United States Patent Application Publication US 2005/0228172 A9 - sequence listing, part 123

SEQ ID NO: 572918 - DNA, 513 bp, Homo sapiens
aataatgtgtcagagaacacaaaattatctgtacatcaaatccctacaacatgcaatttacccatgtaacacacctgcatgtgtacctcctggacttaaaatacamattggaaaggagaaataaattcaagtaatttttcccaaatatatgccacagaacattatgagagtacccatttttgtacatctacacaagactattgtactgatgaaattttgtagtgaaccaaacctttagtttattgtgcctctggttaaaaaactgagatgcctctaatggaaaatagtcagaatatagggtgtaactctctgtgcttgtgttatctctgctgcttgcctaaaagtcctcgatgataaaaatcttcaaatttttaatacaaatattgcctatctcttctagctgtgccctgtaatttgggtgggctgcaacaagcttctctatctttctgtgcagcaaaaactcttatactctatttatacactaggaaaagcatctaatatctgagccacaca

SEQ ID NO: 572919 - DNA, 513 bp, Homo sapiens
aataatgtgtcagagaacacaaaattatctgtacatcaaatccctacaacatgcaatttacccatgtaacacacctgcatgtgtacctcctggacttaaaatacacattggaaaggaraaataaattcaagtaatttttcccaaatatatgccacagaacattatgagagtacccatttttgtacatctacacaagactattgtactgatgaaattttgtagtgaaccaaacctttagtttattgtgcctctggttaaaaaactgagatgcctctaatggaaaatagtcagaatatagggtgtaactctctgtgcttgtgttatctctgctgcttgcctaaaagtcctcgatgataaaaatcttcaaatttttaatacaaatattgcctatctcttctagctgtgccctgtaatttgggtgggctgcaacaagcttctctatctttctgtgcagcaaaaactcttatactctatttatacactaggaaaagcatctaatatctgagccacaca

SEQ ID NO: 572920 - DNA, 606 bp, Homo sapiens
gagttctgtggtgacatagttcagatatttgtccttgcccacatctcgtgttgaactgtaatcctcaatgctggaggtcaggcctgctgggaggtgtcggggtcctgcaggcagatccctcatggcttggtgctgtctttgtgatagtgagttcttgtgagatctggttgtttatctggcaccggcttcactctctctctctcttgctcctgcttcaccttctgccatgatcgtaagcttccctaggtctccccagaagccaagaagatgccagctccatgatttgtgtaaagcccgcagaactgtgagccaattaaatctttttctttataaattactcagactcrgctgggcgcggtggctcacgcctgtaatcccagcactttgggaggccaaggtgggcggatcacgaggtcaggagatcgagaccatcctggctaacatggtgaaaccctgtctctactaaaaatacaaaaaattagccgggcgtggtgacaggtgcctgtagtaccagctactcaggaggctgaggcagaagaatggcatgaacccaggaagcagaacttgcagtgagccgagatcgcgccactgcactccagcctgggt

SEQ ID NO: 572921 - DNA, 573 bp, Homo sapiens
aggaatactattttgtcaatatgccctgtgcgttcttggggacatacattgatacatacttataccaacaagtggtttgctgtttatctggagtcctgtggactttctggaagcaccatccctatgggctcggcacccggcacaaacatgagtcagacttcctccctaaagcgtgcctctgatcacctccccttcctgcccccaaaccatcagtgtccccaatctgcrgaactcctcaactctttagatcacaaccaccatcaatcaagatcctcctatcatacaccccacatactattgtactcacatctttattatttttttagagtgttatcttattgattttactctaagcatggagtggtcttgattttgttttactcttttctccccagcattactgaggaataatcaacaaattaaaattgcttatagtcaaggtgtacaccatgagaatctgatatacatatagactgtgaaatgattatcacaatcaaattaattaacacacccatcacctcacatagttaccattgtgtttgtgtgtgtgtgtgtgtgtttaggggggtgagg

SEQ ID NO: 572922 - DNA, 573 bp, Homo sapiens
aggaatactattttgtcaatatgccctgtgcgttcttggggacatacattgatacatacttataccaacaagtggtttgctgtttatctggagtcctgtggactttctggaagcaccatccctatgggctcggcacccggcacaaacatgagtcagacttcctccctaaagcgtgcctctgatcacctccccttcctgcccccaaaccatcagtgtccccaatctgcagaactcctcaactctttagatcacaaccaccatcaatcaagatcctcctatcatacaccccacatactattgtactcacatctttattatttttttagagtgttatcttattgattttactctaagcatggagtggtcttgattttgttttactcttttctccccagcattactgaggaataatcaacaaattaaaattgcttatagtcaaggtgtacaccatgagaatctgatatacatatagactgtgaaatgattatcacaatcaaattaattaacacacccatcacytcacatagttaccattgtgtttgtgtgtgtgtgtgtgtgtttaggggggtgagg

SEQ ID NO: 572923 - DNA, 573 bp, Homo sapiens
aggaatactattttgtcaatatgccctgtgcgttcttggggacatacattgatacatacttataccaacaagtggtttgctgtttatctggagtcctgtggactttctggaagcaccatccctatgggctcggcacccggcacaaacatgagtcagacttcctccctaaagcgtgcctctgatcacctccccttcctgcccccaaaccatcagtgtccccaatctgcagaactcctcaactctttagatcacaaccaccatcaatcaagatcctcctatcatacaccccacatactattgtactcacatctttattatttttttagagtgttatcttattgattttactctaagcatggagtggtcttgattttgttttactcttttctccccagcattactgaggaataatcaacaaattaaaattgcttatagtcaaggtgtacaccatgagaatctgatatacatatagactgtgaaatgattatcacaatcaaattaattaacacacccatcacctcacatagttacyattgtgtttgtgtgtgtgtgtgtgtgtttaggggggtgagg

SEQ ID NO: 572924 - DNA, 520 bp, Homo sapiens
aataatatctctcattgatcaagcactcaytccaggccagacactgtgctaagcgctttacattcattatctcattaaattctcataatcagtctaaaaagggggactattatcgcctttttagagatgaagaaatggggcacagaaaggctaagcaatttgcccagagtcacatagataggaattcgttagatagtccaagaggtcttaagtcaggccagctgggaaatgtgccagctaccagatgggggaggtggggggaacatggagatatgctaatcctggaggactttctagaggaggcagctggcatctaatggaggggccggtatggaagatcacagcacaacctcccagctcagccacctctctcctcccatcactcccagacctccagcagcttgcagaagaatgcacgttccaggtttggcatccaaacctggtgggtcgagatcctgggtttctatggcaaccgtatccttaatagcatccaataaggacattatttggctgcagtaag

SEQ ID NO: 572925 - DNA, 629 bp, Homo sapiens
tcttttgttcccttgagtctaaatatatataaattactatatatatattactatatatataaattactatatatattactatatatataaattactatatatattactatatataaattactacatatatatagtaatttttctgttttgcacaggtaaaaaatactttctgctgacttttttttttttttcatttaaraacagtggcactttgtaaggtaaaaggttccatacagctctttcttaagatagaagtctgtcttgggtctcaatggagacaaaattatctgccataaaggtagatacattgcctaggggaagggaccaaaatgttacacataagtcccaacaagcatcttcctgatccccccttgctcagagaataagcttaaattaaaactagcctacttgctagcaataatcagggtaaaaagcaaggctggggaccctctagtgcacaatttaatttcacatgtctgaattaagtacttaacagcattatgtggagggtggaggtgagggggtagaagctcttctccacaaggttttctaaacatgacaagagcagtgataaaagaagaagccgacaggattgactttataaaaactaaacaactgtgtataatacc

SEQ ID NO: 572926 - DNA, 610 bp, Homo sapiens
cctctcaaaatgggtcttcaagccagacacggtggctcatgcctgtaatcccaacacttcaggaggctgaggcaggtggatcacctgaggtcaagagtttgagaccagcctggccaacatggcaaaaccccatctctactaaaaatacaaaaattagccaggcatggttagcacatggctgtagtcccaactactcaggaggctaaggcaggcgaatcacttgaacccaggaggcagargttgcagtgagctaagatcatgccactataccctagcttgggcgatagagaaaaactctgtctcaaaaataataataataatgggtcttcaacaagctcattagccttaggctgactgaggacaaactggcatcttcatatccaatttgcattctgaaaggatccccctaacttctatagtgaatttttaaaaacaattcctgtcaaggacacattcagttacttggttttccttgaagttaagttcctagatcatagggtcagtacagtctttgtgtgcacaaagtttattgggaagaaaaaaagaagagatctaggaaataatttttcaacatttactgaagtgattttcttaataaagtatctaatgt

SEQ ID NO: 572927 - DNA, 620 bp, Homo sapiens
aatatgactaattcttttttwaaaaaacgatctatgtagaaggaagggaataaaagggtagaaaggactcggggagatgcaagctaaacttctgtaaatcttaagttgtagatttcattgtagaattctgtgaatattttatataattaaaaagaagaatttaaaatatcttaaacattgaaaaataaatgaacctaaatgtgtatctagctggtatcatacctatttaaaaatgaccttttgcaactgaagttactttaaaacatagtaattttgccatacatccataatgagatatactctaaggaaaaaaaagatctgcaaaagccttaaactgttttgaataaacacgttattgataataatattggcaattttgttttgaaactatatttgtgataaagcaaatgagttatgttggggtttttgaaccttgggattttttatttggatgaaaggagactgtgatagagatgtgagtgtatctcatacagggagtgttaactgacttagggtctcatcactctttgaaatccgtgatgcatttgcaccctcatgacatctaccatgggctgctttcccccagtgactaagtgtggccagggtattaaggtgaaccc

SEQ ID NO: 572928 - DNA, 588 bp, Homo sapiens
tctagacatcccttgtggcaggcagttctcagtgtacgccaggcttcaggcagcaacccagtgccatgccagcagcaactgcactgaacataacccaatgctgtgcctattgcatattttctcagaaaaatgccagtctgctaaggctggaataagtacctagttcttcaaatatgcagatgttgatgcatgactacaaayatcaagaacaatcaggacaacatgacatcatcaaaaggacaaaataagggtgccattgactgttcctaaaaatagagatatatgatatatatgacaaaataactgttttaaggaagctcagcaaacttcaacaaaaatacaaagaaacaaatcaacaaaatgaagaaaacagtatttgaccagaatgataataatagagagactgaaaaaaataagtaaaaagcaaacaaatcctggagcttaaaaacacaaggaataaaatgaaaaattcaatagatggcatcaacagcagaaatgatcaagaagaaaggatctgtgaaactgaagggggattatttaaaaatatacagaggagaaaaaaagaaatataaataaataaataagctt

SEQ ID NO: 572929 - DNA, 588 bp, Homo sapiens
tctagacatcccttgtggcaggcagttctcagtgtacgccaggcttcaggcagcaacccagtgccatgccagcagcaactgcactgaacataacccaatgctgtgcctattgcatattttctcagaaaaatgccagtctgctaaggctggaataagtacctagttcttcaaatatgcagatgttgatgcatgactacaaatatcaagaacaatcaggacaacatgacatcatcaaaaggacaaaataagggtgccattgactgwtcctaaaaatagagatatatgatatatatgacaaaataactgttttaaggaagctcagcaaacttcaacaaaaatacaaagaaacaaatcaacaaaatgaagaaaacagtatttgaccagaatgataataatagagagactgaaaaaaataagtaaaaagcaaacaaatcctggagcttaaaaacacaaggaataaaatgaaaaattcaatagatggcatcaacagcagaaatgatcaagaagaaaggatctgtgaaactgaagggggattatttaaaaatatacagaggagaaaaaaagaaatataaataaataaataagctt

SEQ ID NO: 572930 - DNA, 588 bp, Homo sapiens
tctagacatcccttgtggcaggcagttctcagtgtacgccaggcttcaggcagcaacccagtgccatgccagcagcaactgcactgaacataacccaatgctgtgcctattgcatattttctcagaaaaatgccagtctgctaaggctggaataagtacctagttcttcaaatatgcagatgttgatgcatgactacaaatatcaagaacaatcaggacaacatgacatcatcaaaaggacaaaataagggtgccattgactgttcctaaaaatagagatatatgatatatatgacaaaataactgttttaaggaagctcagcaaacttcaacaaaaatacaaagaaacaaatcaacaaaatgaagaaaacagtatttgaccagaatgataataatagagagactgaaaaaaataagtaaaaagcaaacaaatcctggagcttaaaaacacaaggaataaaatgaaaaattcaatagatggcatcaacagcagaaatgatcaagaagaaaggatctgtgaaactgaagggggattatttaaaaatatacagaggagaaaaaaakaaatataaataaataaataagctt

SEQ ID NO: 572931 - DNA, 628 bp, Homo sapiens
ttattatgaacatttatataccaaccatttcagtaacctagagaaacagataaattatttgatgcttttattatgaagacataaaaaatctttacagaccaataaccagtaaaaagattgaatcagcaataaagtctcctatcaaagaagagtctgggacatggtgacatcactgctgaattctatcaaatatttaaagaagaactaataaaaattttgcttaactcttccaaaaaattgaggagatgaaactttcaaacttattttatcaggccagcattaccttgayaccaacaaacaaacaaacaaacaaacaaaaaactacaaaaaaccctacagaccaatatctctgattaatataaatgcaaaaatcctcaacaaaatattagcacactgaattcaatggtacattgaaaatattattcatcatgatcaagtggtattcattccagtgatgcaaggatggtcctatatatgcaaatcggtaaatgtaatacattacatgaacagaatgaaggacaataagcatataatcatttccgtaggtgcaaaaaaatttggaaaaatttggcatcctttcatgattaaaaaactctaaataaattaggtatagaaggaatgtacttca

SEQ ID NO: 572932 - DNA, 368 bp, Homo sapiens
ctcttcttcttcagggtcgggagaggcaaagcagctctctggggcctcttttataagggcacaaatttgttcatgagggatctgcctcatgaatgacccacttaactcccaaaatgcctcactgcctaataccagcacattggatgtcagaatgttaacatatgaatttggttgggggggggtggggcacaaatattcagactgatagcctaaacctataaaatgaactacaacatgaaactatagaraaaataatcagattttccaaaattcttttattattgttcacgtggctaaagcaatcacaaaacatgatgacatagattaaaaagaaaaagtatttgaaagaaaaatgaagtaaattgact

SEQ ID NO: 572933 - DNA, 368 bp, Homo sapiens
ctcttcttcttcagggtcgggagaggcaaagcagctctctggggcctcttttataagggcacaaatttgttcatgagggatctgcctcatgaatgacccacttaactcccaaaatgcctcactgcctaataccagcacattggatgtcagaatgttaacatatgaatttggttgggggggggtggggcacaaatattcagactgatagcctaaacctataaaatgaactacaacatgaaactatagagaaaataatcagattttccaaaattcttttattattgttcacgtggctaaagcaatcacaaaacatgatgacatagattaaaaaraaaaagtatttgaaagaaaaatgaagtaaattgact

SEQ ID NO: 572934 - DNA, 563 bp, Homo sapiens
gttaattttatttcttacccaaaacccatttagaagcagattttttaactttattgtacagttttggtagatcttcttggtattgatttctayttttattgcattgtggtctaagaatgttgttgatattagttcatttgtttttaatttgttgagacttgctttatggccaagcatatgattgatcttagagtatgtgccatgtgcacataagaagaatgcatattctgttgttattgggtgagtgttgtatagatgtttaggaggtccagttggtcaaatattgagtttaagtccagaatatctttgttacttttctgcctcaataatatctaacactgtcattgggtgttgaagtcctccaacattattgtgtggttgcctacatttcttcatagtcctcttaagaacttattttatgaatctgggtgctccgatgttgggtgcatatatatttaggatagttacatcttcctgttggattgagccccttattattatgtaatgctctttgtcctttttgatcattgttggtttaaattctgttttatctgacataagaa

SEQ ID NO: 572935 - DNA, 562 bp, Homo sapiens
tacagatttcaaaacaccatgttgtatataataaatatacacaattttataaataaaatgttttctgacattaaaaaaataaagaactcttatccacagtgctaggaactataaagtctctctccctttttttttttttttttttggttttggtcttttaaacattttatttttatgtagaactcaacagattccagcttaatttttcacattgctttggccatggaaagatcaaccttctactagcctctggacagactccactcatttttcactaaggtagctccaccgttgttctttttttttatttttttatttttaatttttttagattcagagggtacaagtgcaggtttgttacatgggtatattgcgtgatactaagstttggggtatgattgatctcatcacccaggtactgagcatagcacccaatagttagtttttgaatacttgccctcctctcaccctccccactctagtagtcgccagtgtctattgttgccatttttgtatttacctcccactcataaatcagaacatacagtatttggttttctat

SEQ ID NO: 572936 - DNA, 593 bp, Homo sapiens
gtattgaacaatgagaacacttggacacagggcggggaacatcacacaccagggcctgtcaggaggtgggggcctgggggagggatagcattargaaaaatatctaatgtaaatgacgagttgatgggtgcagcaaaccaacatagcacatgtatacctatgtaaaaaacctacacgttatgcacatgtaccctaaaacttaaagtataatttaaaaaaactgcctttgctgcattgcagagattttgttacattgtgcttccattttcatttctttaaaacaaatttttgaggtatgctttaattttgttgtttacccaaaagtcattcaggagcaagttgtttaatttctgtataattgtgtgtttttaagagatcttcttggtattggtttatatttttattccactgtagtcaaagggtatggttggtatgatatagtttttttagaatttattgagacttgctttatggttgagcatgtggttcatcttagagtatgttctgtgtgcagatgagaagaatgtatattgtgaggttgatgggtgtagcattctgtagatatctgttaggtccaattggtcaaatgtcaa

SEQ ID NO: 572937 - DNA, 593 bp, Homo sapiens
gtattgaacaatgagaacacttggacacagggcggggaacatcacacaccagggcctgtcaggaggtgggggcctgggggagggatagcattaggaaaaatatctaatgtaaatgacgagttgatgggtgcagcaaaccaacatagcacatgtatacctatgtaaaaaacctacacgttatgcacatgtaccctaaaacttaaagtataatttaaaaaaactgcctttgctgcattgcagagattttrttacattgtgcttccattttcatttctttaaaacaaatttttgaggtatgctttaattttgttgtttacccaaaagtcattcaggagcaagttgtttaatttctgtataattgtgtgtttttaagagatcttcttggtattggtttatatttttattccactgtagtcaaagggtatggttggtatgatatagtttttttagaatttattgagacttgctttatggttgagcatgtggttcatcttagagtatgttctgtgtgcagatgagaagaatgtatattgtgaggttgatgggtgtagcattctgtagatatctgttaggtccaattggtcaaatgtcaa

SEQ ID NO: 572938 - DNA, 411 bp, Homo sapiens
tttcataggaaaaaggagacttcctggacaacgtctaatcatgaaatcttgctgttttatacaataggagtaggcagttgatttaaaaaaaaacttgatgaaaaaaatagcatagtttttgatgaattttcaagaaagcaagttaggtatttttattaatattgtttcatgttggtgaaattaggaagcatagtttttyttatttccacacagatgattctagctactttaaagagatgagttttatttctataacctgtgactagttgcataaaaagcaggttattttaattctacactctctctttacagtgactttaggggaaatgaaggctgaaacccaggtgtctgctggctcctccctgctacaaagggtgaggcatgaagggcctttgccagagcattttaatg

SEQ ID NO: 572939 - DNA, 474 bp, Homo sapiens
atcatatattattataaaagattctaaatcttttaaaaattttagtggattacttataatttatgaaaatcatgtttactagtatctgatgcmtattaagcttacattaatttttatattaaaatttgcatattttaaaaattagcttatattatttaaataccctgtattaagtacaattttaggaaataggatcgtctagcatagttactcattaaaattgaatgacgtttctttggattttaactctatttctgctctgctttttcattttcttacatgctgcatgacaggagactctcagaaataaatattgaaatggttttctagggatttaactttggatcacttattaatattaaatctcatcttttccttgtatgcttgaaatgcttactgaaatggatgagcagatatttaaaaggctaagaacagattgctggcacaaaaaaaaaacaaaacaaaacagcaaaa

SEQ ID NO: 572940 - DNA, 474 bp, Homo sapiens
atcatatattattataaaagattctaaatcttttaaaaattttagtggattacttataatttatgaaaatcatgtttactagtatctgatgcatattaagcttacattaatttttatattaaaatttgcatattttaaaaattagcttatattatttaaawaccctgtattaagtacaattttaggaaataggatcgtctagcatagttactcattaaaattgaatgacgtttctttggattttaactctatttctgctctgctttttcattttcttacatgctgcatgacaggagactctcagaaataaatattgaaatggttttctagggatttaactttggatcacttattaatattaaatctcatcttttccttgtatgcttgaaatgcttactgaaatggatgagcagatatttaaaaggctaagaacagattgctggcacaaaaaaaaaacaaaacaaaacagcaaaa

SEQ ID NO: 572941 - DNA, 528 bp, Homo sapiens
tcttttaaggactaaagtaactttttaaaatgcacttgtarattctgtctgattgattttctgtttctgaagaataaaaagacagacatagaattgtagctaccaccaaaggatccaagattataactaaaaaacaaatcaatacttaattttaaaacgtccccatggaaagttttagaaatataacataaactttctatactagcccctgctgagaaaaccacatacatgcatgtccttgtttttgcttaaaattgattttctctgatttcagtgcttcctccgtttttactattgcaaacacccaagactatcaactcatgtacctcaactaataaaaatgaaccagcaaaagactttgttaacaatgtatttattcagtgtattagaaagttcaaagttttgattctactctagaacatagatgttttagtacataatctggactaacagtgaccacattaatgtaactgcaattcattcaattgttccagttttatggaagtaatgtggcatagttttcatcac

SEQ ID NO: 572942 - DNA, 653 bp, Homo sapiens
ccagcctgggagacagagcgagactccatctcaaaaaaaaaaaaaaagcaatattaaattacacaaatggaaaattaaagatgtatattcatttgaaaaacatctattatatattaagaagtttttactgatctttaactttacatatatatatgaattacatatagaaaaaaaggayactgtaaataggccaaaataactgcaaataatcaatatggttaatttctttttgtttttgcaacaaggtgagatataaatatatatatcagtgtaaaatgtgtggcacaaggtagagaaaaacagtaaaataagagcttttaaaaatggatgatgtaaatcctatattttttagtagcctagaaaatcataagtatcttagacacttgtcagatctatttgatggaacaaagttaataattgtacttgggatgttgctcttacctatgagaacatcctatgacttctacatttatcactgttgtaaataaatttgtatctggattttcaccttaaatattttcttcttcctttgatttttaagtataaaatttaggaaacagtgagactgactctgtactatagatttcaaagagatgttggaatagatatttagtagaaaaattaaaaataaagcttaagaccatgttacaaaa

SEQ ID NO: 572943 - DNA, 653 bp, Homo sapiens
ccagcctgggagacagagcgagactccatctcaaaaaaaaaaaaaaagcaatattaaattacacaaatggaaaattaaagatgtatattcatttgaaaaacatctattatatattaagaagtttttactgatctttaactttacatatatatatgaattacatatagaaaaaaaggacactgtaaataggccaaaataactgcaaataatcaatatggttaatttctttttgtttttgcaacaaggtgagatataaatatatatatcagtgtaaaatgtgtggcacaaggtagagaaaaacagtaaaataagagcttttaaaaatggatgatgtaaatcctatattttttagtagcctagaaaatcataagtatcttagacacttgtcagatctatttgatggaacaaagttaataattgtacttgggatgttgctcttacctatgagaacatcctatgacttctacatttatcactgttgtaaataaatttgtatctggattttcaccttaaatattttcttcttcctttgatttttaagtataaaatttaggaaacagtgagactgactctgtactatagatttcaaagagatgttggaatrgatatttagtagaaaaattaaaaataaagcttaagaccatgttacaaaa

SEQ ID NO: 572944 - DNA, 626 bp, Homo sapiens
tcaaaaaacataaaaataaaaataaaaattttaaagtaacttaatgtattcgttaggaatagatatgactgtaaataacagtgaattaaacagagcagtttatttttctatcagataaaaagtaaggtggtccagggctagcatgagaatccacaatcyttaatattaatgcttcctccagctctctgttttgacatcctatgacaaagtccatattcatggtccaagatggcagctagagttcagtcatcacctcctttttccaggttgcataatggagaaagagatgaagaagaaggggagaaggcactcagtgactacattttcaaactgtttcctggaaggtgctgcacaatctttctgcttatgtcacattagctagaacttaatcttagctgcaaagagagtgggaaatgtctatattctgggtggctgtgtgcctagataaatattgggagttatataactatggaaagagaagaatagatattgaggtaaacaactagcaatctgtgcgacatttcagaatggagctctggaattctgtttccagagcagcttagccacagtagttgctaaggataaggaaagattaatccatgtgacgattgagatatgcctggata

SEQ ID NO: 572945 - DNA, 627 bp, Homo sapiens
ggtattttccaaggcaatgtgtwtttatatgagctgtggcctcagtatgtcctcttcttcctccagaatattgagactggtcctcttcgtggattttgcaaaattaaaacaacaattccaaccacctatcagttaagtaaaaagaaatgtaatattttgtatcaaagggaaatgtaacaggaccataatattatgatgcaggaagtgaagatagatgcacaactttcagtgaccttagcagactatcagcatttcactgagccattctctttcttgttattgctgcataaatatgtatataaaagcatatatatatatacacaagtaactgagggtcaaacactcagctcttcagagtatagaaaggaaagagggtcacaggccgatattcttatggtaaggtgacagagcccctcaatcctgtgattgtagcatgttcttttatttgagtaaggtgtacagttgttggagaattatatagctgtcactcaaaatggtgtaacttactcattggtcaacccaagcattaagtacatttgctccttcagttgctgtcaagcccagagggagtgctgaagtcagctactgccctggctggaaggtctcagggaaatagagaattgggtg

SEQ ID NO: 572946 - DNA, 579 bp, Homo sapiens
acacacattaatgtgaatttttcagtgacatacagttaaacatctgaagcattttttctgggactatgtgcactgtctcagtaagagtatgagctctacgagggcaagtactaattttaaaattgtgctataatcttctaatcygaactgtaatttcttcagctatctcattaaatgtttatgactgaccaatgattcctcctcttgtctagctattctctagcaattcctttgaaagaaatactaatgagcaattaaatgttaaaaaggggcaaaagaatgaggagtggattttcccagaaggtaattatgagtgcctaccatgttccaggaatcacttggagtgatgagaggacatagtctctggtctcaaggatattgtctcctgggataaacagacaattacagcacagtattctgggtcagcagaggcccagaggtatcctacacttagacaaaaggcaaaaatgactgactgctgaggtctctaattactgagattcctcctgaagtgatggtaaatgctataatgcaattataataaatataatgcaattacaataaatgtctgttgaattg

SEQ ID NO: 572947 - DNA, 667 bp, Homo sapiens
cctgaaaaagagaatggcacagagtggggagccccaaaaatatacatattgggttggtgcaaaattaaatgcagttttttgttattacttttaatggcaaaaaccacaattagtttttcaccaacctaaaacaaattttaattctcagctgatgtctgtattgtgcatgtgtggaygacattatatgaagttcagtggaaatcaacagccaaaaacttgaaaaagtttagaaggtattttagctgctactcaccgtagaggagaacaaattgggtcccaacaacgtaaagagccttggtatttgaaacgtcagagtcttccactgaaactcaaaaacagccatacctcagaagtaaatgatatgatccagaactgagagatttttctgcgaacaaaacaagacattcttataaaagtaagataagaataccacaagttcaagataatcaaccttctataacaaaaataattctacagaggagcataacagaacatattatctctgtaaagtatcatctactgtgttcattaaaattataagacacatatttaaaacccagaaaactgggatgcatagtcaagaggaaaaaaaatctattgaaatagaccctgggattacttagttttttttttttttaatttagcagaaaaaatgacaaaatacatt

SEQ ID NO: 572948 - DNA, 589 bp, Homo sapiens
aagtcaggccaggcacagtggctcacacctgtaatcccagcactttgggaggctgaggcaagtggatcacttgaggtcaggagttcgagaccagtctggccaacatggtgaaaccctgtctctcctaaaaatacaaaaaaaaaattagccaggtgtggtggcaggcacctgtaatcccaactacttaagaggctggggcaggagaatcacttgaacctrcagggcagaggtcgcagtgagtcaagatcgcgccagtacactccagcctggacaacagagcaagactctgtttaaaaaaaaggaaaaaaaagaagaaggcaaaaagtcattctaaattctatgatctagaattaaccattgctgtaattcgataaagtaacttctagtaatctacttagaagcatgagctttaatatgtttattaatatggaatgttaaaggagatattttaataaaaatatttaactttaattttacttgactttaatcgaagtagaaaaaactgtcacaaagctgaaggaattgttaaaatttgataagtggttcttgtaattatattttaattcatgatttggcattgcactggcac

SEQ ID NO: 572949 - DNA, 589 bp, Homo sapiens
aagtcaggccaggcacagtggctcacacctgtaatcccagcactttgggaggctgaggcaagtggatcacttgaggtcaggagttcgagaccagtctggccaacatggtgaaaccctgtctctcctaaaaatacaaaaaaaaaattagccaggtgtggtggcaggcacctgtaatcccaactacttaagaggctggggcaggagaatcacttgaacctgcagggcagaggtcgcagtgagtcaagatygcgccagtacactccagcctggacaacagagcaagactctgtttaaaaaaaaggaaaaaaaagaagaaggcaaaaagtcattctaaattctatgatctagaattaaccattgctgtaattcgataaagtaacttctagtaatctacttagaagcatgagctttaatatgtttattaatatggaatgttaaaggagatattttaataaaaatatttaactttaattttacttgactttaatcgaagtagaaaaaactgtcacaaagctgaaggaattgttaaaatttgataagtggttcttgtaattatattttaattcatgatttggcattgcactggcac

SEQ ID NO: 572950 - DNA, 589 bp, Homo sapiens
aagtcaggccaggcacagtggctcacacctgtaatcccagcactttgggaggctgaggcaagtggatcacttgaggtcaggagttcgagaccagtctggccaacatggtgaaaccctgtctctcctaaaaatacaaaaaaaaaattagccaggtgtggtggcaggcacctgtaatcccaactacttaagaggctggggcaggagaatcacttgaacctgcagggcagaggtcgcagtgagtcaagatcgcgccagtacactccagcctggacaacagagcaagactctgtttaaaaaaaaggaaaaaaaagaagaaggcaaaaagtcattctaaattctatgatctagaattaaccattgctgtaattcgataaagtaamttctagtaatctacttagaagcatgagctttaatatgtttattaatatggaatgttaaaggagatattttaataaaaatatttaactttaattttacttgactttaatcgaagtagaaaaaactgtcacaaagctgaaggaattgttaaaatttgataagtggttcttgtaattatattttaattcatgatttggcattgcactggcac

SEQ ID NO: 572951 - DNA, 611 bp, Homo sapiens
gggaaaaaaaaaaaccttaagaaaaacacaacaatcctagagaaagaagagcattgataagatgctataaaaaggagcattcaaagaacaaaagaaagagtatggaattgaaaacatgagagcttcaatttttttaactcaatagatttattaggaaataaaatttaraaaaaggttagaaaaatctcccagaaagcagaggaaagaaaaatgagaagaggagagaaaaaaaaataaggaagcttgcatgtttaaagtctttcttattaaattcacatgctttaaaatttcaaattgtactaaaatatttgtaacataaaattatctatttcccacccacttttttctactccctgcttggtaatttcagaagcagtcattttgattctttcagctgtttcttttgacatttacctaactttaaatgtttaaatagtatgtgtatttgctattcttagatacatgaatgttgagcattatctaattacttcctattatggtagtttagcactttactctcttagactcccattgcctctgctttccctcctctatgattccaattcagttgtagtcatttttagattaaatcaatactcagtaaagtctgt

SEQ ID NO: 572952 - DNA, 604 bp, Homo sapiens
acataaggtgtgagtaggctatatttccataataatacaaaaggaatatataggaagttgcattcaatagctcaaacttcagctcaaatattcagcaagtgacctcatacagcagacaatccccaygacattttttttgaagcaattattagtattacttcctagatagcaacattcagaatcagacaaagtttatgccctaaatggcacagtcaagcccaatgagctccaaaccccaagcatttcccaccataccaggctcccctccaccctgctactctgaaccctacccatgtccagaggttgacttctacagtcctataaagtagctatatcaggtcctgaaaatgcaaccaaggaaagggactggaatttctctctcagggagagaagacaactggatgatgtgatcttcctgggaggcagatgcctttaaaatctctgctattaatcatggttgtattttgttaaccaacccagacagcccacagtgctttcttctctattatcttatttgacacagagttccaagaaaaataatacttctactgaaaaaaataagtatatgtgatttttgttacatggtaagaaaaaggaggggtaa

SEQ ID NO: 572953 - DNA, 604 bp, Homo sapiens
acataaggtgtgagtaggctatatttccataataatacaaaaggaatatataggaagttgcattcaatagctcaaacttcagctcaaatattcagcaagtgacctcatacagcagacaatccccatgacattttttttgaagcaattattagtattacttcctagatagcracattcagaatcagacaaagtttatgccctaaatggcacagtcaagcccaatgagctccaaaccccaagcatttcccaccataccaggctcccctccaccctgctactctgaaccctacccatgtccagaggttgacttctacagtcctataaagtagctatatcaggtcctgaaaatgcaaccaaggaaagggactggaatttctctctcagggagagaagacaactggatgatgtgatcttcctgggaggcagatgcctttaaaatctctgctattaatcatggttgtattttgttaaccaacccagacagcccacagtgctttcttctctattatcttatttgacacagagttccaagaaaaataatacttctactgaaaaaaataagtatatgtgatttttgttacatggtaagaaaaaggaggggtaa

SEQ ID NO: 572954 - DNA, 520 bp, Homo sapiens
ctgcctctcttttcctgtttgtttctctatctctacatctctctctstctctatctctttgactatctatctctctgtctttttatctctgtctctatctcttatctctctgtgtctctctgtccgtctctctgtctctatctctatctcttatctctctctgtccttatctgtctccatgtctttatctcttatctctctctgtctctatctgtctctcttctttttcattccccttttccccaggaaagaatctctagaaaatttcttggaatctctctccaagcaaaggccaagaaacccttccctgggccctggaagaaaatgtactctggctgtgcaagtcccagctctagtagtgccctgggctggtgtcctgcaggaaagggttagctcagatggtaaagagcaaagaagaatgtgcttgatagaagagtggaactgaatcctcctcacaccacttactgggtgagccccagtttctttatttatgggatggaaatcaaatcaccacaggata

SEQ ID NO: 572955 - DNA, 531 bp, Homo sapiens
aaattttgccaaatactctgttctgcaccaattgatatgatatttctagcttggtgatacggtggatcacatcgcttcattttcaaatgttgcwccagccttgcatactcagaataagtatcacttgcctatggtgtataatacttgtaaggcattgttagatgtgggtgctaatatgttgttgaaaaattttatgttaatgaaaaatacaggtcttagtttctctctctctctctccctctttctctctcgctctctctttctccctctttctctctctgtgggtgtgtgtgtgtatgtgtgtgtgtgtgctaccttggttttactattagagtgatactggcctcataaagtgagttgggaagtactactccaacatcttctaaccatctggtcttggaaactactttttccagagcttttaatcaccagtgtaatttatttaatagttacatgcctagtcagagtttctgtttcattttggttgtgttttggtagtttttgattctcaaggaattggttcatttattc

SEQ ID NO: 572956 - DNA, 374 bp, Homo sapiens
gtgtgtgactcaacgtgaggaagaactgcctttcccatggtctcatggctagaaggaataatgttttctctgtcagaggaggcactcaagacactggtgaggaacagcttggcccttatggttagataaaacataaaaataattcttacagagaatttgaaacttgactttgggcactctccagggacactttggtcatggaggtagatggtcttcaactcagacataaacatcttcttgagtgtcttcttggatcttagaagataatatcagtcacagacatcagatagggccacaggttgtggcacagctccagagggtgcatgtgtatggygccctgtagagttgttctagccacaattatcaacagtgat

SEQ ID NO: 572957 - DNA, 451 bp, Homo sapiens
aataataaacaactcttcattaagtatctactatattcatagcactgttatatccatgggacaataaagtaattaaccttcatgctgaactttcccatgcatcttactatttgctattaacaaacatcttgtgagaaaaagaatataagcacatgttgtagataatgaaaatgagttttagagggttcaaattgagttgtgcaatgtgaggaatgtggaatttggattcaggtgggcggttcatcctaaccttgagagttttactaccatgaatctgtcttagaggagaaagcatcactgacttcccctgcatatttatggactcaaattcatcattgcttggtccccaarcacctccacctctatattggcctgcagcttaggggagtgtttttttttttttttttttgagacagtttcactcttgtctcccacgctggagtgcaatggc

SEQ ID NO: 572958 - DNA, 634 bp, Homo sapiens
gaaaagaaaacaagtaacttgacagtagagaaatatcaccaacataacctcagccagagatcagggtcaacattaacagggcgaagtcatgctgacagtgcttacccttgacaggatgtgatgaaaatggccctctatctctgtggccttcctcccaagaacctataaccccagtctgttgatgagaaagacattagacaaataacagttaggggacattatacaaaacacctaaccagtcctcctcaaactgtcaagatcatcaaaagcaacaaaattctgagaaactgycacagccaagaggagctggaggagacataacgactaaatgccatgcaatatccacagtgggatcctggatcagaaaaagaacataaggtaaaaattaaggaaatctgaataaagtatggactttagttaataatagtgttgcaacgttgattcattaattgtgaaaaatgtaccatactaatataaggtgttaaacaggtatatgggaactctctgcactatctttgcaatttttctataaaatagaatgaaccaaatgcccatcaatcaatgagtggataaagaaactgtgatatatatatatatgtgtgtgtgtgtatatacacaatggaatactatgcag

SEQ ID NO: 572959 - DNA, 518 bp, Homo sapiens
ggacaagtggttcacaatgactgattacgacgtcattcgggtcaacactttccacttgaaaccatcatttgagatagcagttggaggaagtgtctgaagaggattttgtaaagttttgattgacaccaatttgattgcaargaatataatgacagcccctcggtgtgctaaatggtggagtatctgcagtgtgctgaatgtaggctgcatctgccttgcagaagacctcttgcaattaggactcaggaaacttcttattcctaatggcttttttcactaaagtaaaaaaaaacttgagcttttttttttttttttttttaactagagcatttgtactagagtaccagagtattttttaactagagtaaagaaaactagagttttgtttgtttgtttgttttttgagacagagtctcactctgttacccaggctggagtgcagtgacatgatctcggctcactgcaacctccgccttctgggttcaagcaattctcctgcctcagcctcccaaggagct

SEQ ID NO: 572960 - DNA, 518 bp, Homo sapiens
ggacaagtggttcacaatgactgattacgacgtcattcgggtcaacactttccacttgaaaccatcatttgagatagcagttggaggaagtgtctgaagaggattttgtaaagttttgattgacaccaatttgattgcaaagaatataatgacagcccctcggtgtgctaaatggtggagtatctgcagtgtgctgaatgtrggctgcatctgccttgcagaagacctcttgcaattaggactcaggaaacttcttattcctaatggcttttttcactaaagtaaaaaaaaacttgagcttttttttttttttttttttaactagagcatttgtactagagtaccagagtattttttaactagagtaaagaaaactagagttttgtttgtttgtttgttttttgagacagagtctcactctgttacccaggctggagtgcagtgacatgatctcggctcactgcaacctccgccttctgggttcaagcaattctcctgcctcagcctcccaaggagct

SEQ ID NO: 572961 - DNA, 518 bp, Homo sapiens
ggacaagtggttcacaatgactgattacgacgtcattcgggtcaacactttccacttgaaaccatcatttgagatagcagttggaggaagtgtctgaagaggattttgtaaagttttgattgacaccaatttgattgcaaagaatataatgacagcccctcggtgtgctaaatggtggagtatctgcagtgtgctgaatgtaggctgcatctgccttgcagaagacctcttgcaattaggactcaggaaacttcttattcctaatggcttttttcactaaagtaaaaaaaaacttgagcttttttttttttttttttttaactagagcatttgtactagagtaccagagtattttttaactagagtaaagaaaactagagttttgtttgtttgtttgttttttgagacagagtctcactctgttacccaggctggagtgcagtgacrtgatctcggctcactgcaacctccgccttctgggttcaagcaattctcctgcctcagcctcccaaggagct

SEQ ID NO: 572962 - DNA, 420 bp, Homo sapiens
aagacatgcgataaacataaatgcctatcaatgatagactggataaagaaaaggtggtaaatatacaccatggaatactatgcagtcacaaaaaagaacaagatcatgtcctttgcagggacatggatggtgctggaggttattatccttagcaaactaacacaggaacagaaaactaaataccacattttcacatataagtaggagctaaatgacgagaacacatggacacatggaggggaacaacagacactgggacctattggaggatgaggatcaggaaaaataatgaatggstactaggcttaatacctgggtgatgaaataatctatacaacaaacccccatgacacaagtttacctatgtaacaaacctgcacttgcacccctgaacttacaataaaagttaaacaataaaaa

SEQ ID NO: 572963 - DNA, 420 bp, Homo sapiens
aagacatgcgataaacataaatgcctatcaatgatagactggataaagaaaaggtggtaaatatacaccatggaatactatgcagtcacaaaaaagaacaagatcatgtcctttgcagggacatggatggtgctggaggttattatccttagcaaactaacacaggaacagaaaactaaataccacattttcacatataagtaggagctaaatgacgagaacacatggacacatggaggggaacaacagacactgggacctattggaggatgaggatcaggaaaaataatgaatggctactaggcttaatacctgrgtgatgaaataatctatacaacaaacccccatgacacaagtttacctatgtaacaaacctgcacttgcacccctgaacttacaataaaagttaaacaataaaaa

SEQ ID NO: 572964 - DNA, 514 bp, Homo sapiens
tcaaaacacctgatgcacattatcttgcttgatcttcatagcaatgaagaaggcacggaatgaaaggtgatgtggatgcggctgcagatcctcttcctgcctgcaggagccctggtccatgggcaggtcctctcagtctcaccttcctcgtgtggcaacagggataaccattcgtacttcatgcactggttttaagcatcagatttcctcatgtctatagagtgccacattaaaaatcacttaaatgccagtgggctgtcctttttgtgtgtaatttttttttcaagctattttcttaagacattttgccagaaatggaattactgagtcaaaggaggtagacattagccacaaatgtcaaayttacttatgggcaattttaaaatggcctttttagtttcaagtactagtatttgaaaaaagatattcatctataatggatccattatatgtagggcaagcagtcctatttcttttaaacaactttctaaaaaattaaaacaaaaataaacaa

SEQ ID NO: 572965 - DNA, 514 bp, Homo sapiens
tcaaaacacctgatgcacattatcttgcttgatcttcatagcaatgaagaaggcacggaatgaaaggtgatgtggatgcggctgcagatcctcttcctgcctgcaggagccctggtccatgggcaggtcctctcagtctcaccttcctcgtgtggcaacagggataaccattcgtacttcatgcactggttttaagcatcagatttcctcatgtctatagagtgccacattaaaaatcacttaaatgccagtgggctgtcctttttgtgtgtaatttttttttcaagctattttcttaagacattttgccagaaatggaattactgagtcaaaggaggtagacattagccacaaatgtcaaacttacttatgggmaattttaaaatggcctttttagtttcaagtactagtatttgaaaaaagatattcatctataatggatccattatatgtagggcaagcagtcctatttcttttaaacaactttctaaaaaattaaaacaaaaataaacaa

SEQ ID NO: 572966 - DNA, 637 bp, Homo sapiens
aactgactgagttattgttttatagatatttgaaaagttattttttcctgagatcatttacttcgaatcgaaactttacttccaacactttgtcgttctttttttttgtgtgtagttctccactttaataacgcttctaagctatataccatgaattatgaaaagttcaattataaaataaagattagctgactaaaatctcaaagatttggggtcctagtagatgctgtcacttaactgtaactcagagatattagagacgtcaatcacttctccattatcactattaaaattgagataaaattttctctaaaatattttctgaaaaattaaatcaattgtaagtaaaacaaagtgatactttgaggtataccaggaaatattagtctactcatgaagctataaaataagtatcctgcaaagttatgaaaatccactgaacttgagctgttagaagtgtaaatacacatttcttcaaaatgttgtaggatgtcaatttctaccaagaagatagtttaagattctcctatgtttcaatggygaactatacacattcacagaaaggtggtaatagatcttatatattcttgaatatatcaaattatttgtaataaacactaaattttaattaaatcca

SEQ ID NO: 572967 - DNA, 607 bp, Homo sapiens
tatttgggtggcctaaattatctgcccctctctcacccacagaccaagatgctgtcctttcccaggttgtctagagcagggcactgacacatcctcaaaacccccagtctcattctaggctgggacttcagcagagctcctgaaccaaagttacagctgagtcctagaagtaggaaggagacaagagaacacaggtgcatgtttaatttttaatcttaggagaaatgagattcaaawtcaagccaaagaggtccatctcttacatggaaaagcaagcatataacaaaccaatcctgctacaaataacagctatagactctgggcagcatataaaacacagctactggagagctctggagactgaacaaaaaaatacaaattaacaaaagaatacaaattatcaaatgaggttcaaaacttgaaacaagctgccaaaatagagacttctgtagatttttccctgtggcaagatgggtgtggagcagtgcaaattctgatagaacatccaccatttttcttttctttcttttttctttttttttttgagatggagtttcactcttattgcccaggctacagtgcaatggcgtgatcttggctcactgca

SEQ ID NO: 572968 - DNA, 607 bp, Homo sapiens
tatttgggtggcctaaattatctgcccctctctcacccacagaccaagatgctgtcctttcccaggttgtctagagcagggcactgacacatcctcaaaacccccagtctcattctaggctgggacttcagcagagctcctgaaccaaagttacagctgagtcctagaagtaggaaggagacaagagaacacaggtgcatgtttaatttttaatcttaggagaaatgagattcaaaatcaagccaaagaggtccatctcttacatggaaaagcaagcatataacaaaccaatcctgctacaaataacagctatagactctgggcagcatataaaacacagctactggagagctctggagactgaacaaaaaaatacaaattaacaaaagaatacaaattatcaaatgaggttcaaaacttgaaacaagctgccaaaatagagayttctgtagatttttccctgtggcaagatgggtgtggagcagtgcaaattctgatagaacatccaccatttttcttttctttcttttttctttttttttttgagatggagtttcactcttattgcccaggctacagtgcaatggcgtgatcttggctcactgca

SEQ ID NO: 572969 - DNA, 594 bp, Homo sapiens
tgatcttggctcactgcaagctctgccccccaggttcaagcaattcttctscctcagcccccggagtagctgggattataggcacatgccaccatgcccagctactttttttgtatttttagtagagacagggtttcaccatgttggccaggctggtctcgaactcctgacctcaggtgatccacctgccttggcctcccaaagtgctaggattacaggtgtgagccaccgcgttgggcccatccaccatttttctgatcagaagacccaggatgaagaactaggacaactaggtccactagccaatgagaggaaaaccctaaaatagaacgagtgaagggaatcccaaattctgataaactcaggttaagtctctagctgacccttgagtcagatgtgcgtaataaaatgaaagcagcatacagctaaagattaaagaattggcctaagatctgaaatttcacctcctttcattccttacaggaaatttcaacttcagtatgagtctaatcaagttaactgactgcttaaaagcaatcgatactatttttcagaatataagagaatccagaattatatgatataatatttaca

SEQ ID NO: 572970 - DNA, 502 bp, Homo sapiens
aagttgagggacatcagcaagatggaaaaataggaagtcccgaatccttcttcaccactttgagtacactgattcaacaatatgttgacaaatttccttagtgaaaattccaaagatagagagaggattctgtatcccacgtgagcatgaatctagcttcattgaagccagtaggaaaatctatggcaccctttctacttagtatttttccctggcacatcagtacasaactgggagaaaacctccaaatcacagcttctccctagagaaggaaggagaggactgaaccattcatctaacattctgacttttcaaggggctgcccaaaagaatggtttctgtcttgtctcagagtgttgacagaaatggccccgaaccaggcgctgcatagagagagagagaaaaaaaaggtaatggttttgactagtacaccatagctccattcccagctcagcacagaactagtgggtgaaatttcttaaatctaggcttctttctggag

SEQ ID NO: 572971 - DNA, 502 bp, Homo sapiens
aagttgagggacatcagcaagatggaaaaataggaagtcccgaatccttcttcaccactttgagtacactgattcaacaatatgttgacaaatttccttagtgaaaattccaaagatagagagaggattctgtatcccacgtgagcatgaatctagcttcattgaagccagtaggaaaatctatggcaccctttctacttagtatttttccctggcacatcagtacacaactgggagaaaacctccaaatcacagcttctccctagagaaggaaggagaggactgaaccattcatctaacattctracttttcaaggggctgcccaaaagaatggtttctgtcttgtctcagagtgttgacagaaatggccccgaaccaggcgctgcatagagagagagagaaaaaaaaggtaatggttttgactagtacaccatagctccattcccagctcagcacagaactagtgggtgaaatttcttaaatctaggcttctttctggag

SEQ ID NO: 572972 - DNA, 479 bp, Homo sapiens
tacaagccactagcccgcctcttagaacctctcatttcctttccatcgtggaaatctatcctcaaggaaataacttctcagtgttccatctgctattctactactcctcagggattattcaggccccctcccttccctacacatcaagctcgaggatttgccccacccaggactggcaaattagctttactcaacatgccctgagtcagataactaaaatacytcttagtctaggtagatactttcactggataggtagaggcctttcctacagggtctgagaaggccaccacagtcatttcttcccttctgtcagacataattcctcagtttagccttcccacctcaatacagtctgataacagacgagcctttattagtcaaatcagccagcagtttttcaggctcttagtattcagtgaaacctttatatcccttacggtcctccgtcttcaagaaaagtagaatagactaaaggt

SEQ ID NO: 572973 - DNA, 479 bp, Homo sapiens
tacaagccactagcccgcctcttagaacctctcatttcctttccatcgtggaaatctatcctcaaggaaataacttctcagtgttccatctgctattctactactcctcagggattattcaggccccctcccttccctacacatcaagctcgaggatttgccccacccaggactggcaaattagctttactcaacatgccctgagtcagataactaaaatacctcttagtctaggtagatactttcactggataggtagaggcctttcctacagggtctgagaaggccaccacagtcatttcttcccttctgtcagacataattcctcagtttagccttcccacctcaatacagtctgataacagacragcctttattagtcaaatcagccagcagtttttcaggctcttagtattcagtgaaacctttatatcccttacggtcctccgtcttcaagaaaagtagaatagactaaaggt

SEQ ID NO: 572974 - DNA, 572 bp, Homo sapiens
tgcttaagaaaaaaatggaacagtaatcagatagtggtatcatgattacttaagttattaacaatagtgccatgaggtagaagaagggtaaaatttggtagaaaaaatggttatagcacttagacatatgggatcgattatgattacaaatattgttggattggaagcttttgtagctataaaaaacatacaggcaaagtaaaaattcaatgccttaaattaataaattcaataagcagatttgaaattagaaagattaaaaagcttctttgacaattttaaagtaattccctatttgacatgggtaaaggacagatgtgtctcagggttaagcctagagctgagtgcaatgcttacagaattgaagcaacaaataaatacacacctttgccagataatcttaaagaaagarcagtgatagggaagaattgcaacctgttacaataaaaagaaacttctgaatagacacagagaaatttgataatattgaaactaccattacctaggagccttcttgagagaataacatctttccatcctcaccttcacaggcatctgaggaaaacatcccc

SEQ ID NO: 572975 - DNA, 558 bp, Homo sapiens
tattttttgcaggtgatgtgatctcatgtttgaaataaaacctataaactctatcaaaaaatattcagtagctttttaactactgaaaactcagtagttaaacaaattcattaaagttgtaagacaaaaaaacaatgtacaaaaatcagtagcatttctacatgttaatagtgaacaacctaaaaaagaaagaaaaatgtaatctcatttacaatacccagaaataaaattaaatgcctaggaattaacttaaccaaatacacgaaagatctctataaggaaaactataaaatacttacaaaagaaattatagatgacacaaaaaatggaaagataatccatgttaatggactagaagaatcaatattgttaaaatatccattctacccaaaatgatctacaggtataatgcatttcctataaatactaatgacattatttatagacacagaaaaaattctaaaatttayctggaatgacaaaagaccccaaatagacaaagctagcctaatcaaaaagaatgaaactggaggaatcacattacctgatttcaaatta

SEQ ID NO: 572976 - DNA, 560 bp, Homo sapiens
taccagcaataaataagctgaaaatgaaattaagaatatgattctatatacaatagcatcaagaagaataaactacttaggaataaatataacaaaataattgtaagatttttatactgaaaactacaaaacattgttgaaagaaattaaataaggcctaaataaataggaaaatgtactgtgtttatggatccaaagacttaaaattgttaagatggcaatacaaggagatattgtgggtttggttccagaccaccacaataaagcaaatactgccataaatcaagtcacacaaattttttgttttctcaatgcatataaaagttatgtttgcactctaacctactaagtgtgtaataacatgtctaaaaacacaacgtacatgccttaattagaaatactttgctagaaaatgttaattaactgarcatgcagcaagctgtattttttttgttggttgagggtcttgccttgatgttgatggctggtgactgatcagggtggtagttgctcaagattggagtgtctgtggcattttcttaaaataagacaacaatgag

SEQ ID NO: 572977 - DNA, 590 bp, Homo sapiens
gatccaagcagggttcgctcactgtaattagttggtatatcttttaaatgtcttttaatctatagattcctcttccatcttctaccattctcttcccttcccrcaacccctgcaatttatgttttgaagagactgggtcatttgttttatgtcatttccttaaagtctggattttgctgattgcatgcccaaggtatgtgtttaacatgttctctgtattttctctgaatcatcagttggatgaggaaagttttaaatcatatgagatggagttttccacaggactaggctggactggactttgaatgcctcaaattcacagctacaccacagaatctgcctagcatgctgttaacagatgggaaagttggatttcatggtacaccagtgaaggcagagatggggataattaaagctaaaacatgtttgtattctgtacaactgttcaagcagctcataaaaataactatgaataccataacattgtggtattgatttccaagtcaattctaattgatttcttggacaggctctatggattctttcctctgagttctgccctattgcccccactggcatgccctgggcag

SEQ ID NO: 572978 - DNA, 590 bp, Homo sapiens
gatccaagcagggttcgctcactgtaattagttggtatatcttttaaatgtcttttaatctatagattcctcttccatcttctaccattctcttcccttcccgcaacccctgcaatttatgttttgaagagactgggtcatttgttttatgtcrtttccttaaagtctggattttgctgattgcatgcccaaggtatgtgtttaacatgttctctgtattttctctgaatcatcagttggatgaggaaagttttaaatcatatgagatggagttttccacaggactaggctggactggactttgaatgcctcaaattcacagctacaccacagaatctgcctagcatgctgttaacagatgggaaagttggatttcatggtacaccagtgaaggcagagatggggataattaaagctaaaacatgtttgtattctgtacaactgttcaagcagctcataaaaataactatgaataccataacattgtggtattgatttccaagtcaattctaattgatttcttggacaggctctatggattctttcctctgagttctgccctattgcccccactggcatgccctgggcag

SEQ ID NO: 572979 - DNA, 590 bp, Homo sapiens
gatccaagcagggttcgctcactgtaattagttggtatatcttttaaatgtcttttaatctatagattcctcttccatcttctaccattctcttcccttcccgcaacccctgcaatttatgttttgaagagactgggtcatttgttttatgtcatttccttaaagtctggattttgctgattgcatgcccaaggtatgtgtttaacatgttctctgtattttctctgaatcatcagttggatgaggaaagttttaaatcatatgagatggagttttccacaggactaggctggactggactttgaatgcctcaaattcacagctacaccacagaatctgcctagcatgctgttaacagatgggaaagttggatttcatggtacaccagtgaaggcagagatggggataattaaagctaaaacatgtttgtattctgtacaactgttcaagcagctcataaaaataactatgaataccataacattgtggtattgatttccaagtcaattcyaattgatttcttggacaggctctatggattctttcctctgagttctgccctattgcccccactggcatgccctgggcag

SEQ ID NO: 572980 - DNA, 600 bp, Homo sapiens
agcttgctataattttactttataaacatcaattttttaaaactttgacttttttgtagtaacacttagaacacaaacactttatatagttgtacaaatgtattttctttctttatatacttattctataattttttctactttaaaatgctttattgttattttttactttttcaactgttttgttaaaacctaagacacaaacacccacagtatcctaagcctacacaggtcaatatcactgtcttccacctccacatcatgtcccattggaaggtcttcaggggcagtaccatgcatggagctgtcatctcccataacaaygctgtcttctgaaataccccatgaaggatctgcctgaggctgttttacagttaactttttttttgataagtagaaggagtacactctaaaataacaatgaaaagtatagtatagtaaatatataaaccagtaagtcatttattatcattatcaagtattatgtgctgtgcctaattgcatgtgctatagtttttaatatgactggccatcaagtagatgtctttacaacagcgtcatcacaaacatgtgagtaatagcttgttctgtgcccttaag

SEQ ID NO: 572981 - DNA, 485 bp, Homo sapiens
atttcccacccctctgtgcattttctttgcaaattacattgcattcatttatgcatatctccggggtactctcctacctaaggaaaatcttctttctgctttctttttgtggatatctgtatggccagcaaatccagctcccaggagtgacagggcacaggtcggcacatcttgacctgcctcctccaggcagatagagaaggaatcagctgatgtgctctcaatgaataaataagcatcttgcagccctgtgtctgcatgctgtgggtgttaatgcctgcatagaggagggacagagggagagagcaagggaggacaactgatgcagagcccagacagaaacaggaaccaccgaatccgcttgtcagactgtctcttctgcacttctcctttcaagaagacacaccaagttcccatgatcacatacycccttcccctgaccacacatggcccaggcccactgaaggcccaggaggctggacgca

SEQ ID NO: 572982 - DNA, 396 bp, Homo sapiens
aagaattcttttcagggatcaaacaaggataccctctacaacttctcttcaacagtattcttgggtgtcctagccagtgcagtaagacaagtaaaagtaatgagataaattggaaagtaggagcamatctcattatttgtaagaaatatttacctataagatgaaaggtgtacaactgacaagctatcacaaccaatatagttgaaaaaggtgacagtacacgattaatacactaacatatatcactattttatgggaaaaatggatatttatttataatagcaattaaaaatcacctacggaaagcctaacaagaaatatgctagagtcttatgttcttttttgaaagatagataagaaaacttcaataatggagcagaatatcatggccatgaa

SEQ ID NO: 572983 - DNA, 396 bp, Homo sapiens
aagaattcttttcagggatcaaacaaggataccctctacaacttctcttcaacagtattcttgggtgtcctagccagtgcagtaagacaagtaaaagtaatgagataaattggaaagtaggagcacatctcattatttgtaagaaatatttacctataagatgaaaggtgtacaactgacaagctatcacaaccaatatagttgaaaaaggtgacagtacamgattaatacactaacatatatcactattttatgggaaaaatggatatttatttataatagcaattaaaaatcacctacggaaagcctaacaagaaatatgctagagtcttatgttcttttttgaaagatagataagaaaacttcaataatggagcagaatatcatggccatgaa

SEQ ID NO: 572984 - DNA, 396 bp, Homo sapiens
aagaattcttttcagggatcaaacaaggataccctctacaacttctcttcaacagtattcttgggtgtcctagccagtgcagtaagacaagtaaaagtaatgagataaattggaaagtaggagcacatctcattatttgtaagaaatatttacctataagatgaaaggtgtacaactgacaagctatcacaaccaatatagttgaaaaaggtgacagtacacgattaatayactaacatatatcactattttatgggaaaaatggatatttatttataatagcaattaaaaatcacctacggaaagcctaacaagaaatatgctagagtcttatgttcttttttgaaagatagataagaaaacttcaataatggagcagaatatcatggccatgaa

SEQ ID NO: 572985 - DNA, 396 bp, Homo sapiens
aagaattcttttcagggatcaaacaaggataccctctacaacttctcttcaacagtattcttgggtgtcctagccagtgcagtaagacaagtaaaagtaatgagataaattggaaagtaggagcacatctcattatttgtaagaaatatttacctataagatgaaaggtgtacaactgacaagctatcacaaccaatatagttgaaaaaggtgacagtacacgattaatacactaacatatakcactattttatgggaaaaatggatatttatttataatagcaattaaaaatcacctacggaaagcctaacaagaaatatgctagagtcttatgttcttttttgaaagatagataagaaaacttcaataatggagcagaatatcatggccatgaa

SEQ ID NO: 572986 - DNA, 539 bp, Homo sapiens
tgtatatacctatatgtccataaaaattaaaaacaaataaaaaataaaacattaacagtttcaatcagccatgttagataatatacaatctttccattttctctatagaaaataatgttacagaacttttatatgaaaaaagagataaaagaatttacaattaaaaatatagagaaaaaaattatagaagtgtggtgggcagttaattaatcaatctatcactttttttctggattttataatgcatgtggtttctgttagaacattttaatttttcatttgttgcaatctttttttttyactctaaataaatattaacactggtgccttattctgtgtaaattccttaaagggagtcctccagaagttttgggcccctaaacctgggtctactcctgctgagtgcaccacatacctccccctctggagggtcctttccaaaagtgttgccacaaaccaggctgtgggcctgcattcacagatctttcttcttctctgtctcaggggaagtctctctctctactacttttctagggatt

SEQ ID NO: 572987 - DNA, 478 bp, Homo sapiens
tagagcttacccctcctcaactcatcaaaaaaagaaaataagggtgtggagactcccagtttctctattttgacttctgggtcatcctctagtgtgaaggaccacgatccatcctccacccacaaaagccttacttcaggcttaactakaaagtaccctaaaatcccccgcacagatctcttctcacacctacccatgcttgttttgtttaaagaggaattgctgaggcaaagtatttcagtatgtccaaggacccacaagtatattttctcctatctatagctaatccttcataaactgttgtgagtctctatttacccacattaataccttatctaatacctgctatatgcaatgcaccacaaagcctggattgacccaacactgaggagaagtgggagttggtgattttctggagaatttagacttcgatttcaaagaattccagctttcttgtatctcccagcccctaacccca

SEQ ID NO: 572988 - DNA, 654 bp, Homo sapiens
ttataatttaaagtttttaatttctacattaaggagtgtgttccatgtaaataaatatggatccacattgtcatcatcatcatcatcatttccaatcactacaaaatatcttattctattaaaatatcttattctattaaaataaaacttttggaagtaaacacaaataaaaccaattttctctttcaactactggtgtaaaagtcaattttggttgttttctcttccaagatggtggaatagaggcttttaacatgcctcggccttttggaaataacaagatagtgcataaagattaagtgagctttcattcaagaaggaaaatgggaatataagaagtcaaactgtccctcctcactgaagatatgattttatacctagaaaaccctgcagactccatcaaaaggttcccagaactgayagatgacttcagtaaagtttcagacacaaaatcaatgtagaaaaatcagtagcatttctatacatcaataatgttcaagctgagagccaaatcaagaatgcaatctcatttacaatagccacacacacaaaaataaaatacctaggaatacatctaaccaaggatgtaaaagattttcatagtgataacttcaaaacactgctgaaagaaatcagagatggtacaaatggaaa

SEQ ID NO: 572989 - DNA, 526 bp, Homo sapiens
gtttatttaaagaactatttacaagcacacagtcagagtgtagaggagccacaaggatactgcaggaaccaaggactaaagaaggggtgttttaccacccctacgcccaaggggagaagaggagatggtagttactcaaacctggagaagagaaaatatggtgggagaggccaccttgagagaaacagaggccatcacaagacacagccatgatgtggtgcccttccagggagggatctggggaataaacaccctgatctcaatctcttccctccctcccatctcccgccaacatttctcattagccaaacccattttaagtgttaagacagtgggcagaggaatacaaagaggtcagcttcccagagcacagggtagacaagggtgagggtcgatctggaagggcaaatggaagatacctgcataggcagagatggaccacacacatcttcattctatgattaggtcacattacagatatatttataaygcatatggaatcaaggcattcacacaggacaggaac

SEQ ID NO: 572990 - DNA, 584 bp, Homo sapiens
tttagtctcagtctcacctggggccctgactccccagcagaggggctgcataccctgtcctctctggccttgcttccactcacttgctgcctgtgagaggtggtagcttcttggcacacctcatgagggcagcatgtaagtgagaagtgtgatattaccttaaaatgccatccctgccagcggcagattatgcattaagaaaacatatttcacctctcctattttaatggagttattaggaacaastgtaatatttcctttaaataaactaagagagagaaagaaaaaaacgatgatctacaactctaacgtcttgttatgggaacataagaacagtctgcattttctgtacctttacagttatgtttgtacataaatggggtttgatttagttagtcctgtgctcaggggtgaagtgagggcagaacacgaagtctcatccaagttcaagggctcagtgaatcctcaatcccaagtaagactgctttctccttgtttagtgcagaaccagcaaacaagctatgtgaggtgaaagatacacaatggtatgagtggatgtggttctcagggttcctttgctcctt

SEQ ID NO: 572991 - DNA, 584 bp, Homo sapiens
tttagtctcagtctcacctggggccctgactccccagcagaggggctgcataccctgtcctctctggccttgcttccactcacttgctgcctgtgagaggtggtagcttcttggcacacctcatgagggcagcatgtaagtgagaagtgtgatattaccttaaaatgccatccctgccagcggcagattatgcattaagaaaacatatttcacctctcctattttaatggagttattaggaacaactrtaatatttcctttaaataaactaagagagagaaagaaaaaaacgatgatctacaactctaacgtcttgttatgggaacataagaacagtctgcattttctgtacctttacagttatgtttgtacataaatggggtttgatttagttagtcctgtgctcaggggtgaagtgagggcagaacacgaagtctcatccaagttcaagggctcagtgaatcctcaatcccaagtaagactgctttctccttgtttagtgcagaaccagcaaacaagctatgtgaggtgaaagatacacaatggtatgagtggatgtggttctcagggttcctttgctcctt

SEQ ID NO: 572992 - DNA, 584 bp, Homo sapiens
tttagtctcagtctcacctggggccctgactccccagcagaggggctgcataccctgtcctctctggccttgcttccactcacttgctgcctgtgagaggtggtagcttcttggcacacctcatgagggcagcatgtaagtgagaagtgtgatattaccttaaaatgccatccctgccagcggcagattatgcattaagaaaacatatttcacctctcctattttaatggagttattaggaacaactgtaatatttcctttaaataaactaagagagagaaagaaaaaaaygatgatctacaactctaacgtcttgttatgggaacataagaacagtctgcattttctgtacctttacagttatgtttgtacataaatggggtttgatttagttagtcctgtgctcaggggtgaagtgagggcagaacacgaagtctcatccaagttcaagggctcagtgaatcctcaatcccaagtaagactgctttctccttgtttagtgcagaaccagcaaacaagctatgtgaggtgaaagatacacaatggtatgagtggatgtggttctcagggttcctttgctcctt

SEQ ID NO: 572993 - DNA, 544 bp, Homo sapiens
tcctgaccctattctcctgcctcataatcacaaaaatgtaaattaacatcaaaatgagatgccattgcatatgcacctaattggtgaaatgacaaatcagattaagccaaatgtacattaaaatgtgaggcaatagcaactcagccatggctgataaaaatataaatcacaacaactttggaaaaaaaaagttggcattacctattaaaattaaaatgtgcaaatttttttggcctagccattttgctcttagatatcagcttaaagaaacttttgcatatgtagcattaagtggcaaaatataggactgttcatkttatagaaccaaactatgatctactcgcccaggacagtaaaaccagatatccacaccaaggttttatagcaggagaaaggaaagtatttatttgcaaggcaccaagcaaagggactcaggcaactatggttaaactctgacctcctcaatggctttaaagtaagactttttaaagacaggagtaaatttcaggaaagcagaaattaaaggcaaaatcataaataaata

SEQ ID NO: 572994 - DNA, 540 bp, Homo sapiens
caatgagtacaatgtacacaatatgagtgatggttacactagatgcctagacttcagcgctatgcaatatatccatgtaacaaacctgcgcttgtaccccctaaatgcatacaaattaaaaattaaattaaattaaattaaaaaataataaaataaataaaaatagagtgatttaacaacctacttaaggtattcatcaagtactaactccctccatcttaatatttctggcaactttatctggacttaatttttttttttttttttgtcggaggctggctctgtcgcccaggctggagtgcagtggcgcaatctyggctcactgcaagccccgcctcccaggttcacgccattctcctgcctcagcctcctgagtagctgggactacaggcgccttgccactatgcccggctaattttttttgtatttttagtagagatggggtttcagcgtgttagccacgatggtctcgatctcctgacctcctgatccgcccgcctcggtctcccaaatgctgggattacaagcatgagccacagc

SEQ ID NO: 572995 - DNA, 540 bp, Homo sapiens
caatgagtacaatgtacacaatatgagtgatggttacactagatgcctagacttcagcgctatgcaatatatccatgtaacaaacctgcgcttgtaccccctaaatgcatacaaattaaaaattaaattaaattaaattaaaaaataataaaataaataaaaatagagtgatttaacaacctacttaaggtattcatcaagtactaactccctccatcttaatatttctggcaactttatctggacttaatttttttttttttttttgtcggaggctggctctgtcgcccaggctggagtgcagtggcgcaatcttggctcactgcaagccccgcctcccaggttcacgccattctcctgcctcagcctcctgagtagctgggactacaggcgccttgccactatgcccggctaattttttttgtatttttagtagagatggggtttcagcgtgttagccacgatggtctcgatctcctgacctcstgatccgcccgcctcggtctcccaaatgctgggattacaagcatgagccacagc

SEQ ID NO: 572996 - DNA, 598 bp, Homo sapiens
caggagtttgaaaccagcctaggcaacatagtgagaccccacctgtacaaaaaaaatttaaaaatgaaatgggcatgatggcatgcatctgtagtcccagctacttggraggctgaggcaggaggaggatcactgggccccagagttacagtgacctatgattataccactgtactccagtctgggtcacagagtgagaccctgtctgaaaagaaaagaaaagaagagaaaaaaagaagagaaaagcaaaaaagaaagagaagagaaggaaaagagaaaagaaaagaaaaaagaaaagaaaagaaggaaaagaaaagaaaagaaaagagaaaagtataagtaatctcccaaatgtcaaaagatggtaagttctggagtcaggattttaacacagactttcttttccaaaagctcatcttaatcacttcagtgtggcttgaagcttcaagaaagtagccatccaatcactgcacttggttcagcccctgtaggcagggatgagtcttgggcatccagccttctgagctcatagtaggtgttagtctctggctgcgctgcggttatgttctcagctcaggagctgggaagctctgcaaat

SEQ ID NO: 572997 - DNA, 394 bp, Homo sapiens
tatattgtgtttgaattttcatttgtctcaaatttgtgatttcctctctgacccatatgctgttgtttaatctccacatatttgtgaatttttagttcttttgccaattactggtagttttatttcactgtatttggaaaagatatttgatataattttaatcttcctaattttttaaagacttgttttgtggcctaacatgtgatacagtctcaagaattttttatgtgctcttgagaagaatgtgcgctgctgttgttggaagaagtgttctgaatatatctcttaggtccaattgattatagtgttgccgaagtctttgtttccttgtggatcttctctccagttgttttattatttaaaagtgaktatgaagatctcctacaattattat

SEQ ID NO: 572998 - DNA, 634 bp, Homo sapiens
gatttgtgtatgctgatccaaccttgcaccccaggaatgaaacccactaaattgtgatgaattatctttttgaggtgctgctagattcagtttgctagtgttttgttgaggatttttgtgtctgtattcatcagggatattggcctatagtttctttttattgttatgtccttgccagcttttggtatcaggatgctatagtggttttgtagactgagttaggattgaattgctcctcctcagtttttttgaagtttcagtaagatttgtaccagctcttctttgtacatctggtagaatttggctgtgaattcaaccagtcctggggtttttctrgttggtagatttttttttattactgatttccaagctgttccacaaactactatgttttctaagatttgtacactgtgtagagtggactagaggggaattttatcctaatttttttaaagagggattgaatgagccagtttaggattcacagtaatgatgctaggttactatattttcttgtgcacgtaacccttcatatattgttttgattatttatgttcacattttactgtgtttacatttttaaaatcatggcaatttaaattaagaatttaaaaaatacatttaattttgtaac

SEQ ID NO: 572999 - DNA, 519 bp, Homo sapiens
ttggcattaattgcttcactaaatgtgtagtagaatttatcatttaagccacatgactctgggcttttttgtgtgtgatgatttttaattaattgaatccctttacttgttatatatgtattcatatattctgtgccttcttggatttacttttatgatwggggccccttgaggggtttatttctagtttgtgggactccatgtgtgtaggggttctagacagtgggcatataagattcaagaaactcaatgtgtgagaaagtgtaatgtgtgagaaagaggctctgatatcatcaatgaatgactcgaagtttcctctgttgtaaagaatgatattaccataactgccatagttaatattgatggtgtaagtcaaataagaaggcaggaggaaagggacatccatcactgaaccacaaatcagtgtactcattgaagcctttgagaagaatccacaaaattttacaggataattcatttcctgcgatcaccagtagagagaaactggttaaacagaca

SEQ ID NO: 573000 - DNA, 379 bp, Homo sapiens
tttatgtgactctcctgtcttcwctgtcaccatgcccaaacactattagttgagttttgctgtctgtttttattttattgtttacctttgttttatgttatcctgtatgtaaacacagatttacaactaacactatacccaggacacgaaaacacaaaagaccaataaagactggaataggtgtgtgtaggggataggacacagcaatggaaagatgttattctctttaaacttttcaccctgaggtctgtgctgtctcttcacttttgtaccttccagcatttggagaatattcagaatcaaaggcttccacctgatgaaggagggtggaggacttcgtctacaggatgaagtccaacatcaaggtgtgggtagggtg

SEQ ID NO: 573001 - DNA, 489 bp, Homo sapiens
acagtttgctgtttgctcatatagcctccagtggtataatgagttggtcacaacactcattcttttgacctccagcaggatagtacactaattccatttttaatatctgaggagcctctgtactatttttcataatgggtgcgttattatttttccaccactcagtgcacaagtatatcaatttatctacatcctcgaaaatatttattattttctctcgcttgatagtggccatcctaatgagtgtgaagtaatatctcattgggatattgcttttcatttctctaaagatacgcgaatttgaccatcctttcaaattcctcttgggcatwtgtatatctcttttgtagaaacatctgttgagagatttgcccatttttaaataggggggtgcagttttttttgttgagttttaaagaggtgtatacattctgggtattaactcctatcaaatatatcatttgtgatttttttctcatttcttacgcg

SEQ ID NO: 573002 - DNA, 567 bp, Homo sapiens
gaattctccttgtattcagtacccttatttggcccaacttccttctgcatccctggctacaatcatcacagttactgttttgtcttagtagagccatttgaaacagcctttctctgaacaactctgactaattgtttcasaataatttcggaagaaaaagtcactctgaagaggttcccattctacctttagcatttttcccagcaaagaacaacccttgtttctttcaattgcatccgtgtattttggctgcatgcctacaaagagcagtaatacaaaacagtttttctaagaatgaagatggagtcactaaaatcttgcaggccacaaagtctccccttcccaaactgatagcctctcactccctttatcttaacacatacatttttatttcttaataaaaactgttacccagcatgaacgatgcagaagacgggtgatttctgcatttccaaccgaggtaccaggttcatctcactggggagtgtcagaaagtgggtgcaggacagtgggtgcagtgcaccgagcatgagccgaagcagggtgaggcattgcctcacctgggaa

SEQ ID NO: 573003 - DNA, 532 bp, Homo sapiens
ggcaagagaatagggaattagggtaaccaagggttaaggcataagcaaaagaacagcaggtgcagcaatttctaggcaagactaggcagcatacaggccacaccttcactcctgtgattacaagacagaagtttccacatcgcctctgattgtcctcggccatctccatttcagcctctgattggtcrcaggccaatccttcatagggtgcaaccaattggacgactgtaaagggcacctagggatttaccaaattcttttagcctagtaacccttaagaacactgcaattgggactcttgaagcacttggttcgcttcaataaatttgtgcttttgttacttcgttcttttgttgttttgtctttcgttgcttcttttgttgctttgtttctacgttttgttcaattctttgttcaacacgccaaaaacccagacaactcagtcaagacttcccatccagtaacactaataaaccggatattacccagtctggaagttatctggtccaaattgtctacagaaaccaaaggc

SEQ ID NO: 573004 - DNA, 362 bp, Homo sapiens
gactcatgacactaaccatattcttttacccaaataaaagaagagtaataggcttctaacttttacaagaacagaaagagcaagggcaatttctaaacagactttcaagataatttataggtattaatagctrtctatttaatttatcgtaatactaatacaaagttctctttgtcacaacccatcttctagaaaggggtgcaaagatctttacataccttgcttaaaagcaatagataataaccatagcctattaatcccatctatatcccaagagaaaggtctcttggtgttgagtatcaagcatcaaattctcctgagagttttccataacaaatatttattatttttatcatctgaaa

SEQ ID NO: 573005 - DNA, 545 bp, Homo sapiens
ccttctgtaattttgtaatattaagggtcaataatacctttattttctatgcttatttttggtaattttaataatgtagttggatttataaggattgwatatctaaaaattcctcttttaaaaaacagttcttttgtattttgcatactttgtcttttccttaatataaaaatattttattttttctttaaaaaaattccctttttgttgttctcatttaataaacatttatgaatattcaaatatgctgatttcattttttatcttcacttatttgcctagaacttgtttaaaatgagcaattccttggtaactgcttgaaaacactaatcattttcattggctttactttagtagatactgttaaaatacctcttctatacagggaaaagtaaaaaaagatcatatctaaacagttatggaagaaataattccagatttatcacataattgatatataaacattaaatatggaaaactgaaaagaagaaaaacatcaccctcattctcagtatccagggattaattttttaattatgtttgtg

SEQ ID NO: 573006 - DNA, 545 bp, Homo sapiens
ccttctgtaattttgtaatattaagggtcaataatacctttattttctatgcttatttttggtaattttaataatgtagttggatttataaggattgaatatctaaaaattcctcttttaaaaaacagttcttttgtattttgcatactttgtcttttccttaatataaaaatattttaytttttctttaaaaaaattccctttttgttgttctcatttaataaacatttatgaatattcaaatatgctgatttcattttttatcttcacttatttgcctagaacttgtttaaaatgagcaattccttggtaactgcttgaaaacactaatcattttcattggctttactttagtagatactgttaaaatacctcttctatacagggaaaagtaaaaaaagatcatatctaaacagttatggaagaaataattccagatttatcacataattgatatataaacattaaatatggaaaactgaaaagaagaaaaacatcaccctcattctcagtatccagggattaattttttaattatgtttgtg

SEQ ID NO: 573007 - DNA, 596 bp, Homo sapiens
atgttcgtgtttgtttctctttctgwgagttcagtgttgaatcacaaactatataaagaatttagccctgggacggagacttctgtgaccaaacaattttatattcataccttcctgatatcctattgcttaagatgatgatttttccattgtattcaaatgatgtaacctgacgccatccaattcatgtactttataaattcatatgtaaggcttactctgagccagaccctgctctaagcactttacagctaagtcattgaaatctcccagcagcactatgagataggtactgcattatcaccactttcaactagaggtatgaaaccaagggagaggcagtaacattcctgagtcacatagctggtcggagggagagacttctatctcctgagactgtcctcttacccactacaccatgctatctccatgcctatagaaattaaagtgtgcccgtcgtcctaaaggagatattcttaatgcttccttgcctaccttgaaaacaatgcgaaaaattgttcaataaagtagaaattgaggtgtattatattggggagtttcgtatttttcatgaagaggcacaatctgcgtaattt

SEQ ID NO: 573008 - DNA, 661 bp, Homo sapiens
taccaaattagatcacattctgtttcattcaacagttgttaataaattgcaaatggcaaaaatcacagcgtgtattttggaccataaaatactgaattataaataaatgaaaacatatatagaaaatggccaaatatttggaaattaatcagcatgcctgctaataaatcatggaatgcaagagaaataacaatcatattaggaaatactttaacaaarccataatacagacaaacttgcagaatttgataatgttaaaacatgttaaaaaattaactcactaagcttttagcactaaagcgtaaagaagaaaggaaacattaaagctaataacatgaaagaaagagatatataaaacaataataatagagacagacattagaagaagtcaactaatttaaattatatttatttaaaaggattccttaaatttataaatgtatacattactgcttaaaaaacctcagatttttagcactagaaatgaaacacaatcttgtaagagaactatttacagtataagggttttaaagacatatatagagcaactttatgttgataacttgaacaacttcatgtatatagacaaattccttgatatcaaaaattacaaaaactgctctaaaagaaaagataaatatgaataatactgtattaaata

SEQ ID NO: 573009 - DNA, 283 bp, Homo sapiens
aatatccaattggcagacaaattgctgactcagttgtccttgctgtaatataaaggagaaataaaaaagaaaataatccataatgagctgtgtataaatgtgtgagcattattattgtaggctggcagtcagcaaactttttctgtaaaggacgagaaggtaaatattttaggctttgtggcccacataggatctttattgtatagwctttttttttttttaacaaccctttaaaaatgtaaagaccatccttagctcatgggttgtgcaaaagcacgtcaca

SEQ ID NO: 573010 - DNA, 632 bp, Homo sapiens
aagaccatcttccccagttagttactatagccctagtgtctaggcaaggcaattcagcaaaatgtgttgattgaatagctttgggttgcgacctctatcttctcttttcagatgcttagtcaacatgatatagcttcagttttcttcacagtaggtctcttgctggggtttcctaagcccagacttgaaaccaaatatcccatctagcgctacttcagtgacctggcagtaattgtgatccasatttatgttttcatttttactatgtaatgtggttgagtgagatgcaagtaactcttggactttgttaggatgaccaccacagaccccaaacccccatgtggaggagtctagtaaactggactgggacatgtggagttccctatttctcttatgtcatttggacctggaccaaagaagattctgtgactctattgtatttaatctccccagtactcaagacttggattttacagctctttagtcagctgcacagaaagaagacagaagagagctaggcgtgggggtgcattcctgtagtctcagctactcgggaggctgaggcacgaggatctcttgagcctggccaacatattgagacccccatctctttaaaagaaagaaggcgcaag

SEQ ID NO: 573011 - DNA, 632 bp, Homo sapiens
aagaccatcttccccagttagttactatagccctagtgtctaggcaaggcaattcagcaaaatgtgttgattgaatagctttgggttgcgacctctatcttctcttttcagatgcttagtcaacatgatatagcttcagttttcttcacagtaggtctcttgctggggtttcctaagcccagacttgaaaccaaatatcccatctagcgctacttcagtgacctggcagtaattgtgatccacatttatgttttcatttttactatgtaatgtggttgagtgagatgcaagtaactcttggactttgttaggatgaccaccacagaccccaaacccccatgtggaggagtctagtaaactggactggkacatgtggagttccctatttctcttatgtcatttggacctggaccaaagaagattctgtgactctattgtatttaatctccccagtactcaagacttggattttacagctctttagtcagctgcacagaaagaagacagaagagagctaggcgtgggggtgcattcctgtagtctcagctactcgggaggctgaggcacgaggatctcttgagcctggccaacatattgagacccccatctctttaaaagaaagaaggcgcaag

SEQ ID NO: 573012 - DNA, 632 bp, Homo sapiens
aagaccatcttccccagttagttactatagccctagtgtctaggcaaggcaattcagcaaaatgtgttgattgaatagctttgggttgcgacctctatcttctcttttcagatgcttagtcaacatgatatagcttcagttttcttcacagtaggtctcttgctggggtttcctaagcccagacttgaaaccaaatatcccatctagcgctacttcagtgacctggcagtaattgtgatccacatttatgttttcatttttactatgtaatgtggttgagtgagatgcaagtaactcttggactttgttaggatgaccaccacagaccccaaacccccatgtggaggagtctagtaaactggactgggacatgtggagttccctatttctcttakgtcatttggacctggaccaaagaagattctgtgactctattgtatttaatctccccagtactcaagacttggattttacagctctttagtcagctgcacagaaagaagacagaagagagctaggcgtgggggtgcattcctgtagtctcagctactcgggaggctgaggcacgaggatctcttgagcctggccaacatattgagacccccatctctttaaaagaaagaaggcgcaag

SEQ ID NO: 573013 - DNA, 612 bp, Homo sapiens
caagatgagatttgggtggggacacagccaaaccatatcaggcagataggcaccgtgtggaaaaccaagaagaatcatcaaagtagacccacccacttctataacaagaccaccccagaggttggctgtgctgccaggggagaataaacctgtggtggaagtggacggaatgcactcttcactgcttggaatgggcactggcacagtgatgttcagaccccagaagaaagacaagaataagtgtgcattagcaagaactgagagtggggtctgaggctctctggctacacccactgctatttcctcagagaaaagagtgggggtaagaaatcaactcccaagatgctagtaaagtgcaagatgcaagtccagagtgggaaagaccaactaaagtttgggtgtmccagggcagaaacaagtatgttcagcaaagagaattttgttcaatgtcaacaactatataaaaaggagagttgtgatacacatgcaaacatcatacacacacatgtataaataaacacaagacatacaacacatacacataaaaattgtgtttaaaaatgcccaatattttgaagaaaatgtcccccgtggtacatggtagagaaatag

SEQ ID NO: 573014 - DNA, 612 bp, Homo sapiens
caagatgagatttgggtggggacacagccaaaccatatcaggcagataggcaccgtgtggaaaaccaagaagaatcatcaaagtagacccacccacttctataacaagaccaccccagaggttggctgtgctgccaggggagaataaacctgtggtggaagtggacggaatgcactcttcactgcttggaatgggcactggcacagtgatgttcagaccccagaagaaagacaagaataagtgtgcattagcaagaactgagagtggggtctgaggctctctggctacacccactgctatttcctcagagaaaagagtgggggtaagaaatcaactcccaagatgctagtaaagtgcaagatgcaagtccagagtgggaaagaccaactaaagtttgggtgtcccagggcagaaacaagtatgttcagcaaagagaattttgttcaatgtcaacaactatataaaaaggagagttgtgatacacatgcaaacatcatacacacacatgwataaataaacacaagacatacaacacatacacataaaaattgtgtttaaaaatgcccaatattttgaagaaaatgtcccccgtggtacatggtagagaaatag

SEQ ID NO: 573015 - DNA, 612 bp, Homo sapiens
caagatgagatttgggtggggacacagccaaaccatatcaggcagataggcaccgtgtggaaaaccaagaagaatcatcaaagtagacccacccacttctataacaagaccaccccagaggttggctgtgctgccaggggagaataaacctgtggtggaagtggacggaatgcactcttcactgcttggaatgggcactggcacagtgatgttcagaccccagaagaaagacaagaataagtgtgcattagcaagaactgagagtggggtctgaggctctctggctacacccactgctatttcctcagagaaaagagtgggggtaagaaatcaactcccaagatgctagtaaagtgcaagatgcaagtccagagtgggaaagaccaactaaagtttgggtgtcccagggcagaaacaagtatgttcagcaaagagaattttgttcaatgtcaacaactatataaaaaggagagttgtgatacacatgcaaacatcatacacacacatgtataaataaacacaagacatacaacacatacacataaaaattstgtttaaaaatgcccaatattttgaagaaaatgtcccccgtggtacatggtagagaaatag

SEQ ID NO: 573016 - DNA, 502 bp, Homo sapiens
gggtaaggctactcaatgttagagtttgtaaatgcttttgcaaatagataagagagatttttaattaagatattaagtagtcacaaaagaagaaagaaattatggyattcactgaattattgcttccatgattttaatttgatttctatatcctctttcacagatattaaaaaggttaatttcaccagattcctttagcaggttaagctgttaaaaatttagaattattgtacttcaggtaaatgaggttttggtatagcaagtttaaactcttttgtacatgtataaagcgcaattgccacttgcaattttaaaagcctactttttttgtcatgatttatttttcattcctcttcagtaagtggttttttggggctttaatttaacttatgcttaaagagttagaaataaaatatttgtttttgcaaaaataagagatagttaaaagggacacctgtgcctacatagaagtttaactattatttagatatgaacattcaat

SEQ ID NO: 573017 - DNA, 644 bp, Homo sapiens
aatatgtcaagggatatgtttgcgtgcatgagtcaaaagaagagatatagcgctacactttaaggagttggtgacataagcttatttattgagttatttatttgcgcatattastggtagagaaaaatgtatttagtttgctctatcacaggtagagaaaaattatattttgttgttgtgagtgaacccagtgataatcatttcacctcttcttttaagtagtatagaagtctaacattttcattgcttagcgccagaacttaagtgataagattttttatatagtgtgatgatttgattcacacatataatgttgagattcaagaattattatcccatttaccagatgagaaagtggaggtacagaagttttagaaaagggaattagcctccgcttctattctattaagccactatatttcagaaggcatagagtatctattttgcatttgggttgggggagatggagatttgccctaactttgattcttttaggtcaagaataatttctttcagaacccggatggttttcttatttccataaaatgggttgccacattaggcctcagagtccaccaaatgaacggttcttctcttctgctgtccctcaaatttgtgatatgtaaaatatgtgtgaagatgca

SEQ ID NO: 573018 - DNA, 644 bp, Homo sapiens
aatatgtcaagggatatgtttgcgtgcatgagtcaaaagaagagatatagcgctacactttaaggagttggtgacataagcttatttattgagttatttatttgcgcatattagtggtagagaaaaatgtatttagtttgctctatcacaggtagagaaaaattatattttgttgttgtgagtgaamccagtgataatcatttcacctcttcttttaagtagtatagaagtctaacattttcattgcttagcgccagaacttaagtgataagattttttatatagtgtgatgatttgattcacacatataatgttgagattcaagaattattatcccatttaccagatgagaaagtggaggtacagaagttttagaaaagggaattagcctccgcttctattctattaagccactatatttcagaaggcatagagtatctattttgcatttgggttgggggagatggagatttgccctaactttgattcttttaggtcaagaataatttctttcagaacccggatggttttcttatttccataaaatgggttgccacattaggcctcagagtccaccaaatgaacggttcttctcttctgctgtccctcaaatttgtgatatgtaaaatatgtgtgaagatgca

SEQ ID NO: 573019 - DNA, 586 bp, Homo sapiens
ggaggaggagttttaaaaaggaagcagcagagtcctgggtaatacctcagcttagacatttagatactgaaaagatgagctaacgaaagagagactgatctgcaacataggtaaggatcctgtcttattcaccttcatatctgaggcacatcaatggtactcaacagttgtttaatggctaaaagaaggaacagggaaataggaaataagtgactttagagtcacagaagctaaggcaaggggtgtgagcagacctagaattaataactgaacttattggctggatgcggtggctcacgcctgtaatcccagcactttgggaggcmgaggtgggcggatcacgaggtcaggagatcgagaccatcctggcaaacatggtgaaaccccatctctaataaaaatacaaaaaaattagtcaggcgtggtggcgggtgcctatagtcccagctactcgggaggctgaggcaggagaatggcatgaacccgggaggcggagcttgcagtgagctgagatcgcgccactacactccagcttgggcgacagagcgagactccgtctcaaataaataaataaataaataaataa

SEQ ID NO: 573020 - DNA, 455 bp, Homo sapiens
tcagttctgataaaactttccttatgggcactgaaatttggatttcatataatygatgtgtcaaaaatattatttttaaaaccaatttaaaatataaaaaccattcttagcttgtggactgtacagaaacagttagtggtccagatttggccagtggaacctagtttgctgattaatgctttagagaaagatattgcatttcagttaaaaaaatggactttgagttagaattgagtttgaattccatctttgcctattaatactttggatgaatacttaacctttctgagctctcttttccacatctgtaaaatgggaataatgatcttattatgatatggatgaagtcaaagagcatatatttagcataaatttggcatattttaaaaactagctccctacttcctgaaatagctatttccagtgtaggacgaaagagataaataagtaaattt

SEQ ID NO: 573021 - DNA, 455 bp, Homo sapiens
tcagttctgataaaactttccttatgggcactgaaatttggatttcatataattgatgtgtcaaaaatattatttttaaaaccaatttaaaatataaaaaccattcttagcttgtggactgtacagaaacagttagtggtccagatttggccagtggaacctagtttgctgattaatgctttagagaaagatattgcatttcagttaaaaaaatggactttgagttagaattgagtttgaattccatctttgcctattaatactttggatgaatacttaayctttctgagctctcttttccacatctgtaaaatgggaataatgatcttattatgatatggatgaagtcaaagagcatatatttagcataaatttggcatattttaaaaactagctccctacttcctgaaatagctatttccagtgtaggacgaaagagataaataagtaaattt

SEQ ID NO: 573022 - DNA, 455 bp, Homo sapiens
tcagttctgataaaactttccttatgggcactgaaatttggatttcatataattgatgtgtcaaaaatattatttttaaaaccaatttaaaatataaaaaccattcttagcttgtggactgtacagaaacagttagtggtccagatttggccagtggaacctagtttgctgattaatgctttagagaaagatattgcatttcagttaaaaaaatggactttgagttagaattgagtttgaattccatctttgcctattaatactttggatgaatacttaacctttctgagctctcttttccacatctgtaaaatgggaataatgatcttattatgatatggatgaagtcaaagagcatatatttagcatawatttggcatattttaaaaactagctccctacttcctgaaatagctatttccagtgtaggacgaaagagataaataagtaaattt

SEQ ID NO: 573023 - DNA, 455 bp, Homo sapiens
tcagttctgataaaactttccttatgggcactgaaatttggatttcatataattgatgtgtcaaaaatattatttttaaaaccaatttaaaatataaaaaccattcttagcttgtggactgtacagaaacagttagtggtccagatttggccagtggaacctagtttgctgattaatgctttagagaaagatattgcatttcagttaaaaaaatggactttgagttagaattgagtttgaattccatctttgcctattaatactttggatgaatacttaacctttctgagctctcttttccacatctgtaaaatgggaataatgatcttattatgatatggatgaagtcaaagagcatatatttagcataaayttggcatattttaaaaactagctccctacttcctgaaatagctatttccagtgtaggacgaaagagataaataagtaaattt

SEQ ID NO: 573024 - DNA, 570 bp, Homo sapiens
ccacttcttccattcttttaaagaaagattgttctctggaaatcatcccagatcgggagagggggcacaggaggaaggacggaaggatggaaggtcggaaggaaggagaaggggaaggggaaggggaaggggaatcggaataggatataggaaggagagagtgacctaatatacatttttcagtggcctagtttggaaaatgctgattaatatatattttaaagtgcatagtgcctactagtgtattaatggttttgaggagttctttaatatataatctcattaatttttttgctttctttctttcttttttttttttttgagacaaggtctgcctctgtcacccaggctggacagcagtggtgtgatcatggctcactccaacttggacacccgggcttagcctcctgagtagttgggactacaggcacatgccaccatgcctggctaaactttttaaaaaattgtgtagagatagggcctcgctatgttgcccargctaatctcaacctcctagcctcaagcaatactcctgcctcagcctcccaaagtgctgggattacaggcatg

SEQ ID NO: 573025 - DNA, 552 bp, Homo sapiens
atgagcatccatcccatgtacactcttcaacaccagtcattaaattatttgtttaattaatatctgttctcctcatagaccataagctccatgagccctttgaaagatgaattcatagcacagtatgtggtgcataatcaatgcatatctgttgaaagagtaaaaaccacctaatatatagagttcaggacctagcttgagaaatgstttgtagacagagcctccccccatctctttatagcacagtcttccttagagggtgcaactacagaaaaggaaatgttggagggataaagaagaaaggagaaatatttatttccaaagtggctctcatttggagtagactgagtcagaatagagtatttaattaaagtctaatatttgaggtcatggtgcttatttctctctaacaaaagaggaggggaaatgtacctatggcaaaggtctttagaaagaaccaccaaagacaaatagacgcaatttgtagattatatctggtctacgatgaagtcatttttcactcacctcccttattctcagtgcaaataataa

SEQ ID NO: 573026 - DNA, 552 bp, Homo sapiens
atgagcatccatcccatgtacactcttcaacaccagtcattaaattatttgtttaattaatatctgttctcctcatagaccataagctccatgagccctttgaaagatgaattcatagcacagtatgtggtgcataatcaatgcatatctgttgaaagagtaaaaaccacctaatatatagagttcaggacctagcttgagaaatggtttgtagacagagcctccccccatctctttatagcacagtcttccttagagggtgcaactacagaaaaggaaatgttggagggataaagaagaaaggagaaatatttatttccaaagtggctctcatttggagtagactgagtcagaatagagtatttaattaaagtctaatatttgagrtcatggtgcttatttctctctaacaaaagaggaggggaaatgtacctatggcaaaggtctttagaaagaaccaccaaagacaaatagacgcaatttgtagattatatctggtctacgatgaagtcatttttcactcacctcccttattctcagtgcaaataataa

SEQ ID NO: 573027 - DNA, 552 bp, Homo sapiens
atgagcatccatcccatgtacactcttcaacaccagtcattaaattatttgtttaattaatatctgttctcctcatagaccataagctccatgagccctttgaaagatgaattcatagcacagtatgtggtgcataatcaatgcatatctgttgaaagagtaaaaaccacctaatatatagagttcaggacctagcttgagaaatggtttgtagacagagcctccccccatctctttatagcacagtcttccttagagggtgcaactacagaaaaggaaatgttggagggataaagaagaaaggagaaatatttatttccaaagtggctctcatttggagtagactgagtcagaatagagtatttaattaaagtctaatatttgaggtcatggtgcttatttctctctaacaaaagaggaggggaaatgtacctatggcaaaggtctttagaaagaaccaccaaagacaaatagacgcaatttgtrgattatatctggtctacgatgaagtcatttttcactcacctcccttattctcagtgcaaataataa

SEQ ID NO: 573028 - DNA, 552 bp, Homo sapiens
atgagcatccatcccatgtacactcttcaacaccagtcattaaattatttgtttaattaatatctgttctcctcatagaccataagctccatgagccctttgaaagatgaattcatagcacagtatgtggtgcataatcaatgcatatctgttgaaagagtaaaaaccacctaatatatagagttcaggacctagcttgagaaatggtttgtagacagagcctccccccatctctttatagcacagtcttccttagagggtgcaactacagaaaaggaaatgttggagggataaagaagaaaggagaaatatttatttccaaagtggctctcatttggagtagactgagtcagaatagagtatttaattaaagtctaatatttgaggtcatggtgcttatttctctctaacaaaagaggaggggaaatgtacctatggcaaaggtctttagaaagaaccaccaaagacaaatagacgcaatttgtagattatatctggtctaygatgaagtcatttttcactcacctcccttattctcagtgcaaataataa

SEQ ID NO: 573029 - DNA, 488 bp, Homo sapiens
cctcctgagtagctggaactaaaggcatgtgccaccatgcccatcatgttgtttttccttgttaaaaccactgaagccatcttcctggtacccatgatgagatcgcttctctacttgtcttcttgttgcttattctatcatctctgcacctcctgctttccaagaattcactggctactagatagccttctgctattttctaatatcctcatgtgctctcaaaatatgtgatacataagcaaaacactgttaaccatcacgaaagtttagattaacagcttctttcttttttgtagttgcaatctttcctctctccttctaccattttttatttgttttaatgaaaagaggcttctaagcactgattttcactacctcttcaagagccacaaaaatcaaaagtactaagagtaatatttttaactttaggagcccaggcaatctttcaaayagatgacaagcttacggtcaataaagaggaattttaa

SEQ ID NO: 573030 - DNA, 493 bp, Homo sapiens
ttaaaatattataaatatattttataaatactatagagtgacaaaatgataagatagatcttttatatgctcatgtaaaattctgcattattgaataaaataaattataaaattatagtcataatatatacaaaaactcctacaaataaaaaagaaaaaggcagaatacccaagmgaaaatgggacaaaacacttggtcagtgcaaaaaaagaagagtacaaattagaagcaaccacatgaaaagctgctccattttagttgtcatcagtagaataccagttggctggcaagaacagagagaaactggaattccacatactcttctggtatgaatagtacataaaaaccttagaaaactctaaaagtttctactaaagctgaacatatacatacctatgacttctagataaatacccacaaaaatacatacatatgacctccaaaagatatgcacaagaaagttcactgaagtacaatttctaatagccaaga

SEQ ID NO: 573031 - DNA, 493 bp, Homo sapiens
ttaaaatattataaatatattttataaatactatagagtgacaaaatgataagatagatcttttatatgctcatgtaaaattctgcattattgaataaaataaattataaaattatagtcataatatatacaaaaactcctacaaataaaaaagaaaaaggcagaatacccaagcgaaaatgggacaaaacacttggtcagtgcaaaaaaagaagagtacaaattagaagcaaccacatgaaaagctgctccattttagttgtcatcagtagaataccagttggctggcaagaacagagagaaactggaattccacatactcttctggtatgaatagtacataaaaaccttagaaaactctaaaagtttctactaaagctgaacatatacatacctatgacttctagataaatacccacaaaaatamatacatatgacctccaaaagatatgcacaagaaagttcactgaagtacaatttctaatagccaaga

SEQ ID NO: 573032 - DNA, 493 bp, Homo sapiens
ttaaaatattataaatatattttataaatactatagagtgacaaaatgataagatagatcttttatatgctcatgtaaaattctgcattattgaataaaataaattataaaattatagtcataatatatacaaaaactcctacaaataaaaaagaaaaaggcagaatacccaagcgaaaatgggacaaaacacttggtcagtgcaaaaaaagaagagtacaaattagaagcaaccacatgaaaagctgctccattttagttgtcatcagtagaataccagttggctggcaagaacagagagaaactggaattccacatactcttctggtatgaatagtacataaaaaccttagaaaactctaaaagtttctactaaagctgaacatatacatacctatgacttctagataaatacccacaaaaatacatacatawgacctccaaaagatatgcacaagaaagttcactgaagtacaatttctaatagccaaga

SEQ ID NO: 573033 - DNA, 558 bp, Homo sapiens
tgccatggaattttcagcatctgctgccctattttattatacttccccactagcaatgcacaagggttccaattttttcacaaccacactaacacttattttattaacacttttttttttgagatggagtctcactctgttgccaggctggagtacagtggtgctatctcggctgactgcaatttctgcctccagggttcaagcgattcccgtgtctcagcctcccgagtagctgggactacaggtgcatgccaccacgcctaatttttttttttttttgtattttagtagagayggggtttcactgtgttggccagtatggtcttcatctcctgacctcgtgatctgcctgcctcggcctcccaaagtgctgggattacaggtgtgagccaccgcacctggccaacacttatttttataacacttattttatattttcttgatagtagccaccctaatgggtgtgaagtggtatcttgttgtggctttgatttgcatttccctaataattagtgatgttgaacatcttttcatgtgcttattggccatttgtacatc

SEQ ID NO: 573034 - DNA, 583 bp, Homo sapiens
atgattgtgtgtggagagcagtgccctctttctctttggtctcgagcacaggggagactccaggaaacgtggtctggcatgaatccagggatcaggagcagagagtgcacgctgactgagcagccttccatctgtggaggagcgacacgtttcccatttcctcactccgcttcttcatctcrgggtcaggcctgggtgccttgggatctggaaggctaagcaccagtgccttagcatgtctgtctcagcctggagcattcttatcctgttccacctgggacgctcacctgtgtctttcccgccctggctcaattctccctgctctgaaaatgttggccaggtctccccacgccttcccaggcttcccacgggcagcagcaagtcacacatgtgctgtgatgtgatcttgtctccccagcacttcttgaaccatctactgccttatgttaagtcttttcgtacctgggagttgctcaaagaatctggggtgcagaagaattgattattgcttctacttattatagataattttttaaacactgaaaatgattttgttggaggcttgggcagggccaggcaaggc

SEQ ID NO: 573035 - DNA, 583 bp, Homo sapiens
atgattgtgtgtggagagcagtgccctctttctctttggtctcgagcacaggggagactccaggaaacgtggtctggcatgaatccagggatcaggagcagagagtgcacgctgactgagcagccttccatctgtggaggagcgacacgtttcccatttcctcactccgcttcttcatctcggggtcaggcctgggtgccttgggatctggaaggctaagcaccagtgccttagcatgtctgtctcagcctggagcattcttatcctgttccacctgggacgctcacctgtgtctttcccgccctggctcaattctccctgctctgaaaatgttggccaggtctccccacgccttcccaggcttcccacgggcagcagcaagtcacacatgtgctgtgatgygatcttgtctccccagcacttcttgaaccatctactgccttatgttaagtcttttcgtacctgggagttgctcaaagaatctggggtgcagaagaattgattattgcttctacttattatagataattttttaaacactgaaaatgattttgttggaggcttgggcagggccaggcaaggc

SEQ ID NO: 573036 - DNA, 583 bp, Homo sapiens
atgattgtgtgtggagagcagtgccctctttctctttggtctcgagcacaggggagactccaggaaacgtggtctggcatgaatccagggatcaggagcagagagtgcacgctgactgagcagccttccatctgtggaggagcgacacgtttcccatttcctcactccgcttcttcatctcggggtcaggcctgggtgccttgggatctggaaggctaagcaccagtgccttagcatgtctgtctcagcctggagcattcttatcctgttccacctgggacgctcacctgtgtctttcccgccctggctcaattctccctgctctgaaaatgttggccaggtctccccacgccttcccaggcttcccacgggcagcagcaagtcacacatgtgctgtgatgtgatcttgtctccccagcacttcttgaaccatctactgccttatgttaagtcktttcgtacctgggagttgctcaaagaatctggggtgcagaagaattgattattgcttctacttattatagataattttttaaacactgaaaatgattttgttggaggcttgggcagggccaggcaaggc

SEQ ID NO: 573037 - DNA, 583 bp, Homo sapiens
atgattgtgtgtggagagcagtgccctctttctctttggtctcgagcacaggggagactccaggaaacgtggtctggcatgaatccagggatcaggagcagagagtgcacgctgactgagcagccttccatctgtggaggagcgacacgtttcccatttcctcactccgcttcttcatctcggggtcaggcctgggtgccttgggatctggaaggctaagcaccagtgccttagcatgtctgtctcagcctggagcattcttatcctgttccacctgggacgctcacctgtgtctttcccgccctggctcaattctccctgctctgaaaatgttggccaggtctccccacgccttcccaggcttcccacgggcagcagcaagtcacacatgtgctgtgatgtgatcttgtctccccagcacttcttgaaccatctactgccttatgttaagtcttttcgtacctgggagttgctcaaagaatctggggtgcagaagaattgattattgcttctacwtattatagataattttttaaacactgaaaatgattttgttggaggcttgggcagggccaggcaaggc

SEQ ID NO: 573038 - DNA, 679 bp, Homo sapiens
ttcgcagctccccacggccaattttgggggtggactcctgtagctgagccatctggccctccattagtgcccaccgtagactaagcttgctgaccaccagggctgctggatggccttcggagcttggccctgttgtcctggtaacataaaaggcatctttccagaggtcgttaattccaactgaggaaggacaaaaacaagagcagttaacatggacacataccgyccactaacaggagaggggtttggttcaacaatacatttatttactcataagttcatacaggaaatgtactgagcactgaataaacagaaggcagtgagctagcccacgggtgcaaagaggggaaggactggacgccagtaaagcagcacattcttcctggtctttgcacctttactcctctgaagctatttccaaaaaagcccaactcaggaactgagagaatgtgccccttgtggcaagaattcagtagaaaagcaagcccgaaacactagggagcctgagaattcccagactgtcagtgcgcagtcacagaggcgatttaccttgccagtgtttattttgccttatctttaaaatacaagttgtataaggtgtaaggaagggatccagtttcagctttctacatatggctagccagttttcccagcaccatttattaaatagggaatcctt

SEQ ID NO: 573039 - DNA, 397 bp, Homo sapiens
ataagaatggttttcttgtagataatgtatagtcttgctttccttattcattctgacagtgtctttttttttttttttttttgagacagggtcttgctctgtcacccagactggagtgctggagcgcagtggcatgatcactgcttactgcagccttaacctcctgggctaaagtgatcctctcacctcagcctcctgagtaagctgagactacagacacatgccaccatgcctggctaattttgtttattttttgtagagatggggttttgccatgttgcccaggtggtcttgaactccygggctcaggcagtctgcctactttgccctcccaaagtgctggaattacaggcgttagccgctgtgctcagcctctgtcttttaatcggtatagtta

SEQ ID NO: 573040 - DNA, 391 bp, Homo sapiens
tctcagtatcaggtgtataagctcagtcagtgtgtgtgctgaacagggctggtattaattttttccccattagaagagcacaagacaattatttatgtctacctcgcctctaaacataatgatcttattctagagagactgtaaactatctaatatcctttaacaaattttctgcttatattaaaaagagctggtttccatggcttttcactaagaattctgataaacacagagggaaatgcagggattattcaaatgtctgtcctatattttgcaaagaaaatattgtgtgtatcatatatgtatagtcatagggccagagactttaaaagggaaaatgattcaagakaatctgatggacccctgaaaccaatttagtaattataataca

SEQ ID NO: 573041 - DNA, 326 bp, Homo sapiens
tttgtttaaatttatgattcttatttctgattcctttctgtttaataattactagctgaatcattaatcatcaaccaagtgaatggtcacactttatagaaggctacaaggtggaacacaagattwgttggattcttaagaaagaaactaaaagctgcttgcgacttagatgctcctaagttttatgactgtggtgggaatttgagcatccaggccttgcttctgatggtcctctcgttccagtgccccagttctaatcctctgtgggtgccctcggtaggcacagccttggggctgcccagggctcaaggcatccatgtttttaa

SEQ ID NO: 573042 - DNA, 326 bp, Homo sapiens
tttgtttaaatttatgattcttatttctgattcctttctgtttaataattactagctgaatcattaatcatcaaccaagtgaatggtcacactttatagaaggctacaaggtggaacacaagatttgttggattcttaagaaagaaactaaaagctgcttgcgacttagatgctcytaagttttatgactgtggtgggaatttgagcatccaggccttgcttctgatggtcctctcgttccagtgccccagttctaatcctctgtgggtgccctcggtaggcacagccttggggctgcccagggctcaaggcatccatgtttttaa

SEQ ID NO: 573043 - DNA, 628 bp, Homo sapiens
ggtccttctctttgtctctccatgctgggagtgggcagtccctgccctgctgcccttcagacacagccctcttccctcaagctgccctctgcctggatcccaccttccttgtgagctggagtatttgtgttgaaggagtcttgactctccttccctgtcagtcactgtttggctgcaggcagtgacagaggtggcaataaagcagcagagagaaggctttggtatcagagcagggactcgtgggtgggatgggacggggatggttttctgtttgccccactgtgttctctgtgctgctctgcccagggaggctgacctctgcagactgtgtcacctgggccccctgatctctcagccaatagaggtcccagctgagaagggggagagaggagtcagggtatttgtttcccccattccctgtcactccccctttttgcctgcctgaagctctggtggtggttgtggttcccccatggtcacagctttgctgagtggcctctctcctgtgtcccgtgaccccagttggcattgggctttggtagagatatttctrtcctagtgccacactagcccttattagttttcttcatctggtctatgcctttagaaactgtcacatcactaaacc

SEQ ID NO: 573044 - DNA, 628 bp, Homo sapiens
taattaccaaatggtcttatttatcatttagtgctaaatgaatgcatccaccttttatacttaggcttagagtgtcctgggtttcaacagtgctcattggtcctgcctttcattcttcttccttccttccttcttaccttccttccctcctctctctttctcttatcttgtcttcttttctacagttcattgttttattgtacatagtctacatggtttcataatttagtttagctattgatagttttagtaagtttaattctaaatatctgctcctttttattttcattttttaacagacagagtctcactctgtcgcacaagctggagtgcagyagtgcaagtatagctcaccgcagcctcaaattcgtaggctgaagagatcatcacacctcagcctcctaagtagcttggactccaagtgtacaccacccaacctggttattttttaaaatttctatacagactgggtctcagtatgttgcccaggctggtctggaactcctggcttcaagtgatcctcccacctcagcctctcaaatgctgggattacaggtgggatccactgcacctgtcctctgctctcttcttctttttaactcttatgtatggttctttagcaaatagc

SEQ ID NO: 573045 - DNA, 585 bp, Homo sapiens
aataaatcaactaattcacaaattttgattttattttgtgctgtatagataagggattgttagtcaaaaaatgtacattatgaaattttaaaagaccatcctaccactttagtgacattttgaatttaaagctgacagtgtactgtaatccttgacatcgattttatttgacaactcagatctttcagatttgaaagaattttcagccagcgggggattgggtacacattytaatattaacttaaaagtaataactccttattaccattcggtatttatgaagttctctttggactcttacatcattacttttctcacctctcaaaattaaaatttttcttttcttttttttttttcttttttttttttgagacagggtcttgctctgttgcccatactggaatgcagtggcatgatcttggttcactgcagcctccaactctccaacacaagggatcctcctgcctcagcctcccaagtagctgggaccacaagtgcataccaccacacccagctaatttctgtcttttcgtagagatggggtttcaccatgtgggccaggctggtgtcaaactcctaggctca

SEQ ID NO: 573046 - DNA, 567 bp, Homo sapiens
gattattgaggcaattacttagatcattgaaatatacaattacatatatattttaaataaaactatttgaaggcttgattttccttctctcatatgttgatacaaattaaaaattatgagtatctaaaactacgtgcataagcaggctggaactaagaatgtcacagttgaactccagagactaaattttaaaagcaatgacaaaattcttgatttagggagcagaaaatcgaacttcaggctataaagtaatatttagggtacattaggagatacataacgtatctccagtatactggagaagcgttgtgtcagtaattcaatcaaaaaaatttaaaataagtaaaagcagcactgaaatgtatctgagtatttatcaaagctgaatttttattggcagtgacaatacactacatgtctttgtttctgccagatgaacaactataaaattttcctttccaggcatgatttgactatgacatgaataaatagctaaacatatttttgtttggttttaattatctcaggttggatctattatargcagcatcgagtgtgaaaagttaa

SEQ ID NO: 573047 - DNA, 429 bp, Homo sapiens
ttttctttgtttttgaaaatgtatgtagctaatacacacatttcatggaaatgttggcaaacagttgatgcttctctatggaaagrggagatctcccctgcttcttttatcttacctttacctcaactttggtctcatattctttaccttgctcctacattatggacattaaactcatttaagtttttacctccctattctcagaaactttggaattagacttcccagtttcaaagcctggttctgctgcctgttgcctgcatgatcttgagcaggttattttctactctttgcctcagtttcttcttctataaaataaaaaccagatggcttcatggcaaattccaccaaacttttaaagaactaacacaaattcttctcaaactgttttttaaaattgaagcggggagctctcagcaacgtggaaag

SEQ ID NO: 573048 - DNA, 484 bp, Homo sapiens
gactgggatttgaaatcaggcaatctaactccagagtcactgttcttaaccacagtgctatattggaagtagatttatatatatatttcaaattgcttaaattttaaaaggttttgtttttaggttggttagattttctaggcaagtaaagcctactaaaataactcttttataattatttaaatattattttattcagtgcttttgtttttaaaaaaaaatcgtttggttcttataggcataagggccatgtgttctgaaattattttgaggcaagaagttttgaaagatggtttccacaggtaagttgccygttgatttctatttctattaaaataatgtgtcatataattgagagcaaaaaattgatggttgaaatttgtataaattgaaaaatcaggccagatgcggtggctctcatctgtaatcccaacactttgggaggccgaggcaggcggatcacaaggtcaggagtttgatacca

SEQ ID NO: 573049 - DNA, 484 bp, Homo sapiens
gactgggatttgaaatcaggcaatctaactccagagtcactgttcttaaccacagtgctatattggaagtagatttatatatatatttcaaattgcttaaattttaaaaggttttgtttttaggttggttagattttctaggcaagtaaagcctactaaaataactcttttataattatttaaatattattttattcagtgcttttgtttttaaaaaaaaatcgtttggttcttataggcataagggccatgtgttctgaaattattttgaggcaagaagttttgaaagatggtttccacaggtaagttgcctgttgatttctatttctattaaartaatgtgtcatataattgagagcaaaaaattgatggttgaaatttgtataaattgaaaaatcaggccagatgcggtggctctcatctgtaatcccaacactttgggaggccgaggcaggcggatcacaaggtcaggagtttgatacca

SEQ ID NO: 573050 - DNA, 483 bp, Homo sapiens
ctctctcttgttctgtttctctcaccctgttttctgtttctctctgcctcttttctcactctgtctctctctttctgcttctctgtcttcatctccctacctctgcttctcttaaaattaattactttcttattacgaaagcaacagaaattattgtagaaaatttcccacatataaataagaaaattgaagagatctcaatccaccctcctcaagataaccacttggtcatgattagcaccttacaatacctccttttagacattttgtgtttgtctccaatgcacattaatgactctggaagtagcttgcctggatatgagtctcagcgcctccagcccatgacccagaacttgagtaacttatttcctcttggcaacttggtattctctgccttaaaataaggacaataatggtcccttctacaccagtgaggttgtcatgatgtctatatgascggatactggtaaagcaattagccca

SEQ ID NO: 573051 - DNA, 657 bp, Homo sapiens
ggcaaggaattcagtttatggtttgactctgaaacaaaactgataatagccctttcctgaaaagactcccttcttgtctggggaccagtctgcctttrcaggactaacaaattagctacaagattagaaatgatggcttaggggtcatgcagcttttggctccaagagtttgaacctccccaaattgctcctggggataacagtactaagatcagtagttgagatattttgcagaccctgcagtcaatggatcagctgacaccacccagtcccataatctgactcaaccagttctgccatcccacccaggaacagaagacaacaagaacatctcacttcaacccccagtgtttccatctccaacctgaccaatcagcactccccacttcccaagcccctacctgccaaattatctttaaaactctgatccccgaatatggggaaattgatttgagtaataatagaactccagtctcccacacagccagctctgtgtgaattactctttctccattgcaattcccatcttgataaatcagctttgtctaggcagaggacaaggtgaacccgttgggcggttacattggtatcaacttcctgaaaaaccattactaagacagattctgaatttagggtatatgaagctgtcctcacagg

SEQ ID NO: 573052 - DNA, 575 bp, Homo sapiens
ctctgcatgtgtgtgcctgcacaaagggctgccttattaaatagtaattctcattcttacattccatgtccttttcccctggccctgtttcctctttccctctgtaatgtgaaggackgtgcaattcaatctatattggaattagaagtttggagcaggtacaatcacactgtatcaaatcattttgaaattaatgttcattcagacccataaccaggcatgtggcaggttaagagggtacacgtggaagggcccctgccaacacacactcatcctcccagaaacacaatcaggccctagctcagcatttcccagatgtcagtcatttgaatataccttcgttatttgtaagaatattttgctatattcacttatcacccaactgatttttttttttgagatggagtctcgctctgtcacccaggctggagtgcagtggtgcaatctcagctcactgcagcctctgtctcccaggttccagcgattatcctgcctcagcctctcaggtagctgggattacaggtacgtgccaccatgcttggctaattttttgtatttttagcagagacggggtt

SEQ ID NO: 573053 - DNA, 600 bp, Homo sapiens
ataaacaaacatttacactgtttattatctgatgccatttgtatcttcttccttgtcgtccagacatcgaataattaggtttcttcagggttttctttttcaagtgctcagtgttaaagatcactcacattagggccagacaccatggctcatgcctgtaatcccagcactttgggaggccgaggcgggcagagcacttgaggtggggagtttgagaccagccyggccaacttggtgaaaccccacctctactgaaaaacatacaaaaattagctgggcgtgatggtgcatgtctgtagtcctagccacttgggaggctgaggcatgagaatcgcttgaacccaggagacagaggttgtagtgagccaagatcacgtcagcacactctagcctgggtgacagcgtgagactctgactcaaaaaataaataaaataaatatcacttacatgagatatacccaaggggtggtctacagagacttggaagcagtggttattgcaacaggggcacggaagtcatctggctatgccagggtgcccaggggatactcggggtgggtggcatggtgctgctggggactcatcgcacaggacgctctg

SEQ ID NO: 573054 - DNA, 600 bp, Homo sapiens
ataaacaaacatttacactgtttattatctgatgccatttgtatcttcttccttgtcgtccagacatcgaataattaggtttcttcagggttttctttttcaagtgctcagtgttaaagatcactcacattagggccagacaccatggctcatgcctgtaatcccagcactttgggaggccgaggcgggcagagcacttgaggtggggagtttgagaccagcccggccaacttggtgaaaccccacctctactgaaaaamatacaaaaattagctgggcgtgatggtgcatgtctgtagtcctagccacttgggaggctgaggcatgagaatcgcttgaacccaggagacagaggttgtagtgagccaagatcacgtcagcacactctagcctgggtgacagcgtgagactctgactcaaaaaataaataaaataaatatcacttacatgagatatacccaaggggtggtctacagagacttggaagcagtggttattgcaacaggggcacggaagtcatctggctatgccagggtgcccaggggatactcggggtgggtggcatggtgctgctggggactcatcgcacaggacgctctg

SEQ ID NO: 573055 - DNA, 600 bp, Homo sapiens
ataaacaaacatttacactgtttattatctgatgccatttgtatcttcttccttgtcgtccagacatcgaataattaggtttcttcagggttttctttttcaagtgctcagtgttaaagatcactcacattagggccagacaccatggctcatgcctgtaatcccagcactttgggaggccgaggcgggcagagcacttgaggtggggagtttgagaccagcccggccaacttggtgaaaccccacctctactgaaaaacatacaaaaattagctgggcgtgatggtgcatgtctgtagtcctagccacttgggaggctgaggcatgagaatcgcttgaacccaggagrcagaggttgtagtgagccaagatcacgtcagcacactctagcctgggtgacagcgtgagactctgactcaaaaaataaataaaataaatatcacttacatgagatatacccaaggggtggtctacagagacttggaagcagtggttattgcaacaggggcacggaagtcatctggctatgccagggtgcccaggggatactcggggtgggtggcatggtgctgctggggactcatcgcacaggacgctctg

SEQ ID NO: 573056 - DNA, 600 bp, Homo sapiens
ataaacaaacatttacactgtttattatctgatgccatttgtatcttcttccttgtcgtccagacatcgaataattaggtttcttcagggttttctttttcaagtgctcagtgttaaagatcactcacattagggccagacaccatggctcatgcctgtaatcccagcactttgggaggccgaggcgggcagagcacttgaggtggggagtttgagaccagcccggccaacttggtgaaaccccacctctactgaaaaacatacaaaaattagctgggcgtgatggtgcatgtctgtagtcctagccacttgggaggctgaggcatgagaatcgcttgaacccaggagacagaggttgtagtgagccaagatcacgtcagcacactctagcctgggtgacagmgtgagactctgactcaaaaaataaataaaataaatatcacttacatgagatatacccaaggggtggtctacagagacttggaagcagtggttattgcaacaggggcacggaagtcatctggctatgccagggtgcccaggggatactcggggtgggtggcatggtgctgctggggactcatcgcacaggacgctctg

SEQ ID NO: 573057 - DNA, 396 bp, Homo sapiens
gtcgctcaggctggggtgcaatggctccatcagctcactttagccttgaactcccgggctcaagtgatactgccacctcaacttcccaagtatgctactacaggaacacaaactccttttttaaattttttgtggatatggggtctatgttgcctaggctggtctygaactcccaggctcaagcagtcctcctacctcagcctccccaaatgctgggattacaggtgggagctactgtacgcctggccttatctaagctgtttccctgaaaatgcccgtcttgggtaatgattccattggccccaccatgccctgtcctgccttcctggctgtgcccaagcttggtccctgcctgcctgcctcactctctgggtctcgagctcctgtgacacatga

SEQ ID NO: 573058 - DNA, 389 bp, Homo sapiens
caggtccttaaaggctgccctgccaacaaaaccataatgcaggaacaaacatcacaactatgccaaataatcaatcctacaatgtccaaaattttactttaaaactggaattwccagacttcctttctgcattaaccagtttaaatagacagtaacgaaatattcctcctactttatgctgtgatagtttatttatttatttatttatttgagacagattttcgctcttgttgcccaggctggagtgcagtggcacgatctcagctcaccacaacctccacctccgaggttcaagcgattctcctgcctcagcctcccgagtagctgggattacaggcatgtaccaccacgcccgggtaattttgtatttttagtagagacgggggttt

SEQ ID NO: 573059 - DNA, 389 bp, Homo sapiens
caggtccttaaaggctgccctgccaacaaaaccataatgcaggaacaaacatcacaactatgccaaataatcaatcctacaatgtccaaaattttactttaaaactggaatttccagacttcctttctgcattaaccagtttaamtagacagtaacgaaatattcctcctactttatgctgtgatagtttatttatttatttatttatttgagacagattttcgctcttgttgcccaggctggagtgcagtggcacgatctcagctcaccacaacctccacctccgaggttcaagcgattctcctgcctcagcctcccgagtagctgggattacaggcatgtaccaccacgcccgggtaattttgtatttttagtagagacgggggttt

SEQ ID NO: 573060 - DNA, 393 bp, Homo sapiens
caggtccttaaaggctgccctgccaacaaaaccataatgcaggaacaaacatcacaactatgccaaataatcaatcctacaatgtccaaaattttactttaaaactggaatttccagacttcctttctgcattaaccagtttaaatagacagtaacgaaatattcctcctactttatgctgtgatagtttatttatttatttatttatttgagacagattttcgctcttgttgcccaggctggagtgcagtggcacgatctcagctcaccacaacctccrcctccgaggttcaagcgattctcctgcctcagcctcccgagtagctgggattacaggcatgtaccaccacgcccgggtaattttgtatttttagtagagacgggggtttctcc

SEQ ID NO: 573061 - DNA, 393 bp, Homo sapiens
caggtccttaaaggctgccctgccaacaaaaccataatgcaggaacaaacatcacaactatgccaaataatcaatcctacaatgtccaaaattttactttaaaactggaatttccagacttcctttctgcattaaccagtttaaatagacagtaacgaaatattcctcctactttatgctgtgatagtttatttatttatttatttatttgagacagattttcgctcttgttgcccaggctggagtgcagtggcacgatctcagctcaccacaacctccacctccsaggttcaagcgattctcctgcctcagcctcccgagtagctgggattacaggcatgtaccaccacgcccgggtaattttgtatttttagtagagacgggggtttctcc

SEQ ID NO: 573062 - DNA, 504 bp, Homo sapiens
cctggccaacatggtgaaaacccatctctaccaaaaatagaaaaattagctcggtgtggtggtgcatgcctgtagtcccagctacttgggaggctgaggctgaagaatcacttgaacctgggagacggaggttacagtgagccgagatcgtgccactgcactccagccggggtgacagagtgagactctgtctcaaaaaaaaaaaaaaaaaaaaaaaagamagtggaattggcatatggatgaacaaataaatatatataatagaaaaagagtctaggcacacaatcaaatgaatatggaaacatactaatggcaagaggttatattacaaattagtagggataggatagactacttcagctactggagaaactggttattcacatgagaaaatgaaaataaaatcagattggccaggtgcagtggctcacgcctgtaatcccagcactttgggaggcctagacgggcggatcacgaggtcaggagattgagaccatcctggct

SEQ ID NO: 573063 - DNA, 615 bp, Homo sapiens
gacattttatacttcagaaaygaaaatactaatcttacgtgtttatggcggatgtttttcttataattttagttaaaaaatatttgtagaaggtttttatagtaatatagtcagaaaattagtctgcatttttacctacaaattaagcagtattttaaaaattagctcaagaaattttattttatattgtattttagtctgcatttgaatgatatttaaattcttagattttcactttagatgtgggaactccggtgcttaattctatcctctttaattttatatctgtgatttcttctgctttgttttcagttctatttttttcctgcactgcaaaagagtttctaaagattgtatttaatattacaagcttcatttagtgctctatcatttggcatttacatttttacatagttttaaaattatatatatttctttggattttttatctaattttatacaattttaaaaatcatgcacctctaatatctattgactaggtttagctttcatttcagagataacattaatagtgaaaaatattatcttaaatgcaaagatattcattatttaaaaattgatcaatgacattcactaaattatcacagggacgaa

SEQ ID NO: 573064 - DNA, 587 bp, Homo sapiens
atatgccttattctttctcagaaaagctaagccaaatgcctaggaatgtttcctttttccaatattccatcccctgtaatcccttaaattttcaaataattttaattttggaacataaaaatggtattccatttaaaatgcgtatgtttttcatttgcaaagagattaaacattttttcaagtttttaaactatatgcagccctttttttctgctatacctgttcatttcctcaagctatttttccatcagacagtttcatgttttctcattgatttgaagcttctattaaagtattgtatacacatgggtaaatgcacataagtttaaagcttagtgagttttaaaatactatgatcatccagaataagaaaatgtaatagtcacacacctgatttccacccatccctcctaacataacactattctaacttttaccagtaaggaatcaaatagtgtgtgtagtgttttgaaccacatttttttgcttaatattatatttgtgagacgaattgactatatgacctgcaaatgaaactatttayatttatttctctaatattttattaggtgatcatattacaactt

SEQ ID NO: 573065 - DNA, 526 bp, Homo sapiens
ttgggttggttccaggtctttgctattgttttataagcaagttctttatgacctgtatttggtgctgacttcctatctcacactgtgacttagaatgccttaaccatctgggaacacagctcagtaggtctcagtctcattttatccagctcctattcaagatggagttgctctggcccccgcaccactgacagctctaaaggtctaccaggcygccagggcccacggaaccctaaagtgttctgaccccagggctctgacatatctccttgggaattctggacgccaagagaaagcaagcaggctgaggagcctatgaggccagatcatggctgttggatgaacacagaccacacacatttccaccacacctcagagacttccttcttggaggcaaaacatcaaaataactccttaatgcatggtccaaacagaggacttaacataataaaatagatttttatagcctagccaacatggtgaaaccccatctctactaaaatacaaaaattagccaggcatggtg

SEQ ID NO: 573066 - DNA, 526 bp, Homo sapiens
ttgggttggttccaggtctttgctattgttttataagcaagttctttatgacctgtatttggtgctgacttcctatctcacactgtgacttagaatgccttaaccatctgggaacacagctcagtaggtctcagtctcattttatccagctcctattcaagatggagttgctctggcccccgcaccactgacagctctaaaggtctaccaggctgccagggcccackgaaccctaaagtgttctgaccccagggctctgacatatctccttgggaattctggacgccaagagaaagcaagcaggctgaggagcctatgaggccagatcatggctgttggatgaacacagaccacacacatttccaccacacctcagagacttccttcttggaggcaaaacatcaaaataactccttaatgcatggtccaaacagaggacttaacataataaaatagatttttatagcctagccaacatggtgaaaccccatctctactaaaatacaaaaattagccaggcatggtg

SEQ ID NO: 573067 - DNA, 446 bp, Homo sapiens
gggggattttgccatggcaaatgcttactggatgactcacttgtgttttgtcttgcaaccactttgaccttgatgccaccagtgagtaaagccattgcccacaaaggacactgggctaaagggaaaacatggaaaagaagagctaaaaaggggaggaggaaaggaaggtggaaataaaggaagagaaagagggggccaagaggtggagaaaggtgtagagagatggaaaatgacagaaaagagtcagagaaagagggagaaaaaaagaaaaaggaagggamgagaccaaaaagaaaagaatataaaagatgctagaaagaggagagagagagttgtagaacagccgagggtttggagaaagaaacagagaatgctgtggtaagagaggaagagaaaggcaaaacaatctaatacaggcagagcatcactaatccaaaagtccaaaa

SEQ ID NO: 573068 - DNA, 344 bp, Homo sapiens
atgacagaaaagagtcagagaaagagggagaaaaaaagaaaaaggaagggacgagaccaaaaagaaaagaatataaaagatgctagaaagaggagagagagagttgtagaacagccgagggtttggagaaagaaacagagaatgctgtggtaagagaggaagagaaaggcaaaacaatctaatacaggcagagcatcactaatccaaaagtccaaaatcagaaatgctccaaaatctgaaactttttgaatgcctagatgctcaaatcagattttggattttctgattagtgatgcttaacctgtatgtattctgyaaatatttcaaaatctgaaaaaaattaa

SEQ ID NO: 573069 - DNA, 597 bp, Homo sapiens
acaaaaaaaaattttttttaattagccaggcatggtaatgcatgcctgtggttccagctacaagggaagttgaggcaaaaagaycacttgagcccaagaggtcaaggctgcagtgggccatgttcacatcattgcacagcatgtgtgacagagcaagacactgtctcaaaaaaaagaaatgcacttgttagtaaaatttttaatttcaaaataattttcaggcaatcttggctgccccaaaggcttcacatgtctctggtgctatgtgaaatgccccacccaaagtgaatatggtcaaaatgaacatgttcattgataactttgtttgcacccaatgatttttttttttaatttctgaaacttattgcaaggataaaacaaatttgcatctgccaagtctactacctgcaatctaagttgtttttgcatttctaaattataaattcattaaaacccggtacttcatatttagctatgtttctcacattttcattacgtatttggtttgtatttaaggagttttcataaagaaaaacaaaacttccagcagtgacaaaagcagagccgatttattttattggctattcctgaaaacaa

SEQ ID NO: 573070 - DNA, 533 bp, Homo sapiens
atttatttatcagttctaagagtttcttggtagagtctttaggtttttctatatataagaacacgtcatctgcaagcagggacattttcatttactccttttcaatttggattccctttctttctttctctttcctaattgctctaagacttctagtactatgttgaaaaaaagtggtaagagttggcctccttgtcttgttctcattcagtaaratgttagctttgggttgtcatatatggcctttattatgttgaggtattttccttctatacctaacttattaagagtttttatcatgaagggatattgagttttatcaaaaaatttttctgtggctattgagataatcacatggattttattcttcattctattcatgtgatgtatgatggtttttgatttctgtacactgagccatccttgtattcctggataaattccacttgattcttgtgtgtgtttttttttttttttttttttttgatgtgttgtttgattcagtttgctaattctttgttgagaatttttgc

SEQ ID NO: 573071 - DNA, 533 bp, Homo sapiens
atttatttatcagttctaagagtttcttggtagagtctttaggtttttctatatataagaacacgtcatctgcaagcagggacattttcatttactccttttcaatttggattccctttctttctttctctttcctaattgctctaagacttctagtactatgttgaaaaaaagtggtaagagttggcctccttgtcttgttctcattcagtaaaatgttagctttgggttgtcatatatggcctttattatgttgaggtattttccttctatacctaacttattaagagtttttatcatgaagggatattgagttttatcaaaaaatttttctgtgkctattgagataatcacatggattttattcttcattctattcatgtgatgtatgatggtttttgatttctgtacactgagccatccttgtattcctggataaattccacttgattcttgtgtgtgtttttttttttttttttttttttgatgtgttgtttgattcagtttgctaattctttgttgagaatttttgc

SEQ ID NO: 573072 - DNA, 584 bp, Homo sapiens
taatttttgtatgttttgtagagatggggtttcgccatgttggccaggctggtctcaaactgctgacctyaggtgatccacccgtctcagcctcccaaagtgctgggattacaggcatgagccaccatgcccggcctcctccttgatctttatgcactagaaataacaaaacacctgtagcaccccaaacgcactatgcaatcttgtctccatgttgtgccttctaccttactgatatagaaaactactcttcatccttcaaaaccttactcagagctagcttcttccatgcagctattatgttttgacttctcaccaccatatttaagcatatcctcttctgtactacttccatatcttgtaaattctttcactactgtgtcttacacctcattataatgggctagtgccagcttctctgtgcaggccatgatgttccactttttgtcctgggatcttctctgacagtgtgggagccagcttggcccgtgctcaaccagaacccagaagtgggtgggtgtcacctgaggcagctctcaaccactaggggcagaaccaggcggatacgtgctctgctggtggag

SEQ ID NO: 573073 - DNA, 584 bp, Homo sapiens
taatttttgtatgttttgtagagatggggtttcgccatgttggccaggctggtctcaaactgctgacctcaggtgatccacccgtctcagcctcccaaagtgctgggattacaggcatgagccaccatgcccggcctcctccttgatctttatgcactagaaataacaaaacacctgtagcaccccaaacgcactatgcaatcttgtctccatgttgtgccttctaccttactgatatagaaaactactcttcatccttcaaaaccttactcagagctagcttcttccatgcagctattatgttttgacttctcaccaccatatttaagcatatcctcttctgtactacttccatatcttgtaaattctttcactactgtgtcttacacctcattataatgggctagtgccagcttctctgtgcaggccatgatgttccactttttgtcctgggatcttctctgacagtgtgggagccagcttggcccgtgctcaaccagaacccagaagtgggtgggtgtcacctgargcagctctcaaccactaggggcagaaccaggcggatacgtgctctgctggtggag

SEQ ID NO: 573074 - DNA, 495 bp, Homo sapiens
tccagcgattctcctgcctcagcctctcgagtagctgggactacaggcatgcaccaccatcccttagtaacttttgcatttttagtagagacagggtttcatcatgttggccaggctggtctcaaacttatgacctcaggtgatccgcctcagcctcccaaggtgttgggattacaggcgtgagccaccatggccagcccctcctataggtataatttaatttaatcctcacaacaacactatgaggttgatactgtcattatttccaatgtgcagatgaggaaactgagtcataggataagatgcaatgcctgtgatcttaaactcccagcamtggagaacttggaataaaaactagaaggagctgaattccagagctcttatctatgacctacctgcttcaaaactagccctttcttttatttctcctaaaataactcctttcaagcttccagtggaatgcttgctactgttggtattctaatgtctagtgag

SEQ ID NO: 573075 - DNA, 624 bp, Homo sapiens
agatccaacctttgctaacttcttgcactggcctagaaccatcttttaraccgtgtcattgtttatgctggtttagatctttaaagatacatctttataaaaagttataacattcttgatgacatcgaagcatttccagaaaatatcgagatccgtcttatatatctgttttttttttcatgcatccaccatccatgtattcatccatctatgtacccacccatccacccatccatccacccatccatctacccacccatccacccatccatccacccatccatccatccacccaccatccaccaatccattcactcatccatacattcacccacccatccacccacccatccaccaatccatccacctatccattcactcatccattcattcacccacccacccaccaactaattatttacccatccatccacccacttacccactcatttatttatccatccatccatccatccatccatccatccatccatccatccatccagctatcatgtatacagtaattaaaacagcaccattttgcagagttgcttcactctacctttcttttctgtgaatctggaacaactaactcagactctgtagctggaaaaccaagaaaaa

SEQ ID NO: 573076 - DNA, 624 bp, Homo sapiens
agatccaacctttgctaacttcttgcactggcctagaaccatcttttagacygtgtcattgtttatgctggtttagatctttaaagatacatctttataaaaagttataacattcttgatgacatcgaagcatttccagaaaatatcgagatccgtcttatatatctgttttttttttcatgcatccaccatccatgtattcatccatctatgtacccacccatccacccatccatccacccatccatctacccacccatccacccatccatccacccatccatccatccacccaccatccaccaatccattcactcatccatacattcacccacccatccacccacccatccaccaatccatccacctatccattcactcatccattcattcacccacccacccaccaactaattatttacccatccatccacccacttacccactcatttatttatccatccatccatccatccatccatccatccatccatccatccatccagctatcatgtatacagtaattaaaacagcaccattttgcagagttgcttcactctacctttcttttctgtgaatctggaacaactaactcagactctgtagctggaaaaccaagaaaaa

SEQ ID NO: 573077 - DNA, 624 bp, Homo sapiens
agatccaacctttgctaacttcttgcactggcctagaaccatcttttagaccgtgtcattgtttatgctggtttagatctttaaagatacatctttataaaaagttataacattcttgatgacatcgaagcatttccagaaaatatcgagatccgtcttatatatctgttttttttttcatgcatccaccatccatgtattcatccatctatgtacccacccatccacccatccatccacccatccatctacccacccatccacccayccatccacccatccatccatccacccaccatccaccaatccattcactcatccatacattcacccacccatccacccacccatccaccaatccatccacctatccattcactcatccattcattcacccacccacccaccaactaattatttacccatccatccacccacttacccactcatttatttatccatccatccatccatccatccatccatccatccatccatccatccagctatcatgtatacagtaattaaaacagcaccattttgcagagttgcttcactctacctttcttttctgtgaatctggaacaactaactcagactctgtagctggaaaaccaagaaaaa

SEQ ID NO: 573078 - DNA, 487 bp, Homo sapiens
aaaatccttttctaacattctgacattcattatgctaattattaaagcttctggtattgatccagtataaatagccaactcagttgtatcagtcccttctaaggtctgggcttccttttagaatgttagtgagtcatccctgagttgcgagatcccaaaggtacactaactgtaggctctgaagtaactttcagtaaattacaggcatcatagcattgtagcaagtctctaaaatactaagatctttcatatgtgtccattattctattgttgacctcctcttttactttctgttttgttttttttttctaatatatatacccatgttatcctttatgttaccttgcattctcgtttggcttctcttttttcattgtgtagatcartgtatcagtaattatcttgcatctcccaggaaataagcttttttgtcatgatctagaatcatattttctccaagagtagtctctagaccacctgtttagaa

SEQ ID NO: 573079 - DNA, 593 bp, Homo sapiens
caggtaaaatttccccatacctcatagtagaagtgtgtagaactgagcctctttaaagccaaatgcctgtatatctggccctaaaatccctaggagggctgcctattaatagaactctgtagagaattctctttttaaatgaagaaacctctttaaagaataattatcctcacattactttcccaccagcagtttctgtttcctttccttgaagtcagagttgaatgtatttggcttgcaaaaattcaattctgagatattattttgataacgtctgtgtgaaagagtttaaagaaggaaggcatagagatgggaaagggtaaactaaaaaaggaagaagcagaggcaactggtgttactcgggaatgggatggcatgaacattccagcaaattcctgacataatacagatgagaagaggaaataaaataattgctttgagtggatatatccccattcgcttttcwtttgtggaagatgaggtgaattcacaattattagaatatgaacctcctttgtgattatccagccaaaggttcaggtttcctgccagcagcctaacctgatgtggtggaagaggcccaaaagggtaag

SEQ ID NO: 573080 - DNA, 538 bp, Homo sapiens
aataatgtgacttttagaaactctacgtgcaaaggggacacacaccatgaggagatggtagtggacttataaggaaaagtagtaagcaatttaataaaatgaattcataacgcatgagagcatggctttttgagtcatagagacttgagtttgaatccttgctctgccacctgcaatatgtcargcactattctgcaagctttacaacaatcaatctttataataattgtatgaggtggatgagtaaacagaggtacagagaattttatagatgagtaaacagaggtacagagaatttgataccatgcccaaggtcacatagtccatgagtagagccaaaattagctgagataggtattcagaatctctgataatgtcttacatacacagtacataataagagctgaaaaatattagtttttaaaatttaaagcataaaatacactacttctaaacatgtagtaagatgtttagaagtaaatcttttatttgtaacatattattgtttctttaaaacatttaatggattcattattcc

SEQ ID NO: 573081 - DNA, 455 bp, Homo sapiens
cacttaaatgagaggtgacttagctcaagctaatgatctaaatgtaagattgcagtcttgggttttgtttygttttgtttctttcccctgacatgatgctgttaaaaaataaaaatcaccttgaagcactttgaagcccaaatgcctcctgggtatggtatcatttaggcatatgctagctagctaactagttcagtttcccaaaaagagaactgctatcagggagcatttcatttgaggtttactagaaaacaggatgcttccttggtgtttttgttttcatttatttttccctccttgcttttcaaatgcttttaaataataatgagttttgctttagattgctttctgaaactcacctgagggggaaaatatggagtttatcattagaattttatttttataggtgatgtggtcagaaataaacttttgatcttagctgaattgatttgttt

SEQ ID NO: 573082 - DNA, 455 bp, Homo sapiens
cacttaaatgagaggtgacttagctcaagctaatgatctaaatgtaagattgcagtcttgggttttgtttcgttttgtttctttcccctgacatgatgctgttaaaaaataaaaatcaccttgaagcactttgaagcccaaatgcctcctgggtatggtatcatttaggcatatgctagctagctaactagttcagtttcccaaaaagagaactgctatcagggagcatttcatttgaggtttactagaaaacaggatgcttccttggtgtttttgttttcatttatttttccctccttgcttttcaaatgcttttaaataataatgagttttgctttagattgytttctgaaactcacctgagggggaaaatatggagtttatcattagaattttatttttataggtgatgtggtcagaaataaacttttgatcttagctgaattgatttgttt

SEQ ID NO: 573083 - DNA, 411 bp, Homo sapiens
gagccaagggtaaaacggaacacagcaaaggtgaggactgagagccaggcacatggtgagccattgcagaatttcagatgtgggaggaacatgatcacagttccacttcagtaggattgctttcattgyatcgtgggggatgattggtggaggaaaaggagaagcaaggagactaatggggggcctttgcagtgatcaaaatgggaaataaatcatttgaagacagaatgaaaaaagatttaaattttatgaaggcagtagaatcagcatgatgagttaattttgagcaacaggaaaggcagaggcccagatgactccctgaccgctaacttgaatcactggaagaatggcagtacccttcctaaaggacaaaaatcccaaaggaggagcgggtttagttttgcacaaaag

SEQ ID NO: 573084 - DNA, 411 bp, Homo sapiens
gagccaagggtaaaacggaacacagcaaaggtgaggactgagagccaggcacatggtgagccattgcagaatttcagatgtgggaggaacatgatcacagttccacttcagtaggattgctttcattgtatcgtgggggatgattggtggaggaaaaggagaagcaaggagactaatggggggcctttgcagtgatcaaaatgggaaataaatcatttgaagacagaatgaaaaaagatttaaattttatgaaggcrgtagaatcagcatgatgagttaattttgagcaacaggaaaggcagaggcccagatgactccctgaccgctaacttgaatcactggaagaatggcagtacccttcctaaaggacaaaaatcccaaaggaggagcgggtttagttttgcacaaaag

SEQ ID NO: 573085 - DNA, 411 bp, Homo sapiens
gagccaagggtaaaacggaacacagcaaaggtgaggactgagagccaggcacatggtgagccattgcagaatttcagatgtgggaggaacatgatcacagttccacttcagtaggattgctttcattgtatcgtgggggatgattggtggaggaaaaggagaagcaaggagactaatggggggcctttgcagtgatcaaaatgggaaataaatcatttgaagacagaatgaaaaaagatttaaattttatgaaggcartagaatcagcatgatgagttaattttgagcaacaggaaaggcagaggcccagatgactccctgaccgctaacttgaatcactggaagaatggcagtacccttcctaaaggacaaaaatcccaaaggaggagcgggtttagttttgcacaaaag

SEQ ID NO: 573086 - DNA, 540 bp, Homo sapiens
gctttgcctaggccaagacaccttatgtactgtatattgttactacccactgggccataattagggatcttataagactttagcaactgcaactaccagcttctgtagtacatattagtctatcttgtaactttaaagcacttagtttccagtaatatgtgaatcatgaaggtagggaaaagcccataccaataccattatttagaacctcttctttaaaaaactgtgaataatgctgtaagactgaatagtactatctctctccatttagckaattatgcaccaatactgctatcttctgaatacaataacttccaacattttgatataaaattttctacttattttgagaagattttgttcaatgccacataggcaatacataatcagcatttgctaaattgtttatctctatacaccaagtcatagacaactttttttttttgattcttgttgctagcacttttaaatatgcttttcatgacagagaaataactggctggccaaaaccagtgttgaaattgaataataagcaaactt

SEQ ID NO: 573087 - DNA, 540 bp, Homo sapiens
gctttgcctaggccaagacaccttatgtactgtatattgttactacccactgggccataattagggatcttataagactttagcaactgcaactaccagcttctgtagtacatattagtctatcttgtaactttaaagcacttagtttccagtaatatgtgaatcatgaaggtagggaaaagcccataccaataccattatttagaacctcttctttaaaaaactgtgaataatgctgtaagactgaatagtactatctctctccatttagcgaattatgcaccaatactgctatcttctgaatacaataacttccaacattttgatataaaattttctacttattttgagaagattttgttcaatgccacataggcaatacataatcagcatttgctaaattgtttatctctatacaccaagtcatagacaactttttttttttgattcttgttgctagcacttttaaatatgcttttcatgacagagaaataactggctggccaaaaccartgttgaaattgaataataagcaaactt

SEQ ID NO: 573088 - DNA, 297 bp, Homo sapiens
ctatacaccaagtcatagacaactttttttttttgattcttgttgctagcacttttaaatatgcttttcatgacagagaaataactggctggccaaaaccagtgttgaaattraataataagcaaacttttgtggaaggaagacagaatatgaaagatggatcaggagatttgaaacttctatttgcccattagaaaaatctaaattcagccaggctcagtggctcacacctgtaatcctgaccctttgagaggccaaggtggcaggatcacttgaagccaggagttcaccagcctg

SEQ ID NO: 573089 - DNA, 601 bp, Homo sapiens
tgagaccccatctctacaaaaaattaaaaactaaaattagccaggcatggtggcacatgcctgtggtcccagctactcgagagagcaaggtgggaggatcacttgagcccaggacttcaagtctgctgtgcactatgatcatgacactacactccagcctgggcaacagagtgagactccgtatctaaaaaaaagagaaaagaaaaatagaaaattcccataaactkctggcacaagatctttataatataatgtcaatatccatattaatactgatacaaactcttaatatatattatcaacaataactatgactgccatttgttgagagcctactatgtgccagttgtggtactaggggcttttattggttatgtcacttaatcctcactgttattattcccatcccttagacacggaaacagagacataaagaggctaactttcccaagagtacacagcaataatgagtagatcaggaatttgaaggccactgactccaagtccttgctctttccagtatacaacatagaatcacacagaaaggcaagatgtttgctagtacaacactgcttcaaaaatatgattctaagaaaagggg

SEQ ID NO: 573090 - DNA, 529 bp, Homo sapiens
aataacaaaacaactcaataacaaacaacccagttaaaatattgttaaacaacttgaataaagcatttatccaaaaaagaaatagaaatagccaacaagcacacgaaaaaacagtatcataatcataagaaaatgcaaatcaaaaccacaatgagataccacttgtcacccactaggattgcttataataaaaagagataataatagcaagaatattgagaggttggaaaccctagtaccttgcaactaagaatgtaaaatggtagaactgctgtgaaaaacaatttggcagttccttaaaatgttaaacacacaactaccaatgatccagcaagtcggctcctaggtayatgcctgagagaaatgaaaacaagtgttgaaacaaaaacttgtacgcaaatgtccacagcaatattattcacaatagccaagaagtgaaaacaactcaaatgtgtgtcagttgagaaatggataacaaaatgtggcataatccacacaatggaatattatttagtcataaaaaggaata

SEQ ID NO: 573091 - DNA, 539 bp, Homo sapiens
aaaagtgccttgagcataacaaacactcaagttacgctcatggtgctgtgactgtgtgtatgatgctggggagggctgcttcagctgcacagtggcaaacctgacatgaccttgggactgctgtagtgtatgactgacattttatttactttaaaacaaaattctctccactgggggttggggggcggtgggtggtacttttcaatgaatgatgaaggagtagttggacatttataagcaaaataaaataagtcttaagctaaacgtcataccttgcaaaaaaatgatctctaaatgggtcattgacttaatgtaatgtaaacaataaaatgcaatgtaaacaataaagttctagacacacacacagagcacgacaatttccttccacctctcagcactcatttgtcatcacttgtctccttaactgcagagtatcatagcaactttcctacaaaggccttcaaccatctcgttttttttttttttttttttgagacagagtctcgctctgtcacccagrctggagtgcaatggcaaga

SEQ ID NO: 573092 - DNA, 588 bp, Homo sapiens
gatgtaattacaaatgcacacacacacatacataaatacacacatcacacatttaggccattatttcacaccataaaaataccaactcaatttaatcaaagacctaaaggtaagagttggaactataaaactttaaaacatatgcatacacacacagacacacatgcatacatgtgcttacacacacaagaaagtctttatgatattcatttaggcaaagattcttggacacacaccaaaataactggtgttggaagcagtaattgtctccaaaggggtacaagcaagcactttaggatgatggaagtgatctaaaatttagttctaatgatggttgatgatggttggacaatagtataaattgctaaaaaattacaacttatctgttgcaatgggtgaattttatcttacacaaattatagcttaaagcttttaaaatgcacaaattagacaaatattgactatatatatctcagaatgttctattaaataatgcttaataaccataatatgagtgattatgtgkcagaaaactaaactgatttgaattcagtgttatcctcaaagagaaaaacagaaaaaattatt

SEQ ID NO: 573093 - DNA, 597 bp, Homo sapiens
aaattatctttcaaagttctcaaaattcaatgctgaccaagaaaaagtaaattctactgagataaatcagattttgctgactgtaagaaacttatttctattcaaagacacaagtaggttgtgagtaaaaaaaataaaaaatatttagcwtgtgaacattaataaaatatggcagaattggcagcattagtgatagaaaaaatagtttcaaaacaaagaaaattgctagaaacagaaagcaacagtgtgtaatgatgaaagcatcaatttagcagaaagacataacaatcttaaatgtgtattcaccaaacaacagaaccctaaagaagcaaaaactgataagagttgaaaaaaaaatagacaaatccataattggagttagaaattccaacatctggtctggcgccatggctcatgcttgtaatcccagcactttgggaggccgaggcaggcatatcacctgaggtcaggagttagagatcagcctggccaacatggcgaaaccttgtctctatttaaaaaaatacaaaaattagccaggagtggtgacatgcacctatactcccagctactcaggaggctgaggcaggagaatcg

SEQ ID NO: 573094 - DNA, 606 bp, Homo sapiens
ttttaatgtatatccatataactcaactaaaatacaggagtcttttatatgttttgcctttaactatgactccctatcctatatatagaaatcaaattattttagaactgaaatggaccttcaggttcacactttttttaaattcctcacctcaagcatataccatttctttgtgctacaagcattcgaattatactctttgagttatttttaaatgtacaatgaattattgttgattgtaatcatcctgctgtgcataataagatcaagtattaggtcttattcattttttctaactatatttttgtacccattaaccatccccaccttaccccctacctctcacttcctttctcagcctctagtaaccatccttctactctctatctccatgagatatactaatttcctttctttttgttagataattagaagtggggttgctggatcacatggtagctctatgtttacttgaagaaccttcaaactgctctctgtactggttatactaatttacattcccaccaacagcatatgaggctcccctttctccatattccctccagcatttgttcttgtctgcsttttggatataagccattttaa

SEQ ID NO: 573095 - DNA, 581 bp, Homo sapiens
gccaaggaagagttgcagttgctgtctggagccagtctgctagcagaattcccccttcttcttattgggatttcagtctttttctttagctcccactgatcggataaggtccacccacattatggagagtaatctttactcaaagtgtattgattttaatgattaatgtcatctaaaaactacattcacagcaacatccagacatatttgaccaaacatgtggttattatagtctaaccaagttgatgtgtattatcaaccatcacaaggccaagcatggtggctcatgcctctaatgtcagcactttgagaggctgaggcaagcggattccttgaggccaggagttcaagaccagcctgggcaatatagtgagaccttatctctactaaaaaaaaaaawagctgggtatggtggtgcatgcctgtagtcctaactactcaggaggctgaggcaggaagatcacttgagcctgggagtttgaggctgcagtgagctatggtcatgccactgcactctactctgggtgacagaagaagaccctgcctcttttatatacatatatatatgtgtgtgtgtgtgt

SEQ ID NO: 573096 - DNA, 619 bp, Homo sapiens
aaattaaatataaaattttagcctgtggtattgttttcaattctttcaaattttamtaacttacaacctattttatttaaaattcagcatgctttcacttagccactgatttctagtctttctaatttaactggtttaaaaatttttagcagccatggaatttatgcaacaattgtagttttagcattttgtaatgaaaagaaaggaaaatggctgaaaccaaaatcagagaatgacccagatcataaaggtgagaagcatcagacatgttcatgttacatttgccctatctaagggagtaataggaaataataatggagaaatggtagaaatcagggatagatatagatttgtaatttaccctcatttgaatgattgttgaagccatagaaaagaatttaatgaaaagaagaatggaaaataaagaaaagtgaaaaaagatgaggacagaatattgagtagtgactatgcatcctggcttaggataggggtgtgaaatgcaaaggaaagggagaaataggaaaagaactcgttgacataactagcacagataattttaaagaaagcaaaagaacaagaatttcaggaaatagggaataatcaaacttcaagtactgtg

SEQ ID NO: 573097 - DNA, 595 bp, Homo sapiens
ataacacttgcacctatcaggtggggtggttatgaggagtcaagctgtgaatatctatgaagcttttagaaccatagtttacacacagtaaatgatgtatttgttaaacaaatacttttcaggtaactatcataaaatgtaacattctttatgttatatacatgggagggggagtctcagataattttttaaaaacatacttcaaaataatacataaaatgacattcagcagtagcaaaaaaccagttaagtcatcttagtaaaaaagcaattaagttgtcatagtattatgtttctttttttttattttcttgagatggactatagctctgttgcccaggctggagtgcaatggcacgatctctgctcactgcaacctctgcttcccgggttcaagcaattctcctgcctcagcctcccgagtagctaggattataggtgcatgttaccayaccccggctaatttttgtatttttagtagagaggggatttcactatgttagccaggctgatctcaaactcctgacctcaggtgatctgcccaccttggcctcccaaagtgctgggattacaggtgtgagccaccaagcccagc

SEQ ID NO: 573098 - DNA, 580 bp, Homo sapiens
gatttccagtactatgttgagtaggagtggtgactgtgggaaaacttgtcttgttctagttcatagggagaatacttttaactttcccctttcattatggtattggctgtgggtttgccatgtayggcttttattattttaaggtatgttccttctctgcttattctggtaaggggtttttttttttttaatcttgaaaggatgctggatttttgagtgctttttctgcatctgttgatatgatcatatggttttcattttaattctgtttatgtggtgaatcacattttattggtttgtgtatgtcgaaccatccatgcatccctgaaataaaccccacttgattgtattatctttttgatgagctgctcgattcagtttccctgcattttattgaagatttttgtatctgtgttcataaggcatatcggtaggcagttctattttttgttgtgtctttgcatggctttggtttcaggctgatactggcttcacagaatgagttagggaggattcccttcttgattttctggaatagtttcagtaagattggtatcagttcttcactgtatgtctggta

SEQ ID NO: 573099 - DNA, 551 bp, Homo sapiens
tagggaggattcccttcttgattttctggaatagtttcagtaagattggtatcagttcttcactgtatgtctggtagaattctgctgtgaacttggctggtcctaggtttatttttcttaggaggtcttcttgttattaattaaatttctctactcattattggtctgttcaggatttccattccttcctggttcaatcttgagaggttgtatgtctccagaaatgtatccttttccccttgatgttctagtttgtgcacatatagatgctsatagcagtctctaatgatcttttatatttctgttgtgtcagtcatactgacacctttatcacttctgatttattagaatcctctctcattttttgttgttaatctagctagaagtctatcaattttgcttatcctataaaagaaccatcttttctttcatttttttttggtctcaaattcatctagatgtgtttttgtctttgttatttcttttcttctgcccaatctgagtgtggtgtgttcttgtttttctagttccttgaggtgcaatgttaagtt

SEQ ID NO: 573100 - DNA, 508 bp, Homo sapiens
gacaattggcatcaggcaacaaaagacaatgatctcccacagaagggctacaaagcaagagtccaatcactgccccaactcactgccctgtgaaagtttctaggtcacactgcgaggaagaataatccagacagagcctggcagactccctgagttgtgatggaaatgaagtcaagagtccaagcaaatcaacattactggaattcmcaggactgagtactgaagacaagcctgcacagaaagagaattccagagattttcagtctctggaaaatatgagagataatagtacccagtgcccacacatagggccaggaatagtacctactctcaacagctagactgtaaaacctcatgcatgattcatgagtcactgggtagagcacaagtcagcaaacttttctgtaaagggccagatagtagatctttcggtctatcaggccacatgatctctgcttcagctactcaacttttcagtggtagagccaaagtggccacagaaatagtt

SEQ ID NO: 573101 - DNA, 398 bp, Homo sapiens
agaattcatgccccaagaacaccccttgaagaatcggagctggaaattgatgaataaaggttccctccctctttcaggcgcacakgccgtgcattctgaagtcactccgtggctcattaggagcccctgcgcagtcatgccccagctgcctccaggagtgaacaagctgagattgcactcccatttgccttccttccttccctgtgtcactcttcccaatccctctatcttcttttctgggaacactttcccaaattagaaaattctggaggccaattaaggcaataagccagggaatatgttatgtaaccgtgtgatgaactcacaagagatacttggggacttggagaagtccattccctgtatctaggcgagaccacagctaagtcattgaccaa

SEQ ID NO: 573102 - DNA, 433 bp, Homo sapiens
cttgaagaatcggagctggaaattgatgaataaaggttccctccctctttcaggcgcacatgccgtscattctgaagtcactccgtggctcattaggagcccctgcgcagtcatgccccagctgcctccaggagtgaacaagctgagattgcactcccatttgccttccttccttccctgtgtcactcttcccaatccctctatcttcttttctgggaacactttcccaaattagaaaattctggaggccaattaaggcaataagccagggaatatgttatgtaaccgtgtgatgaactcacaagagatacttggggacttggagaagtccattccctgtatctaggcgagaccacagctaagtcattgaccaaaggaactttgtattaaaacaaacaaacaaacaaacaaaaaaacttagaaaaatggaatt

SEQ ID NO: 573103 - DNA, 384 bp, Homo sapiens
aagaacaccccttgaagaatcggagctggaaattgatgaataaaggttccctccctctttcaggcgcacatgccgtgcattctgaagtcactccgtggctcattaggagcccctgcgcagtcatgccycagctgcctccaggagtgaacaagctgagattgcactcccatttgccttccttccttccctgtgtcactcttcccaatccctctatcttcttttctgggaacactttcccaaattagaaaattctggaggccaattaaggcaataagccagggaatatgttatgtaaccgtgtgatgaactcacaagagatacttggggacttggagaagtccattccctgtatctaggcgagaccacagctaagtcattgaccaa

SEQ ID NO: 573104 - DNA, 384 bp, Homo sapiens
aagaacaccccttgaagaatcggagctggaaattgatgaataaaggttccctccctctttcaggcgcacatgccgtgcattctgaagtcactccgtggctcattaggagcccctgcgcagtcatgccccagctgcctccaggagtgaacaagctgagattgcactcccatttgccttccttccttccctgtgtcactcttcccaatccctctatcttsttttctgggaacactttcccaaattagaaaattctggaggccaattaaggcaataagccagggaatatgttatgtaaccgtgtgatgaactcacaagagatacttggggacttggagaagtccattccctgtatctaggcgagaccacagctaagtcattgaccaa

SEQ ID NO: 573105 - DNA, 544 bp, Homo sapiens
ctaaagtaagccacgttatctatgagagacaggaacatttcaatcagggctaagatgatttmtttaaggataaagagcccaatatatctcaaatggaattttccaggaaaagaacatattgtgagtctagctcccaagttagtccgctggctaatacactgagaagccagggttactggttgtatctttccaaaccagcatggttagtttggttggcttcaacatggcataaataaatccaaacttctgagtttagtaatcacagtattagaggtgacactgactgcttcaacaacaacaaaattaaccctaaaacgtagaatggctctcaacacatagaagcttatttctcattaacataaagccccagaacacacattcttgatcagtaggaggcgctgatgtgagccaggcacccagacccttccatcttgcgacagacatatggcttcccatctgctgtctttgtccacatggacacagagaaggcacacaaagaattgcaaagtagagagcctgtgggccaggccgtgaagtcgcaggc

SEQ ID NO: 573106 - DNA, 544 bp, Homo sapiens
ctaaagtaagccacgttatctatgagagacaggaacatttcaatcagggctaagatgatttctttaaggataaagagcccaatatatctcaaatggaattttccaggaaargaacatattgtgagtctagctcccaagttagtccgctggctaatacactgagaagccagggttactggttgtatctttccaaaccagcatggttagtttggttggcttcaacatggcataaataaatccaaacttctgagtttagtaatcacagtattagaggtgacactgactgcttcaacaacaacaaaattaaccctaaaacgtagaatggctctcaacacatagaagcttatttctcattaacataaagccccagaacacacattcttgatcagtaggaggcgctgatgtgagccaggcacccagacccttccatcttgcgacagacatatggcttcccatctgctgtctttgtccacatggacacagagaaggcacacaaagaattgcaaagtagagagcctgtgggccaggccgtgaagtcgcaggc

SEQ ID NO: 573107 - DNA, 544 bp, Homo sapiens
ctaaagtaagccacgttatctatgagagacaggaacatttcaatcagggctaagatgatttctttaaggataaagagcccaatatatctcaaatggaattttccaggaaaagaacatattgtgagtctagctcccaagttagtccgctggctaatacactgagaagccagggttactggttgtatctttccaaaccagcatggttagtttggttggyttcaacatggcataaataaatccaaacttctgagtttagtaatcacagtattagaggtgacactgactgcttcaacaacaacaaaattaaccctaaaacgtagaatggctctcaacacatagaagcttatttctcattaacataaagccccagaacacacattcttgatcagtaggaggcgctgatgtgagccaggcacccagacccttccatcttgcgacagacatatggcttcccatctgctgtctttgtccacatggacacagagaaggcacacaaagaattgcaaagtagagagcctgtgggccaggccgtgaagtcgcaggc

SEQ ID NO: 573108 - DNA, 478 bp, Homo sapiens
cacacttatttgtttaactatcatctatggctgtttctttgctacaggggcagaactgagtagttgagacagagattgtatggctgcaaagcctgaggttttattatctgtctctttataaataaaagtttgccagcccctggtattgattattctgcttcttcaattttacaagataatcctaaatagtaggcaaaaatggctagcctttttgacaaatttaattgtggtaaactgtgctaataatattttcttcatttgctttytgtcacattctttaatctgattctttaatggtcacttttttgtttgttttccttcagtgtgttgtttaacttaataaatgatacttcatcaatctgtgtagagttttgttaccacattgatcaaatgtaactgtaaatgaaatcatccttattgatgaaaaccttaaggatcgtcctggtggcaagacatacacaattcttctagtacattt

SEQ ID NO: 573109 - DNA, 478 bp, Homo sapiens
cacacttatttgtttaactatcatctatggctgtttctttgctacaggggcagaactgagtagttgagacagagattgtatggctgcaaagcctgaggttttattatctgtctctttataaataaaagtttgccagcccctggtattgattattctgcttcttcaattttacaagataatcctaaatagtaggcaaaaatggctagcctttttgacaaatttaattgtggtaaactgtgctaataatattttcttcatttgctttctgtcacattctttaatctgattctttaatggtcacttttttgtttgttttccttcartgtgttgtttaacttaataaatgatacttcatcaatctgtgtagagttttgttaccacattgatcaaatgtaactgtaaatgaaatcatccttattgatgaaaaccttaaggatcgtcctggtggcaagacatacacaattcttctagtacattt

SEQ ID NO: 573110 - DNA, 276 bp, Homo sapiens
aaattgtagatgacaaaagcaaatggaaatacattctttgctcatgggttagaagaatcaatatcatgaaaatgaccatacactccaaagcaatctacagattcaatgcaatttctatcaaattaccaacactattttttacagaattagaaaaatcaatcctaaaattcacatggaaccaaaaaatagcccaaatagtcaaagcaacctaaacraaaagaacaaatctggaggcatcacattacctaacttgaaattttactacaaggctaacgt

SEQ ID NO: 573111 - DNA, 402 bp, Homo sapiens
ttgtaaatcccatcgaaccctcttaatattcacttggtcacactgayggagcacactaatgggactgctttccacatcacccaggttaagtgcctgtgcatttacttacaagaactgggaggaaatatatggtgatttaaaaagccagggtaggccaggtaaagtggctcatacctgtaattccagcgctttggaaggccaaggcaagaggattgcttgagcccagaagtttgagaccagcctgggcaatatagggagaccctgtctaaaacacacaaaccaaccaaccaaaaaaaaaaaaaaaaaaggctaggtgtggtggcacatgcttgagcccaggaggtagaggctgcagtgagctctgactgggctgggccactgtattccagcctgggtgacagg

SEQ ID NO: 573112 - DNA, 595 bp, Homo sapiens
tggcaatgactcttctttacacgtttggcagaattcaccagtgaagccatctggtcccgggcttttccttattagaagatttttgattagtaattcaatctccttgctcattactggtctattcagattttccatctcttcatggttcagccatgataggttgtaaaatatatgtccaggaatttatctgtttcttctaggttatccaatttgttgccatataattgttcatagtttcttatgattttttgtatttctgtggtattgtaatgtctcctctttcattcataattttatttatttgagtcttctgtctttttttcttagtctggctaatggtttgccaattttatcttttaaaaaaacaactctcagtttcatkgatcttttctattgtttttctaatctctacttcatttatttctgttctaatctttaatatttccttcctctggttactttgagctgttcattctttttctagttccttggggtataaagttaggttatttgagatttcttttttcttaatgtaggtatttatcactgtaaacttccttcttcaaactgattttgctgcatctcataagtttta

SEQ ID NO: 573113 - DNA, 603 bp, Homo sapiens
tacctgatactgggtaatttataaagaaaagaggtttaattggtgcacagttccactggcttaacaggaagcatgactgggaggccttaggaaacttacaatcgtggtggaaggcaaaggggaagcaggcatgtcttcacaatggtggagcaggagagagagagggaagggggaagtgccacacacttttaaaccatcagatgtcatgagaattcactcactatcatgagaacagcaaggaagaaatttgtccccatgatccaatcacctcccaccaggcccctcctccaatttgacatgagatttgggtgaggacacaaacaaaccatatcattccaccttccaccccttgccaaatctcatgtccatgtccttctcacattacaaaatacaattttcctttctcaacagtcctccagtcttaattcatttcagcattaactcaaaagtgcacagtccaaagtttcatctgagacaaggtaagtcccttctgcctatgagcctgtaaawtcaaaaacaagttcattccttccaagatacaatgggagtgtgggcattgggaaaatgctcgcattccaaatgggaaaaaatggtcaaaacaaa

SEQ ID NO: 573114 - DNA, 603 bp, Homo sapiens
tacctgatactgggtaatttataaagaaaagaggtttaattggtgcacagttccactggcttaacaggaagcatgactgggaggccttaggaaacttacaatcgtggtggaaggcaaaggggaagcaggcatgtcttcacaatggtggagcaggagagagagagggaagggggaagtgccacacacttttaaaccatcagatgtcatgagaattcactcactatcatgagaacagcaaggaagaaatttgtccccatgatccaatcacctcccaccaggcccctcctccaatttgacatgagatttgggtgaggacacaaacaaaccatatcattccaccttccaccccttgccaaatctcatgtccatgtccttctcacattacaaaatacaattttcctttctcaacagtcctccagtcttaattcatttcagcattaactcaaaagtgcacagtccaaagtttcatctgagacaaggtaagtcccttctgcctatgagcctgtaaaatcaaaaacaagttcattccttccaagatacaatgggagtrtgggcattgggaaaatgctcgcattccaaatgggaaaaaatggtcaaaacaaa

SEQ ID NO: 573115 - DNA, 565 bp, Homo sapiens
ttgcttattcataaaagtaaccacaccagcaaccagcaacatctacctaagtatgctaaagttgctttaaaaagaataaagtgatatgtatctcaataaagccaacrttttcttgttcaagtggaaaaggatgaacttgtacctctaatactaatattgaactaattctgatctttaaactaagatacaaataattttagaaagcaattttcttctttgcctagggcaaggtgtaataaatacagaccccaaatatttaagattccattcttctatccatgcttacacattccccatcagtggttcttcccaaagtccacataaagaactgaagcagtgtgtctcctctgccagggctgtgcttttaaatcactgatttatgttctaaggccccccaagacagcattttacatagtaccacgctagccagcagccagggtcccgaaggtgagtgtatcagttgaaagggttttaatgcagtgggggaggaagcactacctcctggtaatcacatgatcagcacacctaaatggacaaactcagcctgcatattttaacctgcagc

SEQ ID NO: 573116 - DNA, 520 bp, Homo sapiens
aattcaagaccagcctggctaacatgatgaaaccccgtctctactaaaaayacaaaaaagttacccaggcatggtggcaggtacctgtaatgtcagctactcaggaggctgaggcaggagaatagcttgaacccaggagtcggaggttgtagtgagccaacatcgcaccactccactccagcctgagcgacagagtgagactccatcaaaaaatataaaaataaaaaaaaaaaatgaagcaccaaatgcctcaatggaaactctactttttaacttatggacagcattgtagggtaattaggaagtaggtaaccagctttttcattggatggccccaaaatattatttatgtaagtctattcacctatgcttttaactttttctagaatactcttcaactaactgtagtctgcacttacatatccagttcccagcatgctgagattagaatgcgggaaaaagactgggaaatttcaccattcagaatgcacaatttaacttgttctccctgttttccgtc

SEQ ID NO: 573117 - DNA, 538 bp, Homo sapiens
ctgaggtcaggagtttcagaccagcctggccaacatggcgaagccccatctctactaaaaaaaattcaaaaattagctggccatgaccatgtaattgtaatgaagcctttatcgagaagaaaaatgttaactcatagaggtttatgattataggaattttaaaaatgtttcatttccatttacctatttctatggtagataaatatgaaggaatgatcaatgaaagaattttgaggttaaaataatttacatatgatgaaattctttgaggggaagcagaacgaaataaaagttcaaaggccaggtgcrgtggctcacgcctgtaatcccagcactttaggaggccaagggggggtggatcacttgaggtcaggagttcaagaccagcctggccaacatggtgaaaccctgtctctactgaaaatacaaaaattagcccggcattgtagcacacgtccgtagtcccagctacttgggaggctgaggcgcaagaatcacttgaacccgggaggcagaggttgcagtgagcttagatcac

SEQ ID NO: 573118 - DNA, 611 bp, Homo sapiens
taacaatatattactggtcctgtttttgcaaactgcatagtaccatcaccctactaccttgaaaatcacacgtcagcttttacatgcacagaagctaacccaccactcaaccaaccactagacatcaaaagataagatttagatgagaaagtatttcatggcgtcagtttcctatccaacgttagtatgtagttctaaggatatttcctttctggtccaaaagatttattaagggaggggtattcaatcctgtaggaggtgaaccctatcctgtaggaggggttccatgaagtgactgacacctcaaaaaggtattcatggtgttcacttccttaaagagaacagggtgcasatgtataaagattaggaaagtgcccagttatacaattatattgtcagcttttcccttaaacttcaagaactgatgctttgtttctataaatgcttacttcaaatcttgtggccaaactttcacttttaaatatcataaaaatatctattgctatgtttttaaaaatagaatacaaaaaatcttcatgtcctaaaagttgaatttaggtacatgatgaaacttcattaagtccaccctagctaacaatcctgattaaaca

SEQ ID NO: 573119 - DNA, 611 bp, Homo sapiens
taacaatatattactggtcctgtttttgcaaactgcatagtaccatcaccctactaccttgaaaatcacacgtcagcttttacatgcacagaagctaacccaccactcaaccaaccactagacatcaaaagataagatttagatgagaaagtatttcatggcgtcagtttcctatccaacgttagtatgtagttctaaggatatttcctttctggtccaaaagatttattaagggaggggtattcaatcctgtaggaggtgaaccctatcctgtaggaggggttccatgaagtgactgacacctcaaaaaggtattcatggtgttcacttccttaaagagaacagggtgcacatgtakaaagattaggaaagtgcccagttatacaattatattgtcagcttttcccttaaacttcaagaactgatgctttgtttctataaatgcttacttcaaatcttgtggccaaactttcacttttaaatatcataaaaatatctattgctatgtttttaaaaatagaatacaaaaaatcttcatgtcctaaaagttgaatttaggtacatgatgaaacttcattaagtccaccctagctaacaatcctgattaaaca

SEQ ID NO: 573120 - DNA, 476 bp, Homo sapiens
tctgtgaaaaaagagggctctggacttcccatgggaatgtagtcttctagtaggttctctgatcttgcataataactacaatctaacatgctactccctctgagacttctgactccttcattattctgccaaggaagtttctggcatctctacttcattttcgaaagtggtaattgtgtccaagtttcaaagaaacatctcatcaaacatgtgaaaatggggttatgtatcctygattggatgttaatccctgaataatgagagagcccccacatagatacattcttacaaccctctcctcacacccctgttatccctgtgcctgccacaacatatgtgccgtaattttttcaatgtgtatgctatttgcttataaatcagatactgtgtttctccacttatgctgtgctgagacctaaccctacttattggtctgcaggcagtgaagggaggtaggggatatggaggagaataag

SEQ ID NO: 573121 - DNA, 620 bp, Homo sapiens
tgatgtgtccagagcttgttccttctgatgttcggacatgttcagagtttcttccttctggtgggtttgtggtcttgctggcttcaggagtgaagctgcagaccttcacggtgagtgttacagctcttaagaccgtttgtctggagttgttcgttcctcccgtccggagttgttcattcctcccactgggttcgtggtctcgctggcctcaggagtgaagctgcagaccttcgcggtgagtgttacagctcataaaggtagtgtggacccaaagagtgagtagcagcaagatttattgcaaagagcgaaagaataaagcttccacaacgtggaaggggacccaagtgggttgccactgctgggtcaggcagcctgtttctattcccttatctggcccacccwcatcctgctgattggtccattttacagagaactgattggtctgttttacagagagctgattggtccattttgacatggtgctgattggtgcatttacaatccctgagctagatacaaaagttctctaagtccccactagattagctaggcacagagcactgattggtgcattcacaaaccctgagctagacacagggtgctgattggtgcatttacaa

SEQ ID NO: 573122 - DNA, 593 bp, Homo sapiens
attaacaaaactactgtcaataaagtgaccatggttcaacacacatatggaaccaaataaatgagatagacttgaaaatcgctataaatacaaacatataactatgacaaatgccattaatgtgaagaacacagcttcatgatagaaaataatggggacayctgtagatacagagtaggagagagcctcattgtaaaagtgacatttaacttgatatctgaagaacaacttaccatgcaaactgggtcaaagactgttccaggcaaaagatagatctaaagcaggaaagacttaagtgttttgggtgactcaaagaaggcctgtgtagatgactgaagaaagagatgtgattggagtggtatacagattcccctgttactgagataactgaattaagcatatcaactcatttatttgtgtatttctgttgcttgccccagtgcagaatgcatggcaaatattcagtaaatactaattgaacaagtaaataaattacatagagaagaaacataaaatattatttcctgcttgtctctatctctgcttctatttattttattttctttttctttttttttaatttttttggggga

SEQ ID NO: 573123 - DNA, 592 bp, Homo sapiens
tctgtttacattttttttctttttttttttggagacagagtcttgctctattgcccaggctggagtgcagtggcaccatcttggctcactgcaacctctggctcctggattcaagcaattcttgtgcctcagtctccaaagtagctgggactacaggygcttgctaccacacccagctaatttttctatttgtactagagacagggttttaccgtgttggacaggatggtctcgatctcctgacctcgtgatctgcctgccttggcctcccaaagttctgggattacaggcctgagccactgcgcccggcctcaaatctttttctattacaaaatatgctgccaatgaatacacatatctataaatataaatgtttgcacatacatgtgaactgtttaaatatgtctgaagtcttacaatagtaagactgttacagtcttgtgttacagaaacatgagtgggtgagaatgagataaatcataaatataagggaatataaatttctgatttatggtgtgtgtgctttatatatacatacatatatttaatgtatatgtatacaaggagagggagaaagactttaagtattgta

SEQ ID NO: 573124 - DNA, 595 bp, Homo sapiens
ctcttcaccaagtaagaaacgcagatggtaggtaattaaacacataaaaatatgctcagcatcattagtctttagggaaatgcaaatgcaaatcacaataaggtacggctgcacatccactagaatgatttaattaacaaggctattaatacctggtgttaaatattgaagatggagcacctgcaactctcatacataactggtgaggtgagaaaatggtacaattactttggaaacacgtttgtcagctacttagacagttayatacccacagtatgatccaactgttctactcctaggtgttttttcaagagaaacaaaccaaaccaacaacaacaaaaaacccccaaaacaaaaaatgtcatttcctcaaaaacctaggtgtaaatgtttgtggtggcttttttttcataattgttagaaatttaaaaataacccaaatatcccttgaccagagaatgagtaagtgaactgtggtacttataaaatagaataataacagaaacaaaaaaagaatgaataggtcaggcacgatggctcacgtctgtaatcccagcagtttaggaggccgaggagggtggatcacctgaggtca

SEQ ID NO: 573125 - DNA, 614 bp, Homo sapiens
cacaataggtgttaaaatgccagtcataataattgtaattatgcgtaatgtgacaaaaagaagaaaatgaatgacaatacaaagaataacatggaagccgaattctgattattatttaactgagaaagttatggtttcatcacccacaaaaagatataaaatgatagttttattttgctttaatttacacctctgatttagagtgagtgtgagcatctccttatagacctgttagtctttgatgttttcctttccttaaattgccctattttctacttgtattgctcttttacttgataatttgcttgagctccytatatatcttgacaataatttgttgttggttctagaaattgccatcattttctcccagtctatcacctctcagttaactttgtacatggtgtcctttgtgaaacagaacaggacttcatattgtgtactcaaattcatcagtcttttaccctgtgttttgtgatttctatttctactttacaagtccttccccatgcccagggtataaatatattatcttacatttttcttacactcattatataatttttttcatatttaattctttcatctctcttgagctcatctttttgttgcca

SEQ ID NO: 573126 - DNA, 574 bp, Homo sapiens
ttagagaaacaatattttcatggtctaaaatcattacttggtaaggaagaacttaatgtttgttccataatgcatttggctcagaaaacttatatttctttttccatatttttctttctctataaaagtccaattataattaggaarggtgtttctccacaaccaccttatttctttctcttgccgttgttgaacctactcaataagtaaaagcaaaacaaaaacaacaatgacacaataatttaaataaaaaggaaaaggggcaagttttaaaatttgcttttcaaaaatttagaggcttcaaaatgggactgttcttttcctgcctgtatcttatttggtattagcatttaaacaatatccagtaaaacaatgcatttgcattactacatttctatttaggaagcaaataaacattaatttctttgtggaaaaatatgcatattttagaactacagatattacagtgaaataattaaacccaagttaatgaaagttgagaattactatacataattactaaatataaaaatcagagagatctaaatcatggtatttccaatattttcagctt

SEQ ID NO: 573127 - DNA, 478 bp, Homo sapiens
cctgtcaaacagtagccggagacgaaacatatgtggccctttagacggagcaggggttctccagcttcccacagtcccccrtccccattgtagccgcaacactcagtcgaatgagagttagcaggtcccatcgggtgcatccatttacatagagcccacgttacttatttttacctgcctaagccctgtgggcatttgagtttgtggtgcctgctgtgaaaattagaaagaccagttgtcaagtcccagctcccataatggtttgctctgtaactgggcaacttatgtaacctcgctgaacctgactttcatcacccacaaaacagcgataataatagctgctgtttccaatggtggttgtgagaactaaaataagatgcatataatgcatataaacaggataacccagggctcagcccatagtcagcgtcacgtgaatagccactattattcttatcgagagcatcatgcccggggt

SEQ ID NO: 573128 - DNA, 677 bp, Homo sapiens
tataagcatgccagggcaaatatttaggctaagttgtaggagctaagaacataaagtacattgatttctttatcatggctagcagatatttaagaatgtcccctggtgtgattccatcctgtgtggctgttctctggagcagcattcrtttatcttcgtccgccttctctcctacctaagtgcgtgctgcctcccgatggaagatctgatggacgtggacatgagctccctgaggccccagaactatctttttggttgtgaactaaaggctgacaaagattgtcactttaaggtggataatgatgaaaatgagcgccagttgtctttaagaacggtcagtttaggggctggtgcaaaggatgaattgcacattgttgaagcagaggcaatgaattacgaaggcagcccaattaaagtaacactggcaactttgaaaatgtctgtacagccaacggtttcccttgggggctttgaaacaacaccaccagtagtcttaaggttgaagtgtggttcagggccagtgcatattagtggacagcacttagtagctgtggaggaagatgcagagtcagaagatgaagaggaggaggatgtgaaactcttaagtatatctggaaagcgatctgccctcggaggtagtagcaagcttccacagaaaaaagtaaaacttgctgctg

SEQ ID NO: 573129 - DNA, 677 bp, Homo sapiens
tataagcatgccagggcaaatatttaggctaagttgtaggagctaagaacataaagtacattgatttctttatcatggctagcagatatttaagaatgtcccctggtgtgattccatcctgtgtggctgttctctggagcagcattcgtttatcttcgtccgccttctctcctacctaagtgcgtgctgcctcccgatggaagatctgatggacgtggacatgagctccctgaggccccagaactatctttttggttgtgaactaaaggctgacaaagattgtcactttaaggtggataatgatgaaaatgagcgccagttgtctttaagaacggtcagtttaggggctggtgcaaaggatgaattgcacattgttgaagcagaggcaatgaattacgaaggcagcccaattaaagtaacactggcaactttgaaaatgtctgtacagccaacggtttcccttgggggctttgaaacaacaccaccagtagtcttaasgttgaagtgtggttcagggccagtgcatattagtggacagcacttagtagctgtggaggaagatgcagagtcagaagatgaagaggaggaggatgtgaaactcttaagtatatctggaaagcgatctgccctcggaggtagtagcaagcttccacagaaaaaagtaaaacttgctgctg

SEQ ID NO: 573130 - DNA, 578 bp, Homo sapiens
attttccttcaattttccaagtgttgtgatacatagcatctcataactataggtggattttgttttgatttataaaagatctcttatacttacagaatagaaagttggagttgcagatattcctcattcactgagatagtaaacaccatgaaccacaagaagagaatgggaggggccaaatgaaaggggctatagtgcagattgtgactttttatttaacagactagctaactttaaggggagaaggaggagggaawgtagcttgcaacaaatgttcaagctcttctaaaatgtcaatgctatggatattgtattttggatcaaaggtatgtctcaacttgccatttagctcctcctttagaatattgaatatattaacctcatggttcagttcaacacacttcaattaaacgtgtattatgttctaaactgtgggcttgatactactacttcataaaaactggcctatgaaaagatttcatgattaagacctcaaaagcacaggcaacaaaagcaaaagtagtcaaagtagttgattataccaaactaaaatacttctgcacagcaaaaggaaacac

SEQ ID NO: 573131 - DNA, 584 bp, Homo sapiens
cagactttttcaaagaagacatacaaatggacaaaaagcatatgaaaaaatgttcaacatcactaaacatcaagaaatgtgaattaaaaccaaaatgagataccatctcatgccagtcagaatggctattattaaaaagtcaataaaagttattggcagggatgtagagaaaagataatgcttatatgcttttattgagaatgtaaattagtataccctctatagaaaacttaaaatattttgcaaagaactaaaaatagaattatcattcgatccaggtacacaactgttggatatctacccaaagggaataaatcattatatcaaaaagatacttgtacttgtatgtttatcrcagtactattcacaatagcaaagatatgggtcaatagaagtgtccatcaatggataattggataaagaaaatgtgttatgtacacacaatggaatacataacttaatgtcttatcttaaaccacaaatataacaaaattatgtcttttgcagcaacattaatggaactagaggccattatcttacctgaaataagtcagaaataaaaagtcaaatactgcatgttctca

SEQ ID NO: 573132 - DNA, 590 bp, Homo sapiens
ctttcctttataaattacccagtctcagacagttctttatagcattatgaaaacacactattacaccatccaattgagaggtattccctaaataggtggtatgcagggtctaccttccacttacagaagccaaaaggggatggatgttttctcactcaccctggtaaaatatggcattagcctaaaatataaatttggttactygaatgttcttccttgctgttcttaaccgtaagaaagtgacaaaactatgtgattatgtaacatgtgggtggggggcaaaaatatttaagcatgacatcaagcatgtactggaggcgtgtaactaaaaaatctgggatatactagtactaagacaaggctttatcaaggtgaggaggtgatgcaaacgacattaccaggttccaaatttttctctccatattcaggtcttctttttctaattaaaatctattctcagataaactatgtgatctgtttcaatgcctaagtaatgtcaaatgataattgtttcacaaataaagaagaatgatcattaatcataagtgaaaaggttaaattggtaaattgtctgaggatcagaattccct

SEQ ID NO: 573133 - DNA, 590 bp, Homo sapiens
ctttcctttataaattacccagtctcagacagttctttatagcattatgaaaacacactattacaccatccaattgagaggtattccctaaataggtggtatgcagggtctaccttccacttacagaagccaaaaggggatggatgttttctcactcaccctggtaaaatatggcattagcctaaaatataaatttggttactcgaatgttcttccttgctgttcttaaccgtaagaaagtgacaaaactatgtgattatgtaacatgtgggtggggggcaaaaatatttaagcatgacatcaarcatgtactggaggcgtgtaactaaaaaatctgggatatactagtactaagacaaggctttatcaaggtgaggaggtgatgcaaacgacattaccaggttccaaatttttctctccatattcaggtcttctttttctaattaaaatctattctcagataaactatgtgatctgtttcaatgcctaagtaatgtcaaatgataattgtttcacaaataaagaagaatgatcattaatcataagtgaaaaggttaaattggtaaattgtctgaggatcagaattccct

SEQ ID NO: 573134 - DNA, 528 bp, Homo sapiens
ttggttactcgaatgttcttccttgctgttcttaaccgtaagaaagtgacaaaactatgtgattatgtaacatgtgggtggggggcaaaaatatttaagcatgacatcaagcatgtactggaggcgtgtaactaaaaaatctgggatatactagtactaagacaaggctttatcaaggtgaggaggtgatgcaaacgacattaccaggttccaaatttttctctccatattcaggtcttctttttctaaktaaaatctattctcagataaactatgtgatctgtttcaatgcctaagtaatgtcaaatgataattgtttcacaaataaagaagaatgatcattaatcataagtgaaaaggttaaattggtaaattgtctgaggatcagaattcccttttcagtgtcctgtgccaccatgtttttgaagcatataccatctgagaagaatctcagtatggtctttgaggacagtctcccctgtgccccacagttggctcagctgaggctgcttgtaattaattatcccc

SEQ ID NO: 573135 - DNA, 590 bp, Homo sapiens
ctttcctttataaattacccagtctcagacagttctttatagcattatgaaaacacactattacaccatccaattgagaggtattccctaaataggtggtatgcagggtctaccttccacttacagaagccaaaaggggatggatgttttctcactcaccctggtaaaatatggcattagcctaaaatataaatttggttactcgaatgttcttccttgctgttcttaaccgtaagaaagtgacaaaactatgtgattatgtaacatgtgggtggggggcaaaaatatttaagcatgacatcaagcatgtactggaggcgtgtaactaaaaaatctgggatatactagtactaagacaaggctttatcaaggtgaggaggtgatgcaaacgacattaccaggttccaaatttttctctccatattcaggtcttctttttctaattaaaatctattctcagataaactatgtgatctgtttcaatgcctaagtaatgtcaaatgataattgtttcasaaataaagaagaatgatcattaatcataagtgaaaaggttaaattggtaaattgtctgaggatcagaattccct

SEQ ID NO: 573136 - DNA, 429 bp, Homo sapiens
gaattcccttttcagtgtcctgtgccaccatgtttttgaagcatataccatctgagaagaatctcagtatggtctttgaggacagtctcccctgtgccccacagttggctcagctgaggctgcttgtaattaattatccccaaattctggatgcatttcaaaatactgaaatgttctgatttttaaactctggcaatgacatttagctttacggaaacatttctttacactgttgcccagaattaccaactgccagaataaattatggacatacattataatcactgtccatttatggatggccacaaagatatctatgttgtggagtgacagtctttcctgtgctcatccaggtgcattgtacaagtatatcataaatgctttaagttaaatgatgttcatttytctgctttaacaccttagaattgg

SEQ ID NO: 573137 - DNA, 614 bp, Homo sapiens
atgaaagagatgcactaatacaaaccaaacccactcctgaatcgagacttcagcattcccacctagcacatgctccattgcacttccttcagtgattaaacagtttaagtacatctgaacttcatcctatggctctgattattgctcattctgggatggagactgagatcagtactctcttttataagggacattttgacaagctactttaatgacactcagagcattttatacttgaaaacccacgatgaagagatatttcagctttccaaggaagttgattctctgagcaaagtggaggctgagaggtctggaggctgaaaacaaacccaacccatctgttcttactaaaagagagatactactgctttaaggggctaaaggctgggcaggaaaaagcaagtatcttctagaatcagtccactttcaactcttacttatatgacaccagtggcttggagagttatattattaagataaattgtttttattrgtaacttcctaaaattcctcactaaagacgagtattaggtatcaaaacatccaattccatagccacttttcaaaatgcctaaagctaaactccttaaacttttgattatcatttgagatat

SEQ ID NO: 573138 - DNA, 645 bp, Homo sapiens
taatttataatatttgttttggcaaagtgatatgaaacatttttagaatcatacatttaatcaattatacagctcactttggaatacagatctcttttgttacatattatacatttccacattgccaggygagccatgtcataagttcttaatatgaaaatatgacagtgaccacatatgaatagcatattaacaatctgtgttttccaaatgaactgacttcacctatcttccaaaagaaaattaaataactataagttatttaaatgtttaactctaagccagagtaattctaaattgatataaactattggtttttatattttaatagtatttgatgaattgattatattatagctattgtcattttagttaatgagttacctaatcttgaaacgcacacatagaatttaaactaaaaatatttttcctaattttagagttgatagctgggatttgttacatgtgactccagtacaccaagggttaaggactatagatatttaactacatgttgagtagtgcagaaggtggagaccaacttgcacagtaagcacaattaagtttcacaattagcccatgggccagataggtttattcttgcaatgtgcagtataaaataattttatataagaaatttaaata

SEQ ID NO: 573139 - DNA, 559 bp, Homo sapiens
tcactgcactccagcctgggcgacagagcgagactccatctcaaaataaataaataaataaataaataaataaataaataaataaagattttcttttktaggtatagacatcaggggagtcatgcagtgactgcctggctgtgaaagatgattatgcggatggagttgtctcgctcaacgtatctcttcttgagcgtgtttacttttaaaaatctagaaattcccttttcagttactatttaaaatttgtaatttgatttctttatacacacaccgtcacacatacaacacataattttatataaaggcaacatagttttttccctaattttttgcctttccctctcataaattccctctatttgcagcccttctctgccctctgttaaatcagactctttcaaatttttccccttactaacataattgtgtataggcgtaaacaaacacaaacacatatgtatatactcctagaaccttattcattatgactagcttttataaatgcaccaaacttttgattatttttcttctctctcaaaagtgccacacagaaatt

SEQ ID NO: 573140 - DNA, 559 bp, Homo sapiens
tcactgcactccagcctgggcgacagagcgagactccatctcaaaataaataaataaataaataaataaataaataaataaataaagattttcttttgtaggtatagacatcaggggagtcatgcagtgactgcctggctgtgaaagatgattatgcggatggagttgtctcgctcaacgtatctcttcttgagcgtgtttacttttaaaaatctagaaattcccttttcagttactatttaaaatttgtaatttgatttctttatacacacaccgtcacacatacaacacataattttatataaaggcaacatagttttttccctaattttttgcctttccctctcataaattccctctatttgcagcccttctctgccctctgttaaatcagactctttcaaatttttccccttactaacataattgtrtataggcgtaaacaaacacaaacacatatgtatatactcctagaaccttattcattatgactagcttttataaatgcaccaaacttttgattatttttcttctctctcaaaagtgccacacagaaatt

SEQ ID NO: 573141 - DNA, 559 bp, Homo sapiens
tcactgcactccagcctgggcgacagagcgagactccatctcaaaataaataaataaataaataaataaataaataaataaataaagattttcttttgtaggtatagacatcaggggagtcatgcagtgactgcctggctgtgaaagatgattatgcggatggagttgtctcgctcaacgtatctcttcttgagcgtgtttacttttaaaaatctagaaattcccttttcagttactatttaaaatttgtaatttgatttctttatacacacaccgtcacacatacaacacataattttatataaaggcaacatagttttttccctaattttttgcctttccctctcataaattccctctatttgcagcccttctctgccctctgttaaatcagactctttcaaatttttccccttactaacataattgtgtataggcrtaaacaaacacaaacacatatgtatatactcctagaaccttattcattatgactagcttttataaatgcaccaaacttttgattatttttcttctctctcaaaagtgccacacagaaatt

SEQ ID NO: 573142 - DNA, 645 bp, Homo sapiens
cggggtttcaccatattggcctggctggtcttgaactcctgaccttgtgatccacccacctcggcctcccaaagtgctgggattacaggcgtaagccactgtgcccagcccagatgcctatttcataccttcttctttgtcctcaaactgaaaattctgccttgccttctaaagccacactgtcagttgatattcctgtgtattaatcagaattatccagagaagccaaaacaactggaaatatatattcatataaatatgttataatattcataacatataaatactatttattttcaataattgcttccttgattatggaggctgmcaattccataatctatatggcaagcaggcaagctggagacccagagaaaagctaatactgcagttcagctctgaagtgcatctgctgctgaattccctcttgctcttgctcttgctccaggaaagtctgtcttttgttctattcaggcctttgaatgcttggacaaggcccacccacattatgaagggcaatctctttacttacaagccaccaattcaaacgcaaatctcatcaaaaaatgccctcataggaacatccagaataatgtttgatcaaacttctgggcactgtgtccagccaaattgatgcataaacct

SEQ ID NO: 573143 - DNA, 576 bp, Homo sapiens
aaaataattaccgatagacctaacaaacgagaaaaacagcaacacaataatagtgggggacttcaatactccactgacagtactagaaaggtcaagacagaacgtcaacaaagaaacaatgaatttaaactataccttggaacaaatggacttaacagatatatacagaacgtttcatccaacaaccccagaatatacattctattcaacagcgcatgcaactttctccaagatagaccatatgacaggccataaaacaagtctcaataagtttaaacaaattgaaattatatcaaacactctctcagaccacagtggaaaaaaactggaaatcaactccaaaagaaaccttcaaaaccatgcaaatacatggaaattaaataacctgctcctgaatgagcactgggacaagaatgaaatcaagatrgaaattttaaaaatcttcaaactgaacgacaataatgacacaacctatcaaaacctctgggatacgggaaaggtggtgctatgaggaaagttcatagccctaaatgcctacatcagaaagactgaaagagcacaaactgacactctaag

SEQ ID NO: 573144 - DNA, 584 bp, Homo sapiens
tttgtgtttgtatgtgtggcaattcctggctacagaaattctctcaaagcaatagcaacaacaaaatagaaacctatttgagtcttaccagcacctaaactaatttaaaacttccaatctagtgccaaaagattagckctggatatttgagcaagtgacacaccctctcatactcaatttcttcatccaaaaacaagggcacaatggtagaactaacttataggtttgtgctcatattaagacgacagaacgtaagcaaagcacttaacacaatgcctatgaaagaattccttaacaaatgttaggtcatggcaataaccactgacatctctccacacccttatgttcattctctgaccatgatgttctacacaaccataagctgctctttcacccagcaggacttaatggggctgccagcttaattagccttgagactgatgtccaagtcccaatttcaagaatgagaaagaaagtctgtctgttttttgtaatcattttggactttggttgacaaatcaaaatatagtgagaacaagttatagaataattacagtcactttggtttttaaatgatttatgcc

SEQ ID NO: 573145 - DNA, 461 bp, Homo sapiens
ttaaaaactgggcaaaggacctaaatagacatttctccaaagaagacataaaaactgccaagaggtttattaaaagatgcccacaacatcactagtcatcagggaaatgcaaagcaaaaccactaggaggtattgcctgttaggacagcccctgtgaaaaacacagacaataataagctgagtgattctgagcaaatcatttgtcttctgtgaatctcagttttcttacatatccattgggaacactagtctttgtaggacctccctcctggggctcttgtgaagatcagattaatggttttwttttttttttatttttgtttttgagacagggtcttgctctgttgcccaggctggagtgcagtggtgtaatcacagctcactgcagccttgacctcccaggctcatgatcctcctgcctcagcctctcaagtagctgggactaaggcatgcaccaccat

SEQ ID NO: 573146 - DNA, 461 bp, Homo sapiens
ttaaaaactgggcaaaggacctaaatagacatttctccaaagaagacataaaaactgccaagaggtttattaaaagatgcccacaacatcactagtcatcagggaaatgcaaagcaaaaccactaggaggtattgcctgttaggacagcccctgtgaaaaacacagacaataataagctgagtgattctgagcaaatcatttgtcttctgtgaatctcagttttcttacatatccattgggaacactagtctttgtaggacctccctcctggggctcttgtgaagatcagattaatggttttattttttttttwtttttgtttttgagacagggtcttgctctgttgcccaggctggagtgcagtggtgtaatcacagctcactgcagccttgacctcccaggctcatgatcctcctgcctcagcctctcaagtagctgggactaaggcatgcaccaccat

SEQ ID NO: 573147 - DNA, 597 bp, Homo sapiens
aatcctcaacaaaatactagcaaaccaaatccaacagcgtgtcaaaaagagaatccaccatgatcaagtgggtttcattaccatggatgcaggggtggtttaacatacctaagtcaataaatgtgatacaccacataaacagaattattaataaaaacaaaaattacatgatcatttccatagatacagaaaaagcatttgacaaaatctagcatctgtttatcattaaaaccctcagcagaatcagcatagaagggacataccttaaggtaataaaagtcatctacaacaaacccacagtcaacattgtattgaacagggaaaagttgaaagcattctccctgagaactggaacaagacaaggatgctmactttcaccacttttattcaacattgtactggaaatcctagtcagagcaatcagagaagagaaagaaataaatggcatccaaatcaataaagaggaagtcaaactgttgctgtttgcggatgatataatcatatacctagaaaaccctaaagactcattcaaaaagcttctagaactggtaagtgaattcagcaatgtttcagaatacaaaattaatgtacataaat

SEQ ID NO: 573148 - DNA, 597 bp, Homo sapiens
aatcctcaacaaaatactagcaaaccaaatccaacagcgtgtcaaaaagagaatccaccatgatcaagtgggtttcattaccatggatgcaggggtggtttaacatacctaagtcaataaatgtgatacaccacataaacagaattattaataaaaacaaaaattacatgatcatttccatagatacagaaaaagcatttgacaaaatctagcatctgtttatcattaaaaccctcagcagaatcagcatagaagggacataccttaaggtaataaaagtcatctacaacaaacccacagtcaacattgtattgaacagggaaaagttgaaagcattctccctgagaactggaacaagacaaggatgctaactttcaccacttttattcaacattgtactggaaatcctagtcagagcaatcagagaagagaaagaaataaakggcatccaaatcaataaagaggaagtcaaactgttgctgtttgcggatgatataatcatatacctagaaaaccctaaagactcattcaaaaagcttctagaactggtaagtgaattcagcaatgtttcagaatacaaaattaatgtacataaat

SEQ ID NO: 573149 - DNA, 591 bp, Homo sapiens
aaacctcaattcttgacttccgtgtagctgcaggctcaatgcctcatggaarctgccaaggcttgggacttgcaccccctgaagccacggctcatgctgtacgttggcccctttcagtcatggctggagcatctgtgactcagggcaccaagttcctaggctgcacacagtacaaggacactgggcctggcccgcaaaaccatattttcctcctaggcctccgggcctgtgatgggaggagctgccatgaagacctgtgacgtgccctggagacattttccccagtgtcttggggatcaacattcggctccccattacttatgcaaatttctgcagccagcttgaatttgtccccaggaaatgggattttctttgcattgtcaggttgcaaattttctgaacttttatgctttacttcccacataaaactgaatgcctttaacagcactcaagtcacctcttgaatgctttgctgcttagaaatttcttctgctagataccctaaatcatctctctccagttcaaatttccacaaatctctagggcagggacaaaatgccaccagtcttttttctaaaacataacaagagt

SEQ ID NO: 573150 - DNA, 591 bp, Homo sapiens
aaacctcaattcttgacttccgtgtagctgcaggctcaatgcctcatggaaactgccaaggcttgggacttgcaccccctgaagccacggctcatgctgtacgttggcccctttcagtcatggctggagcatctgtgactcagggcaccaagttcytaggctgcacacagtacaaggacactgggcctggcccgcaaaaccatattttcctcctaggcctccgggcctgtgatgggaggagctgccatgaagacctgtgacgtgccctggagacattttccccagtgtcttggggatcaacattcggctccccattacttatgcaaatttctgcagccagcttgaatttgtccccaggaaatgggattttctttgcattgtcaggttgcaaattttctgaacttttatgctttacttcccacataaaactgaatgcctttaacagcactcaagtcacctcttgaatgctttgctgcttagaaatttcttctgctagataccctaaatcatctctctccagttcaaatttccacaaatctctagggcagggacaaaatgccaccagtcttttttctaaaacataacaagagt

SEQ ID NO: 573151 - DNA, 591 bp, Homo sapiens
aaacctcaattcttgacttccgtgtagctgcaggctcaatgcctcatggaaactgccaaggcttgggacttgcaccccctgaagccacggctcatgctgtacgttggcccctttcagtcatggctggagcatctgtgactcagggcaccaagttcctaggctgcacacagtacaaggacactgggcctggcccgcaaaaccatattttcctcctaggcctccgggcctgtgatgggaggagctgccatgaagacctgtgacrtgccctggagacattttccccagtgtcttggggatcaacattcggctccccattacttatgcaaatttctgcagccagcttgaatttgtccccaggaaatgggattttctttgcattgtcaggttgcaaattttctgaacttttatgctttacttcccacataaaactgaatgcctttaacagcactcaagtcacctcttgaatgctttgctgcttagaaatttcttctgctagataccctaaatcatctctctccagttcaaatttccacaaatctctagggcagggacaaaatgccaccagtcttttttctaaaacataacaagagt

SEQ ID NO: 573152 - DNA, 591 bp, Homo sapiens
aaacctcaattcttgacttccgtgtagctgcaggctcaatgcctcatggaaactgccaaggcttgggacttgcaccccctgaagccacggctcatgctgtacgttggcccctttcagtcatggctggagcatctgtgactcagggcaccaagttcctaggctgcacacagtacaaggacactgggcctggcccgcaaaaccatattttcctcctaggcctccgggcctgtgatgggaggagctgccatgaagacctgtgacgtgccctggagacattttccccagtgtcttggggatcaacattcggctccccattacttatgcaaatttctgcagccrgcttgaatttgtccccaggaaatgggattttctttgcattgtcaggttgcaaattttctgaacttttatgctttacttcccacataaaactgaatgcctttaacagcactcaagtcacctcttgaatgctttgctgcttagaaatttcttctgctagataccctaaatcatctctctccagttcaaatttccacaaatctctagggcagggacaaaatgccaccagtcttttttctaaaacataacaagagt

SEQ ID NO: 573153 - DNA, 584 bp, Homo sapiens
tgcttaaatcaaggaattactatcaaggccattatccttagcaaactaaagcaggaacaaaaaaccaaatactgcatgttctcacttataagtgggagccaaatgatgagaacacatggatatatatagaggggaacaacacacactggagcctaccaaaaggtggagggtgggaggagggagaatatcaggaaaaataactaatgggtactaggrttaatacctggtttatgaaataatctgtacacaacaaaccctcatgatacaagtttacctatttaacaaacctgcacatgtgcccctgaacttaaaagttaaaaaagataaccacaatagtagtagcaaatatactacatggtagggttgcaaacttaagagtcaaaatataaagtgattttaaagtgaaaatgaaaggtagctaaaattgctcttgaatatcctgttgcaaaacttcaagttgtgggaagttagtttcaaagaggtttaatatagcacttcccacctgccttgggataatttttttcagttaaaaagtagtataaaagtataaaaaatagttgtcttgcatttatgggtgaagttgt

SEQ ID NO: 573154 - DNA, 507 bp, Homo sapiens
gtgcaccaacacacctggctaatttttgtgtttttagtagagacagtgtttttccatgttggtcaggctggtcccgaactcctgacctcaagtgttccatctgcctcagccccttaaagtgctggggttacagggatgagccactatgcctggctgggaaccagttcttaacaaaagcatagctaaatgacctctagtaatgtcacagatctacagtcagtgaattcatttgatcatcattatccttatccccaatgaccttgtaaagtattaaggaaaaaccgggagatttttattaatcactgcattctagaattcacactttaatrtttctgaaatcatgatgcttgttacagtcaatatgcatatttcagtgtttcctttttccctaaaattatgttatttttcaaaataatggcaagaatgaatatcagtgacaccaccaagtttgaggaaaagatagtttgtgttatcataattcttctctccatcatcatccttcctgtg

SEQ ID NO: 573155 - DNA, 232 bp, Homo sapiens
cattgtttgtacaatatatatatagactaagaaggaaagtgttgataacatgactgccctatattgggagagtcatagaatatagttacrtacaaaaacatctagctactagcactcatatttgtagaaaactgtaatcacattttaaataaagatttaaaggaatattaactatgctaatccttataacttttgtaagattagaaaaaaagaaaatatgtgagaatgtatt

SEQ ID NO: 573156 - DNA, 268 bp, Homo sapiens
ccctttccccctttcccctttccccacttycccactcccccccttccccctttccccgcttccttccttccttccttccatccttccttccttcttccctccctccctctctccctccctccctccctttcttccttccttcctgcctttagaagcagcctctgcctgcatggtaatgtgctgagggcaatgctattgtctgaatgctctgaaaccagagtaactagcttaaaggagacttagggaacacacttggtccacaaagtga

SEQ ID NO: 573157 - DNA, 589 bp, Homo sapiens
tttgtggcaagttttaatttactaaataataatgatataagtgaatttcactgctacattcaagtccatcagcccagagagcatctcacattcactgtttctcagtatgattagatccgagtgggaataacaggagactttcratattttctggtcaatcgattgcattgtttcaatgatatttctttggactatgtatgggttattgtgcccatagccatggagcatttgtaatattattcaaaataaggttcacagtgatattcatttctaagtaaaaaagaatcctgttaaatagaagccacacaattagaaagctttgtcagaattttccgtgtatgtatggaccttaattattcctgcttgaaagatgaacttgaggttctgtcaaatcctaaattgcctattgaattatcagtatgaatttggaataatcagtatattcatattctactgaatgcaaataatttgaaaatatgttctacatagattatttatatcaatgctgaaacagatctttcagtgaagcatagctgtttggaatagaaactctcatagctttaagtcattcagacatgagttaaaatct

SEQ ID NO: 573158 - DNA, 524 bp, Homo sapiens
ggatgggcaggtagtcttcccttgaggtctgaccagctcttccctgaagtcaagccatctctccaaaatcaagccatctctcctctgaagtccaaccatctctaagaagtcaagttgcctctcctcagtcaagccacctctctctcctatagcaactgagtctagggtctttataggtacrggatggaggatggggtgggccatatgtagttttggagaaggcaacatttgattggcaaaaaggcattattcagaaagaacaaatcaggagagagcaggcaaacaggaatagaagctgttgctttggacagtggcttttgggctttttggcttgaagatgggcttttgccaggaacctgctcctgtctgcctcctgcctctagcatttgttttgttgttgttgttgttgagttgtttgagttctttgtgtgtatagcagtctcctgttggatgctagtttgcaaatattttctcccattctataggttttctgttcactctgttgattatttctttttctatgc

SEQ ID NO: 573159 - DNA, 544 bp, Homo sapiens
tgctttataagagcaagaagktagaaatgtgagcaagagagaaaatgagaaagagagcaaataggttagaaatgtgagcaagagagagaatgagagaaagagagagctagagagaaagaacaaaacgaaagtcgctgtctttcatcatttaattttaacattgatatcccatctcttttgccacattctattcattaaaagaaagccaaggagagggtattacacaggagcataagtaacaggagtcagagagcattgggaaccatttcagaagctgcctaatgtcatctcctagaatttattaaagactagggaataatatatgtataaattcattttatgcttataaattcattttatacaagtaaacaagttttttacaaaaatagtcatcattgtgaagaaatgtcttaaaaagttttccttaaataaatattttgctctaacaatatcatttaaaaacaattttatttgtatattgtctcatagatgccatacttggtaatacgcatttaggcccagtttaaatctagccatcagtcaa

SEQ ID NO: 573160 - DNA, 327 bp, Homo sapiens
aagctttccagggagaagtgatgctcaaactgagtatggaataacaagcgattatttgggtagaaaagtggaaagggttcagtcagaagcaacaagaagccagcagagggaagagatcatagggtgttccagcagccgaggcatgatccttgaaccctccttctcctttacccccaacatccacctggacaccaagtcctgtccatgctacttcctcaccatcttccaacctgcccactcctttccacctctgccgccctctggatttcttgcctctcttactacaccagctttgcagtcattstcacacccctgctgaaacccctt

SEQ ID NO: 573161 - DNA, 602 bp, Homo sapiens
atttggaatattcactccaagacagcaattagcaataaatccaggtctttgagctggtaataatatctacatgtatacagtattgattgagctcttatgatatgctaggcattatcctgcaggcttcataaagattgtattatttaatgttcactatgatcttatcagattggggctgctattcttcacacttaatgaatggggaaacaaggctgagaaaatttaagtaaaatttaaattttccgaactcacaaagctgctcatgktaaaaacaaaatttaaaccaaagtagtccatctgcagagctgtgcatctatcaaaaaaactatactgctcccctacatgtggtctctgtcccaatgacatggtgaatacttttcattttgcaatgaatttcacttagtgtaggttaagaaccaggattttggagatttagtactgcctagattcaatctcagttctgtcatctgttgttagaatcttggccaagttgattaacctctgtgccttagtttcctcgtctataaaatggggataataatggtatcactctcacaaagttgtgatgattaaatgagaaaacataagcaaaggtcttagaa

SEQ ID NO: 573162 - DNA, 485 bp, Homo sapiens
acagtgactgtaatagtcaactttgcataaggtgaacagattaatggtgaggaggtgaaaagataaaaagcaggaaaataaaatacatgagcaaaaatgcaataataatccatatatacttatatatgcatataaaggatacaaagcccttttttaaactattgcaaatgctgaacaattctcaaagtaagggagtaaacctctaccagcaaattactgaatcatgctttagaataccatgatttccttgcgrcaacagactgtgctccaagaagaacatataaaagtcatcaaaacagatttaggaaacatactcctataaatgagtatactgtgagtgaaatctaggtagaaaggagagaacagactccttcaagttctgacaaaggcagagagtgtccacttagaagagctgttaaagaaaatccaaggtagatacaggtagaataaatatgagaaagtaaagaaaaaatcacaaaaaaata

SEQ ID NO: 573163 - DNA, 551 bp, Homo sapiens
aagctagtaaatgatatatacatacaggctttaaaaagtgctgcaatatttcttgaaatctagaaaatcacrcatatagtttagagctctgtgtatgcccagaactgcctgcatctctacaaagatatgagaagaccttaatctctgaactcgaagatctgtcctaataaaaagtgaaggctaggacagtggtatcatcccccttcctgagagttcaagatgtgctccaatatacatgcatgcatacataacttctcagaaaagcttgtcagagttattggttccaagtgtttaagaaaatgtatgtaataccactgttagactactaacacataaaagtacagactttagtggtcatgcatgacagaagatttaaaacattaattagaaaattcactagacagtctgccatcaacaacaataaaaataaacactaacaaaaacaaatcctgtggagggaatctgatttcctgagttgccacattatattaattaaatgtccagttgacaacaaaataatacgtgcaaaacaacaagaaaacatgacccat

SEQ ID NO: 573164 - DNA, 551 bp, Homo sapiens
aagctagtaaatgatatatacatacaggctttaaaaagtgctgcaatatttcttgaaatctagaaaatcacgcatatagtttagagctctgtgtatgcccagaactgcctgcatctctacaaagatatgagaagaccttaatctctgaactcgaagatctgtcctaataaaaagtgaaggctaggacagtggtatcakcccccttcctgagagttcaagatgtgctccaatatacatgcatgcatacataacttctcagaaaagcttgtcagagttattggttccaagtgtttaagaaaatgtatgtaataccactgttagactactaacacataaaagtacagactttagtggtcatgcatgacagaagatttaaaacattaattagaaaattcactagacagtctgccatcaacaacaataaaaataaacactaacaaaaacaaatcctgtggagggaatctgatttcctgagttgccacattatattaattaaatgtccagttgacaacaaaataatacgtgcaaaacaacaagaaaacatgacccat

SEQ ID NO: 573165 - DNA, 551 bp, Homo sapiens
aagctagtaaatgatatatacatacaggctttaaaaagtgctgcaatatttcttgaaatctagaaaatcacgcatatagtttagagctctgtgtatgcccagaactgcctgcatctctacaaagatatgagaagaccttaatctctgaactcgaagatctgtcctaataaaaagtgaaggctaggacagtggtatcatcccccttcctgagagttcaagatgtgctccaatatacatgcatgcatacataacttctcagaaaagcttgtcagagttattggttccaagtgtttaagaaaatgtatgtaataccactgttagactactaacacataaaagtacagactttagtggtcatgcatgacagaagatttaaaacattaattagaaaattcactagacagtctgccatcaacaacaataaaaataaacactaacaaaaacaaatcctgtggagggaatctgatttcctgagttgccacattatattaattaaatgtccagttgacaacaaaataatacgtgcaaarcaacaagaaaacatgacccat

SEQ ID NO: 573166 - DNA, 549 bp, Homo sapiens
aggatcacttgtagaaaaaccttctttatttgagttttttcaacgatggaaaatagaaaatatttctatccactataaaataaataataacatgagattgggtttcagttaattcaatgtagaaagcaatattttttcatgaaaaatgaatgatagctttcctagtgacagaagataaagaattatatcccagactgtaagttattcctgtcttttagcatcaacacagaatcaagaaggggaaaaagggtgaaatattaaaagataagactctgcttatttaaccttgagcagtcccagagttaaactctcttttcagtgatgttcctggtctatatttcataaaaacrtacatatctaaaggcagtcttcatcagaaaagaggaatctcagagcagtatctcacaggagggaaatcagatataagaaagttctaggatccttgttcatccatgagaattaaacagtaatgggttttgcacattggttggtgatacgaatattggaaggactggctattggtcagccctagaggaaggaattctgagt

SEQ ID NO: 573167 - DNA, 404 bp, Homo sapiens
tttgaaaattctctgaagcaatataactcatctaatcatattattattattttgtgaaatattgttactattyataaaaatttatgtcagcatagtacacatttattactactatttaagtgatttcagaagtaatttttaaattctctatcttaatttctaatagagtaaatattaatctatcattttaaggtaatagtaacaaaactgcccttttggatctctatcaatatttagtgtgtaagtgtttcctaagaccaaagaataggatagccacttctctggagcatcaaacctcaaaccctagttattatgaattatatcttgtttaaattttggtttttagttccttcaaaattctgattttgagtttcctcttttatgtctttcattgaggatttttc

SEQ ID NO: 573168 - DNA, 404 bp, Homo sapiens
tttgaaaattctctgaagcaatataactcatctaatcatattattattattttgtgaaatattgttactattcataaaaatttatgtcagcatagtacacatttattactactatttaagtgatttcagaagtaatttttaaattctctatsttaatttctaatagagtaaatattaatctatcattttaaggtaatagtaacaaaactgcccttttggatctctatcaatatttagtgtgtaagtgtttcctaagaccaaagaataggatagccacttctctggagcatcaaacctcaaaccctagttattatgaattatatcttgtttaaattttggtttttagttccttcaaaattctgattttgagtttcctcttttatgtctttcattgaggatttttc

SEQ ID NO: 573169 - DNA, 611 bp, Homo sapiens
ataggaatataaaaaagagttcaaaggttaagaatacacaaagtcaaccaagtgaacagacaacccacagaatcgagaaaacattgcaaactacccatctgacaaataattaataaccaggatataaaagcagctcaaacagctctaaaggaaaaaaaaatcaataatctgattagaaaatggacaaaatatttgaatagatatttctcaaggaaagacatktaaatgtcaaacaggcatatgaaaaagtgctcaacatcgtcggtcatcttagaaatgcaaatcaaaactacaataagataacatttcaccccagttaaaatggcttatctccaaaagatagttgataaatgctggcaagtatgtagagaaaagggaacccttgtacactgttggtgggagtgtaaaatagtacagtcactatgaagaagagtttggaggttcctcaaaacagtaaaattagagctaccatatgctccagcaattccactgctaggtatataccccccaaaagaaaatcagtgtatctaagatagatgtgcactctcatgtttttgcagcactgttcacaatagccaagatgtggaagcaacctaagtgtccatcaacag

SEQ ID NO: 573170 - DNA, 611 bp, Homo sapiens
ataggaatataaaaaagagttcaaaggttaagaatacacaaagtcaaccaagtgaacagacaacccacagaatcgagaaaacattgcaaactacccatctgacaaataattaataaccaggatataaaagcagctcaaacagctctaaaggaaaaaaaaatcaataatctgattagaaaatggacaaaatatttgaatagatatttctcaaggaaagacatttaaatgtcaaacaggcatatgaaaaagtgctcaacatcgtcggtcatcttagaaatgcaaatcaaaactacaataagataacatttcaccccagttaaaatggcttatctccaaaagatagttgataaatgctggcaagtatgtagagaaaagggaacccttgtacactgttggtgggagtgtaaaatagtacartcactatgaagaagagtttggaggttcctcaaaacagtaaaattagagctaccatatgctccagcaattccactgctaggtatataccccccaaaagaaaatcagtgtatctaagatagatgtgcactctcatgtttttgcagcactgttcacaatagccaagatgtggaagcaacctaagtgtccatcaacag

SEQ ID NO: 573171 - DNA, 488 bp, Homo sapiens
tgttctcactcataaatgggagttgaacaatgagaatatatggacatgggggaacatcacacaccggggcctgtaggggggtggggggaaagrggagggaaagcattaggataaatccctaatgcatgtggggcttaaaacctaaatgacacgttgatgggtgcagcaaatcaccatggcatatgtatacctatgtaacaaacctgcactttatgcacatgtatcccagaacttagagtataattttttaaaagtcttgtttacatagaaaaaaagaatttacaaagctgtactacatgatatctcttataatctgttttaacatcattgtgcaccatttttgtgagtattaataaatatatgcacccatgaaaccacaataaaatcaacatacagaacatttccataatacacaaatactccttttgcactattgtactcagtcactttctacatgtttagcttcaaataatcaacaatgtgctttc

SEQ ID NO: 573172 - DNA, 601 bp, Homo sapiens
tgatgatttttgtcttgtcccctgtcttgtaaaacactcaatgtctcaccattaagtttgatggagctatatagattttactaagattcttttcatcaagctaagaatgcttccttctatttgtgttggctaaatgttatcattaaggggtttgaattttttttggtatgctttgtaaaaatctgtttatatatcttgcatatttttctattttattttatttatatgatgaattatctgtattactttgcttttatactgctataaagaaatacctgagatgggataatttataaaataaagaggtttaattgactcactgtaccacatgactggagaggcttcaggaaacttagaatcatgaaggaaggggaagcaggcacctcttatatagcagcaggcaagagagagrgcagggaaacccatcacttataaaaccatcagatctcgtgagaactcactcactatcataagaacagcatagggaaactgcccccgtaatcccatcacctcccaccaggtccctcctgcaacacctggggattacagttcaaggtgagatttgagtggggacacagagccaagccatattaattacatt

SEQ ID NO: 573173 - DNA, 471 bp, Homo sapiens
taaagcttaaacatttacaaaaataggctgggcatggtgggttacacctgtaatatcagcactttgggaggctgaggtgggcacatcacgaggtcaggagttcgagaccagcctgaccaacatggtgaaaccccgtctctactaaaaatacaaaaattakctgggagtggtggcaagtgcctgtaatcccagctactcatgaggtggaagtaggagaatcgcttgaactcaggaagcggaggttgcagtgagcccagttagtgccgttgcactctatcctgggtgacagagtgagactccgtctcaaaataaataaaatctctgtgagaaaaagatgtgtgtgtgtgtgtgtgtgtgtgtgtgtctgtgtgtgcatgtgtgtgtgtgtgtgtaatttcctaacatttctgggcaccaatgatctctttaatatctacagctctctttttatatagctacactacacactgt

SEQ ID NO: 573174 - DNA, 453 bp, Homo sapiens
gattcatgacaagtagtagcagaaataatagccttcgtgcagacgagaatttgcttagggatgtctcgatctgcttttggaaaagctccaggaatggagaaggcactacaatcaggttgccactggagtagaaaaggatttaagacaccagaataaaattaccttccttttttttttgagatggagtctcgctctgtttcccaggctggagtgcagtggcgtgatcttggctcactgcaacctccacctcccagactcaagcgattcttctacctcagcctcctgagtagctgggattacaggcgcctgccaacacaccgagctaatttttgtattttgcatttttacaaatatggtttcrccatattggccgaaggataaaattatcttctaatcctataggaatattggaatctgggttttttttgttttgttttccttttattcttatta

SEQ ID NO: 573175 - DNA, 502 bp, Homo sapiens
ttcccatgcccggcaattaggtagagcacctattggtatttccacgaaggctgcacacagtggagtagaagtgagtcttccaaaggaaactgaagatgcttctaaccagaaaaaggagaatggatggggkattctccaaagctacagatgtctcctctagttaaatatatcacaaatagtgttgatgtaaaacacatgtaaaaaatatattgattttatttcaccactgtcttctaattaaagtttttaggtcattactgaatgcttccaaatagctttttttttttacaaaaatattatcttcatatgtttttgacaaataaaaattgtaaatatttatggtatacagcatgatattttgatatattgtgaaataatcaccacaatcaggctaaataacatgtctctcacttcacattgttatttttatgtgcgtggggagaacatttaagctctgatctcagcattttcaagtgtacaatacattattattaactatcat

SEQ ID NO: 573176 - DNA, 515 bp, Homo sapiens
gttcccatgcccggcaattaggtagagcacctattggtatttccacgaaggctgcacacagtggagtagaagtgagtcttccaaaggaaactgaagatgcttctaaccagaaaaaggagaatggatgggggattctccaaagctacagatgtctcctctagttaaatatatcacaaatagtgttgatgtaaaacacatgtaaaaaatatattgattttatttcaccactgtcttctaattaaagtttttaggtcattactgaatgcttccaaatagctttttttttttacaaaaatattatcttcatatgtttttgacaaataaaaattgtaaatatttatggtatacagcatgatattttgatatattgtgaaataatcaccacaatcaggctaaataacatgtctctcacttcacattgttatttttatgtgcgtggggagaacatttaagctctgatctcagcattttcaagtrtacaatacattattattaactatcatcaccatgctgta

SEQ ID NO: 573177 - DNA, 590 bp, Homo sapiens
atttacagggtatattgctgattaagatttatttttcttttaaaaagtgacaaaatgataattaagctctcaaacacaaagtcattcccaacttgtgatatggtgtgatcacatgggatttcctaatttaataccaatcacacatttgaatgggctggtataaaatgaacttacacactggttgtcacaattgctgacgataggtgtgaatatataggcgaaaagtatggctcatctgaaaacacatgagtttatccaaaacttcataaatatctttatttgagtggaattacttcatcaaagtgctatcagcacatagaaatagaaatgaactatgtggctaytgatttcaagcactaggaattggcaaaatgtttgttttagatgatggggcaaaacttgcagatatttaaaaatacataaaaataaactaggtgctacaggccacagtaaacctcacctgatcccattattactcattttactttgaatatataaataagtcttgataattttcagctttccttaaaatataaagtattgataattttcagttttgtgtgtgtgtgtgtgtgtgtgtgtgtgtgtgt

SEQ ID NO: 573178 - DNA, 673 bp, Homo sapiens
caatagtttaagaaatgtttttttcacccctagtcagtaatctcaccctagcattgcatagtttcctttaccttaagagatgagtcaatacctcagtaggcatagaagtgagtttttgtctttctaaagatcttattaatagcaccccttttcactcagagaattgcctcagttttgatgatacgttttatgatcacctatgaaattctcatctcttgacatgtactcttagattttataggttcatcttctcaaatgtctgctttcaggtacagcatggctatcagaaggccataatcawattttgttcactatattttatattttctgtactattggtgcaactaaggtgttgctgcctacagtcccagagttttttctctgtatttgtccattctcacaccgctataaagacatacctgagattgggtaatttataaagaaaagaggtttaatcagctcacagctctgcaggttgtacagatttctgcttctggggaggcatcaggaaacttcgtcatgatggaaggcaaaagaaagcaagcacaccttcacatgactgacaggagagagaaagagtgcaaaggaggaagtgctacacactttgaaataaccagatctcatgagaaatctattaggagaacagaaagaggaaagtcctgcccaatgattc

SEQ ID NO: 573179 - DNA, 609 bp, Homo sapiens
aagcaagctgagatacaggcaggctcctccctcaaatcttagtaatcaatcatctgtataatatctgcatagtcatcatactatgatgacaagagccatgttttccctattcactactattcccagtgctcaacagtttctaggaaattgcgttagcaaatatttgctaaatgacgtaaaagggaagctgacacatgaacaacccatgcctcattcttcctggtgaaacagaaaattggaaaaagactttcaakcaatactaaaattgtatgccattcactagatttaatataataaagacaatattattaatgaattatgtaatatataaatgaaatattatattatataaaagaatatagtacattaattatataatctacaaaatagtttacccctaaaaattatcattttcatttatctatattcacattcttgaatttatattcaagaaataattacttctttttttgtttcctttgaaacagagtcttgctctgtcgcccaggctagcgtacagaggcatgatctcggctcaatgcaacctctgcttcccaggttcaagtgattgtcttacctcagcctcctgagtagctgggattacaggca

SEQ ID NO: 573180 - DNA, 591 bp, Homo sapiens
ttactctctactgtgagtttcagttcatgggaaactttagcaaatagaaaatagaaaaatttagyaaatagaaaatagaaaagagaaaatttgtctttctcttggagagtatctgctttctgaggcagctacagtcctgtatcttagtcagcacctattcctgtcttgatttctctttttctgtatccatctagttcccctaaaacacacactgcagaacttagagaggagctgaatgaaatgactgtggggaagttaagctatgatagagagagatcacaggcagaactcatgaacagatgagacctaggagcggcagtacttgtggactgtaacttatcatacttgattccagtatcagagctccacatactaaacattcagttaggaattgtgcacatcaaaccgcttatgcagtaaaataagctttctaaaaatactcagtgctgatgagtatgcaatgaaatggcccttccagttaatttgtatttacaattataaaatggtacatgttcaagtacttctatcttaaaagcctggagacaaatgtatattaatattcattttttcttcagatgttagaaagtcaag

SEQ ID NO: 573181 - DNA, 515 bp, Homo sapiens
tttatacatatttaattgtattataaaactttttaaatttaatagtaaaagaaaaaagaaagaagggaaaaaatcatatactttaaatggaagtttctagaggctcattatatagtgttgtgggagcacaaggacctgggattaagtcatattcactgatatataaacttttaatttttttctggatgaagaagataaagaaaggagggtaaaagttggtgawgatgaacggtatgagaaataaaatgttaacaaaataacataagctttgccatagaccacaagatcttgccttgcgtttacttgaattactagaggcaaattgagtttcatttttctcattgttgtgtcattgttcgcttatcctctcctgatgaggttttgagctctgtcatatttgtgcgtcagtaatgcataccacactgctgcacacagatgtttagaacatcagttaaattcaactttcataagtgagtgaataaattgccagggtatgagattggtgacaattttaa

SEQ ID NO: 573182 - DNA, 428 bp, Homo sapiens
gggcttgggaaaaggggaaaagaagaacatttttatcatcaccctgggtctttttggcggtaaaacaaacaaaaacatcctcctactgttgcacaaaggaagcattttggaacaaatggtgcaaagtatttgtaggagaagttatatacctcctgaaattctgcactctcatgcatttgtacagtatctgattagtaaaacaaagctgaggacargagaaacctttctgtattcctgcccccacacaattaaagaacataaatacttccagatgtaaggtgataaccaaataaagactgatgtttcctactagagaattatgttagaaattttaacgggcatgcatcttcaaaagagttccttagttcaatggttctcaagccttagcatgcatcaaaatcacttaaagagattgtgaaaacacagat

SEQ ID NO: 573183 - DNA, 584 bp, Homo sapiens
gagatggagaagaaataataaatgtagacaaaatgaaattggcatctcactgaatatagggttttagacagtccttttgaaaactctcattgtttgtgtggaatattggctagtttcggcataaaacaacaacaattaacaatacgaacatcaaaagctttatcttggtgttcaaaacatactgcttaaactatatgtagtgttttcaatgtgatattaaatttacctacattaccaaacaacacccactaagaagtgaatgtatcaagaagctatccaacataaagattcaatttgggtaacggaatgcacaacaaatcagcatgaattttgtgtactttctaccataataaagaattatctttcaaaaaagraaaactggcaaaacatttgttggaagagccctttaagctaagtgctaagtacaattcattccaacacatttcagtattcatctttttcaacaatctcatccaaataatcagctgtcattatatcagaagacaaatatatccatcaagaggatgttagaagaaaagcagagagcaagacaaatgtctaaaagtttgggacaaaacacagta

SEQ ID NO: 573184 - DNA, 493 bp, Homo sapiens
cccaggctggagtgcagtggtgcaatcatagctcattgcagccttgaactcctgggctcaagtgattcacctgcctcagcctcttgagtggctgtgttgcccaggctggttgtgaactcctggcttgagggatcctccctcctcagactcccaatatgctgggattacaggcatgagccactgcatccagcctaccttaatttttgtatcttaattattagaggttcarctttttaaaaagatatttacatttttattttctctcgggatgtctctcttctaaaaagtggagatactactattttcacttttattcttgggtcatgcctttctgtgaagtcaaaaccaaattttggtctctcttgatgatgcgagcccttatgggttagcctttctattctatccactaggaaagcatcagaatcttccctacctaatgaagctttttatagaaaacagctctactccaaccctttcataaacaggggtgaca

SEQ ID NO: 573185 - DNA, 414 bp, Homo sapiens
aataagctgtgggcgtgaaaagactggcggcagggaaaacacaggtgtaaggtatgttactgaagtctagttactagggttaatgtgtggttactggagtgatgcacagaggtccaaatgatttctggaaagctttcaatcacaagcaagtcatgaaatcacagactagggaaataaacctaactatctatgtttcggttgtatctccaaggaaaacaaaggagcaaaaaatttatgtagaattttaagggaagaatacattgtttcttttattttttttatttttttgagtcagagtcttgctctgtcacccaggctggagtgcaatggtrtggtcttggctcactgcaacctccaccttctgggttcaagcagttctcctgcctcagtctcccgagtagctgggattacagg

SEQ ID NO: 573186 - DNA, 396 bp, Homo sapiens
aaatctgctgttaatctgataggttcccctttataggttacctgatgcttttgcctcacagctgttaaggctctttcttttatgtttaccttasatagcctgatgactatgcctaggtgataatctttttgtgatgaattacccaggtgttctttgaacttcttgtatttggatgtctagacctgtaacaaggccagggaaggtttccttaattattccctcaaagacatttcccaaacttttagatttcttttcttcctcaggaacaccaattattcttagatttagttgtttaacataattccacacttcttagaggctttgctcatttttaaaaaaaattcctctttttttggctttgtcagattggattaatttaaaagccatgtctttgag

SEQ ID NO: 573187 - DNA, 608 bp, Homo sapiens
atggtaaaatcagtaactgagctatctttgatccagggggaggaatatgcagacctttacattccatcataaccaatatctcacyctgataatcactatcagttaccccattgggcacattaattccttgactgggtaggctagactgccctaggactaaccccactgttcccagaggcactgggccccagatcccaattgcaacacttttagagtcttcttcttttagcactaattcactggggcagagtaagtccagtcctgtgctcccagttgtggccgctctaaaagagaggactatggacttcccatttgaccaaggaaagctgctggcattgccccagttgggagtggtgcctggagctgacccctcatgaagcttctgactggtttcttatggggttgccatttttatccaatttagacctgcattgatctgcccaatgcttccccttcctactttggggacatatagaagttaccttgatctttacttgatcttagttaccttgatctttactataatgatattcccttgttatatgtcctggctctcctcatagaacacaattttggtctctctcccttttcactttaggaggccttaa

SEQ ID NO: 573188 - DNA, 406 bp, Homo sapiens
aaaagttgggatttcaggctaagtatacccgtcatattaataaataattgcatcttcatattgtatgattgatgctttttgaaaataaatctgaatataaattattatataatgaaacacaagagtatgtgatatttgtgctgatatgcattaaaaataatttattaaaaataactgatgtagtcacactaaggcatcaatctggtctttggtatatgaattttttttagttcaaaaatatgtttatatctaaaacaatgattatagaaaatagacacatttatccagttaagaataaatttatgtgaataaatgttgttcttaaaattgtctctcttgtcattttatttttgttaagatgaacaaatcaataaaattmtatgaatccaacaatctaagctgaaat

SEQ ID NO: 573189 - DNA, 577 bp, Homo sapiens
tgcccataattccaaaggtcagtgttgctccaacctcagcctccctgccagccatttctaccacttcatcccccagagaggaggggttggggactcatcttcactcaatgccaactctcagagcaatgaggaaacaacctcacatttcactggcccgctatggggctgcagggaattcactacagacytctgggcctccatctcctctttggtaaactgaggaaccagctcagaacttgcaaacgggcagccaaaaccagaccctcagacgtgctttgggtttgtctgtttgtttgcattatgatttttgtttgttttggttccttcatattgtagctcacacagtgcttgcttgcttgctttatttatttatttattttattttatttttattgagatggggtctcgctctgttgctcaggctggagtgtggtggcactatcttggttcactgcagccttgactgcccaggctcaaacaatcctccgacctcagcctcctgggtagctgggactacaggcgtgtgcttgccacactgggctaaacttccacacagtgttttgaaaattgcaaatcg

SEQ ID NO: 573190 - DNA, 577 bp, Homo sapiens
tgcccataattccaaaggtcagtgttgctccaacctcagcctccctgccagccatttctaccacttcatcccccagagaggaggggttggggactcatcttcactcaatgccaactctcagagcaatgaggaaacaacctcacatttcactggcccgctatggggctgcagggaattcactacagacctctgggcctccatctcctctttggtaaactgaggaaccagctcagaacttgcaaacgggcagccaaaaccagaccctcagacgtgctttgggtttgtctgtttgtttgcattatgatttttgtttgttttggttccttcatattgtagctcacacagtgcttgcttgcttgctttatttatttatttattttattttatttttattgagatggggtctcgctctgttgctcaggctggagtgyggtggcactatcttggttcactgcagccttgactgcccaggctcaaacaatcctccgacctcagcctcctgggtagctgggactacaggcgtgtgcttgccacactgggctaaacttccacacagtgttttgaaaattgcaaatcg

SEQ ID NO: 573191 - DNA, 597 bp, Homo sapiens
ttggaaaagaagtcaaattagctatgttcacagatgacatgatcttaaacttagaaaaacttaaagactccatcagaaaactgatagaactgataaatgaattctgtaacattgcaggatacaaaatcaacatacatgcatgccaacagcaaacaatatttttaaaagcaagaaataaattctatttataatagctataaagaatataggctgggtgcagtggctcacgcctgcaatcccagcawtttgggaggctgaggtgggtggatcacctgagatcagtagttcaagactggccaacatggtgaaaccccatctctacttaaaatacaaaaaaaaaaaaaaatttagccgggagtggttgtgcaagcctataatcccagctactcaggaggctgaggcaggaaaatcacttgaacctggaaagcggaggttgcagtgagccaggattgtaccactgcactccagcctgggcaacagagagagactccatcaaaaaaaaaaaaaaaaagaaagaaagaaagaaaagaaaagaaaagaaaagaaaagaaaagaaaagaaagaaagcaagcaagaaaagaaaaagaatataaaata

SEQ ID NO: 573192 - DNA, 265 bp, Homo sapiens
aaaactgacagatgggacctaattaaactaaagagcttctgcacagaaaaaggaaactatcaataaacagataatctgcagaatgggagaaaatatttgcaaactgtgcatctgacaaaggtctaatatctagcatctataaggaacttaagcaaatttactaaaaaaaaaattcattaagaagcaggcaaagtacataaacagatacttttcaaaagaaaacatacakgtggccaagaagcacatgaaaaaatgctcaatttca

SEQ ID NO: 573193 - DNA, 576 bp, Homo sapiens
catatagacatgtttcttaaaaatattcttttcttataacatctttatcaggttttggtattttggttataccagtcctaaaaaacaaggcagtgattttgatagatcatagctctgttkttttcttttttaatccaaattgacaatctctgccttataattggggagttttaaattcacttacatttaatgtaattatgaatatgtctgaatttagaatgaccattttggtgtttactttttatttattccatctgttcattcaacacaaaatctgtttgttgttctgttcatttcattttgccatctcataaacaaatgtttattcaaattctattgtaatttttttaggaggttggaagctctacccttttgttttttattttattggttgctctaaggattagaatatgcctccttaatttttaaagtctacttacagttgataagtatgccaattcacaagaaatgtaaaaatctggcaattgtgtcatttgctttaatcccctatacttgtgctatttcaaataaattgagatatacatatatacatatacacatatatattaaaccctg

SEQ ID NO: 573194 - DNA, 491 bp, Homo sapiens
ttctttcatggctactaatattccattgcataaatatgccatatttttaaaatccattctccaatatgtgggtagttttttatacagctcctataaaccatactgttttcattttccttgagtgcataattatgagtggaattgctaagtcatagaacagaatatgtttaactttrttaaaaactgtcaagctattttacaacattgttttatcattttatgtttctaccagcaatgtatgagagttccagttgctctgcaatcttatcaatgcttgatattgtcaatattttttattttagctatttctggtgtgtcttatggaatttcattgtggttttaatttatattttcctggtgattgatgatgttgagtatctcttatacacgaattaaccattcgtatatctttctttgtgaactaggtattcacttcttagttcttttaaaaactactttctaccacatatgcattctaaataaagtccttt

SEQ ID NO: 573195 - DNA, 613 bp, Homo sapiens
aaaaatttgcaagaaaactcttactaaacaacacaaatctatacgtctgatatttatatttattttattaaatatacaattatatataatgtatcataactayatattatatataatacatacatattaaatatataattatagtataaagaaccatcaccactcaataataagaaaataaaatatcaattaaaaatgggcaaaggatctgaagagacacttcactaaagaaaatacatgaatgacaagcccatgaaaagatactcaacatcattagtcatcatggaactgcggagatgtttgaatcacaaagttgtccccagagtgtagagatgataacccagcccaactttccattttattcagtacactcaataatgcaagtggaggacatgaagcaaaggaaatgaaggaacaactatatctgtttggctctagatgtgtgtgctgggatctcctctatgagcttcagccacagaaatgttaaataaattatacacagcattgtggatagaagacagtaccttgtccccacttcccatttggcctctggcagaggaggagcccactgtgtaggagacatcacaatactaggctgctcagcccagctagt

SEQ ID NO: 573196 - DNA, 640 bp, Homo sapiens
ttatcattttttgtggtgataacattcaaaatgtcttctagctatcttgaaatatgcatattgctataatcatcctactgtgtaatagaacatcagaactttttctttttgtctaaatgtaactttgtacccattaaccagcctctcccagtactcccttcctccctactctattcagcttctgataaccactattctactctctacttctatgaaataacttttttagattccacatatgagtgagatcatttagggtcagtttgtgcctggcttatttcacttaacataatgttttccaggttcatccatgttaccacaatgacaggttttcattctgttttatagccatatagtatttcattgtatatttattccacattctctttatccatttatctgtagataggtacttaggtttattacttatcttggctattatgaacagtactgcaataaacatgggagtgcagatatctctttgaagtactgatctcatgtcctttggatatwtacccagtaatgggtttgctggatcaataccatattgagcaatatggtagtcctactttcaattttttgtaagctccatactattttccataacagctctactaatttacattcttaccaaagtgca

SEQ ID NO: 573197 - DNA, 640 bp, Homo sapiens
ttatcattttttgtggtgataacattcaaaatgtcttctagctatcttgaaatatgcatattgctataatcatcctactgtgtaatagaacatcagaactttttctttttgtctaaatgtaactttgtacccattaaccagcctctcccagtactcccttcctccctactctattcagcttctgataaccactattctactctctacttctatgaaataacttttttagattccacatatgagtgagatcatttagggtcagtttgtgcctggcttatttcacttaacataatgttttccaggttcatccatgttaccacaatgacaggttttcattctgttttatagccatatagtatttcattgtatatttattccacattctctttatccatttatctgtagataggtacttaggtttattacttatcttggctattatgaacagtactgcaataaacatgggagtgcagatatctctttgaagtactgatctcatgtcctttggatatttacccagtaatgggtttgctggatcaawaccatattgagcaatatggtagtcctactttcaattttttgtaagctccatactattttccataacagctctactaatttacattcttaccaaagtgca

SEQ ID NO: 573198 - DNA, 529 bp, Homo sapiens
ctgttgtaaaagggattgagttctcaatttcattctcagcttggtcaatgttggtgtatagcaatgctagcattttttgtacattgatctaataacccgaaacattactgaattagtttatcaaaaaaaaggagctttttggatgaatctttagagttttcaggtatacaatcatcactgcaaaacagcgacagtttgacttcctcttttccagttcggttggcccttcctttctttctttttttttaattttactttaagtttcaggatatagtgcagaatgtgtggttttgttacacargcatacatgtgccacagtggtttgctgcacctatcgacctgtcatctaggttttaagccccaaatgcatgaactgtttgtcctaatgctctccctcccctcacttctcaccccccgactggtccaggtgtgtgtcgttcccctccctgtgtccatgtaatctcactgttcaactcccacttatgagtgagaatatgcagtgtttggttttctgttcctgtgtaagttt

SEQ ID NO: 573199 - DNA, 529 bp, Homo sapiens
ctgttgtaaaagggattgagttctcaatttcattctcagcttggtcaatgttggtgtatagcaatgctagcattttttgtacattgatctaataacccgaaacattactgaattagtttatcaaaaaaaaggagctttttggatgaatctttagagttttcaggtatacaatcatcactgcaaaacagcgacagtttgacttcctcttttccagttcggttggcccttcctttctttctttttttttaattttactttaagtttcaggatatagtgcagaatgtgtggttttgttacacaggcatacatgtgccacagtggtttgctgcacctatcgacctgtcatctaggttttaagccccaaatgcatgaactgtttgtcctaatgctctccctcccctcacttctcaccccccgactggtccaggtgtgtgtygttcccctccctgtgtccatgtaatctcactgttcaactcccacttatgagtgagaatatgcagtgtttggttttctgttcctgtgtaagttt

SEQ ID NO: 573200 - DNA, 422 bp, Homo sapiens
atgctgggcatatgatttgaaaatataaataacatgctatttaaaaataagtctaccctatgtataatatctattgtggcacctagatatcccttatgataagtaatagcaaggatagtcatttttgtaagccctgtagaatcttgattaaagaggacatttcagtattgcaaataaatgcatggtatttgtgtgtcaatgtggaaactaataaacacatgttgtcttatagcatttttttcttgccaattttattgacaaataatttatatacaataaaygacatccatttaaagagaacagtttattggcttttggcagttgtatatacccatgaaattaccaccacaatgaagacacagcatttctatcatttctaagattccttgtgtctctttccagtgcatctcactaagtcctag

SEQ ID NO: 573201 - DNA, 610 bp, Homo sapiens
acacacacacacacacgtacatacactttttaaaaagtaaaacattatttttgtaacccagaagaatgcctccaaagtacaaaatacaaaatttaataacatgagtatcatgttagaccatatctttttttttttttttaattttagaagcagagtcttggtctgtcactcaggctggagtgcagtggtgctatcctagctcactgcagcctcaaactcctgggctcaagtgatcctcctgcctcagcctcctgagtagctgggactacaggcatacctcactatgcctggccatttaaaatttttttttagagacagtttggctgtgtccccacccaaatcccatcgtaattatagttcccataatccccatgtgtcatgggagggacccagtgggaggtaactgaatcatgggggcagttacctcatcctgttcttgtgatagtaagtgagttctcacaaaatctgatggttttataaggggttttcttccccttcrctctgcacttctccttgctgtcaccatgtgaagaaaagaggtgtttgcttccccttctgctatgattgtaagtgtcctgaggcctccctagccatgccaaactgtaagtca

SEQ ID NO: 573202 - DNA, 569 bp, Homo sapiens
caggaattcttccattgttatgtgtcaatattttcttcaggttctattgaataatkgtacaagtgctcacactgggcttacaaagatataattttgagcaagtcaccttcccctctctaagactcatttggaaaatcaggtcaatagttttcagtgcactttccttggtgttcctggagatactcttactttaattcaagctctattacatttcatccagattcccgggtaggtaggggtgtgtgtgtgtgtgtgtgtgtgtgtgtgtgtgtgtgtgtaaaggtttatggtcatgtactttgccatacaggtagatgtagatgtccccacatctctcaagtaatttgtctataaaataagagggttcagctgattttgccccttattgtcttccctagagcagtgacaagggtatcacttaggcgattaatagaaatgcagaacccaggccctcctcccagacctacaggtgatttacttgtccattcagcactgaagtaggcagtgttcccttatactcctgcagctctggcattacaggagaaaccaaaaattaagttatcataatt

SEQ ID NO: 573203 - DNA, 409 bp, Homo sapiens
ctcagtggggacagggtttgcccagtgtttctgggctaggacacagcagagcagagatttagttttgttcgttctgattccaaagctccctggagctgagcagggtgattttttgctggtgtttgaatcagcacagacacagtaacagagtaagttcaccaagcaacagatgtcacccytagtttccataggagcaattttgtgcatgtgtgtgctgtgtgtgtgcatgcatgtgtatgtgtgcacatgtatatatgtgtacatatatgtatgaatgtatatgtgtgcatatgtgtgtatatgcatcagtgtgcacttttacatacattctatataatatattatataaatatatagatcattatttggttaagtcagaccaccaacattcaagtcaagtaaagaattc

SEQ ID NO: 573204 - DNA, 198 bp, Homo sapiens
atgaaatgtggtaacgcgaaacttaagaaatcaaggggagcggcgctgtgcttggttgatacctgcaagtcacccataaatgtgcctgtcgtcaacaaagggcaaatcttggaaaaatggcgtgcaaccctgtgttcagttacccattagccaagccctggagcttygaaagaagctcgttgtttgttcatggcagat

SEQ ID NO: 573205 - DNA, 550 bp, Homo sapiens
ggcatgaatctctgctactgtcccaggaaactgtatttattatttgaggaggaaggagtttccaggaacttccatgtgggatcttctgaccataatagtccttactccaatggtaagaagacttgttgggattctgaccattgttaaatatatttacagcctccaggactttggaaacaaccacaagataatccagtggcccaacaggaccttctgtgaaatagattcatgccgtgagcccatctaactcctgctgctttaaacatctctttggcagcaagccacaatgatattttgtgtctgtagggatttgcattcctatcagagctattatctaatatctcctagagaaaatgaatatttcccactccscaaagcacagttgtcttgttaatagctcacaggtccttcgcgggaaggcttggaggaatagccatggtctaccttggcactgagtggcaaggtttcctcaaacatctggtgaaagcaggtagatgaaggtgctctttcttgaactatggaagtttacaggggggtagttctggcacaa

SEQ ID NO: 573206 - DNA, 590 bp, Homo sapiens
atacataaagcttatgtagaaatgaaaagtcttaaagcatgtctaaggaagactattcgaggtggtataaggaaaccagaaaaatgtgatattctagagaccacaggaagaaagcatttcagaaaggagcaagcygcaaattgcatcaaatgctgctgaaaatataagagaatgagaactcaacatgcctctttaatttagtgacatggagagaacttgtgacctttgcaagatctgttttggggaaacgctaagggcagaagccagactgggtgtttaccgagggtagcaaaacactgcatgtaccaatttttttttcctcaaaaaccaaatagcttaccatttttaaagcttgttttgtgtgtgtgtttgattttgattcctctgtgattatatttatataatacgtatcctagaggcaatttgctgctgcttagccactgacgacactcttgtttagcttgctccagtgtaaatgaggttccagcctcatcaggcgtctccaagagctccatggaagggttcagcttcctgagttatttctttgtcttgtgtgcttgggggatgatgaaacagaagtagcagagaga

SEQ ID NO: 573207 - DNA, 586 bp, Homo sapiens
ttatttagtattaaaatgtgattgctattagcatttttgatctcatctttccaatttttttttctaagtgtggccttttctgtattacatatatgatttataacctgttcacttactggcatgcccataaaccagatttccttgttagggaaccatcctatgcttacacaaccattgttgtacaatagtccttgaatattatacacaggttaacatgttctttaagtactcctaaattgctgggaattgggtaaattttagttatccgctttgaaaagccagtatgcctctgctgaaatcagctggattttattcyaggctgtagaatgctccatgccatgtttctcttgttttgtcaccagccagggctggctcttctcatgtgaatggcataagtgcaagtggctggatccaaccatgtaagcatgcgtggagcctctacgagtgtccatcctctagcctttcactggccagagcaagctgtcagccaaatgcaaagttggtaaaaagaggttaccgtctctgtgtacactaccaggagacactgcatattgtataacctcccatccagaggaagtggtgcttg

SEQ ID NO: 573208 - DNA, 538 bp, Homo sapiens
tctctcttcctcctcggagacccctcattccagaggagtcctgccctcttcctgagaggtaaggaacacaaatggagaagccatggagaacaggaacaggtgggtcttgctgggcttaccctcactctctcaccattagatcacagtcttctgtcccatcacattcctacatgtctgtccatgcttccatccatcctaagtgtaaaaagacacagttttccctgggcctttgattcttcatttytgaaggatctcgtgtcatgtaaaatttggactaaatattatgcctattatgcttttctcctgttaacctgtcttttgttctaggagtctctgctatgacccttgtgatgggtgagggaagacatcccacctatcggactctacagaatgcatgctcaggccctccgtaaataccttctgtctataggaatatcgatgaaatactcaagtaattaatcttttgctgagcatttactctgcgcatgcaaaaattgaaaatggcccacgtttctagggggaaatattaccgccgaat

SEQ ID NO: 573209 - DNA, 538 bp, Homo sapiens
tctctcttcctcctcggagacccctcattccagaggagtcctgccctcttcctgagaggtaaggaacacaaatggagaagccatggagaacaggaacaggtgggtcttgctgggcttaccctcactctctcaccattagatcacagtcttctgtcccatcacattcctacatgtctgtccatgcttccatccatcctaagtgtaaaaagacacagttttccctgggcctttgattcttcatttctgaaggatctcgtgtcatgtaaaatttggactaaatattatgcctattatgcttttctcctgttaacctgtcttttgttytaggagtctctgctatgacccttgtgatgggtgagggaagacatcccacctatcggactctacagaatgcatgctcaggccctccgtaaataccttctgtctataggaatatcgatgaaatactcaagtaattaatcttttgctgagcatttactctgcgcatgcaaaaattgaaaatggcccacgtttctagggggaaatattaccgccgaat

SEQ ID NO: 573210 - DNA, 538 bp, Homo sapiens
tctctcttcctcctcggagacccctcattccagaggagtcctgccctcttcctgagaggtaaggaacacaaatggagaagccatggagaacaggaacaggtgggtcttgctgggcttaccctcactctctcaccattagatcacagtcttctgtcccatcacattcctacatgtctgtccatgcttccatccatcctaagtgtaaaaagacacagttttccctgggcctttgattcttcatttctgaaggatctcgtgtcatgtaaaatttggactaaatattatgcctattatgcttttctcctgttaacctgtcttttgttctaggagtctctgctatgacccttgtgatgggtgagggaagacatcccacctatcggactytacagaatgcatgctcaggccctccgtaaataccttctgtctataggaatatcgatgaaatactcaagtaattaatcttttgctgagcatttactctgcgcatgcaaaaattgaaaatggcccacgtttctagggggaaatattaccgccgaat

SEQ ID NO: 573211 - DNA, 573 bp, Homo sapiens
tcacccaagtttagagtttactggttcttgtatatctatgagtttagacaaatgtataatgacatgtgtcccaccattatagtattacgcagagtttttctgccctggaagtcttccacgctctgttcatctttccctccctgcaaactcctgcgcaaccactgattttttttactctctccttagttttgccttttccagaatgtcatatagttggaatcatacagtatgcagacttttcacttagtaaatgcatttaagtttcttccatgttccccaactcctatrtcttgttttctgttcagagttaaatagtatttcattgtttggatgtatcataatttatctcttcacctcctgtagggcatcttggttgtttccaccttttggcaattatgaataaagctgctggaaatattcatatgaagggttttgtctggaaagatatcagttcatttgggtaaattccaaagagcatgattgctgaattatatggtaagagtatgtttagttttataagaaattgccaaactgtcttccaaagtggctgcatcgtttttcattcccaccaac

SEQ ID NO: 573212 - DNA, 599 bp, Homo sapiens
ctgaattatatggtaagagtatgtttagttttataagaaattgccaaactgtcttccaaagtggctgcatcgtttttcattcccaccaacagtgaataagagttgctttggcggggccgggcgcggtggctcatgcctgtaatcccagcactttggggaggccaaggcaggcggatcacctcaggtcaagagttcgagaccagcctggccaacatggtgaaaccccatctctactgaaaaaaatacagaaaaattagctggggatggtgttgcatgcctgtaatcccagcctctttggaggctgaggcaggagaatggcgtgaacccaggaggtggaggttgcagtgagccaatgtcgcaccactgcactccagtctgggtgacagagccagacttcrtctcaaaaaaaaaaaaaaaaaaaaaaagagttactgttgctcaccaacatttgctgtagtcagtgttctagattttgaccattccaataggtgatagtaatatctctgttatgccctttttaaagccaagtccaaaggctaatagaagctcttaaccaatggtctcttctggtatgtaagcggctattctggtcaaactac

SEQ ID NO: 573213 - DNA, 599 bp, Homo sapiens
ctgaattatatggtaagagtatgtttagttttataagaaattgccaaactgtcttccaaagtggctgcatcgtttttcattcccaccaacagtgaataagagttgctttggcggggccgggcgcggtggctcatgcctgtaatcccagcactttggggaggccaaggcaggcggatcacctcaggtcaagagttcgagaccagcctggccaacatggtgaaaccccatctctactgaaaaaaatacagaaaaattagctggggatggtgttgcatgcctgtaatcccagcctctttggaggctgaggcaggagaatggcgtgaacccaggaggtggaggttgcagtgagccaatgtcgcaccactgcactccagtctgggtgacagagccagacttcatctcaaaaaaaaaaaaaaaaaaaaaaagagttactgttgctcaccaacatttgctgtwgtcagtgttctagattttgaccattccaataggtgatagtaatatctctgttatgccctttttaaagccaagtccaaaggctaatagaagctcttaaccaatggtctcttctggtatgtaagcggctattctggtcaaactac

SEQ ID NO: 573214 - DNA, 516 bp, Homo sapiens
actgcaacctccgcctcccgggttcaagcaattctcctgtctcagtctcccgagtagctgggattataggtgtgtgccaccaagtctggctaattttttgtatttttagtagagatggagtttcaccatgttggccaggctagtcttgtactcctgacctcaagtgatccacctgcctcggcctcccaaagtgctgggattatagacatgagccactgcgcctggcctggcttgataatttttaatatttatgtagaygtgtgatcatcactacttttctccatgtctcctaaaaaccaatccaacttcccaggttaatttcgtaatgagtagcaaggcctttctcttctcacctcaatccaagcaaatgttatctttctggatatattggatatgtttctatcatttaaaaaaatgctgtgaattatgcccacttatattccagtgaggatgttttgggtgattttttttaagtgggagttagttcctcttataactttttcttttcttggttat

SEQ ID NO: 573215 - DNA, 557 bp, Homo sapiens
ctcaccaacacttgctattgttagatataaattttgttgctaaacaaaatttagcaagggctgtagtattgcattagagttcagtggttactagtgagattgagcactttggcatttctttattggccatctggtttttgttctgtttgtttgtttgtttacttttactgaattatctgatcaatatcctttgtcttctcaatgggttgcttttgttctcgttttgttttttactcacttataagagttgctctatatactctggatcctaatccttcgcagccatatgaaatgtaaatatcttatctgctgcatgtagtttctcagggacacaggctggggctctgccatcttgaatttgtgtcttctatggtggccttgggggtcaccattacagtcagtcgtaaaggagaagagcatggaggactgtggctggagttttttatgctctatatttktcagtgggatacatcacttccactttattccacaatagagaacattgtcacatgcccacatctgactataaagaagattaagaaatattgttttgttgc

SEQ ID NO: 573216 - DNA, 557 bp, Homo sapiens
ctcaccaacacttgctattgttagatataaattttgttgctaaacaaaatttagcaagggctgtagtattgcattagagttcagtggttactagtgagattgagcactttggcatttctttattggccatctggtttttgttctgtttgtttgtttgtttacttttactgaattatctgatcaatatcctttgtcttctcaatgggttgcttttgttctcgttttgttttttactcacttataagagttgctctatatactctggatcctaatccttcgcagccatatgaaatgtaaatatcttatctgctgcatgtagtttctcagggacacaggctggggctctgccatcttgaatttgtgtcttctatggtggccttgggggtcaccattacagtcagtcgtaaaggagaagagcatggaggactgtggctggagttttttatgctctatatttgtcagtgggatacatcacttccactttattccacaatagagaacattgtcacatgcccacatctgactrtaaagaagattaagaaatattgttttgttgc

SEQ ID NO: 573217 - DNA, 566 bp, Homo sapiens
ttgcgccttgcagttagactacaaggtattcttttcctttgttcatgtgtttttgcagcttaaattgagggcaaagctaaatttcattatttctccaaaggaggtgattacctaaatctgtcccttcttcctccaggcagcacatactaccatttgttcttgtgattcatttcccctagaaagctgagaaggaattttataatgatattattggttttgtaactggtgtttccattgtaatgctattacggaaccagtgttgtgataaatgatctgtttataagggaaatcacttttacaagaagtagaaaattagacacgcttctgctttgcaataacaataaaaaccgcggtgaaaaaatattctccagtttattcccatctgtatyagcagggaagctttagaagatggctttctccctaaagtcttctaaccacgattactacctacaagtcccatgtcaaaatgcaaatttcctccaaattccactgaaggccactacattcttaagcttaaccatgacttgggccctttaagaaaaccaggcgcttcaaactccacccct

SEQ ID NO: 573218 - DNA, 464 bp, Homo sapiens
ccgaaaccaggggaagggtagtgactgtgactccctggctgagccagaggtacgtgtgtttgcttcattcgtggagtggttagaagtatcttgcttctgagtctagatactggagaacaggccatctgttctgtttctacctgtcccctggaggctgcccagaaacgggtaagcttgggtctgtaggtctctctcctggtgtggcaggcgtttagaaaggcccctatagcagtgatgaggcgaaacgtaactagaaaaagtacactgtgtactctcacctatcatccctgccagctcaccacatcattaacatgmaggatccccacacagacaactgtattcaaatcaaaagttccccagccagaagcagagaagatgatgtcaagaaatcaagggggataaatggccatagctgctgcaaaatagcggattaggctgaactttgaaatgaagaaaaagggatg

SEQ ID NO: 573219 - DNA, 580 bp, Homo sapiens
cctatgcagctttcttcgctgacagagatgtctttgctgagtgggggttaagaagagagggaagttgttggaggcagtttaaggtttgagttagtaaatgagagggttagtctcttggagaytgtgagccatggaaagtagtaagacttgcatgaagcaaaatagccttttgcatgcagtgggcaattcaggctggttttgtttgggagggaggaatgagggatgcagagactatgaaagggttatctgtttgacacttagaccgtattataactaggtttgtaaattgtgcttaaacatgttggctttgcaggaacaaatgtgttcattcccggtgtttaagatcagaggccttctgagtacttggctagaagagcgtataaggtggtggcttgctttcttagcacttacccttaactacactgacatccaaccgaatatactttgtgaaatgtcgtgtggtgttaatgagtaaagttaacattgttttagatgacactgcacaagtaccagaagcctctcagttcttctttaatttctgactaatatattcagggagacacataaaaaagtgcttgtg

SEQ ID NO: 573220 - DNA, 627 bp, Homo sapiens
caatgtcacttctgtgaatttaccaagaaaggcagcatcaaaaagtgagggaattccctagaatcagcttgcttagctaggtgtcaattctggctctcctactctctgcggtatgactttaagcaagtcacccaaccctctctgagcctcagtttcctgtctgtaaacaaggataatatgctactggctacttcacaagactgatgyaatgattgagtcaacataaggaaatggttgaagagagtggctaggaattatcccctctgatacactcacccacatacaaaatgacctacgttcaaggtgacggtgacattttgagacaaaagactgaaaacaaattaaatgcacaatggtaagagatacccacacaatggcttaccatgcaactgttaaaaaaaaaaaaaaaaagagaagtatccaaaatataattaaatggcagggggaggggcagaacagaatataatatcatatacgccaccttttgtgttaaagggaaggggaccaaataccaagtgatgtccttcctagtcaaaaaaattcaattaaaaatattttttaaatggggcattatttcaaatctcagaagaaatatcatatgtactcacaaatgtatagactagtggt

SEQ ID NO: 573221 - DNA, 627 bp, Homo sapiens
caatgtcacttctgtgaatttaccaagaaaggcagcatcaaaaagtgagggaattccctagaatcagcttgcttagctaggtgtcaattctggctctcctactctctgcggtatgactttaagcaagtcacccaaccctctctgagcctcagtttcctgtctgtaaacaaggataatatgctactggctacttcacaagactgatgtaatgattgagtcaacataaggaaatggttgaagagagtggctaggaattatcccctctgatacactcacccacatacaaaatgacctacgttcaaggtgayggtgacattttgagacaaaagactgaaaacaaattaaatgcacaatggtaagagatacccacacaatggcttaccatgcaactgttaaaaaaaaaaaaaaaaagagaagtatccaaaatataattaaatggcagggggaggggcagaacagaatataatatcatatacgccaccttttgtgttaaagggaaggggaccaaataccaagtgatgtccttcctagtcaaaaaaattcaattaaaaatattttttaaatggggcattatttcaaatctcagaagaaatatcatatgtactcacaaatgtatagactagtggt

SEQ ID NO: 573222 - DNA, 567 bp, Homo sapiens
agaatcagcttgcttagctaggtgtcaattctggctctcctactctctgcggtatgactttaagcaagtcacccaaccctctctgagcctcagtttcctgtctgtaaacaaggataatatgctactggctacttcacaagactgatgtaatgattgagtcaacataaggaaatggttgaagagagtggctaggaattatcccctctgatacactcacccacatacaaaatgacctacgttcaaggtgacggtgacattttgagacaaaagactgaaaacaaattaaatgcacaatggtaagagatacccacacaatggcttaccatgcaactgttaaaaaaaaaaaaaaaaagagaagtatccaaaatataattaaatggcagggggaggggcagaacagaatataatatcatatacgccaccttttgtgttaaagggaaggggaccaartaccaagtgatgtccttcctagtcaaaaaaattcaattaaaaatattttttaaatggggcattatttcaaatctcagaagaaatatcatatgtactcacaaatgtatagactagtgg

SEQ ID NO: 573223 - DNA, 534 bp, Homo sapiens
tacaggtagtggaggataatgtgggyggtatgatgaaagatactgttcctatagtcaggaaaaaccagccattaattttattgaagtgaaaaatgtataacattaaagttgcagatctgggctttattatcagaataacatcattttggatagaattgagagattctctaaaatgctattgatagacacatttcattttatagtagcaaaaacactatatttattaatatcatcaccaatctcatcagaagagttttcaagctcacagcagctttcaagctcacagtagcagatacaagtttccaacatgcaatttaggtttaaaagctcaacttttagataacagatattttagttcttttccttgaagtgccaggcttactttggtcattttaaagaaaatttctgctgaataactaagtctgaataactacagcctatcagttgtttttttaaaagtcaaactggtgttccataaaaaaaaaaaagtggctggattagctcacagtcaaataatcacaaagtgcttttcct

SEQ ID NO: 573224 - DNA, 565 bp, Homo sapiens
aaatatcttctctcagttagtggtttgtcttttccttctctgaacggtatcttttgatgaacagaaattcttaattttagtgaagtataatttgacaatcttttacaattgtcctttttatgctgatcccaagattgcattcctggcataaatcccacttggtcatattatcccttttatataaaggagaaaatatgtatatataatcatctcaatagatacagattttttgtttgtttgtttgttttttgagacaagtctcactctgtcacccaggctggagtgcagtggcgcgatctcggcttactgcaagctccgcctcctgtgttcacgccattctactgcctcagcctcccgagtagctgggactacaggcacccaccaccacgcccggctaacttttttttatatttttagtagagacggggtttcactgtgttagccaggatggtcttgatctcctgaactcatgatcygccacctcggcctcccaaagtgctaggattacaggcgtgagccacagcacctggcccagaaaaatttgtacataaaatttaatacttct

SEQ ID NO: 573225 - DNA, 529 bp, Homo sapiens
agcactacctgcctgtcctatttctcttcaacccatccactctaaccctctgccagaggctggcagagtgccttgcatggaggtctcattccagtgtttcaaagtgggagtagatcaaaactccctctgttttggctttttattcaacctaagtaacaaccctctgccattccggccaaattcagttcacatgtcagatagcctgcttcctttacgtttccttactctcttgtccatgctttttaggtgctgattgggataggccttctcctttatcttcttgtttgcaggaacttcccttacaccattaagctccactgctcaactttgatgacagaaaggttgaatccctacrtgataagaaactgcatgactcttgatatgagaactacgggtcacttaagaactagagttaattataaatacaaatatatttaatactctctaatattgccccattataatattatcattatcatcagcatgtaggacatgcttatttctttctcagtgcccttcgacttttcct

SEQ ID NO: 573226 - DNA, 587 bp, Homo sapiens
gaattctccagatgatacaaactgctctagaaaattccctttcagtttggaccacagaagcttaatatcaaagacatgtttgattctacctcatcctttctaacaaagaagtagataaaggcatacacttcaagaaaatgagatggaactctagcccaggaagatccatggcacataatctttcctgggacacagggagtgacttgagcgacccatcagactcccacagtttttcaatgtattttctcagagctactttgaagaggtggmggtatctttgttattctgtcagttttgctatgacacttattttgaaaatgagaatttattcctatgcaactgatgtattagagaataatttgagtgtaaggcaattttttgcttgtttatgtgtgatttttatctgtgtaaaacactaggtgtaactagaaaactgtacccaactgaacacagtcaaataagaatgcacaaaagatactgcacacacatcaaacatctaccagttacttcagatcactatgtgtgctacaaaccggcccatccacatctcatgttaaaactttctaacttcagaaaaccctccttag

SEQ ID NO: 573227 - DNA, 368 bp, Homo sapiens
tgtattttctcagagctactttgaagaggtggaggtatctttgttattctgtcagttttgctatgacacttattttgaaaatgagaatttattcctatgcaactgatgtattagagaataatttgagtgtaaggcaattttttgcttgtttatgtgtgatttttatctgtgtaaaacactaggtgtaactagaaaactgyacccaactgaacacagtcaaataagaatgcacaaaagatactgcacacacatcaaacatctaccagttacttcagatcactatgtgtgctacaaaccggcccatccacatctcatgttaaaactttctaacttcagaaaaccctccttagatcaccacacaggaattc

SEQ ID NO: 573228 - DNA, 381 bp, Homo sapiens
tccagctgatagcaaacactgataacaatttcaaaggaggaaaataaatgtttaaatggcagtaacgtagaaaagtgccttggtttcaaaacatgttgataactactgctcctttgttattcagttttgccctctataaaagtctgctattatttctagcgctgtttcctgagtagttttctagtcaagcaatatgagggattaaaatggtgcytggggcgggggtggaggggagggcaggggtgggggagtcaagctgaagtttcagtacccaagtctcattgtactttgctaggaatacctatggcattaaagtaggagattttcttttcttttcttttctttttttttgagatggagtctcgttctgttgcccaggct

SEQ ID NO: 573229 - DNA, 606 bp, Homo sapiens
ttccatggtgtatgtgtgtgtacattattctttatccacgatctaccattgatgggcatttaggttgattccattctttgctattgtgaatagtgctgcagtgaacatacatgtgcaagtgcctttgtgatagcaacaatcttatatgtccatttggcttctatcacacccaataatgggattgctgggttgaacggtcgttctgtttttagctctttgaggaattgccacaccactttccataatggttgaactaatttgcactcccaccaayagtgtataaatgtttccttttctccacaaccttgccagcacctgttatttttgagtttttaataatagccttctgactggtgtgacatggtatctcattgtggttttaatgtgcaattctctaatgaacagtgatgctgaacttttattcatatgcttgttggccacatgcctgtcttcttttgaaaagtgtctgtgcgtggctgggcacagtggctcacgcccgtaattcaagcactttgggaggccaaggtgagtggatcacttgaggtcaggagtttgagaccaccctggccaacatggtgaaaccccgtctctactaaaaatacaaaa

SEQ ID NO: 573230 - DNA, 667 bp, Homo sapiens
ttttgaatacagtcatgtgttggttaatgacaggttatgttatgagacatgcattgttaggtgatttcatcattgtgtgaacatcaaagtatacttacataaacccagatggtatagcctactacacacctaggctatgtggtatggcctattgctccgaggcctgtacagcacgttattatactgaatactgcaggcaattgtaacataagattagtatttatgtatctaaacatagaaaaggtacagtaaaaatataatattttaatcttaagggacgactgtcttacacacagtccatcgcagacttaaatgccattackcagtgcataatcatctcagcagatgcaaaacatttgacaaaattctgctcattcacgatggcaaaacaaacatcctccatctaggcatctactaagagctttcctcagataacgtatttaataaagcaccagaatcactcctgtaaagtttgaaacaagagtaggatgtctgcgatcatcaatatgactcaacgtagtacagaacatcctagctaatgcaggaaatagaaagaaaataaatggaggtggttcttctgttagggctaggttccaaggttaggatgtaaatgcgaaatggcagaaagtcaggttctctttgattacgatacagctggggtagggtc

SEQ ID NO: 573231 - DNA, 461 bp, Homo sapiens
ctgggctcattgtagagtcaggggaatggttctcagttcttctgatccagtttaaggtaggccctggtacctgggtcatggagatagggtctccacagcattcctcttcctttcttcgtctggtagtcaaactgccttgaatctgatgtgtatatgggcagaagagtttccagcctttcctcgggggcattggatctgtgtctgagtcctggggatgggakggtttcctacctttgcatcacacacagaccagttttgcttatgcctgtcatgctgaagcagtgcctttttgcctggactctgggattggagggtttactgttccacccagagtggcttgaggtattttattttactttatttcaagacagaatctcgctctgttgcctagactggagtacagtggcacaaaactggctcactgcaacctctgcctcccaggttcaagcaattcttatgcc

SEQ ID NO: 573232 - DNA, 313 bp, Homo sapiens
taagtgcttaacaaaatgttataattgcctaaggagttgaggggacttcactgaagagatgacataagcagggttgtgaaaaatgacaccagattgacaagattaaataaaataattacttggtacatgtaacaacatggatgaatttcacmgtcataattttgagtgaaaaaagtcagacacaaaagaggatagatgaataaaggtgctatagccatccttgaaaaacaaatccttcctagcactttgggaggccggggtgagcggatcacttgatcccaggagtttgggaccagcctggacaacatggtga

SEQ ID NO: 573233 - DNA, 313 bp, Homo sapiens
taagtgcttaacaaaatgttataattgcctaaggagttgaggggacttcactgaagagatgacataagcagggttgtgaaaaatgacaccagattgacaagattaaataaaataattacttggtacatgtaacaacatggatgaatttcacagtcwtaattttgagtgaaaaaagtcagacacaaaagaggatagatgaataaaggtgctatagccatccttgaaaaacaaatccttcctagcactttgggaggccggggtgagcggatcacttgatcccaggagtttgggaccagcctggacaacatggtga

SEQ ID NO: 573234 - DNA, 424 bp, Homo sapiens
tatatatatatatacacacatatatgaaaggagtgtgtgtatgtgtacatatatatatacacacacatatatatgtatatatacacatatgtacatatatacacacatatttctgaaagttttccaaaagtatctcccttcaatgaggaggggttagtgtgcatcagctgaatggtgcccacagtgatacaggctcatggtagttctggcaaatgtagcttcctgccagtctgcaccaagaagacttgcatggtctacaacaggccttgcaatccacactgtstctccattgctggcagctcaccggcaggaaaaaaaggtgacaaaacgagtttacttaacagccttaagctgccttaaatgtgtgtcttcagccctacgggacaaaatcactcaaaaatttgtgaaattgttccatgaattc

SEQ ID NO: 573235 - DNA, 551 bp, Homo sapiens
agttcttggttcagcaaaattcaagtttctaaaatgtcatatatctttatggcattggcaaaaagtcagaactttctatgattaactcataaatgttactgatcaattctgttccctgtaatggcccaagctttccaaaagctggcccttttccacaaagtgtcttctttctgtaacacccacccccatctataccaaatgaaaccctactcattcctcaaggctcaattctgayttcacattttccacaaagcctttccaaatcgctctgctataactgttctctattttgatcaaatatagcactttatttctatttctctcatgtcatttatttctgccttatattttcgatcagtctcagcctctcccactagatcaaaagcttgactctatactcttagcagagcattttatttatttgtttgcactgaattaaatctggatttgttttgtttttgtgacagacaaaaagtaattgtgcaacatcattgaccacaatgtttttttaaagtctggtcacaaattatgactgtcaaaataataatcag

SEQ ID NO: 573236 - DNA, 551 bp, Homo sapiens
agttcttggttcagcaaaattcaagtttctaaaatgtcatatatctttatggcattggcaaaaagtcagaactttctatgattaactcataaatgttactgatcaattctgttccctgtaatggcccaagctttccaaaagctggcccttttccacaaagtgtcttctttctgtaacacccacccccatctataccaaatgaaaccctactcattcctcaaggctcaattctgacttcacattttccacaaagcctttccaaatcgctctgctataactgttctctattttgatcaaatayagcactttatttctatttctctcatgtcatttatttctgccttatattttcgatcagtctcagcctctcccactagatcaaaagcttgactctatactcttagcagagcattttatttatttgtttgcactgaattaaatctggatttgttttgtttttgtgacagacaaaaagtaattgtgcaacatcattgaccacaatgtttttttaaagtctggtcacaaattatgactgtcaaaataataatcag

SEQ ID NO: 573237 - DNA, 551 bp, Homo sapiens
agttcttggttcagcaaaattcaagtttctaaaatgtcatatatctttatggcattggcaaaaagtcagaactttctatgattaactcataaatgttactgatcaattctgttccctgtaatggcccaagctttccaaaagctggcccttttccacaaagtgtcttctttctgtaacacccacccccatctataccaaatgaaaccctactcattcctcaaggctcaattctgacttcacattttccacaaagcctttccaaatcgctctgctataactgttctctattttgatcaaatatagcactttatttctatttctctcatgtcatttatttctgccttatattttcgatcagtctcagcctctcccactagatcaaaagcttgactctatactcttagcagagcattttatttatttgtttgcactgaattaaatctggatttgttttgtytttgtgacagacaaaaagtaattgtgcaacatcattgaccacaatgtttttttaaagtctggtcacaaattatgactgtcaaaataataatcag

SEQ ID NO: 573238 - DNA, 551 bp, Homo sapiens
agttcttggttcagcaaaattcaagtttctaaaatgtcatatatctttatggcattggcaaaaagtcagaactttctatgattaactcataaatgttactgatcaattctgttccctgtaatggcccaagctttccaaaagctggcccttttccacaaagtgtcttctttctgtaacacccacccccatctataccaaatgaaaccctactcattcctcaaggctcaattctgacttcacattttccacaaagcctttccaaatcgctctgctataactgttctctattttgatcaaatatagcactttatttctatttctctcatgtcatttatttctgccttatattttcgatcagtctcagcctctcccactagatcaaaagcttgactctatactcttagcagagcattttatttatttgtttgcactgaattaaatctggatttgttttgtttwtgtgacagacaaaaagtaattgtgcaacatcattgaccacaatgtttttttaaagtctggtcacaaattatgactgtcaaaataataatcag

SEQ ID NO: 573239 - DNA, 434 bp, Homo sapiens
ctttatcatgcagacaacagcctctgaaagtgttgactataaaacacaaaactatgaaaattaaatttgtataggggaacccaaacattttgctcatgattactgattataacaagtttatcacactttaattcacaaaaaaagacattaatcatgaaaaggaaatcaagtctcagaaaggcagtaatagcatagttattaaatgttaaccatttgaatcctacctcctccacttactagctgtataacctcaaggaattagtcaacctctctttcrctccatttcttcatctataaaatgaggactgtggtatttatctcatggagcagttgcaatgattaaatactttagtatctgtaaaatacttgggacagtgcctggctcatagttggtattcaataattgctcttatctactcatgtattattctttt

SEQ ID NO: 573240 - DNA, 557 bp, Homo sapiens
aaagtcaaatttgaagtgagactgttttttttgaaacagagtcccgctctgtcctccaggctggagtacagtggcgcgatcttggctcactgcaagctctgcctcccgggttcacgccattctcctgcctcakcctcccgagtagctgggactacaggcgcctgccaccacacctggctaattttttggtatttttagtagagatgggatttcaccatgttagccaggatggtctggatctcctgaccttgtgatctgtctgccttggcctcccaaagtgctgggattacaggcgtgagccaccatgcccagcctgaagtgagacttttttattccaaagtattttatttgcctgattcatctttaagttctgtaaaattccttacatccaggagcactcaatatgtgttgaatcaattgttcaaaaacagaaatttatattccactcaaaagtttttctttcttaaggagtatggagaaaaattactggttgagttaatggtttgcagaagagttaaagtgaatatgaactatgaatgtttgtggattagcaactg

SEQ ID NO: 573241 - DNA, 539 bp, Homo sapiens
aatcttttagtttcacagtctggttctcatgacattctcatttatctacattcaaaaaatgttttgtgacatgttaagtaggaagaaatcaggtttaccctgtaatgggacatggtattttcaaactctgtcccttaaaagtaacatagcatctataaaatcagttgcttgggtttcacaaacttaattgatcatctttcattcaactaatgtttgttccatattatctcatcaaacccattcattacattcattcaaaaataatgcctactgaacatatgtattatgctaggcactggtgattcaatatgaatatcacaaggttctgccctcgaggagttctcaatttcttggcagcaacaattttaacaaggtgtgaagagtgctggtaagctctgggcaccatgggaaccagagaggatcaactaacctctgtgagcaggaaggggctggagaaaacaagacyttaatcaaagaaacaccatgatcaggtctgtattttaaaactggaactactgacagcaagagtggaagcagaa

SEQ ID NO: 573242 - DNA, 576 bp, Homo sapiens
atatcacaaggttctgccctcgaggagttctcaatttcttggcagcaacaattttaacaaggtgtgaagagtgctggtaagctctgggcaccatgggaaccagagaggatcaactaacctctgtgagcaggaaggggctggagaaaacaagaccttaatcaaagaaacaycatgatcaggtctgtattttaaaactggaactactgacagcaagagtggaagcagaaagaccagttaagaagcaatagctataatctagaacacaagtgctgaatggctgaactaaggaatgttttctgggaacacagaacagaatccagagatacacaggaagtagaatttacagaacctggagataattttatggaagagtaaaggcagacataaagatcaaggataaagaataagttcctcaagacaaggatgcccactctcaccactcctattcaacacagtactggaagtcctaatcagagtaaccaagaaagagaaaaaaaataaaaggcattcaaataggaagagaagaagttcaactatctctgtttgcagacaacatgattctatacctaaaaaccc

SEQ ID NO: 573243 - DNA, 562 bp, Homo sapiens
tgctcactcctggatttcttgttactagaaaaaagtaaactctttactgtttaagccactrttactggcagccaatcacattctcaactgatacctcccaaaaggagaaaaaagagatgatggaaaggaagaaataatataagataattttctgagctgaaggaagatttgaaccttcaggtgaaaagagcctacaaggtaccaagcaggaactgaaatgtttttaaagacacacacaaatataatctgataaaattgtgaactccaaaataaggagaaaatcctacatgcttcaagaaaaaaaggattttgcaagtagaatttagtcatctgctaagctaacattcaaatgaggaaaaaataaatatttgaatacacaaacactcaaaaattatccacacttcaccatttcttggggcaaaatttttcaaaaaagttccagaaaaataattcaaggaatgatttatacaaataaataattcgttgagtccaaatacacagttaatgatgtggctaaaaattttggctaaattttgtttagagagattcctaacatacaaga

SEQ ID NO: 573244 - DNA, 626 bp, Homo sapiens
gactataccatgaaccagcgaagctgaaatatctcagaattatgtgggcatttagcagtttccctcacccacccctttcccatacttcatcagccccaggcatagcaacaccttcacctgctcctagacacagcccccgctgggacctcaccatctcaggaaggattatttagaggattattatgtgtgatattctgtagatatgtttttgctttttggtggaagggagggatattttgtttgcccacacagaacttttttaaataggagcagttgtgaacattttacaagtttaatgtttctcacaaaaaaatctgaatttctagcttcccttgaaaaactggaggatccaggcaggcctggcctgggatttccatgcagcagacattgagtgttacctcccactggacrggcacaccctcctcccccgtgggccacagggatcactgcacatgcactgcttttagacttatagcaaaaaaaactacgctctgaatctctgtgtccctagatgtggaaactaagacaaggattcttgttcaagtaattcactgggagagtgcctttgggaccagggacatgaggaaaacagccgagggcaagggcacagggccaagcgaggatgt

SEQ ID NO: 573245 - DNA, 569 bp, Homo sapiens
tgtttgcccacacagaacttttttaaataggagcagttgtgaacattttacaagtttaatgtttctcacaaaaaaatctgaatttctagcttcccttgaaaaactggaggatccaggcaggcctggcctgggatttccatgcagcagacattgagtgttacctcccactggacgggcacaccctcctcccccgtgggccacagggatcactgcacatgcactgcttttagacttatagcaaaaaaaactacgctctgaatctctgtgtccctagatgtggaaactaagacaaggattcttgttcaagtaattcactgggagagtgcctttgggaccagggacatgaggaaaacagccgagggcaagggcacagggccaagcraggatgtggtctcagctgaagctcagcttcagtctgatccctggggaagctatggaggacacactgcaccagagagctaatctcacatttaggtaaggggcctagggtggggagggagtgatatcctgggctgtttggctcagggaaattctcaggggaaggggacagctgtgcacccttagcacag

SEQ ID NO: 573246 - DNA, 605 bp, Homo sapiens
aaaagtgagaacacccgcggtattttgttatctgttcctgtgttagtaaaacagggtttttttaaaatcaaagaataatgtctcagaatccgaaaaattattgtaaatttatgatactgggccaataatattattttttaaaatctaaattaagaagtgtagtgttccctatcagagtttacgtacctcagaactggagagcccggaatctttctcatccaagtccttcaaaagctcaaccagccttttcttctctctgtcaaccataaccactgggtttcttgattccttggccaactacagaatttattaatggaaaatatcatatactcaargaaattcacagttcaggaaaaaaaaaatggaatctgagacttctacactacagatacacaaagaaaagttgcaagattaggcattttacattttctaggtaattttattttataccaaaatttttatatagggccattctctaatatccaaagatattatccctataagcaggccctgctgttaaccactccaacagacattttattaaaaaataatatgagcagttttcaaacctctctactatagataaaaaatataaatgcaaaaac

SEQ ID NO: 573247 - DNA, 587 bp, Homo sapiens
gaacagtgcattttgttttgcctgtcttttgagcaaggtctgggagttagcgtcccatgtcctagctcccatctgcacaaacccctagagcccatctcagttggccaattttcctcaaccttttggaagaggcttgagtcaatgtctgagatattcagacaccgagtgctcaaaataagaataagaaaaatacttgtggactcgtattccctttataaaatatcttgttttctatgtgtcgcattaaaatattctaaaacaagatcatgtgaacccttcattaaagctctgaaaatatgcacgaagaaggaatgtctccttatayaacacatgcagttcaccctacaaaacaggatgcatttccacaatcaagtccacaaaggaaaaaaacaccagtcacaagctcaatccagacaaagtttatataaaatttaattttgttttataagggaggttacctgaacataaaggattaaaggagctagtcaactggtgtgtttatagctagttatcaaagagtcaatacagatataaccatttaaaatttttttgatgaaaatagctggaaagaacgagagaaagagtaa

SEQ ID NO: 573248 - DNA, 639 bp, Homo sapiens
gttacttttttggtgagtggcctaatagatacaaaatataacacttctttccataattcaagttgtatacagtctttttagttgaaatatgaggtttgtttattcattcagttgaagtttcatatactcttaaccaatacaacatttaaaaaatacaaactgaatgcagccatgtttacatttatcacagagctcctttaaaacatatttctaataaacagtagggaaaacacattgggttatctggccagaactgtcttcactggaaatgtcctcttctcctctccagtctggtattgacatagctgccatgttcctacagtsaccccaaaccttgctgggttggacaagttggttgagccaggggtaggcccctgacccagctggatcactcaggctcttctctaggattgcagaactgagccaacctctgaatgactaaccacagcatatgctcttgggaaccaaagaaagctgcctcccaccaaaatcattttcacagacttgtttttgcttaagccaggttttcattacttgcagccagctttttttaaaaactctttattattatacaaaatttcaaacatccaaagtagaatggtataacaaactctcaacaactagctgcaacaataacca

SEQ ID NO: 573249 - DNA, 537 bp, Homo sapiens
aactagaggagtaagtcacaggaaagaactgatgaatataaaaagacaagaggatgggattataaaaataaagggggaagaagggggaactgagtgaaataaggagagatgataagaaaaccaacgtgagagtgtatcttttaacaggctagttcaaaagagtacactcattgcctcacctaacatgtacatcactagacayattagtgattttcctgttagaccctaatggttttcctgtttgggcttccctccttccctccttccctccttccctccttccctccttccattcttcctttcttccttcctctttcctccctctctccctttcttcctttcttttaatgctcattttcttgtcttcttttcctttctcctttataaaccataatcctaactatacaacaatttggaaagtttgcactttaatttgaagtctaagttatataaacatattttttctatattaagaaagtcaagaacaaaaaatggttttctgcctctcctctaaagtaatacaaggaatttagaatt

SEQ ID NO: 573250 - DNA, 571 bp, Homo sapiens
gtaattaaaaacttccccgcaaagaaaaccccacgaccagatggtttcatggctgaattccaccaaactctccaagaagaattaataccaatacttcttaaactcttccaaaaaaaaaaaaaccaggctrgaggggatactttctaacatattttatgaagccagtatcaccttgatacctgagccacacaaagacccaacacaaaaaagaaaattacacaccaggaatctctgatgaacattgatgtaaaaatccttaataaaatattacaccaaaccaaattcaacaatatatcaaaaagactacacatcatgatcaagtgggatttatccctggcaggtaagggtggtttaacttatgtaaatcaatcagtgtgatatataaataacattaacagattgaaagacaaaaaccacatgatcatttcaattgatgcagaaaaagcatttgacaaagttcaacatcctttcttgataaaaactctcaagagtttaggtatagaagaaaatttcctgaaggccatttataaaaagttcacagttaacatcataaccaagggggaaaaacaga

SEQ ID NO: 573251 - DNA, 614 bp, Homo sapiens
ggatcaccctggcccctcacatcaaaaccaaaaagcataagtcaccaaaaggccaaatgtcttgtaaacgccctaagcagcctgtcaagggagacttattacagcttgcagagggagcaatgagatggaagcatgcgcagarccgcataatacatgtcaataaaggcacaggcacaggcaaccaacaatgacctggatcagctaaagagctccacaaatctttcattttgctctagaaataggtctgttctattaggttcactcctgaaaataataaattaaataaaatgcagttcctgaggtaggtggggactcaataacagactatcttatgaatttggccatctagaaaaaggtattggtaaagggtattaaaattggatcttatagatgtatttaagcatttgagaagaaattgcaactgccacaaagaaattccacaagaaaaataaagcattgtacaagaaaaaagcaatcaatatgtaaatagttataattacgtaagcattgaatgttgatttaaccaaatattatgccttaattatattgagtgttcgtgaggagtgcacaaaaggaagcgagtagtatcagaaatgtaatctgttaccacagga

SEQ ID NO: 573252 - DNA, 534 bp, Homo sapiens
ctcatgcctatgccttgctcacttgggtttcacctgctcctccctgcccaccttgctcattcctattatttctttaagattccatgtgaaagttaccttccttgattgaagccctcatttcccatgcttccagagcacatctgcattcctctcagtgcacaggatgctgtattttatttatatgcctggaattacataccatccaccaagcttcttgagggcagggtaaataaccttactcctttttgatttctcagagtccarcatagcaccagagtcaacatacacaataatggagtgcataaatgagaattaatggggtaatatgagcgaagcaatgaagcccacctcttccgtgccttttctgcttgggaaagtgggaattgcctcatttgcctggtgtttcaccatcttccgtggggctccccaaaccctccctctccatctgggctgtagaagcatttatggaagaggcctgcataataacgatcatatcatttcttgttgactaaagctcctatggccagaaacttt

SEQ ID NO: 573253 - DNA, 534 bp, Homo sapiens
ctcatgcctatgccttgctcacttgggtttcacctgctcctccctgcccaccttgctcattcctattatttctttaagattccatgtgaaagttaccttccttgattgaagccctcatttcccatgcttccagagcacatctgcattcctctcagtgcacaggatgctgtattttatttatatgcctggaattacataccatccaccaagcttcttgagggcagggtaaataaccttactcctttttgatttctcagagtccagcatagcaccagagtcaacatacacaataatggagtgcataaatgagaattaatggggtaatatgagcgaagcaatgaagcccacctcttccgtgccttttctgcttgggaaagtgggaattgcctcatttrcctggtgtttcaccatcttccgtggggctccccaaaccctccctctccatctgggctgtagaagcatttatggaagaggcctgcataataacgatcatatcatttcttgttgactaaagctcctatggccagaaacttt

SEQ ID NO: 573254 - DNA, 585 bp, Homo sapiens
tactgacagcctaagaaataccccagaaagtctgcttcctacactggtcattatgtcatttaatattcttttaaaaaagtaaaacaactctcatttggcaaatgccttttagagttaacagatacagtagaaaggccataggttttgtgactagggacctggattggaatcctggctctccatacactagtgacactctgtcaagtggaggaatcttatttcttaatggagatagtaacaccttcttggaagggtgttataggaattgcagaattcactggatgtttacaatgtgcaatgcaccctgctagagctttataagcacctcactaaattcttacaacaaacttatgagccagggattattagccccaccccatctgctttccaagtgcacagataagggatcacctgtattgcattaggtaaattacctggaatctccctgctagttagrgagggaggggcaaaggtagtgtaggtgaaagctcctaggagttactgaatgggcgccaaaggatcatcagctaccttttcctgcttctcttaaatacctgaaatcttcccttttgaatgacagaaaga

SEQ ID NO: 573255 - DNA, 492 bp, Homo sapiens
attagtattcattgagcactgaccaagtgggagcctaactcaaatttcaaaaactttattcccctgaaaagattttcactgtaataaaacaaatagtctctgttaagtttagcctaaagactttttttttgtcttgtctttaaaaaaattattttaagttcaagggtacatgygtagctttgttatatagttaaacttgtgtcattgagggtttgctgtgaagattattttgtcatccagatattaagcatattacccataagttatttttcctgatcctctccctcctcccaccctctaccattagtacccagtgtctgttgttcccctctctgtgtccatgtgttctcatcatttagctcccacttataagtgagaaattgcattatgtgttttcctgttcctgcattagtttgctaaggataatggtctccagctctgtccatgtccctccataggacatgatctcattgtttttatggctgcatagta

SEQ ID NO: 573256 - DNA, 486 bp, Homo sapiens
cattagtggtttagttcaagcccaaataaattacgcaatgtatagtctacagatatttcccatggggcaaaggcacttgattttatttttccctcttcctacataataatgcaatgagcgtcttttgaaactcatggcaagctgtstgtgttgctgcacttcctttcattccaaaatacagcatatgcataagtagtgttggacatgaagactttttcattaaacttgtttgcacattaaaattacttgggtaaaattttaaacacatttggttaacataacccatgtgtattactacagcacagataatccccctgcacacattcttggagagactgtaacaaaggagcagcaatacaagtcagagaacaattctgcttgattttcctgtgcagtcattttatcagggacaaggaatattccacagtggtgcccagatgaaggctgcatgcattccccagcattgcattgtagaagaaaatgaaa

SEQ ID NO: 573257 - DNA, 486 bp, Homo sapiens
cattagtggtttagttcaagcccaaataaattacgcaatgtatagtctacagatatttcccatggggcaaaggcacttgattttatttttccctcttcctacataataatgcaatgagcgtcttttgaaactcatggcaagctgtgtgtgttgctgcacttcctttcattccaaaatacagcatatgcataagtagtgttggacatgaagactttttcattaaacttgtttgcacattaaaattacttgggtaaaattttaaacacatttggttaacataacccatgtgtattmctacagcacagataatccccctgcacacattcttggagagactgtaacaaaggagcagcaatacaagtcagagaacaattctgcttgattttcctgtgcagtcattttatcagggacaaggaatattccacagtggtgcccagatgaaggctgcatgcattccccagcattgcattgtagaagaaaatgaaa

SEQ ID NO: 573258 - DNA, 619 bp, Homo sapiens
tgagggagtaaggagtaagtccctttgcctgaattcatgccatgttttattaaagtgaacacggaatatccatgcttgaaatcccctccccaaacggctttgttagctggacacacccactccatctcaggtgtaatttcgcacgcacaggcaggtgaggtcctgagttggggacagctctctggcggtgagacatctccccagaggctcacaggtacactctakccgcctatgggtctatatgagccctgaggaaaaaaagatggagtttctggtttagattaggttattctggcaacaaaaaggaaagggcacgggaggagaacattatcagtgtccttcaagaacgggcaacttcagagggtatgcacataggcaatagctataggggaaaaaaaattcacactggcatccaaaaaatgtaacttaaattaaggatgttacgtcattttccacctatcagaagggcaaaatgaaaaagcatgacatatccattactgaatatctgaggaaagagacaccacacaccactattaaaaggagcaaaaatggtcttcccacttttggagaccacctgtatccaatatcttcaaaacgtgcatatcttaaggtgcggtaa

SEQ ID NO: 573259 - DNA, 619 bp, Homo sapiens
tgagggagtaaggagtaagtccctttgcctgaattcatgccatgttttattaaagtgaacacggaatatccatgcttgaaatcccctccccaaacggctttgttagctggacacacccactccatctcaggtgtaatttcgcacgcacaggcaggtgaggtcctgagttggggacagctctctggcggtgagacatctccccagaggctcacaggtacactctatccgcctatgggtctatakgagccctgaggaaaaaaagatggagtttctggtttagattaggttattctggcaacaaaaaggaaagggcacgggaggagaacattatcagtgtccttcaagaacgggcaacttcagagggtatgcacataggcaatagctataggggaaaaaaaattcacactggcatccaaaaaatgtaacttaaattaaggatgttacgtcattttccacctatcagaagggcaaaatgaaaaagcatgacatatccattactgaatatctgaggaaagagacaccacacaccactattaaaaggagcaaaaatggtcttcccacttttggagaccacctgtatccaatatcttcaaaacgtgcatatcttaaggtgcggtaa

SEQ ID NO: 573260 - DNA, 619 bp, Homo sapiens
tgagggagtaaggagtaagtccctttgcctgaattcatgccatgttttattaaagtgaacacggaatatccatgcttgaaatcccctccccaaacggctttgttagctggacacacccactccatctcaggtgtaatttcgcacgcacaggcaggtgaggtcctgagttggggacagctctctggcggtgagacatctccccagaggctcacaggtacactctatccgcctatgggtctatatgagccctgaggaaraaaagatggagtttctggtttagattaggttattctggcaacaaaaaggaaagggcacgggaggagaacattatcagtgtccttcaagaacgggcaacttcagagggtatgcacataggcaatagctataggggaaaaaaaattcacactggcatccaaaaaatgtaacttaaattaaggatgttacgtcattttccacctatcagaagggcaaaatgaaaaagcatgacatatccattactgaatatctgaggaaagagacaccacacaccactattaaaaggagcaaaaatggtcttcccacttttggagaccacctgtatccaatatcttcaaaacgtgcatatcttaaggtgcggtaa

SEQ ID NO: 573261 - DNA, 619 bp, Homo sapiens
tgagggagtaaggagtaagtccctttgcctgaattcatgccatgttttattaaagtgaacacggaatatccatgcttgaaatcccctccccaaacggctttgttagctggacacacccactccatctcaggtgtaatttcgcacgcacaggcaggtgaggtcctgagttggggacagctctctggcggtgagacatctccccagaggctcacaggtacactctatccgcctatgggtctatatgagccctgaggaaaaaaagatggagtttctggtttagattaggttattctggcaacaaaaaggaaagggcasgggaggagaacattatcagtgtccttcaagaacgggcaacttcagagggtatgcacataggcaatagctataggggaaaaaaaattcacactggcatccaaaaaatgtaacttaaattaaggatgttacgtcattttccacctatcagaagggcaaaatgaaaaagcatgacatatccattactgaatatctgaggaaagagacaccacacaccactattaaaaggagcaaaaatggtcttcccacttttggagaccacctgtatccaatatcttcaaaacgtgcatatcttaaggtgcggtaa

SEQ ID NO: 573262 - DNA, 562 bp, Homo sapiens
ctcctgggtctccaatttacacacctattagacggagtgatgttgtcccacttatgtggttgctctgttgtgtttgcatgtttgtttgttttttctttccattcattttcctctctatgctttagtttgaatcatttctattgatctatctttcaggtcatttatccttccttctgctatgtccagtttgcttttaaacttttcaaaactttttttgtaagcagttgtacttttggccrggcacagtgtcttatgcctgtagtcccagcactttgggaggccaaggcgggagaatcacttgaggtcaggagtttgagaccagcctggccaacatgataaaaccctgtctctactaaaaatacaaaatattaccgggacgtggtggtacgtgcctgtaattccagctactcggaaggctgaggcatgagaatcgcttgaaccctggaggcagaggtttcaatgagccaagatatcgcatcacagtactccagcctgagtgagagtgagactccctctcagaaaaaaaacaaaaacagacattgtgctttttatttctgggttt

SEQ ID NO: 573263 - DNA, 562 bp, Homo sapiens
ctcctgggtctccaatttacacacctattagacggagtgatgttgtcccacttatgtggttgctctgttgtgtttgcatgtttgtttgttttttctttccattcattttcctctctatgctttagtttgaatcatttctattgatctatctttcaggtcatttatccttccttctgctatgtccagtttgcttttaaacttttcaaaactttttttgtaagcagttgtacttttggccaggcacagtgtcttatgcctgtagtcccagcactttgggaggccaaggcgggagaatcacttgaggtcaggagtttgagaccagcctggccaacatgataaaaccctgtctctactaaaaatacaaaatattaccgggacgtggtggtacgtgcctgtaattccagctactcggaaggctgaggcatgagaatcgcttgaaccctggaggcagaggtttcaatgagccaagatrtcgcatcacagtactccagcctgagtgagagtgagactccctctcagaaaaaaaacaaaaacagacattgtgctttttatttctgggttt

SEQ ID NO: 573264 - DNA, 562 bp, Homo sapiens
ctcctgggtctccaatttacacacctattagacggagtgatgttgtcccacttatgtggttgctctgttgtgtttgcatgtttgtttgttttttctttccattcattttcctctctatgctttagtttgaatcatttctattgatctatctttcaggtcatttatccttccttctgctatgtccagtttgcttttaaacttttcaaaactttttttgtaagcagttgtacttttggccaggcacagtgtcttatgcctgtagtcccagcactttgggaggccaaggcgggagaatcacttgaggtcaggagtttgagaccagcctggccaacatgataaaaccctgtctctactaaaaatacaaaatattaccgggacgtggtggtacgtgcctgtaattccagctactcggaaggctgaggcatgagaatcgcttgaaccctggaggcagaggtttcaatgagccaagatatcgcatcacartactccagcctgagtgagagtgagactccctctcagaaaaaaaacaaaaacagacattgtgctttttatttctgggttt

SEQ ID NO: 573265 - DNA, 338 bp, Homo sapiens
gagacgggggactgtggggtcatttggtrcgtggatgtctgtggggtgtgcactgaaatggggactgtggggtcatttggtggatggatctctgtggggtgtgcactgagatgggagctgcggggtcatttggtgcgtggatctctgtggggcgtgcactgagatgggggactgtggggtcatttggtgcgtggatctctgtggggtgtgcactgagatggggactgtggggttgtttggtgcgtggatctctgtggggtgtgcaccgagatggggagctgtggggtcatttggtgcgtggatctctgtggggtgtgcaccaagatggggactgtggg

SEQ ID NO: 573266 - DNA, 547 bp, Homo sapiens
aagttcaagcatatattttatgaaaacgtttgttaaatagtgtttaattattgaataaagtaaaaccaataattagaaggcctgtgttgtaaattcaccttcaccactgactttactgatgatcttagccaattttttattatttccttgatttcacaagatgagggaacttgggtacttttcacttttatcattggctaatcatatatttattttatggtggtcaaycaggagactgtattcagcaatggcaaacaacttgaaatcattagacatttaactatataatattatacagtgataatatattataatattactttggtacacaatttataattggataatggccatgattctcttacacctttcagtgctaacttgaatttttaaaaattttgaattacctgtagtaaatgtatgttaaggattccaggagttttttttttaatggagtctcctcctccttcttcttcttcttctcctccttcttccttcttccttcttcttcctcctcctcctcctcttcttcttcttcttcctctgt

SEQ ID NO: 573267 - DNA, 470 bp, Homo sapiens
gccttgaaaccattattctaggtggaagaagccagacataagaggccatgtgttgtatggtttcatttatgtgaaatatccagaataggtaaatccacagagacagaaagcaaattagtggttgctaggggttagggaataggraaaatgtaactgctagtagccacagggcttcttttcaggatgacaaaaatgttctcaaattagacagtggtgagagattagattgtataacctatgtgaatatactaagcaacaccaaattataccctttatagtggcatattgtgactatatgtggattatatttgaatgcaatattttttaaaagaatgttcaagtcaaaatgaagcctcagtcagcctgggtcactgagtgacctcaattagcaaaattccctcaactgctattgagttaagtaactgaaatttgtttgtatattgctatataagttatcctatccttactga

SEQ ID NO: 573268 - DNA, 396 bp, Homo sapiens
tgaacattagtgtacaaatatccaggcccttactttcaattcattcacccaaaagtcacaacacttcctcttaagtaaaaagtgtatacccaaaagtagagttgctggaacagatggtaattctatrtttaatttatccatgaacctccacactgttttccacagtggctgcaccatttcccattctctccagcgttgtatgagggttccaattgctccatatgcttgccaatacttgttattttgtgtgtgttttatatttttttggtagtagcctttctaataggtgtgaagtgatatctcattgtggttttgattagcgtttccctaataattaatgatatcgagcatcttttcatgtgcttattgacatctgtatatcttctttgaagaaat

SEQ ID NO: 573269 - DNA, 396 bp, Homo sapiens
tgaacattagtgtacaaatatccaggcccttactttcaattcattcacccaaaagtcacaacacttcctcttaagtaaaaagtgtatacccaaaagtagagttgctggaacagatggtaattctatatttaatttatccatgaacctccacactgttttccacagtggctgcaccatttcccattctctccagcgtygtatgagggttccaattgctccatatgcttgccaatacttgttattttgtgtgtgttttatatttttttggtagtagcctttctaataggtgtgaagtgatatctcattgtggttttgattagcgtttccctaataattaatgatatcgagcatcttttcatgtgcttattgacatctgtatatcttctttgaagaaat

SEQ ID NO: 573270 - DNA, 578 bp, Homo sapiens
gggaaaaaaactttgtaaataagttataaagtttctttgagacagtaaaattatgatttcttgaaagaactgctctcttgtgctgtgtgaggctgtgccaggggkccaggccaggttcccgcctctggagacagttcatacagggtcagcgacttatcaacttatcggtgatagaatggagaccctgtaccccagaaacaccagggtatcgtcagaggcctgtgaggtgccccattgggctttttcttcctgccttgctccattgacccccaaggtgtctgattcctacctgaattggaagggtaaggagagaatgcctggcgagggttccccaggaagggggctcaggaacaggtgcatcagggcagggctgacgctcaggaaccaaaaggatgttgaagacccgctgagaggagatgaagtcagagttcaaagtcagccggccaggacgatttcagtttttcccacacccagccagctcttgagaggccgggaggttgggaggctgagaggcctgaaagcagagacactgctttgcctctagccttcctccggatcaggcctccctgcttttgcat

SEQ ID NO: 573271 - DNA, 578 bp, Homo sapiens
gggaaaaaaactttgtaaataagttataaagtttctttgagacagtaaaattatgatttcttgaaagaactgctctcttgtgctgtgtgaggctgtgccaggggtccaggccaggttcccgcctctggagacagttcatacagggtcagcgacttatcaacttatcggtgatagaatggagaccctgtaccccagaaacaccagggtatcgtcagaggcctgtgaggtgccccattgggctttttcttcctgccttgctccattgacccccaaggtgtctgattcctacctgaattggaagggtaaggagagaatgcctggcgagggttccccaggaagggggctcaggaacaggtgcatcagggcagggctgacgctcaggaaccaaaaggatgttgaagaccsgctgagaggagatgaagtcagagttcaaagtcagccggccaggacgatttcagtttttcccacacccagccagctcttgagaggccgggaggttgggaggctgagaggcctgaaagcagagacactgctttgcctctagccttcctccggatcaggcctccctgcttttgcat

SEQ ID NO: 573272 - DNA, 600 bp, Homo sapiens
catggctgaggttcaaaccccaggtaggaaggggctttcccagccccaggatgttgctcttccacacaaagtgaagttggaaagcctctgggtaactgtgggtttcatacccctctctgggggtagtgaaaaaacagtaatactaaatattaaatagatataatttagtgagttgttaccatgtgccaggcactgttacactgttgcctcattaaatgctcacaactgcaagctatagctgttaatayttctcctatcttacagatctgcaaactgtaacacagggtggttaaatgggttccccaaggtcacacagtcagtgattgaagccaggaagcttccaactgcgggccctagcactttcagggaaaggccctagcactttcagggaccttcattaaccaccaacccctggcctttgtagggaatgccagaaagcagggtcacctccaaagttgtaagctggttgtgtggggcccaaggtagaaagcagagcccagtggtgtgtggacatcccccccaccaagagtatgaagtggaaagatgccactctcataccagtgtatataagtctgtgagtaagtatacatgagtgtgcat

SEQ ID NO: 573273 - DNA, 565 bp, Homo sapiens
ctgttgatagtttcttctgctgtgtagctttttagtttaattaggtcccatttgtcaatttttatttttgatgcaattgcttttggtatttttgtcataaaatctttgctggggcctgtgttctgaatgttatttcgtaggttctcatcaaaggtttttatagttttgggttttacatttaagtctttaatccatcttgagtagatttttatatttggtgtaaggaaggggtctaatttcaatcttctgcatttggctagccatggagygaatgtttatatccccccataattcatatgttgaaatcctgaccttcaatgtgatggtattgcaaggtgaggctttggaaggtaattaggtcatgaggatggagccctcaggagtgggatgagtgcttttaaaagcgacattagagagctctctcatcccctttctgtcatatgaggagataatgggaaaaagtagtctgcaacttggaagaggagcctcaccagaacctgattatgatctctaacttccagcctcccaaactgtgagggatgtctttttgtttttgtaagctacc

SEQ ID NO: 573274 - DNA, 261 bp, Homo sapiens
agaattatctatagtttggtaagttgaaaaagtctagtgacatcaaaattaaagttacttaagttactgaggttaagacatttacatagttaagatatttaaaaatatattattttgagagatamaagaaaataatttaccaatatagacaacttcataatatattatacttacaatctagttgtttataacgatgagatatcaaaacaccttttgttttatcaatatttaaagctaagtactctactgaaccatggccaa

SEQ ID NO: 573275 - DNA, 640 bp, Homo sapiens
tcacatgttattcctggctaagaaatttcattcagagagaaaatatgtttttcattttgaaaaggcggtcacattttttgactctatcaatgtattgacattgatatgtagtttcacatcaattcactgtattaagctccatttataaatatttyctgagttgttactttgtgcaagtcataatgttcagaaaattaactactaaaataggtcttctcatttacttgcttctgttacaaaattaggtagcaattgcaattaatgttaagcatacttggcagtccacttttgtgtgcaaattgccacaaatcttattctccctgcagcttccttagattataaaataacctagattttttcaaaacaaatataaaaatttgccatgatcacattttatctattaaaagtaaaactaggttttaaaaattgcattgaatatcccaagatattattttttccaaattacacatgggaggatttcaaacagtttcttaccttttcgatgattaactaatatgttactaattgatcataatcatttctagatatctaaccaagtgccccagttcaacaactcattattttactctttcattttgatattatttggtacaactacataacgctgctgaatggaata

SEQ ID NO: 573276 - DNA, 640 bp, Homo sapiens
tcacatgttattcctggctaagaaatttcattcagagagaaaatatgtttttcattttgaaaaggcggtcacattttttgactctatcaatgtattgacattgatatgtagtttcacatcaattcactgtattaagctccatttataaatattttctgagttgttactttgtgcaagtcataatgttcagaaaattaactactaaaataggtcttctcatttacttgcttctgttacaaaattaggtagcaattgcaattaatgttaagcatacttggcagtccacttttgtgtgcaaattgccacaaatcttattctccctgcagcttccttagattataaaataacctagattttttcaaaacaaatataaaaatttgccatgatcacattttatctattaaaagtaaaactaggttttaaaaattgcattgaatatcccaagatattattttttccaaattacacatgggaggatttcaaacagtttcttaccttttcgatgattaactaatatgttrctaattgatcataatcatttctagatatctaaccaagtgccccagttcaacaactcattattttactctttcattttgatattatttggtacaactacataacgctgctgaatggaata

SEQ ID NO: 573277 - DNA, 616 bp, Homo sapiens
acaaacctgcacattgtgcacatgtaccctaaaacttaaaatataaaaaaatgaaaaaaaaggaaaataaaacaaagaattcccaccctaaaaaaaaaataaataaagcattactgataccaaaaccwgaaaaagacacaacaacaaaagaagaaagttgaaggccaatatccctgataaacagatgcaaaaatgttcaaaaataccagcaaatgaaatccaacagtgtatcagacagataatacacaatgataaattgtgattaatatcaaggatgcagggatggcttaacatatgcaaatcataaatatggaacattaaatcaacagaatgaaggacaaaaaccatatcatcatctccatggataccaagaaagcatttcataaaattctacaccccttcataataaaaattgtcaacaaactaagcacagaaggaacatatctcaaaataataaagatcatttatgacaaatcacagccagcatcatactgaatgaagaaaagttgaaagcatttccttacctgaagcaagagaggaacgcccactttcacgactcctcttcaacatagtactggaagtcctatgcagagtaattagccaagagaaagaaata

SEQ ID NO: 573278 - DNA, 616 bp, Homo sapiens
acaaacctgcacattgtgcacatgtaccctaaaacttaaaatataaaaaaatgaaaaaaaaggaaaataaaacaaagaattcccaccctaaaaaaaaaataaataaagcattactgataccaaaaccagaaaaagacacaacaacaaaagaagaaagttgaaggccaatatccctgataaacagatgcaaaaatgttcaaaaataccagcaaatgaaatccaacagtgtatcagacagataatacacartgataaattgtgattaatatcaaggatgcagggatggcttaacatatgcaaatcataaatatggaacattaaatcaacagaatgaaggacaaaaaccatatcatcatctccatggataccaagaaagcatttcataaaattctacaccccttcataataaaaattgtcaacaaactaagcacagaaggaacatatctcaaaataataaagatcatttatgacaaatcacagccagcatcatactgaatgaagaaaagttgaaagcatttccttacctgaagcaagagaggaacgcccactttcacgactcctcttcaacatagtactggaagtcctatgcagagtaattagccaagagaaagaaata

SEQ ID NO: 573279 - DNA, 616 bp, Homo sapiens
acaaacctgcacattgtgcacatgtaccctaaaacttaaaatataaaaaaatgaaaaaaaaggaaaataaaacaaagaattcccaccctaaaaaaaaaataaataaagcattactgataccaaaaccagaaaaagacacaacaacaaaagaagaaagttgaaggccaatatccctgataaacagatgcaaaaatgttcaaaaataccagcaaatgaaatccaacagtgtatcagacagataatacacaatgataaattgtgattaatatcaaggatgcagggatggcttaacatatgcaaatcataaatatggaacattaaatcaacagaatgaaggacaaaaaccatatcatcatctccatggataccaagaaagcatttcataaaattctacaccccttcataataaaaattgtcaacaaactaagcacagaaggaacatatctcaaaataataaagatcatktatgacaaatcacagccagcatcatactgaatgaagaaaagttgaaagcatttccttacctgaagcaagagaggaacgcccactttcacgactcctcttcaacatagtactggaagtcctatgcagagtaattagccaagagaaagaaata

SEQ ID NO: 573280 - DNA, 577 bp, Homo sapiens
acagtgcaatcaaattagaacttaggattaagaaatttactcaaaattgcacaactacatggaaactgaacaacctgctcctgaatgaygactggttaaataacgaaatgaaggcagaaataaagatgttgtttgaaacgaatgagaacaaagacacaatgtaccagaatatctgggacacatttaaagcagcgtgtagagggaaatttatagcactaaatgcccacaagagaaagcaagaaagatctaaaatcgacaccctaacatcatgattaaaagaaccagagaagcaagagcaaacaaattcaaaagctagcagaaggcaagaaataactaagatcagagcacaactgaaggagatagagacataaaaaatccttcaaaaaatcaatgaatccaggagctggttttttgaaaggataaaccaaatagacttctagcaagattaataaagaagaaaagagagaagaatcaaatagatgcaataaaaaatgataaaggggatatcaccaccgatcccacagaaatacaaactatcatcggagaatactataaacatctctaggcaaataaacta

SEQ ID NO: 573281 - DNA, 571 bp, Homo sapiens
cagaaatacaaaagaccagtagaaactattatgaacaacaatgtgccaataaatcagaaaacctagaggaaatcgacaaattcctggacacatacagcctaccaagattgagccaggaagaaatagaacatgtgaatagaccaataacaaatagcaagattgacacaacaatacaaagtttcttaacaaagaaaaattgaattctaccaaacatttaaaggaaaactaataccaattcttcttaaacaattcaaacatgttgaagagtagagaattcttcctaactcattctacaatgccagaattaccctgataccaaaaccagacaggaacacaacaaagaaagaaaactaaagtccaaaatccctgatagacatagacacaaaagttttcagcaaaatactagcaaactgaatccaacagcatatcgaagagatcatacatcattatcaaatgatatttatcccaggaatgcagtaatgattcagcatatgtaaatccataaacgtgatacataatgtaatagaatgaaggmcaaaaaatatgatcatctcaagagatgcagaaaaag

SEQ ID NO: 573282 - DNA, 625 bp, Homo sapiens
ctgtccaacagacaatcttgttcctgcaaggtacttcttcccactaagctcccaaatgcagtttcaatcttagcaccctttgcacaagttgttttcttttctaaaatgaccataaacctccagcctatttatacaaatcccctgatcctttaagattcagcacaaattccacttcattcacaagacaagcttccattgatttcttcctcagagaattctgctacacyatagtgtaaattgtcatcaaggagtttctttccctgtattcctggtttaccagctgtctgtttcttcatgatgactgtgtgggaagtgtacagattactctgaagagaactcacacgtgagtgtaatgacacatcatgtcaaacagctaaatgtaaaggaagccttattcctagcttttccagtctgaacaagtttcaagcaagagaaaactttttgcagcctttgcaaagataagatatggaaggagaatatgggtgttattggggaaggaataggacagatttggagaacagcctctgtaaagcttcagactcagttaatttgttctttcttccctatttgtgcagggaagtgggtagaaggatgcttaatatgttatctgataaatgttcatcac

SEQ ID NO: 573283 - DNA, 625 bp, Homo sapiens
ctgtccaacagacaatcttgttcctgcaaggtacttcttcccactaagctcccaaatgcagtttcaatcttagcaccctttgcacaagttgttttcttttctaaaatgaccataaacctccagcctatttatacaaatcccctgatcctttaagattcagcacaaattccacttcattcacaagacaagcttccattgatttcttcctcagagaattctgctacactatagtgtaaattgtcatcaaggagtttctttccctgtattcctggtttaccagctgtctgtttcttcatgatgactgtgtgggaagtgtacagattactctgaagagaactcacacgtgagtgtaatgacacatcatktcaaacagctaaatgtaaaggaagccttattcctagcttttccagtctgaacaagtttcaagcaagagaaaactttttgcagcctttgcaaagataagatatggaaggagaatatgggtgttattggggaaggaataggacagatttggagaacagcctctgtaaagcttcagactcagttaatttgttctttcttccctatttgtgcagggaagtgggtagaaggatgcttaatatgttatctgataaatgttcatcac

SEQ ID NO: 573284 - DNA, 535 bp, Homo sapiens
aatatatccatatgtatatatctttactgtccaagttaagcttatgggaacagatactcaaaataattttgcacactctttctactctctatggtatgatacatacatacatagtatgctctagtaaaaggttgtggtcagagtagggtaaaattgtatttgtttaaaacctaatgtgatgatatcttccccccatcatctctccttaaggtggggccatctcttcttggtaatagtagtcccccttatcatggggatcagtttaggcaaaaagctgctgtatttactggtaactcatgcaaactcacaaacgctagtagatgactctgtcctactgttttcactctaaaaattatttgttagttatctattgttgtgtaagcagattacccccaaacttagaagacattgagacaacaaatatttattattgtagtgtctgcgggtcagaaatcaggctgtarcttactgagtgcctttggctcaaggtttctcataaggttgcattgaagctgtcagtcagggctacaggctc

SEQ ID NO: 573285 - DNA, 595 bp, Homo sapiens
aggagcaaggaagccagtggtggatctgtctgagtcccaaaaccycaaaagtggagaagtcaacagtgtagcctttagtttacggccaaaggcccgagagtccctggcaaaccagtagtgtaagtccaggagtcccagagctgaagaatttgaagtctgatattttagggcaggaagcatccagcatgggagaaagatgaaggccggaagactcagcaagtctagtcctttcgtattcttccacctgctttctcctagcagcactggcacctggttagatggtgcccacccagagtgaaggtgggtctgcctctcccagtccactgactcaaagttaatcttctttggcaacaccctcacagacacacccaggaacaaaactatgaatccttcaatccaatcaagttgacactcaatattaaccatcacactgttgaaggcacaaataggcagaaaagatgttactaagactcattcttcataagttgtcattagagaatatgttacttccataattcagagatttaaatgtaaagtgtagccttcaaatcttaaattcataacaccaatcctgggaactagaagattaaaaaaa

SEQ ID NO: 573286 - DNA, 595 bp, Homo sapiens
aggagcaaggaagccagtggtggatctgtctgagtcccaaaacctcaaaagtggagaagtcaacagtgtagcctttagtttacggccaaaggcccgagagtccctggcaaaccagtagtgtaagtccaggagtcccagagctgaagaatttgaagtctgatatttkagggcaggaagcatccagcatgggagaaagatgaaggccggaagactcagcaagtctagtcctttcgtattcttccacctgctttctcctagcagcactggcacctggttagatggtgcccacccagagtgaaggtgggtctgcctctcccagtccactgactcaaagttaatcttctttggcaacaccctcacagacacacccaggaacaaaactatgaatccttcaatccaatcaagttgacactcaatattaaccatcacactgttgaaggcacaaataggcagaaaagatgttactaagactcattcttcataagttgtcattagagaatatgttacttccataattcagagatttaaatgtaaagtgtagccttcaaatcttaaattcataacaccaatcctgggaactagaagattaaaaaaa

SEQ ID NO: 573287 - DNA, 330 bp, Homo sapiens
tgaataatttaatattttacattaaagataatgtcgttacacggattttgtagatgttctttatcaagtcaaagtagttttcattcatgcctaacttactgtktttatcattaaaatatatagacttttgtcaaatgctttttctacaccgaataatataatttttattctgaaaatagttgacatggaaagtgacattgattgatttcaagtgttaaaccaactttacctacctgaagaaaatcccacttaatcatgccgtgcaattctttttgtatattgttagattcaattttctaagttttgttgagtattatgatatctaacttc

SEQ ID NO: 573288 - DNA, 330 bp, Homo sapiens
tgaataatttaatattttacattaaagataatgtcgttacacggattttgtagatgttctttatcaagtcaaagtagttttcattcatgcctaacttactgtgtttatcattaaaatatatagacttttgtcaaatgctttttctacaccgaataatataatttttattctgaaaatagttgacatggaaagtracattgattgatttcaagtgttaaaccaactttacctacctgaagaaaatcccacttaatcatgccgtgcaattctttttgtatattgttagattcaattttctaagttttgttgagtattatgatatctaacttc

SEQ ID NO: 573289 - DNA, 616 bp, Homo sapiens
gatattagctgtaagcttttcatatatggactttaatgtgttaagttccttttatacttaatttactgagagttatcatgaaagggagttaaattttgtcacatgctttttctrtatttttgagataatcatgtgatttttatctccattctgttaatgtggtgtatcacattgattgatttctgtatgttgagccatccttgcatgccagggacacatattatttggtcatggaatatgatccttttaaagtgctataaatttgatttgctattattttgttggggaattttgcatctatgttcatcaggaatattggcctaaagttttgttttcttgtggtgcctttgtccagctttggtatccagatgatgttgaccttataaaataaaactggaagtgttccctcttctattttttagaagcatttcagaaggattggtattaattcttctttaaatctttggtagaattcacctgtgaagtcatttggtcctgggcttttcttcgttgggcagtttttgattactgattaagtctccaaacagggtctcactatgttacccaggctggtctcaaactcctagccccaagtgatcctcccaccttggcctct

SEQ ID NO: 573290 - DNA, 602 bp, Homo sapiens
cctcacaaactgttggactcagggcctcagttgctcactggctgttccacagaagctgccctgagctctttgccacatggacctctttcacatggcagcttgcttcatcatagtgtgcaagccaagaaaacaattgtctactagcaagatggaagtcacaatcagaagtgacatcaccttcatgttgctgtattctattggataaaagcagattgtttaaaggcagtggattacacaaagctgtgagtatcaggaagtgaagatcactggtagatatcttacagtctgtctaccacaactgtgaagaataaaatcraaagacaaagaatattagagggaaaagcatatagaaacacatgtattcaaatacttttggaactacattttaaatgcttttccattcattgcaccttttaaatataagccacatatattaaattcaaacaatagcttaatataataatgacatttagagaagctaaaggatttctctcatttcctgaatttactctctaaagtaacaccttcacactatcctctggtaactatctaaaattttgtatgtttgttttacatgtctgcaatagaatgtgagatttatg

SEQ ID NO: 573291 - DNA, 514 bp, Homo sapiens
ttgtatggtcacagtcctattcttttcaaataatttcccatagaactgtgtcatttgtgaattcttataatattcactggaaaagaaaacaattctgaggacactttaatttttatctccgtgtatgtaatctgagcttttctcttaattatttatttcaatgggaaatttggaaagagagatgcatattctaagaaacacatctaactttgaaatccctcatcatgatgtaaactgaatgcattgtttggaaagtttagcatctgtggagatacgatgtaaatgaaaagggaaaagaatgaatggcattattaaatttcaacatatgaacagcaaccaataatgaaaatgcaattggagcaaggarataaaaaaaactataagtaaggaggcgaaattttcctgtaaaaagaaactgtccttaattaaattttaaaataattttaacacactcttgcttgtgagagatacactcaatatccacaaatattatcaacctaaaagttaaagccca

SEQ ID NO: 573292 - DNA, 514 bp, Homo sapiens
ttgtatggtcacagtcctattcttttcaaataatttcccatagaactgtgtcatttgtgaattcttataatattcactggaaaagaaaacaattctgaggacactttaatttttatctccgtgtatgtaatctgagcttttctcttaattatttatttcaatgggaaatttggaaagagagatgcatattctaagaaacacatctaactttgaaatccctcatcatgatgtaaactgaatgcattgtttggaaagtttagcatctgtggagatacgatgtaaatgaaaagggaaaagaatgaatggcattattaaatttcaacatatgaacagcaaccaataatgaaaatgcaattggagcaaggagataaaaaaaactataagtaaggaggcgaaattttcctgtaaaaagaaactgtccttaattaaattttaaaataattttaacacrctcttgcttgtgagagatacactcaatatccacaaatattatcaacctaaaagttaaagccca

SEQ ID NO: 573293 - DNA, 545 bp, Homo sapiens
ctcccatcactcaggctggagtgtagtggtgcagtctcggttcctgggctcaagtgatgtccctcatctcagcctcctgagtagctggtactacagatgtgtgtcaccacgcccggctaattttttgtattttttgtagaggcaaagttttgccatgttgcccaggctggtcttgaacacgggtctgaagtgatccacctgctttggcctcccaaagtgctaggattgcaggcatgagccactgtgccgaccagaataattttttttttaagaaaagttttgaaacttcttaagtacttgcattataattgtacttctagacaacatcactagtagatctgctcatttttttttctctgaagcatgtcttaattctcacgttgatttttctattccattgccttgtttccatcctttgctgtcttttgccaagggccatgattcacaaactgtgccaaggagcccaggggcactgcagagaactcacaagggagcaagagatgtttaacarttttgaaggaaacgtagcagcatctgttggaaac

SEQ ID NO: 573294 - DNA, 388 bp, Homo sapiens
ataattttgggatttgcatttatactgatctttaaaaatcataatggcaactactagctatatataaataacataactgtatatttaagcacagtgctttgaaaaagtaagcatgcaagaaagtctgttgaatatctgttaaataaaaagataatttttaaattgtaggctttattatattttccttatatattatattaccttttctattactcatcatctaagtatctaaatcaggtatgaatggatgaggctctgggtataatccttgctggggcacaatttttcttcatctgtggacatgtgaaamtagaaaacaagttatctgctcccagtacaatggtgggcacagaatgacaatgaaagatattccagttcaaaaaataag

SEQ ID NO: 573295 - DNA, 528 bp, Homo sapiens
caggaaacaagtagtttggactaattggtctgggttttctgctgattggagatgtgactgagattgttagtgctcactaacttcccaatgctcatctcatttcccagttttccttgcagttaggttgaggccatgtgactaagttctggccaatgggaaatagacagaagtgattatgagatcattttaggcctaactgttgaaaatatttctcatctcttttcactttctgtttccctgccacagtgacctcggaggccacrtgttccaaatggtatagtgataggatggagaagtgctgctcagcccatggaaaattgtgacacgagttaggaagaacatcttcatggtttaggatttctttttttcctttgagacagagtcttactccgtcttacccaagcttgagtgcagtggcatgatctcagctagctgcaacctcttcttcctgggttcatgcaattctcatgactcagcctcccaagtagctgaaattacaggtatgctccaccatgcctggctaatttt

SEQ ID NO: 573296 - DNA, 528 bp, Homo sapiens
caggaaacaagtagtttggactaattggtctgggttttctgctgattggagatgtgactgagattgttagtgctcactaacttcccaatgctcatctcatttcccagttttccttgcagttaggttgaggccatgtgactaagttctggccaatgggaaatagacagaagtgattatgagatcattttaggcctaactgttgaaaatatttctcatctcttttcactttctgtttccctgccacagtgacctcggaggccacgtgttccaaatggtatagtgataggatggagaagtgctgctcagcccatggaaaattgtgacacgagttaggaagaacatcttcatggtttaggatttctttttttcctttgagacagagtcttactccgtcttacccaagcttgagtgcagtggcatgatctcagctagctgcaacctcttcttcctgggttcatgcaattctcatgactcagcctcccaagtarctgaaattacaggtatgctccaccatgcctggctaatttt

SEQ ID NO: 573297 - DNA, 576 bp, Homo sapiens
caggaaacaagtagtttggactaattggtctgggttttctgctgattggagatgtgactgagattgttagtgctcactaacttcccaatgctcatctcatttcccagttttccttgcagttaggttgaggccatgtgactaagttctggccaatgggaaatagacagaagtgattatgagatcattttaggcctaactgttgaaaatatttctcatctcttttcactttctgtttccctgccacagtgacctcggaggccacgtgttccaaatggtatagtgataggatggagaagtgctgctcagcccatggaaaattgtgacacgagttaggaagaacatcttcatggtttaggatttctttttttcctttgagacagagtcttactccgtcttacccaagcttgagtgcagtggcatgatctcagctagctgcaacctcttcttcctgggttcatgcaattctcatgactcagcctcccaagtagctgaaattacaggyatgctccaccatgcctggctaatttttagatggggtgtcaccatgttggccaggctggtctcaaactcttgatc

SEQ ID NO: 573298 - DNA, 546 bp, Homo sapiens
tatatttattctaattgtatgagttaataaaaattaagctctttgaagtttgtatattctcaacatttttgatggcttaaatgtatggattcattttagcactctgtaatcttcaatatatttctactcttatgtatgtgcttagctcattttttattcttaaaaaatcatctagctaacattattcaccaaatgcttcaagtatttattaatttaatattgttaaacattattcttttatgaataaaaatgctcttaaaatagccatttgtgacagctttccaaatattmatcataataaagctatgtattacagtaataaagtttaaagatgagcaagcattaggtactcacagttacataagtttgactgtggaaagttatttttcttatgtacttaatatatttatcaatactataaatggtgatattgtagtatcctagtgttaaaattcatcaataaggcaaatcaaagcaacagtcacgagcatgaagaattagacataaatttttttctttgaagatagacgttgaggattttggtat

SEQ ID NO: 573299 - DNA, 546 bp, Homo sapiens
tatatttattctaattgtatgagttaataaaaattaagctctttgaagtttgtatattctcaacatttttgatggcttaaatgtatggattcattttagcactctgtaatcttcaatatatttctactcttatgtatgtgcttagctcattttttattcttaaaaaatcatctagctaacattattcaccaaatgcttcaagtatttattaatttaatattgttaaacattattcttttatgaataaaaatgctcttaaaatagccatttgtgacagctttccaaatattcatcataataaagctatgtattacagtaataaagtttaaagatgagcaagyattaggtactcacagttacataagtttgactgtggaaagttatttttcttatgtacttaatatatttatcaatactataaatggtgatattgtagtatcctagtgttaaaattcatcaataaggcaaatcaaagcaacagtcacgagcatgaagaattagacataaatttttttctttgaagatagacgttgaggattttggtat

SEQ ID NO: 573300 - DNA, 505 bp, Homo sapiens
ttacattttggcatgattttgcagcggctggtaccagttgttcctttccatgtttagcacttccttctggagctcttttagggcaggcctggtggtgacaaaatctctcagcatttgcttgtctgtaaagkattttatttctccttcacttatgaagcttagtttggctggatatgaaattctgggttgaaaattcttttctttgagaatgttgaatattggcccccactctcttttggcttgtagagtttctgcccatggcttattttttcacgttgcgtatcgaaatgccagctattcagaaatgccatacagttgcttggataaatattaatttagaaggaagaaatgacctagtgttctcatttataattcttataacttgtccggtttagacattatatatggtccaatatctcctacacatcagatttttttttcccaagatggagtttcactccctcagaagtagtcatcattttatacatgtatcattctatttata

SEQ ID NO: 573301 - DNA, 541 bp, Homo sapiens
acatgcctatagtcccagttactcaggaggctgaggtgggaggatcacctgagcctggggaggtcaaagctgcaatgagtgtgatcacaccactgcactgcagcctaggtaacagagtgagacgatgttcctccctgcaaaaaaatgagtgtgtgtagttttggaagacactgccaaaccttcctctaaagtggctttactattttgcattcccataataaatgagaattcctgctgcttcatattctcaccagcacttggcattgtcagtgctctgtatttttgtcattctaatatgtatggagtggcatctcattgtttcaatttgctattttctaattaaatatatacatrtatatatatatatatatatatatatatagttggacatatttggatatgacttcttacatcttccttgataaaatgtctgggtgtctgttcagttgttttgttcattttgtacctgggttgctcattttcttattttggagtttcaaaagtactttgtacattttggattataatattttatcagctg

SEQ ID NO: 573302 - DNA, 541 bp, Homo sapiens
acatgcctatagtcccagttactcaggaggctgaggtgggaggatcacctgagcctggggaggtcaaagctgcaatgagtgtgatcacaccactgcactgcagcctaggtaacagagtgagacgatgttcctccctgcaaaaaaatgagtgtgtgtagttttggaagacactgccaaaccttcctctaaagtggctttactattttgcattcccataataaatgagaattcctgctgcttcatattctcaccagcacttggcattgtcagtgctctgtatttttgtcattctaatatgtatggagtggcatctcattgtttcaatttgctattttctaattaaatatatacatgtatatatatatatatatatatatatatakttggacatatttggatatgacttcttacatcttccttgataaaatgtctgggtgtctgttcagttgttttgttcattttgtacctgggttgctcattttcttattttggagtttcaaaagtactttgtacattttggattataatattttatcagctg

SEQ ID NO: 573303 - DNA, 541 bp, Homo sapiens
acatgcctatagtcccagttactcaggaggctgaggtgggaggatcacctgagcctggggaggtcaaagctgcaatgagtgtgatcacaccactgcactgcagcctaggtaacagagtgagacgatgttcctccctgcaaaaaaatgagtgtgtgtagttttggaagacactgccaaaccttcctctaaagtggctttactattttgcattcccataataaatgagaattcctgctgcttcatattctcaccagcacttggcattgtcagtgctctgtatttttgtcattctaatatgtatggagtggcatctcattgtttcaatttgctattttctaattaaatatatacatgtatatatatatatatatatatatatatagttggacatatttggatatgacttcttacatcttccttgrtaaaatgtctgggtgtctgttcagttgttttgttcattttgtacctgggttgctcattttcttattttggagtttcaaaagtactttgtacattttggattataatattttatcagctg

SEQ ID NO: 573304 - DNA, 558 bp, Homo sapiens
gaattacaattcaacatgagatttgggtggggcacagagccaaaccataccactatttaaaaatgcacaaaacatctgaataggcatttctcaaaagaagatatacaaatggcaaacaggtatatgaaattgtgctcaacatcactgatcatcagaggtaagtaaatcaaaattccagttaaataactccctctagttataaaagacttttatctaaaagatgggtaataagaaatgctggtaaggatatggagaaaaggaaaccctagtacactcttggtgggaatgtaaattagaactgccattatgaataacagtagagcggttcctcaaatactacaattaggttaccatatgctccagcaaacctccctgctaggtttatatacaaaagaaaggaaatccacatacaaaagtaatatcagcacttttgtggttttagcagcactaatcataatagtcagtttttgaaatcatcctaagtgttcatcaacagactaatagataaagaaaatgtgatacatatacraaatggactactacttagtgataaaacaa

SEQ ID NO: 573305 - DNA, 606 bp, Homo sapiens
gaaatggactactacttagtgataaaamaagatcctttcttttgtaccaatatggatggaactagaggacattttgttaacttacataagccacatcctgaaagacacacttcataggttctcatttatgtgtgggacttaaaaattaaaataattgaactcatggagatagagatttgaatgatggttaccagaaattgggaatggtagtgggtgaaggtgggaggggatggtcaatgggtacaaaattatagacagaatgaataagacctagcatttggtagtacaacagggtgactacagtcaacaataatttattgtacatttaacaataactgaaagagtataattggaatgtctgtaacacaaataaatgataaatgcttaaggtgatggatatcccacttattgtcatataatcagtacatatcacatgcctatattaaaatatctcatgtacttcataattgtgtacacctactatgtacccataaaaaataaaaattttaaaaaggaagataaatttctttctatgagtacacaactaataaatggagaatctaagatctatctcaagtagttctggctccagaggactgactgtta

SEQ ID NO: 573306 - DNA, 652 bp, Homo sapiens
tttaatattccagcccagctcactggaaacaaccaccacaaaaaactaaaatgacagagcagtgttctgtagagcaacatgatttgtctgctttaaatggagaataatggttttaagtttagagcagaactaaagggctcaattactattcatggattctgaattgttctactttagaaactcctttagcatgaaatgttcatcaaaatcaatgcatgaaactatagaaaaaaaataaaaacccagtttcccatatgaataaaggacttcccaactaagaaagtctataaaaaaaaaaagtatcaccagtttacacaaacccatcttaggcagtaggactaaacattttaaagtaataatttttggttgaatgttgataggcagaaaattttatatatataaaatccaaagtcgtcatatagaagactttagtactaagctaccattgattttctttaatctttaaaaactatactaatggttatccaaactatatggacatgctttttactgaaacaaaccattgtccttggaattgagtaggtttactgaagacaatagtgtaacagtaaattgaaaaaatatatgatttctttaactatttttgtatctgactgtaasgatctgattagtagctttcacactaaagaac

SEQ ID NO: 573307 - DNA, 588 bp, Homo sapiens
ctggaggccagaagtctgaaatcaacatattgactgggctatgttccctcccaaccctctagggaaggatccttctttgcctgttccagctttcgatagccccaggtgttcctgagcttttgacatcataactccaatctctacctccaccttctcatggctgtctttcctttacgtcttcctgtgaccaaattctcctcttcttataaggacatcagtctcgttggattagggcccaccctaatccagcacarttttgtcttaacttgattacatctgcaaggacctctggtttcaaatgagatcacattcacaagaggttaggacatattggggctgggggcactcaattcaaaccataatagtctccaacaatttcaatcccttgccagcccttaaatgttttcttatgcattctagcactttcacagttatcatttatataatctttctgttttctattcagtgtcagctcttatttctcactcatttcgttgtgcttggccatagtagctccttcctttttctcattgtgttgccgacttacaaatcagaaaaaaaaaagagcatgaaataagaagaaggctt

SEQ ID NO: 573308 - DNA, 533 bp, Homo sapiens
ttggcaatggactctttagtgcaaagtcctaaagccttcaagacccaaacttttctcactgggcaagcaatttgcgggaaattaaacaagtccaaaatattgaacaaatgaagaaaggggccattttaacagacaggaatacttcataytgtaaagatggccaggtgtagtggttcacacctgtactcccagcactttgggaagttgaggcaggaggattgcttgaggctaggagtttgagaccagcctgagcaatacagggagacctcatctttgctagaactttaacaattagctgggcatggtggcatgcacctgtagtcccagctatgccagaagagaagggaggattgcttgagcacaggagtttgcaactgcagtgagctatgatcttgcaactgtgctccatcttgggtgacagaatgggaccttgtctcaattttttaaaatatatatatacatatatatatatatagagagagagagagactatatatatgtgtgtgtgtatatatatatatacagagagagag

SEQ ID NO: 573309 - DNA, 614 bp, Homo sapiens
tttatattaattttttacaaccagtttatgcgatgcatactgtcctcatttatcatataaggaaactaaaacttaaagagtttaatatattgctcaaggttatccagtgtattggtttgctagggctctgtaacaaagtaccacaaaccaggtggctcaaacaacagaaatgcattgtttcacagttctggcgtcaaaaagtccaaaatcacagtgttggcagctttggttccttctgagggctgcaagggaaagattgttctgggtccttctccttggcttgtagatgtctgtcttctccctgtgtctctccatgtcattttttcctctatgcatgtctgtctctgtgtccaaatttttccattttaaaaggacattagtcattgctgggcacaatggctcacacctgcaatcccagcactttgggaggctgagagaggcagatcacttgaggccaggagttcgagaygagcctggccaacatggtgaaacgtgtctctgcaaaataatacaaaaattagctaggtatggtggtgcatgcctatagttccagctatttctactcaggaggctgaggcatgagaattgcttgaacccaggaggcagacgttgca

SEQ ID NO: 573310 - DNA, 475 bp, Homo sapiens
tataacactgcttgcactgagattatttttaaagtcactttttttgtggcaattgatatgttttcacacacaggtgttatacaatatttcttttatgatagaaaatacaaaatgatgggtcaatatatggaaagaatgttaaattatagttcatatattcaaaaagagcaaatatcaggaagatggtatccaaatgactgaaattggtgaactcatttaggcaaagtgccagtcactttccatcttatctactttaatgaaacatttattatactaaatatttattattattattattattattattacaattttgagatggagtcttgctttgtcaccgagcctggagtgcagcggcatgatctctgctcactgcaacctctgcctctcgggtaaaagcgattctctgcctcagctgggagtacaggcgcccaccaccaygtccagataatttttgtatctttagtagagacgg

SEQ ID NO: 573311 - DNA, 553 bp, Homo sapiens
gtaactattttgaatatttttgaagaataaattaagaaattagcaattctyatatttcactagtttgaacttataaagaacaaggaaatcttgtgatacaatttatatcaggaagaaaaatggttcatcatgccctccatcacatattctggcaatgtcatatcctcttacttcaaggaacaatagtttgtttcatctttcacactaatacccatttcagaagaatgaaaggccatattcgtgggaaatgacatttgaaaactggaaaaaagggaagagcatattcatgaggagagaatgattcattttaggggtgttgttctttccgatgcacaataaatcaaagttaaatataattcatttcttcattcaataaacactgagtgagagtccaatgtgtggcaagctttgggttgtcataattactttggtgaatacagaaaaagtgtctcctctcataggagtacttatattttagtcaatggagtcagattataaacagggaaaactataaggtaatttcacacgagaagtactataaggacaataaaag

SEQ ID NO: 573312 - DNA, 553 bp, Homo sapiens
gtaactattttgaatatttttgaagaataaattaagaaattagcaattcttatatttcactagtttgaacttataaagaacaaggaaatcttgtgatacaatttatatcaggaagaaaaatggttcatcatgccctccatcacatattctggcaatgtcatatcctcttacttcaaggaacaatagtttgtttcatctttcacactaatacccatttcagaagaatgaaaggccatattcgtgggaaatgacatttgaaaactggaaaaaagggaagagcatattcatgaggagagaatgattcattttaggggtgttgttctttccgatgcacaataaatcaaagttaaatataattcatttcttcattcaataaacactgagtgagagtcyaatgtgtggcaagctttgggttgtcataattactttggtgaatacagaaaaagtgtctcctctcataggagtacttatattttagtcaatggagtcagattataaacagggaaaactataaggtaatttcacacgagaagtactataaggacaataaaag

SEQ ID NO: 573313 - DNA, 620 bp, Homo sapiens
caccgggctggagtgcagtggcatgatctcagctaactgcaaactccacctcccgagttcaagtgattctccttcctcagcctcccgagtagctgggactacaagtgtgcatcatcacaccaggctaatttctgtatttttagtagagacagggtttcaccatattggccaggatggtttcgatctcttgacctcgtgatctgcccatctcagcctcccaaagcgctgggattacaggcataagccaccgtgcccggccttcccattcttaaaaaatgggaaccactgttttatagactttttacttggcagcctgaaggctaaaggaaagctagcttcattttggaagggagctggcaaatgccttccagccgcctctgcccacctgccggagtccatccctgttttggcagtgaggtgatggggtttcaggtctttggaagtcagacagtgtgtatgagaaatggactcacctgcagtttcagtaaaggatgaaaaataagagacatggcgcactgttcyctcagcagtgtccctaaactgcaaaatgctccttctcactaaaaattactggggatgagggaaggcaaagaccagaaggtcatgaaaagaactgccca

SEQ ID NO: 573314 - DNA, 569 bp, Homo sapiens
ttttttgttgttgctgttggtaagaacagggtttcaccatgttgcccaggctagtctcaaactcctggtctcaagcaattcacccacctcggcctcccaaagtgctgggattacaggcatgagccaccactcccagcccaaggtggtcattttaatgtgcagttgttacagacaagcaaatgayctccagtttgtaaagatctctctgagtcaaaaggagaccatgactaaattccacctttaacttcaaggtgatccataaacttgaggagttttgcaaacgccatttggctcagttactgagattctttgtgtcattttggcagccacccctgtgcctgagacagggagctcaggcagctggttggagctgcttgtggattcagatattccagaactgccggttatgtaggaagttcatgctatagagaggaagatgagtatgagacagagaatccatatttatgaaacaccagacattatcctgggcacactccatcctcacagccatgttgtgaagatacttacatatgctctgtccagcatccagggaaactaaggtctagagg

SEQ ID NO: 573315 - DNA, 568 bp, Homo sapiens
aagctctattcaaatgttctttcttcaatttaaatatagcatatctatattcaatgatgtatacacatatacacatatatatgtggtatatatatgtatatatatacatacatatatatakagagagagagagagaggaagagagaaagagaggaagagtgagggagagagaaacagatagtaatggttatgaattcagtctttcctgtagaacacataaacctgtgaatattttgtccagccttccaatttaagatgattatttatgtctgttctctgcaaagaaataaaccacttttcctcctaggttttaaatgtacttataattctttcttctggacgttttagctcattgctatgttatcttgagtgtgccacagaagataccttaaaagaatcagtatatcctaatttcttcctcatccttaaggcttcttgccactgtaaagctttacttggagattttcctgacttactgacttgtacagaactataagaaataccaccttttaaattttaggtcattaaaaatccatacgattgcctttgctctaaatatataaaaaga

SEQ ID NO: 573316 - DNA, 540 bp, Homo sapiens
tcaagctcattgatgagcagttaattgccagaacaaaattcaactatttttaaaggaagacaacaaaatccaaacacttggtagcacaccatttatagtatctagcattcaataaaaagttacaagatataaaaagaagctgaaaactacactgataactgacagaaatttcagtcaataaaaacaggctccaaaacgacaggtgatagaattaacagacaaaaactttaaagcatctattataaatatgtttaaggaattacatttaaaaaactcagtatggtgagaataattttttaaaactgatattacaatatttaaaataaaaaatgtggctgggcgcagtggctcacgcctgtaatctcagcgcttttggaggacaargtgggtggatcacttgaggtcaggagttcgagaccagtctgaccaacatggtaaaaccctgcctctactaaaaatacaaaaaattagctgataatggtggcagacgcctagaatctcagctacttgggaggctgaggcaagagaatcctcttaacc

SEQ ID NO: 573317 - DNA, 595 bp, Homo sapiens
tggaaaaagatattgctggtgatagatgtggccagtctggaaacccacagtaatttagagaaaaggaaaataaggttaccttataatcttattagcaagaaaaaaaaatatcctgagccccaaatggtttaaaaggcttagaaatctatagttgaaggcttaaagccttcaacagtatttactaaaaaaactggagatgttgctggcacaagtgcctttaagagggaaaaatcattagttctccattaccataaaaaaatgagaggcaaaaggatgcatgctattttttktctgatggagggtggtagtgaacataatcccagtaaagcaagactaagtcaggcagggaaggagagcaaacataaggagtaagtaagtgagccggcaaacgcttccccaaagccagggctggctgctcagtcttctcaggccatcaccaggtacactgtacaaactcctacatcttggcatcatctatagttggaagaagaaaagcaagcaattggcagggtgcggtggctcacgcctgtaatcccagcacattgggaggccgaggctggcagatcacttggggtcaggagttcgaggccagcct

SEQ ID NO: 573318 - DNA, 595 bp, Homo sapiens
tggaaaaagatattgctggtgatagatgtggccagtctggaaacccacagtaatttagagaaaaggaaaataaggttaccttataatcttattagcaagaaaaaaaaatatcctgagccccaaatggtttaaaaggcttagaaatctatagttgaaggcttaaagccttcaacagtatttactaaaaaaactggagatgttgctggcacaagtgcctttaagagggaaaaatcattagttctccattaccataaaaaaatgagaggcaaaaggatgcatgctattttttttctgatggagggtggtagtgaacataatcccagtaaagcaagactaagtcaggcagggaaggagagcaaacataaggagtaagtaagtgagccggcaaacgcttccccaaagccagggctggctgctcagtcttctcaggccatcaccaggtacactgyacaaactcctacatcttggcatcatctatagttggaagaagaaaagcaagcaattggcagggtgcggtggctcacgcctgtaatcccagcacattgggaggccgaggctggcagatcacttggggtcaggagttcgaggccagcct

SEQ ID NO: 573319 - DNA, 562 bp, Homo sapiens
ggctagccagttttcccagcacagtttcttttaaagagcaaaagtttgtaatatgaatgagattcaatttatcaatcttttcttcctatggttcatgcattttgtgcctttcaaaaaaatccttgcctaactcaaggttaaaaacaattttctctcatgatttttctggaagtttcatcattttagtttttatatttaagtctttggaagtttattaaccataatctatataacagtttgaatttcatatttaattctataaatgtttttcaaaccacttttacacccacacgagtggaagttatatatattaaattcctagtgcctcaatactctttctcttggattcttctgttaatggattacctatgatattgaaggtttttcctatgccagcattagcattcaatttctttttgaaatatataaatattgtgtgtcaatcacaggtgtctgatagtgagcaatagaaaacaactccrcttctttaagtaatttattgggagaatatgagggagctgaagaaacagttttcacatagaaggaaacagttagttccaaa

SEQ ID NO: 573320 - DNA, 543 bp, Homo sapiens
gcacctgtagtcccagctactcgggaggctaaggcaggagaatggcatgaacttgggaggtggagcttgcagtgagccgagatcrcgccactgcactttcttgctctgggcgacagagcaagaaagactctgtctcaaaaaaaaattctagaaaaattttatatatgtaacaactaaataacaaacttctaaataaatatgggccagtgaaaaaaaatcaaaagaaaaataaaaaagacttttgagcttaaagaaaacattgttagcaccctatcaaatctgtgagatgaagctaaagcagcacttagacgggtattcatagcacaagaggcctatattagaaaagaaaagcaagtttcaaatcataacttcagcttccacaaaagaaactagaaaagaaagagcaaaaacacatgcaaacaacaacaaaaataatgaaacagaagaagtgaaacaatcataccttaagtcaataaaatatgaaagaaaataaagaaaattaataaaatgaaaacctgcttctttgagaaggtctataaaatt

SEQ ID NO: 573321 - DNA, 543 bp, Homo sapiens
gcacctgtagtcccagctactcgggaggctaaggcaggagaatggcatgaacttgggaggtggagcttgcagtgagccgagatcgcgccactgcactttcttgctctgggcgacagagcaagaaagactctgtctcaaaaaaaaattctagaaaaattttatatatgtaacaactaaataacaaacttctaaataaatatgggccagtgaaaaaaaatcaaaagaaaaataaaaaagacttttgagcttaaagaaaacattgttagcaccctatcaaatctgtgagatgaagctaaagcagcacttagacgggtattcatagcacaagaggcctatattagaaaagaaaagcaagtttcaaatcataacttcagcttccacaaaagaaactagaaaagaaagagcaaaaacacatgcaaacaacaacaaaaataatgaaacagaaraagtgaaacaatcataccttaagtcaataaaatatgaaagaaaataaagaaaattaataaaatgaaaacctgcttctttgagaaggtctataaaatt

SEQ ID NO: 573322 - DNA, 544 bp, Homo sapiens
aagcagttgcacatacatacagtttcctgatatataaaagtgaaacactagagtgcaataggagaaaaatggccttttcaataattgctgctgggccacttrtatgtttattgatattttcaaaaaagagtctattaatagattcctatattatactatatacaaaataaatataaattgaatggaaatataaatgtacaaattaacactactagaagacagtacagaaaaatatctttatgaatttgggctagcaaaaaaatttaacacagaaaaggattaatcacaatgaaaagagattaaaaattctactgtaatacaactaagaatttcaaaagtcaccattaagagaataagaaataaagccacaaaagactcttatccaatatatataaacaaattagcatttcacatttggaaagtgagacaaatgctagaacatgcactttataaaataggacatccaaatgtccaataaacatgaaagggtactgatcttcacagtaaagataattgtacatttaaatacaaattataaccaaag

SEQ ID NO: 573323 - DNA, 544 bp, Homo sapiens
aagcagttgcacatacatacagtttcctgatatataaaagtgaaacactagagtgcaataggagaaaaatggccttttcaataattgctgctgggccacttgtatgtttattgatattttcaaaaaagartctattaatagattcctatattatactatatacaaaataaatataaattgaatggaaatataaatgtacaaattaacactactagaagacagtacagaaaaatatctttatgaatttgggctagcaaaaaaatttaacacagaaaaggattaatcacaatgaaaagagattaaaaattctactgtaatacaactaagaatttcaaaagtcaccattaagagaataagaaataaagccacaaaagactcttatccaatatatataaacaaattagcatttcacatttggaaagtgagacaaatgctagaacatgcactttataaaataggacatccaaatgtccaataaacatgaaagggtactgatcttcacagtaaagataattgtacatttaaatacaaattataaccaaag

SEQ ID NO: 573324 - DNA, 555 bp, Homo sapiens
caattccccaaaagttcttcatctccatctgagaccacctcagcctggacttcattgtctataccactatcagcatttttgtcaaagccattcaacaagtctctagaaagttccaaaactttcctacatctccctgtcttccaagccctccaagtatttgagaatttccaaactttccccatttttctatcttcttctgacccctccagactgttccaacctcttcctgttacccagttccaaaatcacttcyatatttttgggtatctttacagtagtgccccattcccagaaccaatttactgtattagtccattctcatgctgctatgaagacatacctgagactgggtaatttataaaggaaataaatttaattgactgtccatttcacagggccgggaaggcctcaggaaacttacaatcatggtggaaggggaagcaaacatgcccttcttcacaaggcagcaggagagagaagaatgagagctgagaaaagagagaagaatgagagctgagcaaagagagaagcccctcacaaaaccatcagatctca

SEQ ID NO: 573325 - DNA, 443 bp, Homo sapiens
tcatttcattctcccctggtaagtggtctgctgagaaatgcaatgatgttctaatgggtgttcccttataaatgtctagatgtttctctcttgctgtttttagaattatctctctgtccttttattattactattattattatcatactttaagttctggggtacatgggcaggrcgtgcagatttgttatataagtatacacgtgccacagtggtttgctgcacccatcaacccgtcatctacattaggtatttctcctgatattatccctcccctagccccctaccccatgacaggccttggtgtgtgatgtttttcttcctgtgtccatgtgttctcatcgttcaattgccacttatgcatgagaacacacagtgtttggttttctgttcttgcgttagtttgctgagaatgatggtttccagcttcatccatgtccctg

SEQ ID NO: 573326 - DNA, 587 bp, Homo sapiens
tgtgagtcaccacgcctggccttcccagaattgtttagaatgcaattaaactgtccaaaatttatctttctggcactatgtgtgattttttttcctccaccttcctgtccagcctctctggttcactttctttttctaaacatgccacatactttcatattaatgtggttttgtctttttgttttgtttccatttcagccaccaaatagccaaagtccaaattattagtattggctccatgcagctttctcaaatgtcgaatttatctagtgagcatagctcctgtctctcttttgctgcagcatgttgcatagatctggtccctctcttacacgctaagttgatcaattgcatttctatgatccctctagcttttgagttccttaacagccatggctstttttaatttctatattccttttgcatcttggatgagtgcttagaccatagtatatatatgttgaagtacacagaatagacagatgatagatagatagatagatagatagatagatagatcagtagataatggagatagaagatgagatacatagacacagagagagagatagatgatagataaatac

SEQ ID NO: 573327 - DNA, 362 bp, Homo sapiens
aatgtattagtccattctcacactgctataaggaactacttgargccaggcgcagtggctcatgcctataatcccagcactttgggtggccaaggctggtggatcacctgaggtcgggagttcaagaccagcctgaccaacatgtagaaacctcatctctactaaaaatacaaaattagctggggtggtggtgtatgcctataatcccagctacttgggaggctgagacaggagaatcgcttgaacccaggaggcagagtttgcggtgagccgagatcatgccattgcactccagcctgggcaaaaagagcaaaactccgtctcaaaaaaaaaaaaaaaaaaagaagaaaaaagaaaagaaa

SEQ ID NO: 573328 - DNA, 362 bp, Homo sapiens
aatgtattagtccattctcacactgctataaggaactacttgaggccaggcgcagtggctcatgcctataatcccagcactttgggtggccaaggctggtggatcacctgaggtcgggagttcaagaccagcctgaccaacatgtagaaacctcatctctactaaaaatacaaaattagctggggtggtggtgtatgcctataatcccagctacttgggaggctgagacaggagaatcrcttgaacccaggaggcagagtttgcggtgagccgagatcatgccattgcactccagcctgggcaaaaagagcaaaactccgtctcaaaaaaaaaaaaaaaaaaagaagaaaaaagaaaagaaa

SEQ ID NO: 573329 - DNA, 627 bp, Homo sapiens
tatagcactgcaaatcatactaaccatcaggagacatctcacatcccaggcactcagatctttatttcccccaaacaaaatagagaaataaaaagataactactttaaacaatttttcttcctgttcaggttttaaaaacaatgtttttgtttttatgttctagatgattagtcaagatatttactagaggcaatgaaaggtcacggaaatacttacgctacagacaagttcattgaaaatttcaacaaggaagtgtgtatagacacagcctattaaagctgaaagagattctaaaattgtgtaacctgattctcttatttctagatgaggatgcggagcccagaaaaatggcaytatttctaaagctgacatgtaaacccccagtctccaaaaccctaagagtgtacctttctcattaatttctgagttcatcctttttgttcatattataactgtgatcttttctcccttcatattttctgtttgggaagcgatttctttgtaataattggcctgttagagtttatttctcttctggtgttcacctttgtataagagttattgttaagtaatatatggtaacttagtggcagtgaaaccaccactcaaaccaaaatctagggcct

SEQ ID NO: 573330 - DNA, 532 bp, Homo sapiens
gactgttttccttctagaagaatttcaattaagtatagaagaaatgagggaaacgcaaaatcaccattaggcaaatacattaacaattgttgcaggcaagagccaccaatggatgttaaccttaatgggtgacagtttacagagaaacaaaatattttcatagcttcacagtatctcctgaaagacaaggagaaggaaaaacagcaactctacaatggagaaactcagcacacacccttaaccaagtgatcaaagttaacatcagtaattacgtcctccttgttaggatatacagagaagggcacagtatcacatcttatagcattcttaccaaaaatgcataaccttaagcaagggggagaaaacataaaaaaamccaaaacgagagacaattctacaaaatacctgaccagttctcttcagaaatggcaaggtcataaaagacacggaaagactaaagaaatgtcacacactggaggagactaaggagatgtaataaataaatgcagtgtgaaattatggattgagtcct

SEQ ID NO: 573331 - DNA, 499 bp, Homo sapiens
tcctgcctcagtctcctgagaagctgggattacagatgcccaccaccacacccgactaattttttttgtatttttagtagagatggggtttcaccatgttggccaggctggtctcaaactcctgacctcaggcaatccacctgcctcagcctcccaaagggctgggattataggcgtgagccaccatgcccggccaaggcccttcctttcaacagagctctgggcctgtggtagcaactgcaagctggttcccaacatccactcctgacttcttccaaaaaagtaaaaccctcasttctgagctaggtacatggctatccagaacaaacttctcatccttgtttgcagttaggtgtggccatgtgagtaagtactttctggctatggtatgacactagaagtgtggcttggcagcttccagaaacttcccttcacagactctggcacatgccttctgccccttcctcccagtgacaggaatgtgggtgtggaggttgga

SEQ ID NO: 573332 - DNA, 498 bp, Homo sapiens
aacatttctaacatcacagaaagctacattgaacagtgctgggttaggtaataattcaacgttaaaaggaatgaattaaatctataactgacatgaaatgaagtagaagaatgtgttgaagtggaaagggcaaatggcagaattatatggatagcatgatcccatttctgtataaaatagctgtgtctttatacatacattcagtgtacagaaaaatctggaagaatacctgaaaatattaactttsgtcatttctgtagatagggaatgagtagggggacactttcatttctgacattatttatcatcagttatttgaatatttaaaaactgcaacaattaactgaatgttgctaaatccaaataaatatttttattacttattttgaaagatttttggctgccttctactatctcagcgacgtactctttcttgaaatactgaactactttagcttaatagacctccctcatttctgttttatctcctcactgaaa

SEQ ID NO: 573333 - DNA, 557 bp, Homo sapiens
cggctcactgcaacatccaccccctggattcaagcaattcccctgcctcaatattttagcattttatcctttctcrtctcattaaaaggtacttacttattgagctcctgctatatttcagtaactattctcaatgttgggtatatagaaatgaattaaagttttgtcctcaaaagttgtatacgagtcttggctgcaaggctgggaagcagaacccatgaacaaacaagatttcaccttcaaaattgtaaattccattcctaacacagccaaacccacctttcccagcaaacctaaaattatgttggattgttgactaagcacttataggaggcagtgacagagtacaagagtgctctccaaagggccatagtcttcatatttatcttcttcccaggtgacagcaagaaaaagtgactcttttttcattgtgtctcccaagtatccttattgacttggtatagcccctactgaactactgatctttcaccatctctgctgggatggactgagaagagaactcccagcaagaatttgcaagatatccataagcattg

SEQ ID NO: 573334 - DNA, 429 bp, Homo sapiens
cagggttaataaaaggactaagctgaaagaccaccattctaatttggaacatctggagacatcagaaggcccattagaagaccctaaacttctaactttttctttcaaatactctgaaacgaaatccaccaacttatgaatactatcatttttttggtggtggaattccacaggactccattttgttcaccattcttgaagcatcagtaaaataataaagatgattccmactccctcttttttttttttgagacggagtctcactctgtcgcccaggctggagtgcaatggtgcactcttggctcactgcaacctctgcctcctgggttcaagcaattctcctgcttcagcctcctgagtagctgggattccaggtgtgcaccatcacacccaactaatttttgtatttttagtagagacagggtttca

SEQ ID NO: 573335 - DNA, 435 bp, Homo sapiens
gcacaattttgaggtgttcatttattgtggaaatattgatcgtatatacagtgtaaatcaatttgccagttgctataacaataatgatgaatgaaatatggcaaatcaccttgaagatactaattcatttgtggataactattatttgttacaaaataagaacatataaagttaaataaacttttttcttctatttgcttgcttctatatagttttacaggaagataagacgcagaaaatatgttttggtgttgtttttgttttgagatggagtttyactctagttgcccagactggagtataatggcacaatcttggctcaccgcaacctctgcctcccgagttcaagcaattctgttgcatcagcctcctgagtagctgggattataggcatgcaccacctcgcccagctaattttgtatttttttagtagag

SEQ ID NO: 573336 - DNA, 551 bp, Homo sapiens
accataaattttccggatgcagcaatgtcttgggttttcagtgctgtcaaacttgtctactttcctcttgggaagagccattttaatccctgatccctgtcccacctaaatcaaggcagtgtgattgccaaaaacagcaaagtttctaaattagacaccgtatcagtaaaagaacagawttattccatttaatgccagtgctaagttgggctattgtctgaaataacagatttgggtaaatacatttaccaatggagcaataatatttttgtcttagccctttagaaccaaacttcccgtgtctgtctgttccataaaaacacttcgaggtcttttaaagcactatatgaagtgtgtctgatcagcacaaaagtaaactgaaatttggcaacattcattctacaaatgcgagtgtctaaagtggacttagggcgtctgaattatcctgctggacatctacaatgaaataaatatttagaataccaccagattggctcttcctgttgtgctacataaacagtcatatatgcagagaattatggtatgattgc

SEQ ID NO: 573337 - DNA, 609 bp, Homo sapiens
ggataaaaaaatatgtggcacatatacaccatggaatactatgcatccataaaaaaggatgagttcatgtcctttgcagggatgtggatgaagctggaagccatcattttcagcaaactaacacaggaacagaaaaccaaacactgcatgttctcactcataagtgggagctgaacaatgagaacatatggacacagggaggggaacatcacacaccagggcctgtcagtgggtgggggtcaaggagagggagagcattaggacaaatacataatgcatgtggggcttaaaacctagatgacgggttgataggtgcagcaaaccaccatggcacatgtatacctatgtaacaaacctgcacgttctgcacatgtatcccagaacttaaagtaaaatttgaaaaaaacaaaagatgtaaatagrtctgagcagtagaaaggctagactatagtcgatattctcaggggtccacttatctcaaaccttaccacaatcagtgtgatctggacaaattctagtttaaaatgtctgcatctctgtgattaaggcatgtttctgaaactggggaaggccactttctggaaatgcaaaggaatcaccaccaccaga

SEQ ID NO: 573338 - DNA, 609 bp, Homo sapiens
agggacttctggagtgctgtcaatgttctgctttttgatctaggtgctggttgcatgggggaatttaaattgtaaaaagtcatcaaaccatacacgtatgatttctcaacttttctatatattatacctcaaaaattcaaaaatgaatgaaaatttkcttataattaaactatggaaatataaatgcagtgaacttattggaacacttcttttttatacatactgattaacaaaaagaattttctatgtttttaattatcattttgcaaaaaatcaagtgaagattattttgtcttctctttgctttccagattcttaagcatttcaattaaacatcattgggcagggggtatatgggcaaggagtatgtgaggttgcatttggcacaaagaaaatcttaataaattataaatattcaatgttttaatttagaccacgttttacaaccataataaagttagaaattaaaagttccaatgagtcaaatgtaagagtacacaaaaatttataaaacttattcaaaacaaataaaataaacattaaattactaacatttaagaaaattaaatcaatgaaaaaaatgtgtacaagaaaaagaagatcaataat

SEQ ID NO: 573339 - DNA, 567 bp, Homo sapiens
caaaaaagcaagaaaatatgacacatcctaagggatacaataattatccagcaatagatcccaatcaaaaagaaattaacacattctgggaaaagtaatttaaagtattgattctaaagaagttcagggagattcaagagaattttgaaaagcaattcaaataaattgaaaaaacaattcaggatataataataaattaataagatagatatcatagaaaaagaaccaaacaaaatttctggaactaaagaatttattgaataaatgcaaataaatacatttaaaggcttcacsaatagactagaccaagtagaattaagaatctcataacttgaagacagacaaatataaaagaatttaaaaaatgaataaagcctttgtaatatatgggacaccataaagcaaccaaatttttgcactattgcagttccaaagagcaaaaagaaaaggaaaagtttagaaaacccatttaacaaataataggtggaaacttcctaagtcgagccaaatatttagacatcaagatacagaaggctctgagatcaccaagcagatataatgcaaaaa

SEQ ID NO: 573340 - DNA, 580 bp, Homo sapiens
tcttatagattctggatattaggtctttgatagatgcacagtttgcaagtatacctcagattaattctaattattttagggggctttctctggctatactatcaaaatgatcaccccactcccacttttgctactcattcaccaaacatctccactcttccataaaagcacctatataattttctactccctggaatttcttttattgtctacagaaagtctactggtgatagatttatttaagaaagtctttattttacctttccttctgaacaataatttcactggacatggaatcctagataggcataatattttctttcaacactttatttcactttcttcatgtttgcatggtttctgatgagaaatctgtaattcttatccttattcatctgtacataagatctcttttaaaaattttcaatttttaatttttgtggatacatartattcatatatatatatttatggggtatatggggtattttgatataggcataaaatgtataataatcacatcagggtaaatgaggtatctattacctcaagcatttatcctttgtgttacaaacagtac

SEQ ID NO: 573341 - DNA, 588 bp, Homo sapiens
tatctgtgtatatgtgtatatatatacatgtgtgtatatgcatgcacayatatacatatatgtatagacatgtgtacattgtgtatgtacatgtgtacatgtgtatatatgcatatacatacatatgcatatatacacacatatgtgtgtatgtatgtatttatatatagagagagagagcagtatagggaggacaaggcgaatgtgaactgggaaaaaagcattatatatcataactaagaggtaattgatgatacttgagaaatcggtgaacaattaatatttgttaaaccattgactaggatgttaatttttcatttgaggtattttttagtgaaaggagagaaggaaatgaaatggtagctagtagatggtgaatttaagcaagatttgttccctttcttccactatacgcctctaaggaaattaaaaaaaaaaaaggcttgtttactttggaatgtggagtaaagagagcaacaagagattgaagtcaaagaataggtaagtgagcactgtaaggatctgcagagacagacagaaaaagtctgcatggagagtaaattgggaagccaattaaaaaattttggt

SEQ ID NO: 573342 - DNA, 623 bp, Homo sapiens
ctgaggcaggagaatctcttgaacctgggaggtggaggttgcagttagccgagactgtgccactgtactccagcctgggcgacagagcaagactccgtctcaaaaaaaataaaaaataaaaaaaattattcaaatacagtattatcaaaaagccccactactttatcactgattatcagtttacagaattctaagatgcctgtgaatgaaggtracaccattattttatgtaccagtgagaaaacatgcaccaatctataatacaatactttattcagaaatttttacttactcagaaagctattagacttacacagattatcatacctttatttttgtgcatttataaaaaataagcaaaatgaattggctaaagtattcctcaaatgttttcacattcataacatggctcttctgactcatttttcaaactcatatttggtggctttctttttgccacagaatatcattttgtgtgccatcaacagtattggtagtatagccttttaaaacaatttattaaaaacaaacaaacaaaaaaacccaaaccaaaacaccaaaagctaccatgctgggtttgcaattatgaagagactagtctacttgattcttccttaggtatg

SEQ ID NO: 573343 - DNA, 559 bp, Homo sapiens
taaataacctatgtacatcatgaccaatgaccagtcacttctatcaaagactgccagaggtcactgcacatctgttattcctgcatagatagcaaagtgtgtagttgtattgctattgcctgcttgtggcccagtgataaatccctttgacattttacaaaaatgaatcaaaagagggaactccccaacaaagatgaaagtgcagcaaaggaacaaaaactgataatcctggaatgaaattcaaactgaatataaagagttatcgagaaaagagctgactgtgggaatctgacacggctcaaaaggctctagatatgcagccagagaaacttgtaaagatgaatttactgacatgaataaagttgttgtgatgagaaaaatgtagataccccagagatcaagagaaggagaagacaagccacagacttggagaaaatacttgtaaaacatgtrtctgacaaaagactattattcaaaattatatagaactcataaaactcggctgactctcttttcggactcagcccacctgcacccaggtgaaataaacagccacgtt

SEQ ID NO: 573344 - DNA, 574 bp, Homo sapiens
tcgtctgtcctttatgtacattatatacacagataagtaaaacaaaatgcacagacatacatcttgcctcgctgtaaacaggatggcatagagctctctgcacctccccctcctctctcctcccctgaaccactgcacaaacacaatgagtattactcaacaggtgatttgrccattccccccaaaaaatatttcctatgaattgtaacaaaaaggtatttacaaaatgtgattttgctacctctaattttaacatatcaggcacttcagaacatctaaaaagaagagacatttcaaaaaagcttagcattgtcaactatatacacagtagtgaggaataaaatgcacacaaaacaatggatagaatatgaaaatgtcttctaaatatgaccagtctagcatagaaccttcttctcttccttctcaggtcttccagctccatgtcatctaacccacttaacaaacgtgaacgtatcgcttccagaggccgtcttaacaattccatttccaaaagtcatctccagaagacatgtattttctacgatttcttttaaacaaatgagaatttacaaga

SEQ ID NO: 573345 - DNA, 295 bp, Homo sapiens
gaaaaaagaaaatcttgaaagaagccagaggagaaaaacatcttatttacagaggagcaaaggtaagaaccgtatccaactcctcctcagaaaycgtacagccaagaagagagtgaactgaaacatttgaagtattaggagaacgaaatcaccaacctagaattttgaggctggtgaaattatcccccaaaagtaaagaaaaaaataagactttcttaaacaagcaaaaatttaggaaatttgttgccaatgaatctgccttgcaaggcatgttaaaagaaaatctttatatata

SEQ ID NO: 573346 - DNA, 565 bp, Homo sapiens
actcttttttttaaagtaatagcacctaatttaactagactttactttcccagctttggactaagacagtaacttttatttctgtttctaagtggtcaataaatctaaagtagaagtggaagccaagcataatgcaccattgtttatttctaactaaatgcatttggtttcttagttctttttgttttatacttggagaacaaattttaataattttttcaattaaagatggttggtgctcttacacttttcaaaactgaaagcataactaagtccagatgaattattataaggaaaggaactattttactctgtgacagccttggaacatattagaaagattttgaatacagtgatgtctattaattgactttaaagtcaacattaaaaaataaaagcagggaacaatttgtgggtaagaagagaggtttatgagaatttatggaaaaactatgatctaattcgagtctttgtatataaaaagttttatttttatctatggtgtttgctataaaatttttgttrcaatatattttaaataaaaactagtgatcattaaaataaa

SEQ ID NO: 573347 - DNA, 574 bp, Homo sapiens
tggaaggcacctcttcaggagagaaaatgagtgctgaataaagaggaagccacttataaaaccatcagatctcacgaaaactcactcactatcacaagcacagaatgggggaaactgctccctgatccarttatctccacatgctcccacccatgacacatgggaattgttacaattcaaagtgagatttgtgtggggacacagagccaaaccatatcattttacctttggcccttccaaaatctcatgtcctcacatttcaaaacacaatcatgcccttgcaacagtcccctaaagtcttaacttcccagaagtccaaggccaatagcttatctgagacaaggcaagtcccttccacctatgagcctgtaaaatcaaaagcaagttagttacttcctagatacaacagggtacaggcattgggtaaatgcacctgttccaaatgggagaaatcgatcaaaatgaagaggatacaggccccatccaattctgaagtccaatagagtggtcattaaacattaaagttacaaaataatctcctttcactccatgtcttatatccaggtcattgctg

SEQ ID NO: 573348 - DNA, 518 bp, Homo sapiens
tcaaatccggatttttctcatgttttactatattccagttcatagaaataaacatgaaagttgatgcataaagtctataagaatcacctcaaagatagcaaagtcccaacacagtaaaattaagttgataatatttcctattactggaaacgtggtgttctgagtgttctcataggttcctgatgaaaatattattggtaaaactgttttggaaamtatttttttaatttatatagaaattttttaaattaaaagttattaacttagtaacaagatatttattccagtatattcacagccataatgatgatagcaagaaagtggaaacaatctaaaaatagagaaattattagatcagttataatatttttaaaagatggaacattatgccatcatttaaaacaatatctttaacacatgcacacacatgcttagagcagcacaattcacaattgaaaagatatggaaccaacctaagtgcctataaaccaacaaatggataaagaaaatgtggtata

SEQ ID NO: 573349 - DNA, 518 bp, Homo sapiens
tcaaatccggatttttctcatgttttactatattccagttcatagaaataaacatgaaagttgatgcataaagtctataagaatcacctcaaagatagcaaagtcccaacacagtaaaattaagttgataatatttcctattactggaaacgtggtgttctgagtgttctcataggttcctgatgaaaatattattggtaaaactgttttggaaactatttttttaatttatatagaaattttttaaattaaaagttattaacttagtaacaagatatttattccagtatattcacagccataatgatgatagcaagaaagtggaaacaatctaaaaatagagaaattattagatcagttataatatttttaaaagatggaacattatgccatcatttaaaacaatatctttaacacatgcacacacatgcttagagcagcacaattcacaattgaaaagatatggaaccaacytaagtgcctataaaccaacaaatggataaagaaaatgtggtata

SEQ ID NO: 573350 - DNA, 646 bp, Homo sapiens
tcctgtctcagcctccaaagtagctggactacaggcacacgctaccatacccagctaattttaaattgtttttgtagagatggggtcttgcttggttgcccaggctgacctctttcatcaatataaaacaataatatgatagatattttaatcttaggatccatgtcaaacttaaaattactggataagagagaagaaacactcttaaatcatcaacttaaaataacgaattgcttttgagaatgatcacattttctttacaatctccatacatgatttttctacttagaaatccttctacattccaaaatctaataaaatccttcacttgattatgctgtwgatagtctcaaatctatactaatattttttaattgttatgttaacttaggtgagaatttctcttcaattgctctcaaataatcaactgcttaatacaattgccaaatactctattgtttttctatttctttaggccacatttgttatgtgattattctgtttctagaactggtttcttatcaatttttttacaagagtatttctatttctgtatttttttatttagttaattgaagagttactttttaaaggtaatgttaaactttaagttatgttttaaaattagaataattttatatttgca

SEQ ID NO: 573351 - DNA, 443 bp, Homo sapiens
cctaattttatcaatgtggagtataataaaaaaatacttttttaactgtatttgctgctcactaagaaactaggaatctgaagttcctagactttttaactgctttataagttcagataagccactattcctctcatacattttttaattgaggaaaatataaaattatatgttcggtgaaatagaattataattctgataagcattttatatcaagagttattatgtcccgtactgtgtcagttaaaactgattttccaagatcattttttaagttttagacaaaaatactaataataaattgagttaattgatggaaaattcttgtatatcttcagtttctaagtamgcatagttttaatacacagtatgtacttttgtttcttatttttacacattttagggaatctatgcctctgagctctgtcaacaaatgtattcat

SEQ ID NO: 573352 - DNA, 598 bp, Homo sapiens
taatttttgtatttttagtagagacgaggtttcatcatgttggccaggctcgtcttgaactctgggcctccagtgatccgcccgcctcggtctcccaaagtgctgggattacaggcctgagcaaccatgcccgtccttaaagataaacattctagatcaaaatgagctggaatccacttgccctttttggccttcctgcattctgcctcctgcagtcctctcctgtgggtcctcttctctcaaaggtcccttcccagactgtagagtcgcacagctccagggacacctttcacattgcattctatgtttataacgctccctggagctgctgtgcctcagggttgccctgagggtggcagctcagtggcaagtgcatcctgctttccgcctcccatctttctacctacctcttgattggcacctgaggcttgtrgcccaagccctggagctgtcactgacaatctgagctactgtaggaaaaggggagacatgaagcaattaaacatcacatctctggtgaagagtgagaaactggacatagccacagtttgtgcgtgcctcacccgaccctccccgtccccggcccataccttgaact

SEQ ID NO: 573353 - DNA, 598 bp, Homo sapiens
taatttttgtatttttagtagagacgaggtttcatcatgttggccaggctcgtcttgaactctgggcctccagtgatccgcccgcctcggtctcccaaagtgctgggattacaggcctgagcaaccatgcccgtccttaaagataaacattctagatcaaaatgagctggaatccacttgccctttttggccttcctgcattctgcctcctgcagtcctctcctgtgggtcctcttctctcaaaggtcccttcccagactgtagagtcgcacagctccagggacacctttcacattgcattctatgtttataacgctccctggagctgctgtgcctcagggttgccctgagggtggcagctcagtggcaagtgcatcctgctttccgcctcccatctttctacctacctcttgattggcacctgaggcttgtggcccaagccctggagctgtcactgacaatctgagctactgtaggaaaaggggagacatgaagcaattaaacatcacatctctggtgaagagtgagaaactggacatagccacagtttstgcgtgcctcacccgaccctccccgtccccggcccataccttgaact

SEQ ID NO: 573354 - DNA, 610 bp, Homo sapiens
gcaaaggaatgaaatcgtacccttatctaacaccatacacaaaaatcaacctcagactgcattaaagacaaatataagacaagagatcgtaaaacttagaagaaaatgaagggaaaagttttataatattggtcttgacaatggtttcatgaatatgacatcagaagcacaggcaacaaaaacaaaaaaaacaagcaggactgtatcatactaaacagcttctgtayagcaaaggaaataatcaacaaagtgaaaaggcaacctgtggataaggggttaatatccaggctatataaggaatgcctacaactcaatagtaaaaaaaataaaataaaataatccaatttaaaaatggaacttgaatagacatctccaaagaagacatacaaatgaccagcaggtatacgaaaaaacactcaacatcactgctaatgggaatgtgaaatggtacagctgcatacatccgtgtaaagatttgtacatggatgttcatacagctttaactataatggccataagctggaaacaactcaaattcccactaataggtaaatagacagataaatcgtggtatatccagacaatggaatactattcagcaatacaaagg

SEQ ID NO: 573355 - DNA, 610 bp, Homo sapiens
gcaaaggaatgaaatcgtacccttatctaacaccatacacaaaaatcaacctcagactgcattaaagacaaatataagacaagagatcgtaaaacttagaagaaaatgaagggaaaagttttataatattggtcttgacaatggtttcatgaatatgacatcagaagcacaggcaacaaaaacaaaaaaaacaagcaggactgtatcatactaaacagcttctgtacagcaaaggaaataatcaacaaagtgaaaaggcaacctgtggataaggggttaatatccaggctatataaggaatgcctacaactcaatagtaaaaaaaataaaataaaataatccaatttaaaaatggaacttgaatagacatctccaaagaagacatacaaatgaccagcaggtatacgaaaaaacactcaacatcactgctaatgggaatgtgaaatggtacagctgcatacatccrtgtaaagatttgtacatggatgttcatacagctttaactataatggccataagctggaaacaactcaaattcccactaataggtaaatagacagataaatcgtggtatatccagacaatggaatactattcagcaatacaaagg

SEQ ID NO: 573356 - DNA, 404 bp, Homo sapiens
ttcattataactgctccttcatgtttcatataaccaaaattctctcatctctttgaggacacgtattatatttattctaaactctgtatctgtttcattagttctgatctacctattatagacagcctagtttgttgtctctctttaggcatgttgtacttctcagctatctggctactgctgccaattgaagcttatcttcccctaaaagaattatcaggcccggtgtggtggctcatgcctgtaatcccagcactttgggaggccraggcgagcagatcacctgaggtcgggagttcgagaccagcctgaccaacatggagaaaccccatctctactaaaaatacaaaatttttagtatttttttattacagtcatagtggtgcatgcctgtaatcccagct

SEQ ID NO: 573357 - DNA, 538 bp, Homo sapiens
  misc_feature 1, 2, 3, 4, 5, 6, 7, 8, 9, 10: n = A,T,C or G
nnnnnnnnnnactgaagattaagtttcttcagctctttgcattcttaaagtttctactagcacacaraaaacagcttgcatgctaaatcccctttccttctcaagaaggtgaatatttatggtcaatactggagagagagagagagagagcccttaatctccatgtgttccctttcctccaacaagagtttaacagggagaagagtagagacagtaggaaagtttgcaaaaacacatcatgatgatttttcagatgcagcctcttaaagaggatgtaagcaaaatttccccttttaaagaacaaaaaggaaaagaaaaaactatatgtagctacaagtaaacacagtccccaaaagcttcaggcccaattttctattaaggggcaataaacctagattccttaattgtctggcttatttcccaagttgtctctactttccaaattcatctctgaccagagactgtatttgcataactcccagaccatggtgctggaagagctgttacagtcggccaagtcccaggcaattagacttgg

SEQ ID NO: 573358 - DNA, 574 bp, Homo sapiens
cctgtgattccagctatgagggaggctgaggcagaggatcacttcaccccaggaggttgatgctgcagtgagctgtctttactgctgcaatccatcctgggcaacagagcaagaccctgtctaatgaattaattaaaaatagaaataaaaatatttcaccattaagtaatgatattgcttgtagggttttttaatggttattctctattagctcaaggaagttccgttctatttctagtttgctaaggttttttttttttttttttttttttgactgggtcttgctcccaggkgggagtacagtggcacaatttcagctcactgaaacatttgcctcccaagctcaagccatcctcccacctcagcatcccaagtagctgggactacagacatgcaaccaccaaacctggccacattttttgtattttttataaaaacagcgtttcaccatgttgcccagactggtcttgaactcttgaattcaagcgatctgcccaccttgacctcccaaaatgctaggattacaggcatgatccactgagtctggcctgctactttttttttttttttagtc

SEQ ID NO: 573359 - DNA, 574 bp, Homo sapiens
cctgtgattccagctatgagggaggctgaggcagaggatcacttcaccccaggaggttgatgctgcagtgagctgtctttactgctgcaatccatcctgggcaacagagcaagaccctgtctaatgaattaattaaaaatagaaataaaaatatttcaccattaagtaatgatattgcttgtagggttttttaatggttattctctattagctcaaggaagttccgttctatttctagtttgctaaggttttttttttttttttttttttttgactgggtcttgctcccaggggggagtacagtggcacaatttcagctcactgaaacatttgcctcccaagctcaagccatcctcccacctcagcatcccaagtagctgggactacagacatgcaaccaccaaacctggccacattttttgtattttttataraaacagcgtttcaccatgttgcccagactggtcttgaactcttgaattcaagcgatctgcccaccttgacctcccaaaatgctaggattacaggcatgatccactgagtctggcctgctactttttttttttttttagtc

SEQ ID NO: 573360 - DNA, 457 bp, Homo sapiens
ggtttctgatgagtggaatccataaagtagtcataaggaaggagaatcagacttctacgtttgtgacaaccctcccactcactctgccaggcaccaagcaggtggaaaatctccctccaaatgacaatttttactctggaataagtgaaactgaagtagtcagccagcacaatgatctccaagataacacagttaaggagttagtttagaaatttatcagataaatttaacaaagagattaaagtaatttcttcttaaatttagagactgggccttctgctgttgcccaggctgaaatgcagtgatgcagtcacagttcactgcagcctcaaactcctgggcttaagcaatcctcctgcctcagcctcccaaartgatgggattatagtcatgagtaatcatgcctggcctaaagtaatttttaaaaaatcaaacagaaatttcaaaactgataaat

SEQ ID NO: 573361 - DNA, 579 bp, Homo sapiens
ggttgagaaaggaattaatagccagaacacagacgattttgttttgggcaataaaactactctctgtatgttaccataatggtgtatacatgtcattaggcatttggtgaaacccatcaattgtacaacaccaagagtgaaacctaatgtaaattatggacttttggtgacaatgcagcmacgtaggttcagttgtaacaaatattccactctggtaggagatgttgataattgggcagaccatgcaagtgtgagggtagtagatatatggacctttcccttaattttgctgtgatagtggtaggtatagcttgagatttacaaaattgacataaggttatagaggaacacacttgaaattttcaaagtctaaagagaagataaaaagtaatatctatgttgagattcatgaaaattccaactcagttgtttgttttgaacacaggttccatgacacattttgcaaaatatttagttatactattagatattgagctcttccaaaaaattgctacatgtattattaaactaccatagatttgtttttcatcatttttttctaaagcattttagaagcca

SEQ ID NO: 573362 - DNA, 609 bp, Homo sapiens
acctgatcctgaatgacttttgggcaaataatggcattaaaacagaaatcatgaaatttttgaaactaatgagaacaaagatacaagataccagaatctctgggacacatctaaagcagtgttaagagggaaatttatagcactaaatgcccatatcacaaagttaaaaagatctcaaattaacaacttaatatcacaactaaaagtactagagaactaagaggaaaaaaatcccaaagctggcagacaacaagaaataaccaaaaccagagctgaaccaatggagattgaaacgtgaaaagccattcaaaaagtcaccaaactcagaagctattaaaaaaaaagaaatcaatgaaatagatagaccactaggtagactaattaataaaaaaaaagagaagattcaaagaaacacaatcagaaataacaaggggkttatatcagtggcaatatccactgaccctatagaaacacaaacaaccatcagataatactatgaacacctctatgcacataaactagaaaatctagaagaaattggtaaattcctggagaaatacacccaccacccaagactgaacaaggaaagaaatgaatccctgaacagac

SEQ ID NO: 573363 - DNA, 567 bp, Homo sapiens
agtctccctctgtcacccagtctggagtgcagtgtcatgatctytgctcactacaacctccgcctcccaggttcaagcaattctcctgcctcagcctctatagtagctgggattacaagcacgtgccaccatgcccagctgatttttgtacttttagagagacagggttttaccatgttagccaggctggtctcgaactcccgacctcaagttatttgcccgccttggcctcctaaagtgctgggattacagacataagccaccatgcccagccggtagtaatgcatacttgtaaatcaatatacattgaggaattaaagcctcttgttttacaaagtcttcggtgtctttaaaaaacaaaaatcccagctcatggtagtcaaggcctgatagatgaatgaatgaagacatctcatacacacaaatataattcctccctcaattatccaagttctagctgactttgacagtgaatattgtcttgccactgtgatgtaaaaagtttaaattatgctaatacattatttgttgttgtttcactagtctatgtatacaacaaatcatccc

SEQ ID NO: 573364 - DNA, 491 bp, Homo sapiens
ggctcatacctgtaaccccagaactttaggaggtcaaggtgggcaaatatcttgagctcaggagttcgagatcagcctgggcaacatggcgaaatcctgtctttacaaaaaaatacaaaaaaactagctggacataatggcacatgtccgcagtaccagctactgaggggactaaggtgggaagatcacctgagctcaggaggtggaggctgtagtgagctgtgatcatgccacggcactcccacctgggtgacagagtgagattctgtctcaaaaaacaaacaaacaaaaagacagggagagaaatgcccttgacaatgatgctgctcaggaattcctctagctaaagccggctattagaggagtcccatgtctcccaggaatgggtttcacttaatatccctgctgtgcyccatcactggctgagagcagctggagggatcagtgcaaatgccacagtagatttcatagcacaacagctggggccctca

SEQ ID NO: 573365 - DNA, 378 bp, Homo sapiens
gtttggcttatttttcagtatattagtagagtcatctgttatctttcttcttcaaataaaatcttgactatgatacatataaaatgtgtgagatccgtaagttacttatttgtgacttggttctcaatctgtaaaatgtgctaagttatagtgtcgttgtgaggattaaacatgttaacacatggagaataaacatcrtagtgcccagctcagcataagcctttaataaattctatctcctaacataactggtctttgcaaatactgctgttatcatactctggaagtaagaattcccatataggccttgttgcatataggtactgtcaggcctctgagcccaagccaagccatcgcatcccctgtgacttgcaggta

SEQ ID NO: 573366 - DNA, 493 bp, Homo sapiens
tttaaacagccaacagaagcataaaccaaataacctattttttaatatataaattacccagcctcaggtatccttttatagaacacaaacagactaagacaagggactactgtatttaaaattaagttacattttataatkgttagtttaaattgtgattttaaattctccctagtttcaataatggtgatacaaagctcaaagagagtactttctaagcttgtatgtaactgttatttttcaaaccacattgtattcgagtgtcagtatatcttcatttctgcggcataaccaagtctctttaaaatgtctgcatgtgtttgcgtattttaaaaatatttttgaacaaaaagacacaaagaaagttagaataaagtaaaatactcagtgcctacatagcattagaatttataaggtctgttcatataactacactgaacaagaccctctgggcttatgtatcgcaagcatttgtatcacacctattaagctt

SEQ ID NO: 573367 - DNA, 604 bp, Homo sapiens
ttatagttcacataacctaaagaaataaatacgtttaaaaattttctaaaattaaaaaaactattgattttatatataagcttcatgtccatawctatgaattcagaaacataaaaaaaggaaagttttttttaaatatcaatgagaaaaatgtaaagtgcaatgcatctatattcatgaataattttaactattttcttggcatatttttaatgcttaataatggttcagaggaagtgttctatatgttaaatttcaggctatgactaggtgagatgtccaatgcgtagatttcagttttaccttagattattaatcccctctggccactgaggcactccaaccccaactagttgcctttggtgacacgcagactggttaagaaagttctgttgggcatctcagctaagtgatatattatcaaattcattatggtccttgaaatatctgtcactcactgcttcaaagatagtgaacccagcatcaaaatgtagtgaacacagctaagattgcatgccatcacctaaacatattctatagattacagtagaattaatagttgcctaatttagacaacaagtctgggggaagcttctgaaaaatg

SEQ ID NO: 573368 - DNA, 610 bp, Homo sapiens
cctggctaacatggtgaaaccctgtgtctactaaaaatacaaaaattagctgggcgttttggcacacacctctaatcctagctcctacagagtctgaggcaggagaatcacttgaacccggaaggtggagattgcagggagctaagattgcaccactgcactacagcctgggtgacataacaagaccctgtcaaaaaaaagtttgtagaaattgataaaaggaaagcttcaagtaattacagccctaataatgtcctctactaatcatcaaggctcaaataagattgattggtgaagttagtatatataaataagttggtataaccaacagagcctctggaattcataaatgtaaaggcaatgggagctatactaaaatgacacattatatttacaatttctaaatgggctcatgttgcattttctrgggaaaagatgggctcatcaaagcaacaattagaatattcctgcatcagtcacccaatgagccccttgcctatacatcctatattcatgctctctttagtccatcatccacaatgcagtccaagtgatttttcaaaaataacaacctcttgatggctttttctataggatccagactgcttag

SEQ ID NO: 573369 - DNA, 565 bp, Homo sapiens
tacttgtctgtcttgcctattagggctctcacgtaattctggcatttcctctattcctttagccacaaaactagcaatgccacagatagtgtctattcattcagtagggtcacaaaatgaagaaataatgcaatgagtctcaaggggcatgccaaatgattaagaattaaatacttgttgttataagcaattaacattttcaagcaggttgttgctacaatctatcttagcctaacatgactgatagagcaataaatattttgaattaattgagtcacttagaaaacaacttcagaatgtatctgtaattaaataaaatggtgtgcaattaccaaacctgttaacattcttatattgtacaataatttgccacttcatctcaaaaattaagtaagccaagctacacatttaatattgataacattttggggggctgctgtagactccacaaagagagagagaaggagagagaragagagagagagacagagctctagcttgtgaacacttataatttctaggaataaaatactaatttaaaaaatcatgcattgtttcagccagg

SEQ ID NO: 573370 - DNA, 551 bp, Homo sapiens
attttatattaaattcagttttctttgatagttttgtctctccctctccacacacccacttgtctttctctctgcatataatagcaataagtaaaaaattctatgcttacattgtaccaataaaaatatataaaccttataactacaataataaatgaattasaaatctactttgacaatttgtttctgacctttctgtttgtactgcctatatattttactaaatatattcttttctacttttaatatttatagtttaatatgaatttatttaatattaatattaatatattttatatattgaataccaacatatttgatattaattaataatttcaattaattattaataattaaaattacattaaatttaataattaatttaatttaatttaaaatttacttgtaatattaattattttataaattagtcaatttagaatattaattacatgatttaagtagtaattaattatgattaaatattataccataagtagtaaaaacaatactcaagaaagaaatgctacataatgaccaactaaatgggc

SEQ ID NO: 573371 - DNA, 381 bp, Homo sapiens
tgtatatccacacagacttgcacacagatgtttacagtagctttattaaaatgtccagaagtcaaaatgtccatccagaagtgaatatataaacaatcatggtacattgatacaatgcatcagtactaaataatacaaaggaatgaactattggtacacaacaaaacggatgaatctcaaaataatttcactgagttaaagaagccaaacagaaaggaggacatactgtatgattccatttatataaaattcaagaaaakgcaaaccgatccacagtgacagaaagcagaataacggtattctggagattgtagagtgagaagggattaaaaagggggcaccaggaaaaatttggaaggagatagatatattcatcatcgt

SEQ ID NO: 573372 - DNA, 381 bp, Homo sapiens
tgtatatccacacagacttgcacacagatgtttacagtagctttattaaaatgtccagaagtcaaaatgtccatccagaagtgaatatataaacaatcatggtacattgatacaatgcatcagtactaaataatacaaaggaatgaactattggtacacaacaaaacggatgaatctcaaaataatttcactgagttaaagaagccaaacagaaaggaggacatactgtatgattccatttatataaaattcaagaaaatgcaaaccgatccacagtgacagaaagcagartaacggtattctggagattgtagagtgagaagggattaaaaagggggcaccaggaaaaatttggaaggagatagatatattcatcatcgt

SEQ ID NO: 573373 - DNA, 381 bp, Homo sapiens
tgtatatccacacagacttgcacacagatgtttacagtagctttattaaaatgtccagaagtcaaaatgtccatccagaagtgaatatataaacaatcatggtacattgatacaatgcatcagtactaaataatacaaaggaatgaactattggtacacaacaaaacggatgaatctcaaaataatttcactgagttaaagaagccaaacagaaaggaggacatactgtatgattccatttatataaaattcaagaaaatgcaaaccgatccacagtgacagaaagcagaataayggtattctggagattgtagagtgagaagggattaaaaagggggcaccaggaaaaatttggaaggagatagatatattcatcatcgt

SEQ ID NO: 573374 - DNA, 602 bp, Homo sapiens
gttgccaggccagaattacttttctgctggaggcacactcccccaagggcacaaaggaagccagtcatgttgatccattcctgtagagagtctgtgtcagacaaatctatgcatcctcctccacgcacatgggacattcgcctcttaacaatggtcttgtgaagctttcagcagcctaaacacaaaattttcakgtaaagcatgaattaaacctaaattagttgagacttgacaaattcctctttatccaacatttcttccatgacaaaagtacaagaaatgtaaaaaaacacattaaaatcaaccccaagagtgtcagacaatgggtgcaggacagtggatgcagcacatcgagagtgagccgaaccagggtgaggtatggcctcatctgggaagttcaaggggtcagggaattccctttcctagtcaaagaaaggggtgacagatggcacctggaaaattgggtcactcccaccctaatactgcacttttccaacggtcttagcaaatgacacacgaggtgattatatcctgtgcatggctcggagggtcctatgcccatggaacctctctcattgctagcacagcagtctgagatcaaa

SEQ ID NO: 573375 - DNA, 491 bp, Homo sapiens
atgggcataagtttttaatacacaagaaaacaagtggttgagggctcctttctcacatacatcaaggcttgatttatattccaaattcaacaaatatatcaatttgtaaagctattgcacagacatagaaatagatgcctctttcacattgcatttcttacatattatgccacaagaacaaataccatttattaaataattttgccaaatgtttattctgctttttccctgagcatgtttgcctttacatcatttggcatgtttctcagcattaatacttttttctttttttgctatgagaatggcaaccttgaaagatgccctataaactaggttcttttctgtgtttaatgatgaactttttcaactttataatgaaaataattactttgtgctcattgtggtagttctatttttagtttttgagaaatctccatactgttttccataaggactgtaataatttacattcccaycaacaatgtgtaaga

SEQ ID NO: 573376 - DNA, 429 bp, Homo sapiens
gtttgttccttcagatgttcagatgtgtccagagtttcttccttccggtgggttcgtggtctcacttgacttcaggagtgaagccacagacctttgcagtgagtgttagagctctgaaaagyggtgattctggagttgtttgttcctcctggtgggctcgtggtcttgctgacttcaggagtgaagccacagacctttgcagtgagtgttacagctcatagtgtggacccaaagagtgagcagcagcaaaatttattgtgaagagcgaaaggacaaagcttccacaacgtgatacgggacaccagtgcgttgctgctgctggcactcggtggccagcttttattcccttatttggcccaccaacatcctactgattggtccattttacagagcactgattggcccattttacagagcgctgattggtgc

SEQ ID NO: 573377 - DNA, 429 bp, Homo sapiens
gtttgttccttcagatgttcagatgtgtccagagtttcttccttccggtgggttcgtggtctcacttgacttcaggagtgaagccacagacctttgcagtgagtgttagagctctgaaaagtggtgattctggagttgtttgttcctcctggtgggctcgtggtcttgctgacttcaggagtgaagccacagacctttgcagtgagtgttacagctcatagtgtggacccaaagagtgagcagcagcaaaatttattgtgaagagcgaaaggacaaagcttccacaacgtgatacgggacaccagtgcgttgctgctgctggcactcggtggccagcttttattcccttatttggcccaccaacrtcctactgattggtccattttacagagcactgattggcccattttacagagcgctgattggtgc

SEQ ID NO: 573378 - DNA, 541 bp, Homo sapiens
aggttctttaacatccccccaaaatcacactagctcaccagcaatggatcaaaccaagaagaaatccctgaaatacctgaaaaagaattcaggaggttagttatgaagctaaccaaggaggcaccagagaaaggtgaagcccaatgcaaggaaatccaataccaatacaagaattgaaaggagacatattcraggaaatagcataaagaaaaaaaaatcaaaacttcaggaaacagacacacttatagaaatgcaaaatgctctctgaaaagtctcagcaatagaaatgaagaagtagaagaaagaaattcagagctcaaacacaaggtcttcaaattaacccatccaaaaaagacagagaaaaaagaataagaaaatatgaacaaagcctccaagaagtctgggattatgctaaatgaccaaacctaaaaataatcagtattcctgaagaggaagagaaatctaaaagtttggaaaacatatttgggggaataattgaggaaaacttccccagccttactagagacctagacatgcaaat

SEQ ID NO: 573379 - DNA, 541 bp, Homo sapiens
aggttctttaacatccccccaaaatcacactagctcaccagcaatggatcaaaccaagaagaaatccctgaaatacctgaaaaagaattcaggaggttagttatgaagctaaccaaggaggcaccagagaaaggtgaagcccaatgcaaggaaatccaataccaatacaagaattgaaaggagacatattcaaggaaatagcataaagaaaaaaaaatcaaaacttcaggaaacagacacacttatagaaatgcaaaatgytctctgaaaagtctcagcaatagaaatgaagaagtagaagaaagaaattcagagctcaaacacaaggtcttcaaattaacccatccaaaaaagacagagaaaaaagaataagaaaatatgaacaaagcctccaagaagtctgggattatgctaaatgaccaaacctaaaaataatcagtattcctgaagaggaagagaaatctaaaagtttggaaaacatatttgggggaataattgaggaaaacttccccagccttactagagacctagacatgcaaat

SEQ ID NO: 573380 - DNA, 296 bp, Homo sapiens
ctactatatgcaagtcagacttgtaagaaatcagaccactattcatagtaaatgatctgggaagccaaatgataaccttgtaacatgtggccccaaatgccctggacttgaytaataatcgatggcttccccaatttttgcatgacttcaggaccatctagaggcatccaaatatgttctccaagccaatcacataggatgcctcacttctagtttatcccacctatggcttttccacgccaacacccctaatcaaggcacacctgaaggctttccatttcccactataaagtatt

SEQ ID NO: 573381 - DNA, 296 bp, Homo sapiens
ctactatatgcaagtcagacttgtaagaaatcagaccactattcatagtaaatgatctgggaagccaaatgataaccttgtaacatgtggccccaaatgccctggacttgactaataatcgatggcttccccaatttttgcatgacttyaggaccatctagaggcatccaaatatgttctccaagccaatcacataggatgcctcacttctagtttatcccacctatggcttttccacgccaacacccctaatcaaggcacacctgaaggctttccatttcccactataaagtatt

SEQ ID NO: 573382 - DNA, 433 bp, Homo sapiens
tcaatgtaattctccttgtaatttgccatgtagccatacatatccacaggttctggggattagggcatggcatctttcaggggatgttattctgtctrtgtcaaggttctaaggcaatatttccaagaattttacagagttcttaatcatattatacatagagctgaaatttgaaggaaggaatagtttattttctgattagaataaagaaaacaaagcattaagttgccttctcaatatctgtacttagccaacacaaaatacattttcttctcatttgtctccctacttataaaaacatcaacagcacacagcaataaagtcaaataaaaatctcactatcctaaagtatttgtaaagaattagcactaaaaatctaggtggcaaatttacttgttacacttactaaagaatatgaattctcaaatttagt

SEQ ID NO: 573383 - DNA, 571 bp, Homo sapiens
tgactttaaaaattacagctacaaaatatacatccttttgagatgatgtcccaagaaagagcaagtagacacattctgtattttcacactaaaaacactgaccagtgatgacttccaatacttcaaaacaattctttttaaattgaaaatatttacartaaatatcttcgtaaaatatcagtatagctaattctataatttcaagtgaatttcctcaattacactttaacaaaatagtcaatgttttcattagtataaatatatcacttcaggatcaaatatcacatttaaaaaaaaatgagaagacaaactgcaaacttggagaaaatgtttgggaaagacatatttgataaagaccgtcatctaaaatatacaaagaagtcttcagactgaacaataagaaaatgaagaaaccaattaaaaaatgggcaaaaaaacctagatacacaactcaccaaagaagacataaggatggttttaggtcttacatttaagtctttaatccatcttgagttaatttttgtataaggtgtaaggaaggagtccagtttcagttttctgcatatggcta

SEQ ID NO: 573384 - DNA, 549 bp, Homo sapiens
gagctgggtgtgtagaagctgctgaaaggttgggagcttggcttggggggtccacagtgaggcagatgctgggcctgaagaatctgctgtgaggcagatgttgggactgtagaggccgacgggaggcagaggctgggcctggaggggccaccaagatgcaggagctgggcctggagaggctgcaaagaagcatgaactgggcctggtgaggtcgacttgagaaagttcagggcctggagagaaggctgggaggcaggagytgggtctaaagaggccattgtaacgatggagctgtgcctgtggaggctgttgtgaggcagtaggctcatctgcggagactgccgtgaggtagggtatgggcctaaataggccattgtgagtcatgagcttggtctgtagaggctgactggagaaagttctgggcctggagaggctgccgggaggtaggagctgggacaaaagatttaagcacatttacatttattaggtgctttatttccattattacactgtaatatataataaaataattatagaactcaccataat

SEQ ID NO: 573385 - DNA, 498 bp, Homo sapiens
cacgtccggctaatttttgtatttttagtacagacggggcttcatcatcttggccaggctgatttcgatctcctgacatcgtgatccgcctgcctccacctcccaaagtgctgggattacaggcgtgagccaccacgcctggccaaggcctgctcctcttatctataccccctacccctgcagctgtgccaggggaaagctgggcagtttccctcctccgagcccctgtacataccatgaattgtgggaccttcagagcttttcacttttcggaaaatagctcctgctggggctacaagatggagtgtgaagagggccttgggccacagggaagcgcctgtggactaggggkagttcatgcaccccttctttccccagaggggctggactcaggtgagtatgggggtgggggctcctgcacttcgacacaggcagcgggagggttttctccccattccctctgcactcccaacttgagctatactttttaagaaagtg

SEQ ID NO: 573386 - DNA, 649 bp, Homo sapiens
ctcatctgccccttcaacgcacactctttctcctctgggagtctctgaagtgggtaatatcctctgcttataatatgcttccccttaaacctctactcycttcctagctagctttgactcctctgtcacttgtctgctttggcatcacctcctcatagaagacttctatgactcccgagattctcaggagcatggcaggtgaagtgctcctcccatgaatggatggagattagggagtgtgtgttattcatgcttaattcaccagtgcttagctgagtacctggcataaaatagttactgtggtggccaaagtaataagccccaccgccaccaattgctcatgtcctatgttacacagcacaattacataggaagggggaattaagagtgcagataaaattaatgttgctcatcagctgaccttaaaacaagattatcctggagtatctaggagatcccatgtaattacaagcattctttaaaactggaagagggaggcagaaggttaagaaccagagacggtgggcacaatggctcatgcctgtaataccaatactttgggaggccagggcaggaaaatcccttgagtgcaggagttcaaggtcagccgtggcaacatactgaggtcccatctctacaacaaaataaa

SEQ ID NO: 573387 - DNA, 649 bp, Homo sapiens
ctcatctgccccttcaacgcacactctttctcctctgggagtctctgaagtgggtaatatcctctgcttataatatgcttccccttaaacctctactcccttcctagctagctttgactcctctgtcacttgtcygctttggcatcacctcctcatagaagacttctatgactcccgagattctcaggagcatggcaggtgaagtgctcctcccatgaatggatggagattagggagtgtgtgttattcatgcttaattcaccagtgcttagctgagtacctggcataaaatagttactgtggtggccaaagtaataagccccaccgccaccaattgctcatgtcctatgttacacagcacaattacataggaagggggaattaagagtgcagataaaattaatgttgctcatcagctgaccttaaaacaagattatcctggagtatctaggagatcccatgtaattacaagcattctttaaaactggaagagggaggcagaaggttaagaaccagagacggtgggcacaatggctcatgcctgtaataccaatactttgggaggccagggcaggaaaatcccttgagtgcaggagttcaaggtcagccgtggcaacatactgaggtcccatctctacaacaaaataaa

SEQ ID NO: 573388 - DNA, 649 bp, Homo sapiens
ctcatctgccccttcaacgcacactctttctcctctgggagtctctgaagtgggtaatatcctctgcttataatatgcttccccttaaacctctactcccttcctagctagctttgactcctctgtcacttgtctgctttggcatcacctcctcatagaagacttctatgactcccgagattctcaggagcatggcaggtgaagtgctcctcccatgaatggatggagattagggagtgtgtgttattcatgcttaattcaccagtgcttagctgagtacctggcataaaatagttactgtggtggccaaagtaataasccccaccgccaccaattgctcatgtcctatgttacacagcacaattacataggaagggggaattaagagtgcagataaaattaatgttgctcatcagctgaccttaaaacaagattatcctggagtatctaggagatcccatgtaattacaagcattctttaaaactggaagagggaggcagaaggttaagaaccagagacggtgggcacaatggctcatgcctgtaataccaatactttgggaggccagggcaggaaaatcccttgagtgcaggagttcaaggtcagccgtggcaacatactgaggtcccatctctacaacaaaataaa

SEQ ID NO: 573389 - DNA, 564 bp, Homo sapiens
ggattacaggtgtgagccattgcacccaactggtgtagccacgttagaaaacagtctggcagtttctcaaaaggctaaatgtacagtcatcctataatgcaacaatttcactcctaggcatatatcccagaaaaataaaaatatatgtccacacaaaaacttgtayaacaatcttcatagcagcattattcataatgaccaatacatggaatacacggaaacaacccaaatatccaccaactgatgaacagataaacaaaatgcagtgtgtctctaccatggaatactgccatagaaggaatgaaatattgatacacactatgacataaaggaactttgaaaacactgtgctaagagggaaaaaaagccacaaaagatcacatattgtacaattctatttgtccagattaggcaaatctatagtgacaaaaaaattaatcaatggttgcctaaggctgggagtgaaggtaggtggggagagtaggaggtagtggctgaggggtatggatttctctatagggtaatgaaaggttctaaaagtgactgtggtgatcgatgcacagc

SEQ ID NO: 573390 - DNA, 522 bp, Homo sapiens
tgagcttgggcaaatcactcattaaccccaagtcttcatcattttgtgcatataatggggataactgtggcacccamctgtttttgtgagaatcaatgaaatattatgcttgatgttattgtgatcatgatactatctgacaagggcagtgatgcatgataacatcaaaaaattagaaactgtaatgaggtctcttgggcaaaattccatacaagcaaattattgtctctacaaagcatttctgccacacttaattcaccattccctgaacaaaatgtgccatcttcattgttcaggtctgtatagtgctggtttccctgcctgggcagctcactccatcccatcccagcccaatccccatccctccacctcccccttccctccccactctcatacaactcttccttatcttacaggacttggcttcaatgtcaccttaactggaagcttctctccctctccagaagagcttcccattgcacttgatgcatgcactattatttgatcatttttgagttacag

SEQ ID NO: 573391 - DNA, 522 bp, Homo sapiens
tgagcttgggcaaatcactcattaaccccaagtcttcatcattttgtgcatataatggggataactgtggcacccaactgtttttgtgagaatcaatgaaatattatgcttgatgttattgtgatcatgatactatctgacaagggcagtgatgcatgataacatcaaaaaattagaaactgtaatgaggtctcttgggcaaaattccatacaagcaaattaytgtctctacaaagcatttctgccacacttaattcaccattccctgaacaaaatgtgccatcttcattgttcaggtctgtatagtgctggtttccctgcctgggcagctcactccatcccatcccagcccaatccccatccctccacctcccccttccctccccactctcatacaactcttccttatcttacaggacttggcttcaatgtcaccttaactggaagcttctctccctctccagaagagcttcccattgcacttgatgcatgcactattatttgatcatttttgagttacag

SEQ ID NO: 573392 - DNA, 565 bp, Homo sapiens
ccacctcccccttccctccccactctcatacaactcttccttatcttacaggacttggcttcaatgtcaccttaactggaagcttctctccctctccagaagagcttcccattgcacttgatgcatgcactattatttgatcatttttgagttacagtccaagtctttttgtacctgaataacatgttgcccagycagtttctcttcctggattcagaagtctttcatggtaggtccagctagaagtgacaaaaagacattttaaaaaaaaaaaaaagagggatgacacagacagacatcagcacttaaaagttttaaacgatatgtgaaaaacaaaatttaagggcttctaggagaaatgtaggagggaaggtgctactgggaaatatgatagaaggttaatttttattttattttatttttagagaaagggtcttgctctatcgcctaggctggactgcagtggtgcaatcacagttaactgcagcctcaacctccagggcttgagcaatattcccatctaatttttattttgtttaagaaatgcagtcttgctcttagcaaa

SEQ ID NO: 573393 - DNA, 577 bp, Homo sapiens
ccatgaaatatgaaaatatgaagtgatgttcaatcaccatgtaygtatcttgaaggatatggcccattttctcaattgcaattatttcctgagataagattatgggtctaaagagtgaaggacatttttcacttatttaaaagtatttattatttttataatttaataaaagattaaacagatcattgaattagtaaaagacaaagtaactctataaataaatggaaaagacacagataccccaggcatggtggctcatgcttataataccagtattttgggagggggtggtggggggattgcttgaggccaggagttccagaccagcctaagaaacaaagcaagacctcgtctctagtaaaaataaaaaaataaaaataattggccaggcatagtggcatgtgcctatagtcccaactactgaggcggaaggatcacctgagcctaggaggtcaaggctgcagtgagttgagactgtgccactacactgaagcctaggagacagagcgagacttcatctcaaaaaaaaaaaaaaaaggacaataaagaaataaagctaataagctaacataaggaa

SEQ ID NO: 573394 - DNA, 577 bp, Homo sapiens
ccatgaaatatgaaaatatgaagtgatgttcaatcaccatgtatgtatcttgaaggatatggcccattttctcaaytgcaattatttcctgagataagattatgggtctaaagagtgaaggacatttttcacttatttaaaagtatttattatttttataatttaataaaagattaaacagatcattgaattagtaaaagacaaagtaactctataaataaatggaaaagacacagataccccaggcatggtggctcatgcttataataccagtattttgggagggggtggtggggggattgcttgaggccaggagttccagaccagcctaagaaacaaagcaagacctcgtctctagtaaaaataaaaaaataaaaataattggccaggcatagtggcatgtgcctatagtcccaactactgaggcggaaggatcacctgagcctaggaggtcaaggctgcagtgagttgagactgtgccactacactgaagcctaggagacagagcgagacttcatctcaaaaaaaaaaaaaaaaggacaataaagaaataaagctaataagctaacataaggaa

SEQ ID NO: 573395 - DNA, 577 bp, Homo sapiens
ccatgaaatatgaaaatatgaagtgatgttcaatcaccatgtatgtatcttgaaggatatggcccattttctcaattgcaattatttcctgagataagattatgggtctaaagagtgaaggacatttttcacttatttaaaagtatttatyatttttataatttaataaaagattaaacagatcattgaattagtaaaagacaaagtaactctataaataaatggaaaagacacagataccccaggcatggtggctcatgcttataataccagtattttgggagggggtggtggggggattgcttgaggccaggagttccagaccagcctaagaaacaaagcaagacctcgtctctagtaaaaataaaaaaataaaaataattggccaggcatagtggcatgtgcctatagtcccaactactgaggcggaaggatcacctgagcctaggaggtcaaggctgcagtgagttgagactgtgccactacactgaagcctaggagacagagcgagacttcatctcaaaaaaaaaaaaaaaaggacaataaagaaataaagctaataagctaacataaggaa

SEQ ID NO: 573396 - DNA, 261 bp, Homo sapiens
catggtggctcatgcttataataccagtaytttgggagggggtggtggggggattgcttgaggccaggagttccagaccagcctaagaaacaaagcaagacctcgtctctagtaaaaataaaaaaataaaaataattggccaggcatagtggcatgtgcctatagtcccaactactgaggcggaaggatcacctgagcctaggaggtcaaggctgcagtgagttgagactgtgccactacactgaagcctaggagacagag

SEQ ID NO: 573397 - DNA, 577 bp, Homo sapiens
ccatgaaatatgaaaatatgaagtgatgttcaatcaccatgtatgtatcttgaaggatatggcccattttctcaattgcaattatttcctgagataagattatgggtctaaagagtgaaggacatttttcacttatttaaaagtatttattatttttataatttaataaaagattaaacagatcattgaattagtaaaagacaaagtaactctataaataaatggaaaagacacagataccccaggcatggtggctcatgcttataataccagtattttgggagggggtggtggggggattgcttgaggccaggagttccagaccagcctaagaaacaaagcaagacctcstctctagtaaaaataaaaaaataaaaataattggccaggcatagtggcatgtgcctatagtcccaactactgaggcggaaggatcacctgagcctaggaggtcaaggctgcagtgagttgagactgtgccactacactgaagcctaggagacagagcgagacttcatctcaaaaaaaaaaaaaaaaggacaataaagaaataaagctaataagctaacataaggaa

SEQ ID NO: 573398 - DNA, 515 bp, Homo sapiens
ggttaagtgaaataatgaagaattatggagaatttaaaaatctatgctatttatakgcacctagtaacagctcagtaaatattagctgctactattattatttttatggtaatttcactcaattaaaaactgtcattaaaaattaccattgtcatggaacataatgtctcctactgtataattgtaaaaacagatacaatttgtcccttggtatatggggggattagttccagctctcccatttctgtgtataccaaaatccacgcatactcaagttttcgaagtcagtcctgtggaatccacatataacacaaatgggaaaattagtgaggtgtggtgacaagcacctgtagtcccagctacttgtgaggctgaggcaggaggattgcttgagcccaggaggttgaggctgctgtgagccataattgcaccactgcactccagtctgggcaacagagtgagacagaaggttgactttttaatagaatttttctgttcacttgaagatatggtca

SEQ ID NO: 573399 - DNA, 515 bp, Homo sapiens
ggttaagtgaaataatgaagaattatggagaatttaaaaatctatgctatttatatgcacctagtaacagctcagtaaatattagctgctactattattatttttatggtaatttcactcaattaaaaactgtcattaaaaattaccattgtcatggaacataatgtctcctactgtataattgtaraaacagatacaatttgtcccttggtatatggggggattagttccagctctcccatttctgtgtataccaaaatccacgcatactcaagttttcgaagtcagtcctgtggaatccacatataacacaaatgggaaaattagtgaggtgtggtgacaagcacctgtagtcccagctacttgtgaggctgaggcaggaggattgcttgagcccaggaggttgaggctgctgtgagccataattgcaccactgcactccagtctgggcaacagagtgagacagaaggttgactttttaatagaatttttctgttcacttgaagatatggtca

SEQ ID NO: 573400 - DNA, 567 bp, Homo sapiens
aaatggaatgctggtagaacacagggcccaaaggagcaaaagttaacctaagcccaggtagaaccttgtttactagagtattaggcatgggtttgggcaactattctaaccagagaaactggcttcagtgagggcaagttggcaatccaaggtatagcatgcatagggctggcaaaattcagggtgactggagcaaaagcttcagaaccagaaagaccacatctgggggtagagcacaaaactctcaagagatgaatctttgtaagagtgaggcagaactatatagcagttttaggagatctgttggtgcccagcaagagctccaaaygggctatatgcagggatgcaggctgtagtctcaggagaggaggttcacaaaagtcattcagtccaagacctcaaactgtgttctctactaaaaggaatcaaggttccctagagaaatggctgactccatgtatggtgcagtatattgatcctggaacatcttttttgccagaaagcaaggaagccatcaaagtccaacaggatcacgtcaaaaagacatgaaagtcaacttgaagagat

SEQ ID NO: 573401 - DNA, 562 bp, Homo sapiens
aatcctagatcctaggtctgcttggtagcatgcttcctaggtagtggatctgaggctacctatagaacttcctttgcagtcataattcgctcagaaactacaaaagtgcttgctcttgaaaayggagtctttgtccatttcatgcttctatacaagaataccacagactgcataatttataaaaaggaaaaaaggaaggaaagaaaaaaggaaggaaggagggaaggagggaaggaaaggaaggaaggaaaagaaggaaaggaaggaagggaaagagaaagagggaaggaggaagggagggaaggagggagggagggagggagagagagagggagggaggggaagggaagaaaagggaggagaagggaaaggaggaagaaaaggaaaggaaaggaataaattttatttcttaacagttctggatgttaggaagtccaaggttgaggggcctgcatctggtaagggtcttcttgccgcatcatcccactacagaaggcagaaggaaaagagagtgcaagaaggcaagagggcaaaagggctgaactctgttttataataagcc

SEQ ID NO: 573402 - DNA, 562 bp, Homo sapiens
aatcctagatcctaggtctgcttggtagcatgcttcctaggtagtggatctgaggctacctatagaacttcctttgcagtcataattcgctcagaaactacaaaagtgcttgctcttgaaaatggagtctttgtccatttcatgcttctatamaagaataccacagactgcataatttataaaaaggaaaaaaggaaggaaagaaaaaaggaaggaaggagggaaggagggaaggaaaggaaggaaggaaaagaaggaaaggaaggaagggaaagagaaagagggaaggaggaagggagggaaggagggagggagggagggagagagagagggagggaggggaagggaagaaaagggaggagaagggaaaggaggaagaaaaggaaaggaaaggaataaattttatttcttaacagttctggatgttaggaagtccaaggttgaggggcctgcatctggtaagggtcttcttgccgcatcatcccactacagaaggcagaaggaaaagagagtgcaagaaggcaagagggcaaaagggctgaactctgttttataataagcc

SEQ ID NO: 573403 - DNA, 566 bp, Homo sapiens
tatacaagaataccacagactgcataatttataaaaaggaaaaaaggaaggaaagaaaaaaggaaggraggagggaaggagggaaggaaaggaaggaaggaaaagaaggaaaggaaggaagggaaagagaaagagggaaggaggaagggagggaaggagggagggagggagggagagagagagggagggaggggaagggaagaaaagggaggagaagggaaaggaggaagaaaaggaaaggaaaggaataaattttatttcttaacagttctggatgttaggaagtccaaggttgaggggcctgcatctggtaagggtcttcttgccgcatcatcccactacagaaggcagaaggaaaagagagtgcaagaaggcaagagggcaaaagggctgaactctgttttataataagcccactctgtgattactaatctattaccacaataacaacattaactcattcatgaaggctattttattaggccccacatcccaactgttgcattgaggattgagtttccagcacataaactttgggggacacatttaaaccatagcagagcact

SEQ ID NO: 573404 - DNA, 566 bp, Homo sapiens
tatacaagaataccacagactgcataatttataaaaaggaaaaaaggaaggaaagaaaaaaggaaggaaggagggaaggagggaaggaaaggaaggaaggaaaagaaggaaaggaaggaagggaaagagaaagagggaaggaggaagggagggaaggagggagggagggagggagagagagagggagggaggggaagggaagaaaagggargagaagggaaaggaggaagaaaaggaaaggaaaggaataaattttatttcttaacagttctggatgttaggaagtccaaggttgaggggcctgcatctggtaagggtcttcttgccgcatcatcccactacagaaggcagaaggaaaagagagtgcaagaaggcaagagggcaaaagggctgaactctgttttataataagcccactctgtgattactaatctattaccacaataacaacattaactcattcatgaaggctattttattaggccccacatcccaactgttgcattgaggattgagtttccagcacataaactttgggggacacatttaaaccatagcagagcact

SEQ ID NO: 573405 - DNA, 566 bp, Homo sapiens
tatacaagaataccacagactgcataatttataaaaaggaaaaaaggaaggaaagaaaaaaggaaggaaggagggaaggagggaaggaaaggaaggaaggaaaagaaggaaaggaaggaagggaaagagaaagagggaaggaggaagggagggaaggagggagggagggagggagagagagagggagggaggggaagggaagaaaagggaggagaagggaaaggaggaagaaaaggaaaggaaaggaataaattttatttcttaacagttctggatgttaggaagtccaaggttgaggggcctgcatctggtaagggtcttcttgcygcatcatcccactacagaaggcagaaggaaaagagagtgcaagaaggcaagagggcaaaagggctgaactctgttttataataagcccactctgtgattactaatctattaccacaataacaacattaactcattcatgaaggctattttattaggccccacatcccaactgttgcattgaggattgagtttccagcacataaactttgggggacacatttaaaccatagcagagcact

SEQ ID NO: 573406 - DNA, 566 bp, Homo sapiens
tatacaagaataccacagactgcataatttataaaaaggaaaaaaggaaggaaagaaaaaaggaaggaaggagggaaggagggaaggaaaggaaggaaggaaaagaaggaaaggaaggaagggaaagagaaagagggaaggaggaagggagggaaggagggagggagggagggagagagagagggagggaggggaagggaagaaaagggaggagaagggaaaggaggaagaaaaggaaaggaaaggaataaattttatttcttaacagttctggatgttaggaagtccaaggttgaggggcctgcatctggtaagggtcttcttgccgcatcatcccactacagaaggcagaaggaaaagagagtgcaagaargcaagagggcaaaagggctgaactctgttttataataagcccactctgtgattactaatctattaccacaataacaacattaactcattcatgaaggctattttattaggccccacatcccaactgttgcattgaggattgagtttccagcacataaactttgggggacacatttaaaccatagcagagcact

SEQ ID NO: 573407 - DNA, 525 bp, Homo sapiens
cagcgacttgggaggctaaggcaggagaatttcttgaacccaggaggcagaggttgcagtgaccagcaaggttgcgccattgcaccccagcctgggcaataagagygaaaactctatctcaaaaaaaaaaaaaattcctttgggaaggccttctacataaaaatcttcaacatgagactggaaaaaagggtatgggatcatcaccagaccttcggcttttacagctcgagctataagaacaaaaagaaaaagggatatcatttaaacacagtatgtagaaaagaataattattgaatctgtactggtctttaacttttacactttgatctttaattctgttattgtgattgagtccaaagaaaaatagtatgagtaaaataaaaagaacaccaaaaatgctaatattctgtttaccaaagtctgtagtgaaatatcccattaaatccaagtgcagtgctacacacccataatcccagcactttgggaggctgaggcgggtgaatctcctgaagtcaggagttcaa

SEQ ID NO: 573408 - DNA, 525 bp, Homo sapiens
cagcgacttgggaggctaaggcaggagaatttcttgaacccaggaggcagaggttgcagtgaccagcaaggttgcgccattgcaccccagcctgggcaataagagtgaaaactctatctcaaaaaaaaaaaaaattcctttgggaaggccttctacataaaaatcttcaacatgagactggaaaaaagggtatgggatcatcaccrgaccttcggcttttacagctcgagctataagaacaaaaagaaaaagggatatcatttaaacacagtatgtagaaaagaataattattgaatctgtactggtctttaacttttacactttgatctttaattctgttattgtgattgagtccaaagaaaaatagtatgagtaaaataaaaagaacaccaaaaatgctaatattctgtttaccaaagtctgtagtgaaatatcccattaaatccaagtgcagtgctacacacccataatcccagcactttgggaggctgaggcgggtgaatctcctgaagtcaggagttcaa

SEQ ID NO: 573409 - DNA, 525 bp, Homo sapiens
cagcgacttgggaggctaaggcaggagaatttcttgaacccaggaggcagaggttgcagtgaccagcaaggttgcgccattgcaccccagcctgggcaataagagtgaaaactctatctcaaaaaaaaaaaaaattcctttgggaaggccttctacataaaaatcttcaacatgagactggaaaaaagggtatgggatcatcaccagaccttcggcttttacagctcgagctataagaacaaaaagaaaaagggatatcatttaaacacartatgtagaaaagaataattattgaatctgtactggtctttaacttttacactttgatctttaattctgttattgtgattgagtccaaagaaaaatagtatgagtaaaataaaaagaacaccaaaaatgctaatattctgtttaccaaagtctgtagtgaaatatcccattaaatccaagtgcagtgctacacacccataatcccagcactttgggaggctgaggcgggtgaatctcctgaagtcaggagttcaa

SEQ ID NO: 573410 - DNA, 525 bp, Homo sapiens
cagcgacttgggaggctaaggcaggagaatttcttgaacccaggaggcagaggttgcagtgaccagcaaggttgcgccattgcaccccagcctgggcaataagagtgaaaactctatctcaaaaaaaaaaaaaattcctttgggaaggccttctacataaaaatcttcaacatgagactggaaaaaagggtatgggatcatcaccagaccttcggcttttacagctcgagctataagaacaaaaagaaaaagggatatcatttaaacacagtatgtagaaaagaataattattgaatctgtactggtctttaacttttacactttgatctttaattctgttattgtgattgagtccaaagaaaaatagtatgagtaaaataaaaagaacaccaaaaatgctaatattctgtttacyaaagtctgtagtgaaatatcccattaaatccaagtgcagtgctacacacccataatcccagcactttgggaggctgaggcgggtgaatctcctgaagtcaggagttcaa

SEQ ID NO: 573411 - DNA, 522 bp, Homo sapiens
gctggtcaggctggtctcgaactcctgacctcaggtgatctgtctgccttggcctcccaatgtgctgggattacaggcatgagccattgtgcctggccaaaattaatactttttatattaaatttacatatatatatacgttttttctttttgatacygggtctcacactgtcacccaggctggagtacagtggcacaacctctgctcactgcagcctccacctgccaggctcaagcaatgctcctgcctcagcttcccgagtagctgggattacaggtaagtgccaccacacccagctgatttttgtgttttttgtagagacgaggtttcaccatgtttcccagactgttctgaaactcctgagctcaaagcagtccacccaccttggcctcccaaagtgctgggattacaggtgtgagccatcttgctcattctagtttaaacttttgagtggtttgtgtctcctgattggactcctacaaatacagaattgatgctaggaagggtaccaggagatagac

SEQ ID NO: 573412 - DNA, 522 bp, Homo sapiens
gctggtcaggctggtctcgaactcctgacctcaggtgatctgtctgccttggcctcccaatgtgctgggattacaggcatgagccattgtgcctggccaaaattaatactttttatattaaatttacatatatatatacgttttttctttttgatactgggtctcacactgtcacccaggctggagtacagtggcacaacctctgctcactgcagcctccacctgccaggctcaagcaatgctcctgcctcagcytcccgagtagctgggattacaggtaagtgccaccacacccagctgatttttgtgttttttgtagagacgaggtttcaccatgtttcccagactgttctgaaactcctgagctcaaagcagtccacccaccttggcctcccaaagtgctgggattacaggtgtgagccatcttgctcattctagtttaaacttttgagtggtttgtgtctcctgattggactcctacaaatacagaattgatgctaggaagggtaccaggagatagac

SEQ ID NO: 573413 - DNA, 522 bp, Homo sapiens
gctggtcaggctggtctcgaactcctgacctcaggtgatctgtctgccttggcctcccaatgtgctgggattacaggcatgagccattgtgcctggccaaaattaatactttttatattaaatttacatatatatatacgttttttctttttgatactgggtctcacactgtcacccaggctggagtacagtggcacaacctctgctcactgcagcctccacctgccaggctcaagcaatgctcctgcctcagcttcccgagtagctgggattacaggtaagtgccaccacacccagctgatttttgtgttttttgtagagacgaggtttcaccatgtttcccagactgttctsaaactcctgagctcaaagcagtccacccaccttggcctcccaaagtgctgggattacaggtgtgagccatcttgctcattctagtttaaacttttgagtggtttgtgtctcctgattggactcctacaaatacagaattgatgctaggaagggtaccaggagatagac

SEQ ID NO: 573414 - DNA, 473 bp, Homo sapiens
tgctgctctcttttcttaatttgcatttagcatgtgactatttrcacatgcaaatatgaatactttcaaaaaattgtcaaatatgaatactgagaatgtcttcccccccaccatttacatctcatcaaagcacaagtcaaaatgctcttgggtatattattcatctttcactgtgtgttctcctctgctttaccagaccatgtcttgtcttttgcaactcagcccatgtagaataaaagtacacttgttctataattgaaaatgaatctggagagaaagggctaagtcatgcagtgtgtgaggaagacaggtcgtggggaacatttcctctccttccataaaccaaatggtttcataatctgttgtgaatgtaaggatgtggagtgcagtccccaaaagcctgcattaattttttaagttttaaaaattaaaaataacatcataggagcgactgtaagtgaagaggattacta

SEQ ID NO: 573415 - DNA, 473 bp, Homo sapiens
tgctgctctcttttcttaatttgcatttagcatgtgactatttacacatgcaaatatgaatactttcaaaaaattrtcaaatatgaatactgagaatgtcttcccccccaccatttacatctcatcaaagcacaagtcaaaatgctcttgggtatattattcatctttcactgtgtgttctcctctgctttaccagaccatgtcttgtcttttgcaactcagcccatgtagaataaaagtacacttgttctataattgaaaatgaatctggagagaaagggctaagtcatgcagtgtgtgaggaagacaggtcgtggggaacatttcctctccttccataaaccaaatggtttcataatctgttgtgaatgtaaggatgtggagtgcagtccccaaaagcctgcattaattttttaagttttaaaaattaaaaataacatcataggagcgactgtaagtgaagaggattacta

SEQ ID NO: 573416 - DNA, 473 bp, Homo sapiens
tgctgctctcttttcttaatttgcatttagcatgtgactatttacacatgcaaatatgaatactttcaaaaaattgtcaaatatgaatactgagaatgtcttcccccccaccatttacatctcatcaaagcacaagtcaaaatgctcttgggtatattattcatctttcactgtgtgttctcctctgctttaccagaccatgtcttgtcttttgcaactcagcccatgtagaataaaagtrcacttgttctataattgaaaatgaatctggagagaaagggctaagtcatgcagtgtgtgaggaagacaggtcgtggggaacatttcctctccttccataaaccaaatggtttcataatctgttgtgaatgtaaggatgtggagtgcagtccccaaaagcctgcattaattttttaagttttaaaaattaaaaataacatcataggagcgactgtaagtgaagaggattacta

SEQ ID NO: 573417 - DNA, 587 bp, Homo sapiens
ggtatatatatatatatatatatatatatatayacacaccacattttctttattcacattgcttgatgggcacttaggttggttccctacatttgcaattgtgaattgtgctgtgataaacatatgcatgtaggtgtctttttgatgtaatgacttcctttcatttgggtagatacccagtagtgggattgctgaatcagatggtagacctactcttagttgtttaaggaatctccatactgtttaccatagaggatgtactaattcacgttcccaccagcagtgtgtaagtgttcccttttcaccatatctatgccaacatctattgtattttgacttttaaaaatggccattctggctggggtaaggtggtatctcattgtgggtgtaatttacatttccctgatgattcgtgatgttgagcattttttttcatatgtttattggccatttgtatatctccttttgtgaaatgtctattcatgtcatttgtccgttttttttggatgggattatttgtgttttcttgctgatttgtttgagttccttgtagattatggatattcgtcctttgtcggatgcatagc

SEQ ID NO: 573418 - DNA, 587 bp, Homo sapiens
ggtatatatatatatatatatatatatatatatacacaccacattttctttattcacattgcttgatgggcacttaggttggttccctacatttgcaattgtgaattgtgctgtgataaacatatgcatgtaggtgtctttttgatgtaatgacttcctttcatttgggtagatacccagtagtgggattgctgaatcagatggtagacctactcttagttgtttaaggaatctccatactgtttaccatagaggatgtactaattcacgttcccaccagcagtgtgtaagtgttcccttttcaccatatctatgccaacatctattgtattttgacttttaaaaatggccattctggctggggtaaggtggtatctcattgtggktgtaatttacatttccctgatgattcgtgatgttgagcattttttttcatatgtttattggccatttgtatatctccttttgtgaaatgtctattcatgtcatttgtccgttttttttggatgggattatttgtgttttcttgctgatttgtttgagttccttgtagattatggatattcgtcctttgtcggatgcatagc

SEQ ID NO: 573419 - DNA, 630 bp, Homo sapiens
ttttttttttttgagatggagttttgttcttgttgcccaggctggagtgcaatggtgcaatggcgcaatctcggctcactgcaacctccgcctcccaggttcaagcaattctcctgcctcagcctcccaacttgctgggattacagttatgcgccaccatgcctggctaattttgtatttttagtagagacagggtttcaccctgttggccaggctggtctcaaactcytgacctcaggtgaaccaccctcctcggcctcccgaagtgctgggaatacaggtgtgagccaccgcacctagccaaggcctctttacaatcaccctcaaactcatacctttctgatcttatttcttactcttctgcacttactgttctctctgcctgaaaactctgcagttgttcataaggctggttccttcccctccttcaggtgtctgcccaagggtcgccttaccacagaggcaggcctctctaagaccaccgtatcaacccattctcccccacccacgcccagcactcctcgtgtccctaccctgtttattccttcctctatttctcacaccatttgccttactatgtattttatcgaatattacgagcttatatttctttcccaataaaagtagctc

SEQ ID NO: 573420 - DNA, 616 bp, Homo sapiens
tgcccagctaatttttgtatgtttagtagagatggggtttcrccacgttggccagactggtgactggtcttgaactcctgacctcaggtgatctgcctgccttggcctcccaaagtgctggaattacaggcgtgagccactgtgcccagcccttttatccattttgagttaattttcatatatggtgtgtggtagggtccaacttcattcatttgcatgtggatattcagtcatcctagcatcatgtgttgtaaagactattcttttttctatcgaattgtcttgccgcctttattgaagatcaattgaccataagtgtaagggtttatttccagactctcaattctattccactgatgcatgtgtctagccttacatcatcatgccagtatcacagtcttaattactgtagcttttcagtaaattttgagatcgggaaatgggagtccaactttgttatcctttttcaagattgttttggctattctaggtcccttacatttctatatgaattttagaattaactgtcaatttgttttaaaaaaaaaaaaaggcaaccaggattttgatagagattgcaatgaatctgttaatcaatttggggagtattgcaatc

SEQ ID NO: 573421 - DNA, 550 bp, Homo sapiens
tttcaaaatatcaatgatattcttcagagaaatacaataaagaatcctaaaatgtgtatgaaactgctataaccctgaatagccaaagcaattctgagcaaaaagaacaaawctggaggtatcacactatctgacttcaaaatatagtataaatctacagcaataaagacaacatggtacgggcataaaaaagacacacagcctaatggaacagaatagggaacccctaaataaatccacatatttacagccaactgatttctgacaaagttgccaagaatatacactaagaaaagaacacgctcttcaataaatagtgctgggaaaactggataaccatgtgcagaagaataaaactagattgctatctctcaccatatacaaaaaaaaactcaaaatgaattaaaaatttaaatgtaagatcccaaactttaaaactactagaaaaaaatatggtaaatgattcactacattgatctgggaaaagattttatggttgaaacctcaaaagcacaggaaacaaaaacaaaaatagacaaatggaattata

SEQ ID NO: 573422 - DNA, 649 bp, Homo sapiens
cctttgcctcctgggttcaagtgattttcctgcctcagcctccagagtagctggaactataggcatgccccaccatgcctggctaatttttgtatatttagtagagatgaggtttcaccacgttggccaggctggtcctgacttcaactgatccgcctgcctcggcctcccagagtgctgggattacaggcatgagccactgcacctggcctatagaagacaatctatatatacttatatacatttttattaaaagtcatgcatcaaagattgtggaragagcctaacatctcaatagggcatatttagttaagaaaatcaggttcaactctgtattatttcactatatagtaccttttccaggaacaaaatcagatctaagagtaaagtctgataaacttcaactaagatgcaaaattacaaccaagtacttaagcaataaatctgagcaattatcaggttattttattgcatttctaatgagttcttctaaaaaaagtcaatcaattatcactgttatatatgttctgtgtgtaaggagtgcttgagagtctttaattgtaacatttattaaataagaataagaggacatttttaaaggaattaaaggaacattaattccttcataaatgtatagtgcttaagctct

SEQ ID NO: 573423 - DNA, 434 bp, Homo sapiens
gtcaaataatttgtggtcacctctaatctgccacagtcccatctctggccacattcctccaaaaaacaaaatacattcataccctccaaagacttcccaaagtcttatccaattatagtatcagctcagagccaaggtataggatcttgtcacctaaatcagctccaggtgtggggatctctgggtacagttcctccaatacatctcttcaagtagagttctagtctatctgaggccttgtgaactaatgagacaagttttatgacgtaccccccacacatccaacaaacattgatgagwtaggcataggctgaccacaacagaccttccctttcatggagggtagaggagaagagaaaccgtaaaacagtcactgtagttcatggaaattctgaaatacagctgggcacttgttaacaatcattggtaggcct

SEQ ID NO: 573424 - DNA, 455 bp, Homo sapiens
gttcctgcaattgccactatttccatgaccaccaccagagatttattgaaaaccttctcccgtgactagaattcttttggctaattaagtaaacatagctctttttgtagtttagcattttttaaagtatgctagttttctgttgttatgtaacaaattatcacaaacttaataatttaaaaaaccaaatttattacctcagagttcctgtggatcagaagtacagccacagttaactaggacttctgatcaggatctcacaaagctgtaactaaggtgttgtttagacctgagttttcacctcaagctcggtgaacttttccaaactcatatgattgttagtagaattaattttcttgcagctgttgaactcatggaagctccttcttcaatgacagcaggaaagtttttctgatttccagaaggsccagttctctttaagggtttacatgatt

SEQ ID NO: 573425 - DNA, 590 bp, Homo sapiens
tgaaggcaaattctgaagatttggggagaggttaaggagctaatgtgtggacatttagaatatggtgtctgtgtgcgcataagaacatgtctggttggtacttgtattagtcagagttctccagagaaaaagaaccaaaggaatatatagagagacagatagatgagagggtatttattagaagaattggcttatgtgattacggaggctgagaggtcccatgacagagttggggatgctgatagtgtggttcatttcaaatccaaaagcctcagaactagggaagcagatgctgtaactcagtccaaggcagcacgcctgagaaacctggggratggctgctgtgagtcttgaagtccaaaggcctgagagcctaaagttgtgatgtccaaggtcaggaaaaggagggtgtcccagctccaggagagaaagggagcaaattcacctttcttctgcctttttgttctatgccggaccccagctggttagatagtgctctcccacattgagggtgaatcttccccgctcagtccttgactcacacaccaatctcctctggaaatgtcctcacagacacaccttaaaataat

SEQ ID NO: 573426 - DNA, 632 bp, Homo sapiens
gaatatttgcagatctagctcttgtcagaaagactataatttaaaatcctgactcaccaaatcatctctggaaagcaaataaaccagttcttgtctcattttatacacagaataatatatgttaaagacccttcattttatacttatttatgtaaatttcaccaaagagaacattcttcaatgtacccatctttaatctaccacactaactcatcaacaacagaaaatgaattcagttcttctccaataagagataacctagcaactacaataaatcctccttgaaccaaaccacttttgatcttccttcactatgaaagaaatgctttgctaagagaaaacrctgctatgattccgatccataaatggtgatatgggtaggctttgtgtccccacccaaatctcattttgaactgtagttctcataatctccacatcttgtgggagggaccctgtgagaggtaattgaatcttgggagtggttacctccatgctgttcttgtgatagtgagttctcatgatatctgatggttttacaaggggctttgcccccacttccctctgcacttcttccatctttccgccctgtgaagaaggacatgtttgcttcccctccaccatgattgtaagtt

SEQ ID NO: 573427 - DNA, 563 bp, Homo sapiens
  misc_feature 280, 281, 282, 283, 284, 285, 286, 287, 288, 289, 290, 291,292, 293, 294, 295, 296, 297, 298, 299, 300, 301, 302, 303,304, 305, 306, 307, 308, 309, 310, 311, 312, 313, 314, 315,316, 317, 318, 319, 320, 321, 322, 323, 324, 325, 326: n = A,T,C or G
  misc_feature 327, 328, 329, 330, 331, 332, 333, 334, 335, 336, 337, 338,339, 340, 341, 342, 343, 344, 345, 346, 347, 348, 349, 350,351, 352, 353, 354, 355, 356, 357, 358, 359, 360, 361, 362,363, 364, 365, 366, 367, 368, 369, 370, 371, 372, 373: n = A,T,C or G
  misc_feature 374, 375, 376, 377, 378, 379: n = A,T,C or G
atggcacctagtttatgatgagcattttctggtgtcctatkatgaaacattgagtttccagatattctcaataataaatcaagaaatgattacttgctagagactgcattctagttcctgtcccttctctgcctattgatcaactttttctcccttaattctattaactatactgtataattgatttcacttaattctaatctgacataagagaatttatttctcataacagcaaatgaagaattctaatacaaaattgacactgagagcttaacatttnnnnnnnnnnnnnnnnnnnnnnnnnnnnnnnnnnnnnnnnnnnnnnnnnnnnnnnnnnnnnnnnnnnnnnnnnnnnnnnnnnnnnnnnnnnnnnnnnnnngcaaggttgtattgcttatataacctactgttgttacctatttagatatccattatggatatttggcagcaaacagaaacagattctcattatcttaaaatttaaaataactttaccaaaaggaagaactcattggaaagaaattgcacagtttacagaattgaaagaaggactgaaaagcaga

SEQ ID NO: 573428 - DNA, 312 bp, Homo sapiens
atggggtttcacaatgttggccaggctggtcttgaactcctgacctcaggtgatcccccgcctcagcctcccaaagtgcaaggattataggcatgagccacggcatctggccatatgtatcttaaatattaattactgtccagatatttccttgctcaggaattaacatgaaaggagtgcagaagtaacttttwattccttgaacaataaatgtttcaaactatatgaggtactttaaattttgtaatcaaatatacatgcacacataatcttatataaatacaaaatttaaattgaataatacatatgcta

SEQ ID NO: 573429 - DNA, 479 bp, Homo sapiens
agcatgaaaacagactaatacacccactttcaccactcctgttcaacacagtactggaagtcctagttagagcaatcaggcaagagaaagaaataaaaggcattcaaattggaaaaagtaagttaatttgtccctttttgcagatgatatgattttatacctagaaaaacctaaaggctccattagaaaacttagatctgataaatttggaaaagttataggatacaaaaataaacatacaaaagttgatagtgtttctatacaccaataatgaactagcggagaaagaaatcaaaaaggcaatcccatttacaatagctatacaaaataaaatacctagaaataaatttaatcaaagaggtgaaaggcgttgcaaggaaaactacaaaacactgataaaagragctgaagaggacacgaacaaattgaaagatatcccacgtccacggatcaaaagaattagtgtcattaaaatgacc

SEQ ID NO: 573430 - DNA, 537 bp, Homo sapiens
tgtcttggggttgaaatggtggaatatcttactgggattctctgcattttctgaatttgaacgttggcctgtctggataggttggggaagttctcttggatgatatctggaagtatgtttcccaacttggttccattctccccgtatcttttcaggtaccccagtcagttataggtttggtctttttatgtaattccatagttctcagaggttttttttgtttctttttattattttttctctaatcttgtctgcctgtcttatttcagcaatatagtcttcaagctctgaaattctttcctctgcttggtctatttggttattgatacttgtggttgcattgcgaagttcttgtattgtggtttttcagctccgtctgttcatttatgttcctctgtaagctggtttttctggttaacagctcctgtaatgttttatcatgattcttagcttctttgcattgggttacaacatgytcctttagctcagtgaagtttattattactcacctttgaagcctacttctgtcaattccac

SEQ ID NO: 573431 - DNA, 578 bp, Homo sapiens
gtattgaaagtttttctttcaacatagtcatgtgttgcttaataacagggctatttctgagaaatgtgttgttaggttaaatgtrtcactgtgtgaacatcatagtgtgtatttacacaaatctagatggtatagcctactacacacctaggctgtatgatatagcctattgctcctaggctataaacctgtacagcatgctactttgttgagtaataaaagcaatcatctttcattgaccaagacatcattatgcattgcatgactgtattttaaagatggcattctactgacttctgacttccagcacttctgaccagaagtcaacagttctttacattattgtttcctttaatataatggctgtttttctctgatttcaatattttctccttttaaagctttttaaaaatgatacataacatttgtatgtatttgtaaggtacatgtggttttttgatacatgtaggatgtgtaatgatcaagtcagagtatttaggatatccaacaccgcaaacatttattctttccattgggaacatttcaaatcttctgttttagatattttgaagtacaca

SEQ ID NO: 573432 - DNA, 592 bp, Homo sapiens
tctgtggccataggttaggcactgtgggcacccracccagatccctggcctgtgcacccatctcccaaattcatagagcatgactcccagaagctcatagctgtcctcttctcctgaccactgcccttagctcaggatttctcagccttggaaccattgacattttgggtccagattttttttttgatgtggggtctagtctgtgaattgtagtatggtcagtggcatccctagcctctacccactagaagccagtagcccccacacccagttttgacaagcaaaaatatctccaagcattggttgagaacccttgccttagctgacgggaagccttttctgaaacacattggaagttatacccttcttctagggtgctcaaaggccaataactgactgacgaggagtacagaagactagaccctgtcctcagaataggacaattctgatgctattcactctctggagtttcagatcaggctggggctagacttcagctgaagctgcacttttgcctggcttcatcccttgaactattttgccttctaggatgagtacatatcccaggcttctttgcagaaaggttgagtcc

SEQ ID NO: 573433 - DNA, 512 bp, Homo sapiens
atgtaaattatgttctaggatatttggaatttacttgcctttaaaacaccataaccacttcaaaagaggtacttcttgtctcgtttgtaattctgtgatgtaaattctgaagtttcacacattgacaatgatggttattacagtattaacatcgccatacatctctttggttagtttaccagctyaattaatcatgcttcattttcttttgggctctcatatcagcttctcttatttttgaatgaaatgacttctgaaagagaacatcctctgaggacacactaattctcccacctttacggaaattccttctcagaaggggcagatttgctcagcactgaagccacgtcccaaaagcctggggctccgtgtggagggtgaatgctgatgggagcctggggacctcagcttctaaagcctgtttctgccgctcaccgcggggcctgcagggctgagcttcatctttctgtgcttcatttcactgtcagtggaaagagcataatatttttatc

SEQ ID NO: 573434 - DNA, 573 bp, Homo sapiens
ttgaaactactttaatatcactataatgcatgtaaatgaaaggtccttaatatttcatcagacaattttccttctgtaattaagaaatatcttatacttcagctagtcttaaccactggtaaactgagactgttaatagcctatagctttactagtatggtaaccatcaaccacatgtggctatctaaacttaaatgaattaaaactaaataaaaatgaaaattcagctcctcagttgcaccaagtacatttctagtgttcaatggacacacgtagctagtcatcwctttattagattttgcagatataaagtgtgtctatcactgcacaaagtccaagtgggtagtactggtctccagcattaaatgctagaactaaaagttttttaaaaatagctttttcaagaagcatatgaatatggccaacttatgtattccaaagaataaatttttaagactttgtacaacaaatgtcaaaagagaaggaaaaataaaggatctatgtatttttgcataaagtactaaatatccagatgtcctacaccaaattccttctgttttatgttgtgccaag

SEQ ID NO: 573435 - DNA, 593 bp, Homo sapiens
ctcttgttagctgtttttaaatgtcttttttcttgatgctagttgagatttaaaggagaatttaaatgtaaaaaatctagaacagttatctcaagaaaagtgcctccagcctcttaagccattatttacatgaggaattgccaggagcagcagccattgaatgcgaagcaagagrctgctctatgtgtatgttttatagttcccctttgaacctgtctaattccagtgtgaaaataatgtttggctctttattagctaatttgaatctactttgtggtttatataaaatacattctcctaggagtttataatccaggaaatgttcttgatactttgaaactcttttggggagacatgtggttacttcattgaggactgcacttcttcgaaggagaatgtgaccaagttcgctgctctacaagtgctagggagagcgtggaggcgcactcagtgaaatgacaggaaacatacaatacccgtggcattttactttaatcccagattttcctaaaacagtcgttataaccaccttgaaaataaatcgtttaacattctttcccctattcatgaagtagggtacaatattatttaat

SEQ ID NO: 573436 - DNA, 621 bp, Homo sapiens
cccaagacgttgcttctactttggaaaaatcacttttccaaaatgacatttaatttaaaaaatctgtcccagtaaacaactttacactgaacaatatctgcattaataagagttaaggccctgaagaacaactctttggcattcttttctttgacaaggtctctgggaaccatgccaggaaaatataataaaatttactagcccaaaagttgtgtcctttcttcccttctctgtgtatccattgtctatgcgatgcttctttttcrtctttactttcttactagaaatttgagagccttgctttagtttatttgaaaccagccttatatttgcagtgttctgcttctgtttcaatgataggagaccataatctctttgtacaagcatcatcttctctttcaagttgattccacacattttcattgatctggatttcccaggtactgatgcaaacccttcatcaatacacttcacagcgctcttgtccatactctggtttgcatggtctcttcctctccctgaatcataagttacgaggaggcagggccatttccaaaatcaattcctggcagaagagaaagtgcctccatgcatcaggaaaccatttcaaacgttaacagt

SEQ ID NO: 573437 - DNA, 567 bp, Homo sapiens
tttaaatgtttgctaaccgcccacgaccacgtgactaatgagagattctgtaaactgaattttagaccaatctggtatactcaggctattccagtaagcagtctctttggagtgagtcagtttttccaatttacaatattcttcctggttctctctaagatggtatctgggaatgtggaaggaaggcactttgggccagtgggggagagggaggcccctcaaattgtgctagtgcatagctgtgagctagctggcatttgtgggggtgattagactgctattcacacaggctgttcagaggaagtgtcctgctgatgtatgcagctggggcacttgtggtctgttttctcctggcttggacagggttcaggatcctcccagctgactcagttccatctcagccctctctggcactctggactctctgggatctagctggrattccttttcaggtgccagcttggtggacagatccacaatataccctagcatggccattcttccctctaggccaggggacaggtatagcagggctcttgagagcagacctatggccccatttgtccc

SEQ ID NO: 573438 - DNA, 466 bp, Homo sapiens
caagaaagaattcagagtgagactgtagactaaaatgaaagcaagtttattaagaaagtaaaggaatacactttgggaggccgaggtgggcggatcatctgaggtcaatagttcgagaccagcctggccaacatggtgaaacccatctctactaaaaaaaaaaaaaaagaaaaaraaaaatacaaaatattcgggtgtggtggtgcacgcctgtaatcccagctactaggtggctgaggcaggagaattgcttgagcccaggaggtggaggctgcagtgagctgagatcatgccactgcactccagcctgggtaacagagccagactctgtctcaaaaaaaaaaagacaagacaggaaaggaataaaagaatagctactccgtagacagagcagccccaagggctgctggttgcccatttttatggttatttcttgatgatatgctaaacaagggatggattattt

SEQ ID NO: 573439 - DNA, 518 bp, Homo sapiens
acctcctgcatcaaaatagctggtggctttggtcagactcaccaaatcacagaggatggggtgagrttagaaaccaggagatgcatgttttttataagcattcccaagtgaatcttaatttacctactgaaaagcaataatgaaagtgctagaatttccttttgtagtatttctcaacccactatatagctagggtgacttcacagttctagaccttcgtagcctgcttggaggaaggcagtacttcctttcctaaggaagcaccctgtagagtttaccagatcagtgcttactgctgttctgttcatttcttcgaggtattgcatcgcctggggggcagcatgcgaattaagcacatgcatataaaataagtccaacatagctgtttaaaaagacaaattaaacgcattctcatccgcaaaatgatagtgttaggtcaccattacaatgctcctctgtgtccagagttggttccttctggtgggttcttggtctcgctgacttcaggaatgaagcca

SEQ ID NO: 573440 - DNA, 518 bp, Homo sapiens
acctcctgcatcaaaatagctggtggctttggtcagactcaccaaatcacagaggatggggtgagattagaaaccaggagatrcatgttttttataagcattcccaagtgaatcttaatttacctactgaaaagcaataatgaaagtgctagaatttccttttgtagtatttctcaacccactatatagctagggtgacttcacagttctagaccttcgtagcctgcttggaggaaggcagtacttcctttcctaaggaagcaccctgtagagtttaccagatcagtgcttactgctgttctgttcatttcttcgaggtattgcatcgcctggggggcagcatgcgaattaagcacatgcatataaaataagtccaacatagctgtttaaaaagacaaattaaacgcattctcatccgcaaaatgatagtgttaggtcaccattacaatgctcctctgtgtccagagttggttccttctggtgggttcttggtctcgctgacttcaggaatgaagcca

SEQ ID NO: 573441 - DNA, 518 bp, Homo sapiens
acctcctgcatcaaaatagctggtggctttggtcagactcaccaaatcacagaggatggggtgagattagaaaccaggagatgcatgttttttataagcattcccaagtgaatcttaatttacctactgaaaagcaataatraaagtgctagaatttccttttgtagtatttctcaacccactatatagctagggtgacttcacagttctagaccttcgtagcctgcttggaggaaggcagtacttcctttcctaaggaagcaccctgtagagtttaccagatcagtgcttactgctgttctgttcatttcttcgaggtattgcatcgcctggggggcagcatgcgaattaagcacatgcatataaaataagtccaacatagctgtttaaaaagacaaattaaacgcattctcatccgcaaaatgatagtgttaggtcaccattacaatgctcctctgtgtccagagttggttccttctggtgggttcttggtctcgctgacttcaggaatgaagcca

SEQ ID NO: 573442 - DNA, 518 bp, Homo sapiens
acctcctgcatcaaaatagctggtggctttggtcagactcaccaaatcacagaggatggggtgagattagaaaccaggagatgcatgttttttataagcattcccaagtgaatcttaatttacctactgaaaagcaataatgaaagtgctagaatttccttttgtagtatttctcaacccactayatagctagggtgacttcacagttctagaccttcgtagcctgcttggaggaaggcagtacttcctttcctaaggaagcaccctgtagagtttaccagatcagtgcttactgctgttctgttcatttcttcgaggtattgcatcgcctggggggcagcatgcgaattaagcacatgcatataaaataagtccaacatagctgtttaaaaagacaaattaaacgcattctcatccgcaaaatgatagtgttaggtcaccattacaatgctcctctgtgtccagagttggttccttctggtgggttcttggtctcgctgacttcaggaatgaagcca

SEQ ID NO: 573443 - DNA, 596 bp, Homo sapiens
aggagacaaaaattcataccatagcagagataaagattatatgaacagtactatataagtttttgtgtgtatatatatataatttttctcagttaaataacttggtgtggaaattctcagttatatggaaatcatattgagatattaaatgcaattcttaagaaggtttagttagtggtaacccctcttatattctcttaatagcttaacagtatacttttcagtattaggcacttttttcactgtaacttcattgatatatttgtgggttgttaggtgatgctacacttaaattctaggcctgaattcatggtagtaaacatttgttaagtgctaacatagtgttagcagtattktaattactttatgtcgtttaatttttataataacccaaaagagtctgtattctcaatttttagatgagttataaactgaggcaaaatcacattaattaacttacccaaagacacaaacctagtaagtaagttgcagagctaggaattgagccaagttgtcttctcaagtccatgtctctgttaccttaaaaagtccatgtctctgttaccttaaatatagaattaaagggtaagtatgta

SEQ ID NO: 573444 - DNA, 472 bp, Homo sapiens
gtgttctgttgaaccattgggtatgttaasggtgcttgtcaatggagctgagtagattcagataaggggatgctctgtctaagagctaatcagtgactggatgattagttgaggtcattcggtttaggtgtggtgcttctaacctaaatatgtcaaattaaaagtctttaatttgggacttacaaaacaaggatttgaggagaacccaaaaaaaattttggtagaatcgtatgaaagatgtattaaatagctaaacttagcacttatataattaattgtaacaaatttggcccagttattgtcagactctgccaggtttccaaggcttatattcccctttcccaacatatgagacaatttgccttctacctgatgcttcaaattttaagacatattatgaccttatgtggtcagagttccttaagctataatccttgaccagctgtattaaaatcctcgagcttctttctcc

SEQ ID NO: 573445 - DNA, 472 bp, Homo sapiens
gtgttctgttgaaccattgggtatgttaacggtgcttgtcaatggagctgagtagattcagataaggggatgctctgtctaagagctaatcagtgactggatgattagttgaggtcattcggtttaggtgtggtgcttctaacctaaatatrtcaaattaaaagtctttaatttgggacttacaaaacaaggatttgaggagaacccaaaaaaaattttggtagaatcgtatgaaagatgtattaaatagctaaacttagcacttatataattaattgtaacaaatttggcccagttattgtcagactctgccaggtttccaaggcttatattcccctttcccaacatatgagacaatttgccttctacctgatgcttcaaattttaagacatattatgaccttatgtggtcagagttccttaagctataatccttgaccagctgtattaaaatcctcgagcttctttctcc

SEQ ID NO: 573446 - DNA, 591 bp, Homo sapiens
atggaatagtatatattttttatataatggaatattatacatatatattaatcacacaccatacattattcattcatacattcatccagacacttggttgtttctgtatcttgtctaatgtgaataatgctgcagtggacatgggagtatagatatctctttgagattattatttcaattattttcaatatatacccagaagtaayagtgctggatcatatggtaattccatttgtaattttttgaggaacatccatgctgttttccatagctgctgtactattttatattcccaacaacagtgtacaacaattccagtttatccagatcctcaccaacacttcctttttaatagtagccatcctaacaagtgtgaggtgatattttattgtagttttgatttgaattttcctgtcaattaatgattttgagcacattttcatataccttgttggtcatttgtatgtcttcttggagaaatttctgttcaagtcctttgcccatttttaattgggtttatatgtttatttcctatttgtaggagttctttatatatttttgaaattagccccttatcagatgtatagtttg

SEQ ID NO: 573447 - DNA, 604 bp, Homo sapiens
ccaaattcagaagcaatgaaattagaccacagatttgcggtacataaaaatgttaaatgtttatatgctccaacaccataattcaaggaaaaagagaaataacagaccaggcaaaaatgataaaattatataaycaacaagcgggttaaaattcacaagcaataataaaaaggcagtacagtagaaatatgagaaaaggacagatataagcaagtcatagcatatgtatgtgtataataacaaagtaatgtattcatataatgacaaaaacaaatcattattagtaatcacggaaattcaagtaaactaatacaggcacatacacatatattgccagagtgtcagaaattttaaaagttatactatctagtgttgacaaagacagatatacacactaacactcatacagtataggtaaagtggttagcattttgggtagattttttgttgtatttttaaaattgaattactctactttaaaatttatcttacaaaaatacatgtatatgtactcagatatgaatgtgcacagatattcatttcaacatggcgtataatagtggaaaccaacaaatcacacaagtatttatattaagagggatga

SEQ ID NO: 573448 - DNA, 602 bp, Homo sapiens
tgaattctgaaataaaaatgtgaaacaaactgagtcagtagcactccagtccgccatctgggatttcacactacgcagtgaattccagaaattagattaatatggaagaactcagaaaggggaattctctttcggaggtaattacaaggctcacctattaacagtggaaaatctgcggccactaattgctctcctcaagtcacatagaagacctcaaatgaaatacaagcccagaatgtgttttcaaaatgagagttctattccaattatcaatgggcataactattaacattatttggaaatatcaaagtataaggagatttttattgtgagaatttaaaaattgctacaaaagcataggtcaaaatactaatctgctcttcctcaaaacattttgaagttagggttttgcttcagtattttcacktgctccagccagctttctttatcccccaaatggcttcctccgaactgtgtaaaatttaagttcagaaaatttggctttggtttaagatttgcacactgtggagaaccagcactgctctcagactgagaggattccaaacagcttctctggacagcaggtgctgtggctgaatagt

SEQ ID NO: 573449 - DNA, 570 bp, Homo sapiens
ggcttccttggtggggattccattttccagctccccatacagtattcttttggtgtgaattaggtgagttggctgatgaaatagctttagtcattcagttgcaggcagtgtctgggtggtgccctagttagggatctatgaacttctacacacagcytgaaacagtgtaggagtatatgtgggtgtgcatttttctgaggtgagggttgataactttcatcggatctgtgaacttctatttcaaatataaaattaaattaaagcctgtgccctaaagcactgtggggtgtcaagatagaactatgtgggtttctggaggatatcatggggcccagttgcctacatgccctggtcaacttggatgttatgggagtgaaaaatagtctctaccttgttgccagtcattgtgtttggggtttctgtggttataacagtttagtttgtatgctaacaaacataaattcctttattgagaaatatataaacatgaacctacattgtagaatctgattttaaaattaataaaacatgaacagttgtctatgccgttaggatgtataatgtcatgtg

SEQ ID NO: 573450 - DNA, 562 bp, Homo sapiens
gcatgaacatagcagtcgtctcattttgctcacagtctaaaaatgcaaattctccccaacttcttagagcatgacaggtsttcagctggcaatctttccatgtttacataagaagctagaattgatcatatggttttacagtgctttcccgaaaatctgtgattgttattagattctgtttttcctctattacctctcaaaggaaataaagcagcaaattactcccatattttgagctctaaattcaagaactactaaattcactgccagccattacaaatattcagttctttattaaggtacacatcattacagtaggctcagagtgctaatacatgaataataactatagttagtaaaacaatgcaaatggagatcagtttaaagagccctgatcaatgaagtaattttcagttgaaaaattgtagaaggtatgtattaaaaagcactagtaatatatgataattcaataagtcattgaatgaataagtgagtgaatccaactaactagaaattattttgatatattagttttcttttgttttttctttttttttttgag

SEQ ID NO: 573451 - DNA, 594 bp, Homo sapiens
ttttcatcataattgatgtgatgtgatcatcttatgtgaaacatcataaataagcaaaaacattagaggaaaatatatgttttgaggggtggattgtttagtgctataattatttgctttggaccctagtcttagagttcttaaaggcctctaaatggagcttgcatggaacagacaaacaaaacatagcatccccagtgagcaattccccatattttctcatcaaatcttgtgcaaaatgccatgtagaggggatttgcacattcttgccacaatagatctgccaggacattccagcttctgtccagtcaccaggcaacagactttggagctgatggtaatagaaaaagaaaatataattaaaacagattgttgtcctcagagtgatttcatttaactyaaacttatttttatttaacaaacattcttatgcttgtcatttctggtgagaacatgagctccctactggtatagtctaaaagtattctctaattttttagtcagaatgtaattgtctaattttttaagcatgtattatatgctgcaaacttatataagcattttgcatctactttcccaattcttttttaaaat

SEQ ID NO: 573452 - DNA, 481 bp, Homo sapiens
aaatctattgcacaaagaactcttcatactaagattctttcatagacaaattacaaatattttaagaattatatatmtttaataatacaaaaagtatttcagataaaatacatacctattcattttataaagcaagcgtaaccaaaatttgacacagatagtccaagaaagacagatagacctcaacacaataacagctggagacctccaaaccccattttcaacactgggcacctcttccaaacagcaaataaacaaagaaatgtttgaattagtctgcactgtagaacaaatggacccaataagtatttacagaacatttcatccagtggctgcacaatacacattcttctcctcagcacatggatcattgtcaaggatagaccatatgttaggtcacaaaacaagtcttaaaacattcaaaaaaattgaaataatatcatccatcttctctgaccacaatggaattaaactagaaatc

SEQ ID NO: 573453 - DNA, 629 bp, Homo sapiens
acatgtaacctaccaagattgaaccatgaagaaacgcaaaatctgaacagaccattaacaagtaacgagatggaagctgtaataagtcttccagtaaagaaaagcctggggccctatgaattcactgctgacttccaccaaacatttaaaggggaaataataccaatcctgctagaactatttcagaaaatacaggaagagggaatacttccaaactcattctataaagccaatattaacctgataccataaccagacaaatactcattaaaaaaagaaaattacaggccagtatctctgacgaatattaatggtaaaatcatcaacaaaatactagcaatctaaattcaataatacattgaaagcatcattgatcactaccaagtgggactatcccagggatgcaacatacacatatcaattaacatacayagatcaattaacatacactatcaattaatatgatacatcatatcaacagaatgaaggtcaaaaatcatctgatcatttcagttgattctgaaaaagcatttgataaaattctttttatcatctctctgtaatagacatctctacataatcaacatctctatgtaataaaaaccctcaaaaagctgggtatagaagga

SEQ ID NO: 573454 - DNA, 582 bp, Homo sapiens
tgaagtgtccagaatttatattattctaaaaaataaatttgccacaaaaatgaataagcttcatcattaggctaaggagaattgagaaaagaagaaaattctttctgtcatccagyctgggaaatgtgagtgagattggtatgtttatttctttgttgtccaagattctcacataccctgggtaaatcacttttcaggccccaaacaaaatgtgctatcttctgactacacagtccatgagtgatagattacacacagaaagacagatagataatagatagatagatgattgatagatagatagatagatagatagatagatagatagatagatagatagatagattgatagacagatagatagatagagcatagaggtgaatgaagatgaaatgagtagaaaacttctcttgtttctctgttggcgcaatgttctggtctcaattaccaaacacagctgggctggatgagtcagtgcaccacttcagctgattcctctccagcaactcctgtcgaagctactccccactccccagaccccttgcgtgggatatggacatacttatgggagggaaataagag

SEQ ID NO: 573455 - DNA, 582 bp, Homo sapiens
tgaagtgtccagaatttatattattctaaaaaataaatttgccacaaaaatgaataagcttcatcattaggctaaggagaattgagaaaagaagaaaattctttctgtcatccagcctgggaaatgtgagtgagattggtatgtttatttctttgttgtccaagattctcacataccctgggtaaatcacttttcaggccccaaacaaaatgtgctatcttctgactacacagtccatgagtgatagattacacacagaaagacagatagataatagatagatagatgattgatagatagatagatagatagatagatagatagatagatagatagatagatagatwgatagacagatagatagatagagcatagaggtgaatgaagatgaaatgagtagaaaacttctcttgtttctctgttggcgcaatgttctggtctcaattaccaaacacagctgggctggatgagtcagtgcaccacttcagctgattcctctccagcaactcctgtcgaagctactccccactccccagaccccttgcgtgggatatggacatacttatgggagggaaataagag

SEQ ID NO: 573456 - DNA, 650 bp, Homo sapiens
agtatatttagtagtcaaatattagaatcattccagttaaagtaagagatgagaaaaaaagtcacaatttttaccaatattgatgatacaggagctcctaatcaatgtatttagaaaaagaaaagatatgtgaagtataaacattggagagagttaatattctcattttgttctacaatgtrcttctcttcatagaaaactcaataatatgaactaacaatgtgacaggataggtcagcagagtggccagaaacaagggcaaaataagaaaatcaataatatccttagacaaaaagagtatccaattagaaaatatactagagatcccaaaacaattttgaaaaaaattataaagtgcctactcatgtgcctaataagaaatatataaggttttattggaaaaatttataaaacattactaaaggagtaaaagctgtcataggtgaatggaatcataatctacatttgtagatataaaactttatattttaaagataccagttatcttccaagttaatcaagagatttcttactctcccaatcaaatttccaatatatattttttttaattgaaggaagacttgaatatgtcttacatttgtaggagtgtaattctgcaagtcagggccatatatattttagaggaaaga

SEQ ID NO: 573457 - DNA, 614 bp, Homo sapiens
gttggaaacgcagaaatcacccgccttctgcatcgatcttgctgggagctgcagaccggatctgttcctattcagccatcttgccaacaatctctcaaaacttaaatttcaaattcaatgtcaaaatgcttacctgagtcataacatttagttataatattatctacatagatgactstttcaatactctggcacatttccaagaacatttaatactcataaaaaccctatgaggtaaatattattaataacctattacagcaaaattgcttgaaagcactgtctctattctgaattttcaattactctccttctcttcattaaatcaattccaagagatcttcctctcctgccatgacattatgttgacaaatgtgtatctctaactagactcttaactctcaaatgtaatgactatgtacaagtgattatctaacacccttatggacatctaaagttcaccacgactaaaattctcacaccctcctgctcttcatgtgacgtcacgtctctaataaatgggaaacttatacattcagtttctcaggaaaaaatccagaggttatttttcacccatttctccctctcacagtctttactcaaagcatcagcta

SEQ ID NO: 573458 - DNA, 614 bp, Homo sapiens
gttggaaacgcagaaatcacccgccttctgcatcgatcttgctgggagctgcagaccggatctgttcctattcagccatcttgccaacaatctctcaaaacttaaatttcaaattcaatgtcaaaatgcttacctgagtcataacatttagttataatattatctacatagatgactgtttcaatactctggcacatttccaagaacatttaatactcataaaaaccctatgaggtaaatattattaataacctattacagcaaaattgcttgaaagcactgtctctattctgaattttcaattactctccttctcttcattaaatcaattccaagagatcttcctctcctgccatgacattatgttgacaaatgtgtatctctaactagactcttaactctcaaatgtaatgactatgtacaagtgattatctaacacccttatggacatctaaagttcaccacgactaaaattctcacaccctcctgctcttcatgtgacgtcacgtctctaataaatgggaaayttatacattcagtttctcaggaaaaaatccagaggttatttttcacccatttctccctctcacagtctttactcaaagcatcagcta

SEQ ID NO: 573459 - DNA, 442 bp, Homo sapiens
tcatcaaaagaagagagacttcctcttggttctacgcctacttcttgtctttgcaaaaaaataaaccactttcttctttaaatctcttatctctttgatcctgtgatgtaatttctctccctttaaattatttttactctcttcttgagaatttttaatgtcttctcttcctcttcttggtaagtcataaacratcagctaaattgtctttcattaataatctcctcaataattatgcttcatttaatttatttggcttgcattactctaagatccaagattgatgggtctaaactgatgatcattccaaaactacttattatacttatggatttaaaggcctttcatttaaactcaatatatccaacttaaaatttggggacttccagatcaaatggcagactgagaagacatgagaaatagtactacgagcacacatatc

SEQ ID NO: 573460 - DNA, 442 bp, Homo sapiens
tcatcaaaagaagagagacttcctcttggttctacgcctacttcttgtctttgcaaaaaaataaaccactttcttctttaaatctcttatctctttgatcctgtgatgtaatttctctccctttaaattatttttactctcttcttgagaatttttaatgtcttctcttcctcttcttggtaagtcataaacaatcagctaaattgtctttcattaataatctcctcaataattatgcttcatttaatttmtttggcttgcattactctaagatccaagattgatgggtctaaactgatgatcattccaaaactacttattatacttatggatttaaaggcctttcatttaaactcaatatatccaacttaaaatttggggacttccagatcaaatggcagactgagaagacatgagaaatagtactacgagcacacatatc

SEQ ID NO: 573461 - DNA, 429 bp, Homo sapiens
gattttgtatcctacaactttactgaatttatttattagctttaataattttcttgtggggtctttttttccaaacataagatcatatctacaaacaaggataatttgacttcttccattccaatttggatattctgtatatctttctcttgtctaattgttctagctgagacttccagtactatgttgaataacagtggtgagagagggcatctttgttgtgttccagatcttagaggaaaggctttcagtttttccccattcagtatgatactagttgtgagtctgttgcataaggkttttattatgttgaggtatgttccttctatctccaattttttttagggtttttatcatgaaggaaagtcaaattacatcaaatgctttttcagcatcaattgaaattatcatatgatttctattcttcat

SEQ ID NO: 573462 - DNA, 602 bp, Homo sapiens
gcatcccattctgaagcaaactctggtaaaccaagtaaaattgacttatgcctatcctcattaggacttaacagttctaggtattatgcaatggaaattctaacacagcactgtcagtgggcacatgtgaggatgttcaaggttctattatttgttgttttagcaagytaaaaggcaacctgcatgactctgagtggaaaaatgtgctgttttcaagactcagagtattattcagaggtttaaaacaaccaattaagtgttatattgatagtacagaaagacacataggctttaattaaaacagcaagaaaaagaattagatgcataacacaaaattatttatgtaggttcaattttatgctcaaaatacaacacatattttgtgaaaacacctgcaagccagaagatacatattaaactatgagagtttttgcttaggtggagaaaggaaggactgagactgggatatgacaaaaacaaataaataaataactataaataataggtaggggaaagtagaaaaaatgagattctctgggaagcaatgtatgagtgtgtgcatgcacatgtgtgtgtgcatgcacatgtgtatgtgcatatgg

SEQ ID NO: 573463 - DNA, 682 bp, Homo sapiens
tgtgtgtgcatgcacatgtgtatgtgcatatgggtatttatggagttgcagaatcttttttggtgttaatgctaaatgtaaggctcttcagaacttcagatcaattttatgctttgagatgttcaacataaataaaattgattacttgagggctgcaaagacaaatacaatgggaaaggaaacaatgtacttttgttcagtggctctttcactttaccatatggaaacaccattttttattaagctaaactctttatacagaatattttccaaagctatattagcccttaagatgaaacctgtttgctcaaggatgtatttgccctttcaaatctatatcattcaatagctatacaaggattgccatcattttaacttatcaatctgctttttatgtttggataaatatgttgacacacttaaaggttgcagtgtaaaagagcataggtgtcttagttggatttgmgtcaacatttcagcaccccaacctttactaacttcatggaagaaataataagacttaagctttctcagcctgttttattttctgtcaaattctgtgcaaataaacgggaaggtacatgttaaggttgcaaaccacaataaatgttaattcttgccctttatcctcaaatggaatggtctagttacatttatttatttatttgtttatttatttatt

SEQ ID NO: 573464 - DNA, 682 bp, Homo sapiens
tgtgtgtgcatgcacatgtgtatgtgcatatgggtatttatggagttgcagaatcttttttggtgttaatgctaaatgtaaggctcttcagaacttcagatcaattttatgctttgagatgttcaacataaataaaattgattacttgagggctgcaaagacaaatacaatgggaaaggaaacaatgtacttttgttcagtggctctttcactttaccatatggaaacaccattttttattaagctaaactctttatacagaatattttccaaagctatattagcccttaagatgaaacctgtttgctcaaggatgtatttgccctttcaaatctatatcattcaatagctatacaaggattgccatcattttaacttatcaatctgctttttatgtttggataaatatgttgacacacttaaaggttgcagtgtaaaagagcataggtgtcttagttggatttgagtcaacatttcagcaccccaacctttactaacttcatggaagaaataataagacttaagctttctcagcctgttttattttctgtcaaattctgtgcaaataaacgggaaggtacatgttaaggttgcaaaccacaataaatgttaattcttgccctttrtcctcaaatggaatggtctagttacatttatttatttatttgtttatttatttatt

SEQ ID NO: 573465 - DNA, 418 bp, Homo sapiens
aagtcatgttttatcacttttgtccttaaagatttcagacatgctgaaactgattgaagtatcatttgctaccagatagattarttatctctagttgtaggagtggatacatctttaatggtatattttgggttattgtcttatttttgatgcagtgttctataaataatttattaaacctggcatccttgggtgagcatggatttttcaactttggtgttatattgtgtttgcttttaaaaactgcttttgaggccgggtatggtggctcttgccatacccagcactttgggaggccaaggtgggcggattacctcaggtcaggagttcaagaccagcctggtcaacatggcaaaaccatgtctctactgaaaacacaaaattagccaggcatggtggtacatgcttgtagtcctaa

SEQ ID NO: 573466 - DNA, 418 bp, Homo sapiens
aagtcatgttttatcacttttgtccttaaagatttcagacatgctgaaactgattgaagtatcatttgctaccagatagattaattatctctagttgtaggagtggatacatctttaatggtatattttgggttattgtcttatttttgatgcagtgttctatmaataatttattaaacctggcatccttgggtgagcatggatttttcaactttggtgttatattgtgtttgcttttaaaaactgcttttgaggccgggtatggtggctcttgccatacccagcactttgggaggccaaggtgggcggattacctcaggtcaggagttcaagaccagcctggtcaacatggcaaaaccatgtctctactgaaaacacaaaattagccaggcatggtggtacatgcttgtagtcctaa

SEQ ID NO: 573467 - DNA, 418 bp, Homo sapiens
aagtcatgttttatcacttttgtccttaaagatttcagacatgctgaaactgattgaagtatcatttgctaccagatagattaattatctctagttgtaggagtggatacatctttaatggtatattttgggttattgtcttatttttgatgcagtgttctataaayaatttattaaacctggcatccttgggtgagcatggatttttcaactttggtgttatattgtgtttgcttttaaaaactgcttttgaggccgggtatggtggctcttgccatacccagcactttgggaggccaaggtgggcggattacctcaggtcaggagttcaagaccagcctggtcaacatggcaaaaccatgtctctactgaaaacacaaaattagccaggcatggtggtacatgcttgtagtcctaa

SEQ ID NO: 573468 - DNA, 418 bp, Homo sapiens
aagtcatgttttatcacttttgtccttaaagatttcagacatgctgaaactgattgaagtatcatttgctaccagatagattaattatctctagttgtaggagtggatacatctttaatggtatattttgggttattgtcttatttttgatgcagtgttctataaataatttattaaacctggcatccttgggtgagcatggatttttcaactttggtgttatattgtgtttgcttttaaaaactgcttttgaggccgggtatggtggctcttgccatacccagcactttgggaggccaaggtgggcggattacctcaggtcaggagttcaagaccagcctggtcaacatggcaaaaccatgtctctactraaaacacaaaattagccaggcatggtggtacatgcttgtagtcctaa

SEQ ID NO: 573469 - DNA, 610 bp, Homo sapiens
gcatgtgtctttatagcagcatgatttataatcctttgggtatatacccagcagtgggatggctgggtcaaatggtatttctagttctagatccctgaggaatggccacactgtcttccacaatggttgaactagtttacagtcccaccaacagtgtgaaagtgttcctatttctccacatcctcggcagcacctgttgtttcctgactttttaatgatcgccattctaactggtgtgagatggtatctcattgtggttttgatttgcatttctctgatgggtctatttatttaaaacaaagggagggaagtctcatttacattmgtttttttcatagccttttgaactttgcaatttctatgtttcagaacctatttcttacagtttttctacgctaaactctgtcctggtcagttctagagtgtatggagaaccaaatgatgtaactgtatgcgacctggctgtagtggaacaaatttgactcttaagtatgcaggctctaatttttctgtctggttttggtaagtattccttacacaggtttttctttgaaaatctgggattgagaggttgatgaatgaaaattaatcctttcactttgttgtgtat

SEQ ID NO: 573470 - DNA, 610 bp, Homo sapiens
gcatgtgtctttatagcagcatgatttataatcctttgggtatatacccagcagtgggatggctgggtcaaatggtatttctagttctagatccctgaggaatggccacactgtcttccacaatggttgaactagtttacagtcccaccaacagtgtgaaagtgttcctatttctccacatcctcggcagcacctgttgtttcctgactttttaatgatcgccattctaactggtgtgagatggtatctcattgtggttttgatttgcatttctctgatgggtctatttatttaaaacaaagggagggaagtctcatttacattcgtttttttcakagccttttgaactttgcaatttctatgtttcagaacctatttcttacagtttttctacgctaaactctgtcctggtcagttctagagtgtatggagaaccaaatgatgtaactgtatgcgacctggctgtagtggaacaaatttgactcttaagtatgcaggctctaatttttctgtctggttttggtaagtattccttacacaggtttttctttgaaaatctgggattgagaggttgatgaatgaaaattaatcctttcactttgttgtgtat

SEQ ID NO: 573471 - DNA, 543 bp, Homo sapiens
aacatgtgagctctgtagctcatggtgttgttggcgtggtgcttagcaacagggattttcctacactacactccagtacagggcacagagcagaaactttattgctaaatttaccgcatagcagaggcagaacagaattcattttcactgcaggctgggacatcctaaagacaaaaaacatggaatgggtgatatgagctaccctagtttatttctttcttccaatatctccagtcacctccactattgatctagtgaaaacaggcgcaggaacagtgctctaaacgacattcgatgtccttcaatatctttgtcagtctgaattcaaaggaaatattttaactcaagtaaaaagaagactacaaaagaaagataacccatatggggatagcagacttttttgtttttgttgttgttttaaaatctcttgtttttggccacagcsactctgagctagaagaaaatatttaggagaaggatgagaaatccttctgtgttgaataagggaattacttccagatggcaatggtgtaaatctactat

SEQ ID NO: 573472 - DNA, 505 bp, Homo sapiens
tgacagtggcattaacattgtcattaaatcttaaataaacactaatttcccagtgcttgcaagartctgacctggaaaaagatgaaaaaaaggagatactatagagttttttgttaattatcaagcttttcctttgtgttttgtttatcagatatataacgtttgaaactgaagctgataatcaaatgaaatagtttttaaaaactacttgttggagtcaaatgactactcttggcttttctttctttttttccatttccatttataatagccaaaaaaagtttcttgtcactgtttctaaataacaccatgacctcctgctcacaaattaaaatgtattgcaattctctaaataagaacaatctaccctttctaaaatttcaaattaaatgtgctttatttttagtatagtgacctaccctgcatgtataaattaaatgtaagaaacattttatgtttagtaggcttgaaaatgagactatttttcccttattttttctcctta

SEQ ID NO: 573473 - DNA, 504 bp, Homo sapiens
gacagtggcattaacattgtcattaaatcttaaataaacactaatttcccagtgcttgcaagaatctgacctggaaaaagatgaaaaaaaggaratactatagagttttttgttaattatcaagcttttcctttgtgttttgtttatcagatatataacgtttgaaactgaagctgataatcaaatgaaatagtttttaaaaactacttgttggagtcaaatgactactcttggcttttctttctttttttccatttccatttataatagccaaaaaaagtttcttgtcactgtttctaaataacaccatgacctcctgctcacaaattaaaatgtattgcaattctctaaataagaacaatctaccctttctaaaatttcaaattaaatgtgctttatttttagtatagtgacctaccctgcatgtataaattaaatgtaagaaacattttatgtttagtaggcttgaaaatgagactatttttcccttattttttctcctta

SEQ ID NO: 573474 - DNA, 425 bp, Homo sapiens
ttttttccccccttttctttagaggcaagatctcaccacgttttctgggctagtctcgaactcctggccttgttaccatggcaaatcccacaggtctgcagcaacctcaattctcrtttcctcagaagaaataatttgactgaggggcagaaggcagaaggagatactgaggcaagttttagagcagaagtgaaagtttattaaaaaacttcagagcaggaatgaaagggaggaaaatatacttggaagagggccaagtgggtgacctgaaagacaagtgtgtggtttgaccttttgatttggggttttatacatcagcatacttccaggatcttgggttacttctccccactcctgaaagcttatccagaagttgatcagtttcaggtgttttctatttattgggagcctgcctttccctagca

SEQ ID NO: 573475 - DNA, 556 bp, Homo sapiens
agaacaggtggggacaggactggagaggaggagggrgtcccctatgagcaaagactggccaccaccccacctaacacccccacagggcccctgtgcatccctggtccagtccctgtcaccacccagtttttccctctggacccaggaattcaaagtaagcaaggaggtccgctgctccagttggctgcaaataattacaaccttaagcccaagcagcactttgggtcctggtttgggacatgaagcggctcggtgagactgagaggtaaggccagggcaggaattgggacagtaggattgaactctccctggggccagcctcagaaagcctgtgccatagcctcttggccaacatcagatcctgtggtctggcaatgctggggtacccagacctcactctggacaggccctgggagggggccctggtgagattcctggcagcctcacagccactcttctgtccgtagctacaacctgtcatgccagctggaggctccatcccagttggctgggagcacaaaggccaggaagatagacatcacccaccacaggggcc

SEQ ID NO: 573476 - DNA, 473 bp, Homo sapiens
gtcatgagacagtactagagggatgatgcaaaaccattagaaaccacccccrtgatcaaatcacctcctgccaggccccaccttcaacacgtggggattacaattccacataagatttgggtggggacacagagccaaaccatatcactagattatatggtaatcctagctttaattttttgaggaacctccatattgttttccataatggcaggatcattttgcattccaccaacagtgcgcaagcgctctaatttctccacattggtgctaacccttgctattttctgttttctttttaaatagtggccatcataatgggtgtgaggtgacatgtagattgattttaaagtacaaaccccctttgaaatggttaggggatctctgaactttcatgccttctggtaaactttgattttatcaaccagctgaaatcattcactgaagtatatgttattttgatctaggcaagt

SEQ ID NO: 573477 - DNA, 207 bp, Homo sapiens
ctgtcatgagacagtactagagggatgatgcaaaaccattagaaaccacccccgtgatcaaatcacctcctgccaggccccaccttcaacacgtggggattacaattccacatragatttgggtggggacacagagccaaaccatatcactagattatatggtaatcctagctttaattttttgaggaacctccatattgttttcca

SEQ ID NO: 573478 - DNA, 593 bp, Homo sapiens
actctccctggggccagcctcagaaagcctgtgccatagcctcttggccaacatcagatcctgtggtctggcaatgctggggtacccagacctcactctggacaggccctgggagggggccctggtgagattcctggcagcctcacagccactcttctgtccgtagctacaacctgtcatgccagctggaggctccatcccagttggctgggagcacaaaggccaggaagatagacatcacccaccacaggggccagtcggggcctgagccagggcgggcagaggttggctgccttgggatatgggtgggctcagggagtcagacagcaagggactagcctcccatcctactsctgaccagacctgtgactggggagagtcaccttacttctctgggcctcagtttccccctctgtggagtgacgctaaatgatctctctggagacggggatcaatagggcactggtgattgaccaggcactcagcacatgcctggaacacacagtgcaggactgtggtggggaggtggcctgagatcctggggagtcacccatgtgtgcctgcccttccgaccagccaccagcgcctcagca

SEQ ID NO: 573479 - DNA, 593 bp, Homo sapiens
actctccctggggccagcctcagaaagcctgtgccatagcctcttggccaacatcagatcctgtggtctggcaatgctggggtacccagacctcactctggacaggccctgggagggggccctggtgagattcctggcagcctcacagccactcttctgtccgtagctacaacctgtcatgccagctggaggctccatcccagttggctgggagcacaaaggccaggaagatagacatcacccaccacaggggccagtcggggcctgagccagggcgggcagaggttggctgccttgggatatgggtgggctcagggagtcagacagcaagggactagcctcccatcctactcctgaccagacctgtgactggggagagtcaccttacttctctgggcctcagtttccccctctgtggagtgacrctaaatgatctctctggagacggggatcaatagggcactggtgattgaccaggcactcagcacatgcctggaacacacagtgcaggactgtggtggggaggtggcctgagatcctggggagtcacccatgtgtgcctgcccttccgaccagccaccagcgcctcagca

SEQ ID NO: 573480 - DNA, 456 bp, Homo sapiens
cccagctacacgggaggctgaggcaagagaattacttgaaamcaagaattggatgttgcagtgagccaagatcatgccattgcactccagcctgggcaagagcaaaaactctgtttaaaaaaaaaaaaaaaaaaaaaaaaaaactataaatacccctacatcagcatagatcagattttccaaaacttaggtttaggtattcataactgttgaattttgtaattccacatgaagaattgtagatctgcatatattttcaaatactaatatttataattacatagtttataatttataagtccaatttttggttattttcattattaatacttttccagtcatctaccctttctaaaagagaatacaaaatgtttcttttccttttttttttgttttcaaggctagaaccaagatggggcaaaggccggggcagatctagggcacaagcagggcagg

SEQ ID NO: 573481 - DNA, 456 bp, Homo sapiens
cccagctacacgggaggctgaggcaagagaattacttgaaaccaagaattggatgttgcagtgagccaagatcatgccattgcactccagcctgggcaagagcaaaaactctgtttaaaaaaaaaaaaaaaaaaaaaaaaaaactataaatacccctacatcagcatagatcagattttccaaaacttaggtttaggtattcataactgttgaattttgtaattccacatgaagaattgtagatctgcatatattttcaaatactaatatttataattacatagtttataatttataagtccaatttttggttattttcattattaatacttttccagtcatctaccctttctaaaagagaatacaaaatgyttcttttccttttttttttgttttcaaggctagaaccaagatggggcaaaggccggggcagatctagggcacaagcagggcagg

SEQ ID NO: 573482 - DNA, 582 bp, Homo sapiens
ttggttactttccttcataaaaacacatcaaatgtgagtttacactatgagaaaaacaggatttgagaatagatagatattttccattatggcacaaatgtttaaggctgagtcagcaccggaaatgttcggggcctgaacgtgtttgtttcctcacattagtatgaagaactgtctgagttgagaaggctgaaaggggagggcagcttcttcttgacctgargccgtgcagccccgaccgatgggagcacaaggtgctggctgacttctgtctgttctttctggtgccccaactcaggaaggaaagcttcttggagattttctggttttatcagttttgtcatcatcatcaatggctaagcagatcatggagtacgttttctacattcccacggagtatgtggcactcttattatgctgcacatagaaaagaaagaaaaagggcgtcaggcatcatcaagatagatgatacaaactacgaagtctggccaggcgcagtggctcacacatgtaatcccaacactttgggaggccgaggaaggtggatcacttgaggtcaggagtccaagaccagcctggcca

SEQ ID NO: 573483 - DNA, 582 bp, Homo sapiens
ttggttactttccttcataaaaacacatcaaatgtgagtttacactatgagaaaaacaggatttgagaatagatagatattttccattatggcacaaatgtttaaggctgagtcagcaccggaaatgttcggggcctgaacgtgtttgtttcctcacattagtatgaagaactgtctgagttgagaaggctgaaaggggagggcagcttcttcttgacctgaagccgtgcagccccgaccgatgggagcacaagktgctggctgacttctgtctgttctttctggtgccccaactcaggaaggaaagcttcttggagattttctggttttatcagttttgtcatcatcatcaatggctaagcagatcatggagtacgttttctacattcccacggagtatgtggcactcttattatgctgcacatagaaaagaaagaaaaagggcgtcaggcatcatcaagatagatgatacaaactacgaagtctggccaggcgcagtggctcacacatgtaatcccaacactttgggaggccgaggaaggtggatcacttgaggtcaggagtccaagaccagcctggcca

SEQ ID NO: 573484 - DNA, 582 bp, Homo sapiens
ttggttactttccttcataaaaacacatcaaatgtgagtttacactatgagaaaaacaggatttgagaatagatagatattttccattatggcacaaatgtttaaggctgagtcagcaccggaaatgttcggggcctgaacgtgtttgtttcctcacattagtatgaagaactgtctgagttgagaaggctgaaaggggagggcagcttcttcttgacctgaagccgtgcagccccgaccgatgggagcacaaggtgctggctgacttctgtctgttctttctggtgccccaactcaggaaggaaagcttcttggagattttctggttttatcagttttgtcatcatcatcaatggctaagcagatcatggagtacgttttctrcattcccacggagtatgtggcactcttattatgctgcacatagaaaagaaagaaaaagggcgtcaggcatcatcaagatagatgatacaaactacgaagtctggccaggcgcagtggctcacacatgtaatcccaacactttgggaggccgaggaaggtggatcacttgaggtcaggagtccaagaccagcctggcca

SEQ ID NO: 573485 - DNA, 582 bp, Homo sapiens
ttggttactttccttcataaaaacacatcaaatgtgagtttacactatgagaaaaacaggatttgagaatagatagatattttccattatggcacaaatgtttaaggctgagtcagcaccggaaatgttcggggcctgaacgtgtttgtttcctcacattagtatgaagaactgtctgagttgagaaggctgaaaggggagggcagcttcttcttgacctgaagccgtgcagccccgaccgatgggagcacaaggtgctggctgacttctgtctgttctttctggtgccccaactcaggaaggaaagcttcttggagattttctggttttatcagttttgtcatcatcatcaatggctaagcagatcatggagtacgttttctacattcccacggagtatgtggcactcttattatgctgcacatagaaaagaaagaaaaagggcgtcaggcatcatcaagatagatgatacaaactacraagtctggccaggcgcagtggctcacacatgtaatcccaacactttgggaggccgaggaaggtggatcacttgaggtcaggagtccaagaccagcctggcca

SEQ ID NO: 573486 - DNA, 579 bp, Homo sapiens
agttaagactggcttactgcttagagaaagagtctcggttccaacagtggaagagggtacctaaacagagcctgtgagtcatgctgagttgaggaggtaagaaaggagtttagtgatgcggagataagaaaggagtttagtgatgctgagagggctagaatttgtagagcygcgtaaaacagaggggagagttacaaaaacagatggttctgaagacctgcagaggatactctgctcttggctgtagcatcgatcttagcactagtgaaaggaaataattcaaggcatgggaaaaataaagtagtgggatggacaatttcaagggctcacacagggctaagaagaatttatgttttcatcagctagagtggatagactgtgtaatacatgccatattggaaagaggctgaagaagaacaagaatgccttattaatggaaatatttaaataagtcccagaataaagactgctctggatccaccagaacaaagggtaaaggcaagcgtctaaagaattcagttaatctgcaagttacttacccgcacaccaggagaaaatccagtgttttttttagatgaa

SEQ ID NO: 573487 - DNA, 579 bp, Homo sapiens
agttaagactggcttactgcttagagaaagagtctcggttccaacagtggaagagggtacctaaacagagcctgtgagtcatgctgagttgaggaggtaagaaaggagtttagtgatgcggagataagaaaggagtttagtgatgctgagagggctagaatttgtagagctgcgtaaaacagaggggagagttacaaaaacagatggttctgaagacctgcagaggatactctgmtcttggctgtagcatcgatcttagcactagtgaaaggaaataattcaaggcatgggaaaaataaagtagtgggatggacaatttcaagggctcacacagggctaagaagaatttatgttttcatcagctagagtggatagactgtgtaatacatgccatattggaaagaggctgaagaagaacaagaatgccttattaatggaaatatttaaataagtcccagaataaagactgctctggatccaccagaacaaagggtaaaggcaagcgtctaaagaattcagttaatctgcaagttacttacccgcacaccaggagaaaatccagtgttttttttagatgaa

SEQ ID NO: 573488 - DNA, 568 bp, Homo sapiens
atgtaccccataaatatgtatagttattatgtgttaatgttttcttaaacttagatttcagataaacaatctaatgaaacactgtaaagaactagaaaagcatgggaaaaaaactcaacattagtggaaggaaacaataaaggtcagagcataaaaagtgaagttcagattttaagaaacaatttaaaaggtcaacagaaatgaaaagttgggttttttaaaacattggcaaaattggcaaggcacagtggctcacacytgtaatcccagcactttgggaggccgaggtgggtggatcaggaggtcaggagatcgagaccatcctggccaacatggtgaaaccctgtctctactaaaaatagaaaaattagctgggcgtggtggtgcatgcctgtagtcccagctacacgggaggctgaggcacaagaattgcttgaacccaggaggcagaggtttcagtgagccaagatcgttccactgcactccagtctgggcaatagaggtagactccgtctcaaaaaaacaaaaggcaaaattgacaaactttttgctagtctaagaaaaaaga

SEQ ID NO: 573489 - DNA, 531 bp, Homo sapiens
cctgattagtcagcagccatcaacatcaaggtgagaccctccataagcaaaacgatgacaacttgctgaaggctccaatgacacacataataaactacagtatagtgtaaacatacctttttttttgagacagtcttgtgtgtcacycaggctggactgcagtgtggcacgatctccacttactgcaacttctgcctcctgggttcaagtggttctcttgccttagcctcctgagtagctggaattataggggcacgccactgtgtcctgtttatttttgtatttttagtagagacagggtttcgccatgttggccaggctggtcttgaactcctgacctcaggtgatccgcccgctttggcatcccaaagttctgtgattaaaggcgtgagccacctcacccagctgtgtaaacataacttctaaatgcatacggacaccaaaaaattcctgtggcttgctttatcgcggtatttgttttattgctgtggtctagaactgaacctgtagtatctccaaggtctgcctgtt

SEQ ID NO: 573490 - DNA, 518 bp, Homo sapiens
gcattctgagaaacttctttgttttgtgtgcattcaactcacatagttgaagttatcttttgattgagatgctttgaatctcctttttgcaaaatcttcacgtggatatttggagccctatttcaccctatagtggaaaagcagatatcttcacataaacaaacactacacagaagcattcagagaaagttctttgtgatgtgtgcattgaacatgcagaattgaaactatcttttcattgtacagttttgaatatctctttttgtagaatctgcaagtggaagtttggagctctttgcaccctgtggtgtagaagtaaatatgttcatataaaaactacacagaagcattcagagagacttctttgygatgaatgcattcctcacacagagtttaatctttctttttattgagtactattgaaatcttctttttgcagaatcatcaagtggatatttggagagctttgaggcctgttttggaaaaggaaatatcttcaaattaaaactacacagaag

SEQ ID NO: 573491 - DNA, 383 bp, Homo sapiens
taagaactagtgaatactctctttcatattatagaataatataacgtatgcactgactggggtcaaatacaaggagagttatctgagtgaaagttattatttgattatctttctaatgcatgttcttcaataaattcagaaaaccattcataatatctttgcatggaaactagtaatatgattttgacagtcatccatttccctacctaatgtaactcttcatacaatctggatacagtgcttataattcaaaatacatgacctcagcacatcagtgaataatggaattggttgcagtatctactaccaggtagtctactgccagggtacaaaatcactttcaggccacacagtaacrgtgtttaaccaatttaaattcccta

SEQ ID NO: 573492 - DNA, 559 bp, Homo sapiens
gaagtttataaagtggaaagcacagaaaaagtgaattcattgagarggaaaggacaacaacaacagaaaactgacaaaataatcctcaccaatatatttaaaaacagaaaaaattaacaatgttttagaaaatcattaaagacaggcatttaaataaaatgtagaaaaatgatttcacctacagcattaaaaaatgtgagcatttgtcaaaaccagttatatacaaacatacatactctcttttgaattaagctagctactttaacttaggaaagaagaaaaaattccagtaccatattaacttctctaagaaagatgaaaacaaatatgctgagttttttaatgaaaaaaaaaatctagtatatgttagtccaacatatacatatagatgcggaaatcttaaataaaatatgagtaatgttaaaatatttctgacacttgctgaaatgctaaaggctttatttaaaaatattgcaatatgtgccatgactataggggagggagattagactcaactctaaatacaattggagaaagtggggattaatagccaaggagc

SEQ ID NO: 573493 - DNA, 559 bp, Homo sapiens
gaagtttataaagtggaaagcacagaaaaagtgaattcattgagagggaaaggacaacaacaacagaaaactgacaaaataatcctcaccaatatatttaaaaacagaaaaaattaacaatgttttagaaaatcattaaagacaggcatttaaataaaatgtagaaaaatgatttcacctacarcattaaaaaatgtgagcatttgtcaaaaccagttatatacaaacatacatactctcttttgaattaagctagctactttaacttaggaaagaagaaaaaattccagtaccatattaacttctctaagaaagatgaaaacaaatatgctgagttttttaatgaaaaaaaaaatctagtatatgttagtccaacatatacatatagatgcggaaatcttaaataaaatatgagtaatgttaaaatatttctgacacttgctgaaatgctaaaggctttatttaaaaatattgcaatatgtgccatgactataggggagggagattagactcaactctaaatacaattggagaaagtggggattaatagccaaggagc

SEQ ID NO: 573494 - DNA, 611 bp, Homo sapiens
cgaaaggttatgtagctagcctctgggaatttttatcacagaacagcaaatcttcatctaaaaatcttcattctgactacaatggtgctaattatgttttttatagaaacatgttttctatttaaacttaaaatattgaattatttgtaacacaaacacaaatagacataattatttttaatgtatacaatttggatgtcatgtacctactacaattgaaacccagggctcacattgtttctgaaaatatatattttttggaggaaaawtttttttcatccttaagctagtaataaaaacaaagaaataaaaaacgcagaagtttataggtttaatttgtgtatttataaatcagtataaatcagaagaaatttttagttcataattaatttagtgaaaaacaaacaaaaatattcatccaatctgtagaaaacacagcatccttgattaaggaattataggtaaaaataagctactctttaagactatgactcatttcacacatgaaattttccttaggaataattgtaacatttattttgtttcacagaagttcacacagttacatgacagcttcctaataattgagagtgtacacatgtgatgatatt

SEQ ID NO: 573495 - DNA, 611 bp, Homo sapiens
cgaaaggttatgtagctagcctctgggaatttttatcacagaacagcaaatcttcatctaaaaatcttcattctgactacaatggtgctaattatgttttttatagaaacatgttttctatttaaacttaaaatattgaattatttgtaacacaaacacaaatagacataattatttttaatgtatacaatttggatgtcatgtacctactacaattgaaacccagggctcacattgtttctgaaaatatatattttttggaggaaaattttttttcatccttaagctagtaataaaaacaaagaaataaaaaacgcagaagtttataggtttaatttgtgtatttataaatcagtataaatcagaagaaatttttagttcataattaatttagtgaaaaacaaacaaaaatattcatccaatctgtagaaaacacagcatccttgattaaggwattataggtaaaaataagctactctttaagactatgactcatttcacacatgaaattttccttaggaataattgtaacatttattttgtttcacagaagttcacacagttacatgacagcttcctaataattgagagtgtacacatgtgatgatatt

SEQ ID NO: 573496 - DNA, 617 bp, Homo sapiens
gactacgcttacatttacttcagataaattatattctaaaagttaacatagttatgccatttgtatgcatacacattgtgttttctacttaattttctaggctaattaacttctaatgttaaattttagattggtcctatgtttgaggtttgtgcctgccaactaagtttatctcaagctcacataatgggtttcactggaatacattatgctatatttatcatgaggataaattatattttaccatctcccccatatcgacaggagagatttccatagatttctaaagactaaaatcagataaaaataaatatattaatcatgattctactctgaaattcaaaagatccttgtgggtctggagttttttaagcacaacaaaggacattgatatatgataaatttatttagtaaggaacaagaaataagaatatattttaccccaattctgtttcagggaatacatagttttttgtttttttcccaatttctactgtcttaatagagttaaagcaatgttttggacacacaattgrttagctgaaataattaaaaatgctagaaaacagtttcttctcactctcaaaggaatcgacttaattgatccttcttaattt

SEQ ID NO: 573497 - DNA, 628 bp, Homo sapiens
actaacttgttcctttttatttttgtgtcactaacacaacaagtaatggaaatttatatattgagtaaaaaaaagtagtaatagtagtattttcattggggtaaattatgattattttttaaaaatttccttaattgagttatttctgcatagcaacggaaggaagaaacagaatacccatgttgttcttaaaagaagacaatattataatacttggtaatatctaggggcttaatgcatcttgcaatatgatatgtatatagtttcatatgctgatttatcactttagttaggcaaaactatacaaaaattcattaaaaatattttagcattttttagaacatgagttgcaattttgcttggtatcaacgtagaaaaggcaagctaatagcaatatgggaatggttaatgcctgtacttaatacatatttgttgaaatagtgaatgacaaatagtatggcaaaatcatacctttgatataaaatgatatgggcaaatatagggtggaattgctatacttaattaaaatatatatatagccagttgattttttatgtaatagcttctgttttgtaaacaagtatcttattctwctttttaaaactgtaggaaactggtctgccaccta

SEQ ID NO: 573498 - DNA, 567 bp, Homo sapiens
aacccttcttttctgcctgtttgttcaatggcaaaaggattcccaaattgcctaaaggcagtctcattctacaattgaatgagtgttgcatctcctagttgaagcatccatgccttaggaactaacacctctaaaaacaggcaaagcccaaggtttccaagagagaatgcaaatattcagagaagatatttagaaataagagtgagcatagtctcccttacttccactacttgacttctgaactcatgcatagtgacttctgggaagacaaacaactataatgtcttctgattaaaataattcgagtcacatattatatccctttagaatgktatctcccagtgggtaccattactaaatcttcaataaaccattttatttttaaattaactcagccaatactcatccaaaagtgtgctgggctacatgttataagaagttaatttcatgagcatgaaccaatctctgctcttcctttgctgagaaatgggtttcttcatcaatgttctcatgaggaatatcgtaaatgtgggtaaggtattctggaggatcatgaatgatgatgct

SEQ ID NO: 573499 - DNA, 255 bp, Homo sapiens
aagataaagcataagtgggagtaggaaatgtcaagggcactgtggggtgaaaatagatataactgcatttaacacattatattcaggaaaggcctccctgagaagatatgtgartaaaaacctagaggatgtgaggaaactagctatgtagatacctggaggaagagcatcccaggtgtaggaagagcaaagaaaaaagccttggggcaggaatgtgacaggggttgggggtagttattgcagaatgtgcaatgg

SEQ ID NO: 573500 - DNA, 545 bp, Homo sapiens
gttttagggcctgggtttattttttcctcattttattttattttttctaaatcttcatttcaaaaaaaactctacttctccattatttattttctgatttttttctaatgctatttccaggccttctgtttctaataattgctaataagagttacttaaagttgaaaggtattgcacttcaawaatgtgtgatagtaaatatgagtatattaaaattttctataaaggaagttttaactagtgaagaattttcaaaactttatattgcattttgaatgcacatgctagagaatgcaaataatacttaagaaaaatcttcaaaacacagtttattataattatttccataacagggaccttgatagctttgggttaagaaagtgagaaaaactaaatttttatatttcacattttggattttgtacgttgtgattattttaggtattcaaatgacaaaaattttcaaatgtgtattgactcagaatgttaggatggcactagtgcaccgacagtgataaattcctactttaaacttattgaccaag

SEQ ID NO: 573501 - DNA, 595 bp, Homo sapiens
tttgttgttgttgttttgagacagtgtcttgctctgttgcccaagctggagtgtagtggcatgaccatagctcactgcagcctcaaactccttggctcattctccctcctcagcctcccgagaaactgggactacaggtgcacaccaccatgtctggctaattttcaattaaaaaaaaaatagagatgaggtctcaatatgtggcctagactggtctcaaatcagcctgggagggttcaagtgattctcctgcctttgcttcccaaagtgttgggattacgagtgtgagccactgtgccggccaggaatctagatctgatgaagaaaaaggaaggaagggctccccccagtaccgggcatggtcttagctaccttacagctgtggcccagagcccagctcggaakgaccctcccagccacagcaccccttcccaccacttcccacagcttccagcctggggaagctcctggagtcttggattgaggtgactaaggagagaccttaagagcaacccccctggcgctacaggcatcctggcccctcgctgaggcccttccaagtctgtctatgggggacatcttcatgctgggattg

SEQ ID NO: 573502 - DNA, 523 bp, Homo sapiens
tttcaccactgccattcaacatagtactggaagtcctagccagagcaatcagacaagataaattgaaattatatcaagtactctctcataccatagtaaaattaaactgtaaattaactccataaggaaccctcaaagctatataaatacatggaagaaggtgcctgattctctttcaccttctgccacaactgtaagtttcctgaggcctcctagcaatgcttcctgttaagcctatggaactgtgagtcaattaaacttctttcctttataattacacagtctcaggtaktattcttaatagcagtgtgaaaactgactaaatacaatacctaaccaaggaggtaaaatatctctacaaggaaagctacaaaacactgctgaaataaatcataaacaacacaaacagatgaaaacacatcccatgctcatggatgggtagaatcaatattgtgaaaaggatcatattgccaaaagcaatctaaagattcagtgcaattcccaccaaaataccatcatcatt

SEQ ID NO: 573503 - DNA, 574 bp, Homo sapiens
aattttttttcattccaacttttaatttaggttccaggagtacatatgcaggtttgttacataggtgaattgcatgycattgaaattttatgtacagattattttgtcagccagataatcagcataatacctgatagggaatttttcaatccttaccctactatcaccctccaccctcaagtaggccttggtgtttactgttcacttctttgtgtccatgagtactcagttttcagctcaaacttacaatacctgatagggaatttttcaatcctcaccctactatcaacctccaccctcaagtaggccttggtgtctactgttcacttctttgtgtccatgagtactcagttttcagctcaaacttataagtgagaatatgcagtatttagttttctgttctccttaggataatggccgccagcttcatcagtgtcactgcaaaggacataatttcattcttttttatggctgcatagtatgccatgctgtatatgtaccacattttctttatgcagtgcaccattgatgggcatctaggttgattctatgtctttgctattttgaatagtgc

SEQ ID NO: 573504 - DNA, 574 bp, Homo sapiens
aattttttttcattccaacttttaatttaggttccaggagtacatatgcaggtttgttacataggtgaattgcatgccattgaaattttatgtacagattattttgtcagccagataatcagcataatacctgatagggaatttttcaatccttaccctactatcaccctccaccctcaagtaggccttggtgtttactgttcacttctttgtgtccatgagtactcagttttcagctcaaacttacaatacctgatrgggaatttttcaatcctcaccctactatcaacctccaccctcaagtaggccttggtgtctactgttcacttctttgtgtccatgagtactcagttttcagctcaaacttataagtgagaatatgcagtatttagttttctgttctccttaggataatggccgccagcttcatcagtgtcactgcaaaggacataatttcattcttttttatggctgcatagtatgccatgctgtatatgtaccacattttctttatgcagtgcaccattgatgggcatctaggttgattctatgtctttgctattttgaatagtgc

SEQ ID NO: 573505 - DNA, 550 bp, Homo sapiens
actaaagctttagtgaacatattcttgcacacaacttttattctttttaattacttaagataaatcgccagaagctaatgtttgggttacaaatacgatttttttttaatygatcttgaaattacttgccaaattacttcccaaaagaagaaaaagtagtgacaatatacaagtatatatattacaacttttgctataatcttatcgttagatttcataatttaaagatatttttcaaaccccaaagattacatcacaatttaactttttaaaaattattggtgaggcggattcattatacatgtattcatttttctgttctttttaaatttttttttaattcctggggatcattttgtttttattttgttaaatttactacttctggttttgtgttatcagcctaaagtttttaaaatcctcatctaactttttgtcaagtattgcattctacaatttgataacatgattatttatgtcctcatgtaaactcctgagtaaaaaaaaaaacccactgtctgcaaaactcaaatttagttctgctctattt

SEQ ID NO: 573506 - DNA, 550 bp, Homo sapiens
actaaagctttagtgaacatattcttgcacacaacttttattctttttaattacttaagataaatcgccagaagctaatgtttgggttacaaatacgatttttttttaattgatcttgaaattacttgccaaattacttcccaaaagaagaaaaagtagtgacaatatacaagtatatatattacaacttttgctataatcttatygttagatttcataatttaaagatatttttcaaaccccaaagattacatcacaatttaactttttaaaaattattggtgaggcggattcattatacatgtattcatttttctgttctttttaaatttttttttaattcctggggatcattttgtttttattttgttaaatttactacttctggttttgtgttatcagcctaaagtttttaaaatcctcatctaactttttgtcaagtattgcattctacaatttgataacatgattatttatgtcctcatgtaaactcctgagtaaaaaaaaaaacccactgtctgcaaaactcaaatttagttctgctctattt

SEQ ID NO: 573507 - DNA, 594 bp, Homo sapiens
aaggctcctggaactgataaacaacttcggtaaagtttcaggatacaaaataatgtacaaaaatcagtagcatttctatataccaaaaatgttcaagctgagaggcaaatcaagaatgcaatcccatttaacacacacacacacacacacacacacacacacacacacacacacacacaatacctaggaatacagctaaccgaggaggtgaaagatctctaaaagaattacaaaacactgtgaaaaaattctrcaatgatacaaactaatgggaaagcattccgcgttcatgaattggaagaatcagtttcttggttccaatgtcaatattggaagaaccaatctacagattcaactctattcctatcaaactactaacatcatttttcacatatttagaaaaaaagtattctaaaattcatatggaaccaaaaaagaattcaaatatccaaagtaatcctaagtaaaaagaaaaagctagagaaaccaaattacctgactttatatactacaaggctgcagtaaataaaatatgataatactgttacaaaaacaaacacatagactaatggaacaaaatagagaacccagaaa

SEQ ID NO: 573508 - DNA, 565 bp, Homo sapiens
tcaaactatctctctttactgaagatgtgattctataactggaaaaccacaaagactctaccaaaaggctcctggaactgataaacaacttcggtaaagtttcaggatacaaaataatgtacaaaaatcagtagcatttctatataccaaaaatgttcaagctgagaggcaaatcaagaatgcaatcccatttaacacacacacacacacacacacacacacacacacacacacacacacacaatacctaggaatacagctaaccgaggaggtgaaagatctctaaaagaattacaaaacactgtgaaaaaattctacaatgatacaaactaatgggaaagcattccrcgttcatgaattggaagaatcagtttcttggttccaatgtcaatattggaagaaccaatctacagattcaactctattcctatcaaactactaacatcatttttcacatatttagaaaaaaagtattctaaaattcatatggaaccaaaaaagaattcaaatatccaaagtaatcctaagtaaaaagaaaaagctagagaaaccaaattacctgact

SEQ ID NO: 573509 - DNA, 661 bp, Homo sapiens
ccaggcattatatctgtattccagcaagcaggaaagaagaaaggaaagaggacttttcagatgccccactaacaactttagctggtttcttattgacaccaagccaccagraaaatgtaagtttttacctgggcatactataatctgaaatataattaaagttttattagtaaggaagaagggagaatgaatattgcataggcaattttaagtctctaccacatttccaaactccactcccaacacacttaaggctgccatcttgcacaattctagttgctccacattatagtctatgagcacagaggtagaaatactagatgcattcacctagtacagatatctttcccaaaggaacgtatttaatttatacttttatatatatattcaacatcagaaataattgataataactggtctcatgcgatggaataattgtttctgaaatggttaagttttaatatgtacatatggaacaagcataaataaccatcagatacgactttggcatgattctgaagttatctgccattcttctatcactacccagttggtgaaacagaattttgtgtctcattataatatttctcatcctctcactcacagcagatgagactaaagtctctcctcctggtgccggataattttttgacattaaata

SEQ ID NO: 573510 - DNA, 580 bp, Homo sapiens
tggtttcttattgacaccaagccaccaggaaaatgtaagtttttacctgggcatactataatctgaaatataattaaagttttattagtaaggaagaagggagaatgaatattgcataggcaattttaagtctctaccacatttccaaactccactcccaacacacttaaggctgccatcttgcacaattctagttgctccacattatagtctatgagcacagaggtagaaatactagatgcattcacctagtacagmtatctttcccaaaggaacgtatttaatttatacttttatatatatattcaacatcagaaataattgataataactggtctcatgcgatggaataattgtttctgaaatggttaagttttaatatgtacatatggaacaagcataaataaccatcagatacgactttggcatgattctgaagttatctgccattcttctatcactacccagttggtgaaacagaattttgtgtctcattataatatttctcatcctctcactcacagcagatgagactaaagtctctcctcctggtgccggataattttttgacattaaatat

SEQ ID NO: 573511 - DNA, 635 bp, Homo sapiens
atcacatatttatcactcccctgtgtgacattgggacgggaaagctcttggggaaaatagactacatcttaaagtcacagttctctgaagacccacagatgcacctccaaaaaagaattactccttcagaggggcaagaactgtcttctctggtttagaggttttaaaaataaaagtccagtgatgtttgttgccatggwtctagcttgtggggcagccagtctgagagatgtaggagagaaaaaatgtcccaatggtgtacaagctcctggagttcctgtcatctcctgcccttccttcagtgagctcataatttttttaagctaatatgagttcggttttgttgctgttgttacttggaattagaaacctgaataataaataataaagcatggataatcatgttgtaatactatgacatcatattcttatatctctgggtgaaaatgctctttctctaaaggtcactagacagatttggaccaaaactatccagattgttaatgccccaaaccccccaaatttccagggatttgaggctaccatgagatatacctcatgctccatggtctccagaaggaattatcatagagaatggaccttttcagtttctagcctgagactggaaatgtcag

SEQ ID NO: 573512 - DNA, 559 bp, Homo sapiens
ttacatagctactgtgtgtgatttaagctaatatgagtttttttttttgttacttggaactagagacctgaataacatagcacggataatcatcatgttgtaatactatgacatcatattcttaatttcattcatgctcttaatttcaatgataaataaacctcccactacaaacacacatacacacacacacatatataagtatacaaatttgggaccatgctcttcatttctttggaaggttctttttttgattatatatatatgtcttgcatatttttacattattcatctgcagccaaaaagttaatatattccttggcttcaactctcagcggctccattgccaataggtcatcatacaagttcttctgcagggcacatgaggccttgagtaatccagctcatttatacttggaaacctgccagttacactaaggaaaaatgtaagatctcttacccatgctgttttctataccctggattttgctagttcttttctccggaatgccttctcatttctcttcctcagtktaacctctgttaattttttaagact

SEQ ID NO: 573513 - DNA, 597 bp, Homo sapiens
atctttcacctgaaggtacaaaacttactggtaatcctaagtacacagacacagaatattataacactrtaattgcggtatgtaacctactcatatcttgagtagaaacactaaaagttgaacttctcaaaaataataactacaacaacttttcaacacagagggagtataataagatagaaataacaaaaggttaaacagtgaggatcaagaaattaaagttagagtttttatgagttttctctttgcttatttgtgagttttttatgcaatcagtgttaagttgccattagttttaaataatgggttatgttatttgcaagcaccattgtaacctctaatcaacaaacttacaacaaatacacaaaaagtaaaaagcaagaaattaaaacatgccatcagagaaaataaccttcacataaaggaagatgggaagggaggaaggaagggaggtaggaaggaaaagaccagaaaacatacagaaaacaataataaaattacagtagtaagtttttacttatcaataataacattgaagttaaatggactaaactctccaatcaaaaagacagagtggctgaatgaataaaaagcaag

SEQ ID NO: 573514 - DNA, 658 bp, Homo sapiens
taactagttgttaatctactgttgagagtttaagatattggtaaaagtattgttgaaatagtgaaaattttttatttttcttggtcattatagagaaaacaatgactatagttataataagtaatttggatgaaaataataaaaagagaaatgagttagaagagaataataatactacatattaagagtgtttttaggttcaaagtggtagtgtgtgcatgtgtctttatgtaatctcataaacgtataaatttaagtttcatgagtgtataaataaaaataacctatgacattttcaaagcagacattactatccttattttacaaatgaggaaattacaaatgaaagagtttgatgacttccccaaacacaacaggaaattaaagtaaaaagcagaacagggatcaaaatttcctgaacgtttgtctaattctccaaaagagatatataggagacatcctgctgtcttcaattagaatggtttcattaacttggtttgagtactttaataacataaggacatattatattttgtcattttctactaactcaaaggaagaaatgcatagatatgtgttttttgctgttgggaaatgagtaatgttggctttcactcaagacactcacactartgaaaacataagtaggtggaatagt

SEQ ID NO: 573515 - DNA, 609 bp, Homo sapiens
tacagaaattcaaagattgtttagtggctactgtgagcaactacatgtaaataaatagaaaactccaaaagaaatggacaaatccccaaacacatacaacctaccaagattgaaccatgaagaaattcaaaaccctcgcagaccaataacaagtaatgagatctaagccataataacaagtctcccagtaaagaaaagtctgggacctgatgacttcactgctgaattctaccaaacatttaaagaaatcctacttaaactattccaaaaaatatagaagaaagaaatagtccaaactcattctggaaggccagtattaccctggtaccaaaaccacataaagacacatcaaaaaaagaaaactataggctaatatatttgatgaatattgattgaaaaattcttaataaagtactaacaatctgaattcaataatgaaataaaaagatcattcattatgaccaagtgrgatttatccctgggatgcaagtgtggttcaacatatgcaaatcaatcaatgtgatacttcatatcaacaaaaagaaaaaaaatgatcatttcaattgatactgaaagtgttttataaaattcaacatcccttcatgataa

SEQ ID NO: 573516 - DNA, 565 bp, Homo sapiens
cccctccactgtgagaaaggggataaagctggagctgatctggtcctctccatctcagggcccatttagcggagggagcccagaccctgcctgtcccctccctccacctccactaccaagagcacccaaggttactgtgcactccccaggagccccagatccttagctagtgagggccaggcaacctccccaccgttatgcaggtcaccagcagtggggcccagaccgaaaactgcctggtggccggaaaccgctggagggagggcctacctctcctggagggtggggcagcgrtggtgctaacggtagcagtgtgcacatgggagggggaggggaggcctccacttccccctgagagagggtgtgctggtgggggggttccccagtgagtaagagctctgtgtgggcaacaacaggaagcgtggggcgctgggtggcaggaagtggagctggctgttcctggttcctcagatgggggatctgggccaggctgtctgcagaagacccctgggggccaggacccacatttcccattccccggctgctccttctttggaggaagccg

SEQ ID NO: 573517 - DNA, 577 bp, Homo sapiens
aaattgaaaatccaccatcatagtaggagatgaaaaacacattttatcaataactgatatattagactgaggaaaaatattattcaagatgtagatatgagtgagacataatcttttcaagagcacctagcacatttataaaaactgatgtgtaagagaacataaagcaaatttgaacagatatcaaataatctataaaatacactccatattatccaatcacatttttaattaagttacagaaataatgcttaaaaaaactatgcaatatgaaattttaaaaacacacctttaaacaatatatagaccaaagaaaaactcatatttgatgctagaagatgcttagataaaaataaaaatgaaaacactaaatatcaaaatttgcaaacataaagctaaagcactacttcaagggaaatttatagtcttaaatgcatattttaaaaaagtttttaaaagactgcaaattactaacctaaagatataagtaattattaaaaatatcaactgaatagactaaagaaaaaaraaagaaaatcatacaggaaaaataatggaaaacaaaaattaaatagaa

SEQ ID NO: 573518 - DNA, 564 bp, Homo sapiens
tatttatcagtacaatatagttttagatgctagcatagacattgtcttcttttaaagttatggtttttttggctggtgaataaaaatgctattggtttttgaaaattgattttatatccaggaaawttttatatttggttattaaattagtttgcagattctcataacgattgtcattttcaacgtaacacaatttttcttcctttttaatcttccagctgattattatttttcttaagtagggcactgttaggtcctcctgtacaatattctacagaaatggggcaagcaagtattcttgtcttgttcttaaagggatggttctagtgtttcatcattaagaatgatgtctttggtgaatgtttgatggacatattttatcagattaaagattcatagcttgcaaaatatatttctcatgaatgagtgttaaattttcatgtttttagaaaacctaatgagaagataatattgttttacattttccatttccatcatgctatgtggtggaatacattattagattgtctaatgttaagtcatccttgaatgctggtaataaac

SEQ ID NO: 573519 - DNA, 564 bp, Homo sapiens
tatttatcagtacaatatagttttagatgctagcatagacattgtcttcttttaaagttatggtttttttggctggtgaataaaaatgctattggtttttgaaaattgattttatatccaggaaatttttatatttggttattaaattagtttgcagattctcataacgattgtcattttcaacgtaacacaatttttcttcctttttaatcttccagctgattattatttttcttaagtagggcactgttaggtcctcctgtacaatattctacagaaatggggcaagcaagtattcttgtcttgttcttaaagggatggttctagtgtttcatcattaaraatgatgtctttggtgaatgtttgatggacatattttatcagattaaagattcatagcttgcaaaatatatttctcatgaatgagtgttaaattttcatgtttttagaaaacctaatgagaagataatattgttttacattttccatttccatcatgctatgtggtggaatacattattagattgtctaatgttaagtcatccttgaatgctggtaataaac

SEQ ID NO: 573520 - DNA, 437 bp, Homo sapiens
ggaggtagaggctgcagtgagccgagatcgcgccactgcactccagcctgggcgacagagcgagagtttgtctggaaaaaaaaaaaaaaaaagccagggtgagcggtggctcaagcctgtaatcgcaagcaacactttgggaggcggcagctgggcagatcaccggaggtcgggagttggagaccagcctgascaacgtggagaaaccccatctgtactaaaaatacaaagttagccgggcgtggtggcacatgcctgtagtcccagctgctcgggaggctgaggcaggggaatcgcttgaacccgggaggcggaggttgcagagagcctagatcgcgccattggactccaggctgggtaacaagagcggaacctccgtctgaaaaaaaaaaaaaaaaaaaaaaaattgggagaattttgctcccactgccgtcaaa

SEQ ID NO: 573521 - DNA, 437 bp, Homo sapiens
ggaggtagaggctgcagtgagccgagatcgcgccactgcactccagcctgggcgacagagcgagagtttgtctggaaaaaaaaaaaaaaaaagccagggtgagcggtggctcaagcctgtaatcgcaagcaacactttgggaggcggcagctgggcagatcaccggaggtcgggagttggagaccagcctgagcaacgtggagaaaccccatctgtactaaaaatacaaagttagmcgggcgtggtggcacatgcctgtagtcccagctgctcgggaggctgaggcaggggaatcgcttgaacccgggaggcggaggttgcagagagcctagatcgcgccattggactccaggctgggtaacaagagcggaacctccgtctgaaaaaaaaaaaaaaaaaaaaaaaattgggagaattttgctcccactgccgtcaaa

SEQ ID NO: 573522 - DNA, 374 bp, Homo sapiens
atgaaatgaatgaaggaaagtaagaaggcaggctgggctcaccatcaattggctttgtccatgggcagaacttttgctcatataccacggtcggtcatgtggggtgcaagtgagtggcagtattctctagagacagaaggcatcataggctcatagattttcctctccatatttgcatgttcttccattaaaatgataaaaaccagtgtttcatttgcttcaatgtcttacaaaaagccttgctttgacatttttactcagaacctgtcccctcagtcataagtcctaagaatgacaggatgggaagcaaatctgagcraatattcctattttctgtatttctctttctttttttttttttttgtttgttcgtt

SEQ ID NO: 573523 - DNA, 578 bp, Homo sapiens
tgtttatataatttctaagatgcaccaatctactcaagcgacaatatgacttgtacaattctatggctttgattgacattctggataggaataggctaggaggaagggaaaaagagaatggtatattccctttgtccatgccagctgagtctttccttattgtcttacactgtttgggctgctaatcacaaagtagtatagaccaggtggcttgcaaacaacatcaatttattcctcatagctctggaggcrgggacgaactatattaaagtacaagcagatttggtgactggtgagggcttacttcatagatcaccacttcttcttgcttagtcctcatgtggcagaagggtgagggtgttctctgaggtctctttcataagggcactgatcgcattcatgagggctccccgtaatcacttcccaaaggccccacttatacatattgtctcattgggggttaggatttcaacatatgaattacgaggagacacaaactttgagtttgtagcactttttaaaataaagacaaaaatacatgtcttgaagcccaactttcatcttactaaccaaaactc

SEQ ID NO: 573524 - DNA, 245 bp, Homo sapiens
ttagagaatctaacatccttgaggaaataataccccaatgtagagatataatattgtacaagaaacaagctccctactctttgggtctgatagtctagctatggggagaatacaagataagtaagcaaatatttagacaaaatcatttggattagtgacaaaggctatcagaaaataayacaaaattagtatggcattcttcaggttagagagtcagaaaagaccttaaaaaaggttaacatttg

SEQ ID NO: 573525 - DNA, 500 bp, Homo sapiens
ctctgtctctactaaaaatacaaaagatcagctgggcgtggttgtgggcgcctgtaatcccagctactcaggaggctgaggcaggagtatcgcttgatcctgggaggtggaggtttcastgagctgagatcatgccattgtcttccagcctaggaaaaaaagagcaatattctgtctcaaaaaaaaaaaaaagaaagaaaaaaactgtactgataaatggcacatggataattgtaatgtgtttttttaaagaggtcagggagttcactttagattggatgggttaggaaagctgctctagagttgacaaatcagctgactgataatgacaggaaggatagaaatataaagattctgaaaaactggtaacagcctccctactaagttatatttttctctactacaacattttctattcttttattataaaattgatgaattaatatatcatttcttcaacatttctctttacgcttattgttttattgctacatcattga

SEQ ID NO: 573526 - DNA, 504 bp, Homo sapiens
ctgtcaggtacgttggctcacgcctgtaatcccagcactttgggaggccgaggcaggtggatcacctgaggtcaggagtttgagaccagcctggccaacatagtgaaactctgtctctactaaaaatacaaaagatcagctgggcgtggttgtgggcgcctgtaatcccagctactcaggaggctgaggcaggagtatcgcttgatcctgggaggtggaggtttcactgagctgagatcatgccattgtcttccagcctaggaaaaaaagagcaatattctgtctcaaaaaaaaaaaaaagaaagaaaaaaactgtactgataaatggcacatggataattgtaatgtgtttttttaaagaggtcagggagttcactttagattggatrggttaggaaagctgctctagagttgacaaatcagctgactgataatgacaggaaggatagaaatataaagattctgaaaaactggtaacagcctccctactaagttatatttttc

SEQ ID NO: 573527 - DNA, 504 bp, Homo sapiens
ctgtcaggtacgttggctcacgcctgtaatcccagcactttgggaggccgaggcaggtggatcacctgaggtcaggagtttgagaccagcctggccaacatagtgaaactctgtctctactaaaaatacaaaagatcagctgggcgtggttgtgggcgcctgtaatcccagctactcaggaggctgaggcaggagtatcgcttgatcctgggaggtggaggtttcactgagctgagatcatgccattgtcttccagcctaggaaaaaaagagcaatattctgtctcaaaaaaaaaaaaaagaaagaaaaaaactgtactgataaatggcacatggataattgtaatgtgtttttttaaagaggtcagggagttcactttagattggatgggttaggaaagctgctctagagttgacaaatcagctgactgataatgacargaaggatagaaatataaagattctgaaaaactggtaacagcctccctactaagttatatttttc

SEQ ID NO: 573528 - DNA, 409 bp, Homo sapiens
ttgggaaaagtagaccccttcgaagkcttcagagatgatctcacggggttctgggtgaccagggacattgtctaatatcaaaagaactttaaaaggtagtcctttgctggcaaagtacttccagacttcagagacaaagcatcaataaaaccaatccagactaaaaatttcttgttgtccaagtcttcttgtacaaccaaaaggctagcagctcgtatttatcttttctcttcaaggctggggaattagtagctttttagatgagggcagttctgaccataaacccaactgcatttgcacaaaacagtagagttagcctatcctttcctttgctttaagttgtcatataatgactttgctttttctcaaattatgttaaaatatagaggtgtgtctttttgtgtgtgtg

SEQ ID NO: 573529 - DNA, 560 bp, Homo sapiens
ttgtgtctggcttctttgactaggtataatttttttttttttcagattcatccttattattgtgtcagtacttgtcttggtttgttctagctgctctaacaaaatatcttagactagagaatttgtaaacaacagaaatttattgcttatagttgttgagtttggggagtccaagatgaagccaccaacaaattcaatatctggtgaggcttgtgctgtgcttcaaagaggaaggcttcttgctgcattcttgcatgatggaacttgcaaggcagctcacttaagcttcctttataagggcactaagcagagtccttatgacttacttattctcagaggccccaactcaatgctatcacattgggtttatcacattgggtgttaggttctaacacgtaaattagatagtggtgggggcaccaactgctatggtttgaatatctgtcccctccaaaattcatgttgaaatttaatccccaatgtggcagtgttgaaagatgggacctttaatgggtgattggatcrtgagggcagataccattcatggattaatgagttaa

SEQ ID NO: 573530 - DNA, 535 bp, Homo sapiens
ttggtgggactgcctaccttttagacggttaaattatttatctatttattaatgtagggacatttatctcttgactctgatataatgatcttggtartatatatgcacatctgagaaaaattttaacttcttctctgcaaagtttgcatcttcaaccatgctcataaaagtccaagatagtaaaaactgtttgaaatttggtaaaattcatctcttcacaaagattttatagcacttttggctgtaatatctgaataagataacctagacatgtgaatgacttcagaaatgttagtactaaattctttgtagttgctttatcatgtctttccatattagtacagaaaggaaatcaattttaagttaaaaaggcccacagtttgaaacaattaccacggttacacactctacactacgctgactccatccaacttagttctctctcaacgcataaaccaagatgtcccgtgtgaaaatgagttcatttaatgactagtctctgtcacaagctaaatttaggcatagaaacatgttt

SEQ ID NO: 573531 - DNA, 589 bp, Homo sapiens
taacagtgaattccagaaaaggagttaggttkattattgtaggttagtagtcttaattggatagcctctgtattttttgataagttcttattttaagtgacgatgtaacaggatctgggatgtaatgtgaggtccttgtcaaaatagaaagcatgtatcatagatttctaaatagtcatgcagagcagctaagatatgcaagaaacttgcccagcaacaactatgtaatttttgctaaccatatggtattctttctccaattgcccttcatattttgtattccaaatgattagctaatagtttataattgtttatgttaagtattcatttcttggtctaaaaatcttagtaacttagaatttgataatgttacccaggggagaacaaaaaagaaatatatattaattttctctttgctttatgtctgttttaaataatttttgaatgaaaaatctgcccttgatgattagttgctttgtgttaagagtgctttaatggtcttttattaagctttattaaaaaatggtcttttggactctttaataaattttttttctgatttcctaatgaggtcttcccatgtagccaa

SEQ ID NO: 573532 - DNA, 557 bp, Homo sapiens
aatttattggttacctgcatcttaatgtatgaaggttctaagtaaatatttgatgaattgatggtagcagcgttaatttttaaatgttccaagctcctagattttttttgttttgtttttrcaaaagccttaaagtttggtactaaggaaatcaaagaatcaactcccaccatcatgcttcagggaaagggaaaaatgtctacctttgggtctaatcttgcctcccaggcgagcttacaaggtactagaacactctaacctgcaactatgatggcacagggaaaatgcatgtatgtaatatgcttgtcggcttcagcaacaactcatgtatacatacacagttactatatgtaaacaggtcctgtatcatacgtaaaacacaagtgtgtggtcgtataaatatttgagtcgtagtatgtgaaaatgcttctaatggtttaaaagacaaaactccaccatgatatcacattgaacattaaaattattcccacagcaacacttatttcagagaaacaattaagtcagttatcttagtcaccactaaaggcacctggtga

SEQ ID NO: 573533 - DNA, 372 bp, Homo sapiens
gaattcacttctccctcaggtacaccaattagtcttaggtttcattgtcttaggccccaccactggggccgctacacgtgacatgggatgtgggccatygggcaaagggcgcggagatggggcgctgccaggggagccaaggaggaaagagagcactttccaaattgtcttccagggtttcaatgtgcattttattaactcagaatctgtcgggaataatactagggagctacctttccctggagatgggtcttgtcagtggagtgagataggctggggggaggaagaggaatgggaggctcagtttataaatattaagatcagcaagggtgtgctgctggcaggagcagagggagcctggagatttgggtg

SEQ ID NO: 573534 - DNA, 372 bp, Homo sapiens
gaattcacttctccctcaggtacaccaattagtcttaggtttcattgtcttaggccccaccactggggccgctacacgtgacatgggatgtgggccatcgggcaragggcgcggagatggggcgctgccaggggagccaaggaggaaagagagcactttccaaattgtcttccagggtttcaatgtgcattttattaactcagaatctgtcgggaataatactagggagctacctttccctggagatgggtcttgtcagtggagtgagataggctggggggaggaagaggaatgggaggctcagtttataaatattaagatcagcaagggtgtgctgctggcaggagcagagggagcctggagatttgggtg

SEQ ID NO: 573535 - DNA, 372 bp, Homo sapiens
gaattcacttctccctcaggtacaccaattagtcttaggtttcattgtcttaggccccaccactggggccgctacacgtgacatgggatgtgggccatcgggcaaagggcgcggagatggggcgctgccaggggagccaaggagkaaagagagcactttccaaattgtcttccagggtttcaatgtgcattttattaactcagaatctgtcgggaataatactagggagctacctttccctggagatgggtcttgtcagtggagtgagataggctggggggaggaagaggaatgggaggctcagtttataaatattaagatcagcaagggtgtgctgctggcaggagcagagggagcctggagatttgggtg

SEQ ID NO: 573536 - DNA, 372 bp, Homo sapiens
gaattcacttctccctcaggtacaccaattagtcttaggtttcattgtcttaggccccaccactggggccgctacacgtgacatgggatgtgggccatcgggcaaagggcgcggagatggggcgctgccaggggagccaaggaggaaagagagcactytccaaattgtcttccagggtttcaatgtgcattttattaactcagaatctgtcgggaataatactagggagctacctttccctggagatgggtcttgtcagtggagtgagataggctggggggaggaagaggaatgggaggctcagtttataaatattaagatcagcaagggtgtgctgctggcaggagcagagggagcctggagatttgggtg

SEQ ID NO: 573537 - DNA, 238 bp, Homo sapiens
tagctatgctcatcaccaacatcgttatatgatggtaataatcagatagtcaggaaggccgacaccaagaaaatggatacwtgctctgagggaatgaatgtggagagatcagaaggtcaagaacaaagccgtacaacatgtctgcagtaaagggatagagaaaagaaaggctataaaagaaggaatgaaacagttagagtaaaattataaaatcaaagctaaggagaatttccagaaa

SEQ ID NO: 573538 - DNA, 238 bp, Homo sapiens
tagctatgctcatcaccaacatcgttatatgatggtaataatcagatagtcaggaaggccgacaccaagaaaatggatacatgctctgagggaatgaatrtggagagatcagaaggtcaagaacaaagccgtacaacatgtctgcagtaaagggatagagaaaagaaaggctataaaagaaggaatgaaacagttagagtaaaattataaaatcaaagctaaggagaatttccagaaa

SEQ ID NO: 573539 - DNA, 498 bp, Homo sapiens
tttaatatcatagaagtttaggaacacaagatggaaaaaaggcctctgggtaactgacattgaggcagtctttagggaagctccatttccgatagagaagtagacacmaagtcagcttgaagcagggactaggtgaagaagctgttggctggtcgcatggggaaataaataagggatgcatatgccatatttctggatttctttctttcttgcccagcctctatatatgcatagagtttggtgaaaacttacaaaaaataaaaatgaaaccaattttgtttgttgactcaaatacaatgctttgtgttagaatcaagataaattcatgcctctcccttctattgtcaccgtcagttttgaaattaaacatcagcttttcttcttcattaaaatcattttcaactcctcccaggtgttggtggtttgggggagttacataagcagtcaggtcttgatgagtagaggaggagggaacaaacactttcagcaaaggcagaa

SEQ ID NO: 573540 - DNA, 498 bp, Homo sapiens
tttaatatcatagaagtttaggaacacaagatggaaaaaaggcctctgggtaactgacattgaggcagtctttagggaagctccatttccgatagagaagtagacacaaagtcagcttgaagcagggacwaggtgaagaagctgttggctggtcgcatggggaaataaataagggatgcatatgccatatttctggatttctttctttcttgcccagcctctatatatgcatagagtttggtgaaaacttacaaaaaataaaaatgaaaccaattttgtttgttgactcaaatacaatgctttgtgttagaatcaagataaattcatgcctctcccttctattgtcaccgtcagttttgaaattaaacatcagcttttcttcttcattaaaatcattttcaactcctcccaggtgttggtggtttgggggagttacataagcagtcaggtcttgatgagtagaggaggagggaacaaacactttcagcaaaggcagaa

SEQ ID NO: 573541 - DNA, 498 bp, Homo sapiens
tttaatatcatagaagtttaggaacacaagatggaaaaaaggcctctgggtaactgacattgaggcagtctttagggaagctccatttccgatagagaagtagacacaaagtcagcttgaagcagggactagktgaagaagctgttggctggtcgcatggggaaataaataagggatgcatatgccatatttctggatttctttctttcttgcccagcctctatatatgcatagagtttggtgaaaacttacaaaaaataaaaatgaaaccaattttgtttgttgactcaaatacaatgctttgtgttagaatcaagataaattcatgcctctcccttctattgtcaccgtcagttttgaaattaaacatcagcttttcttcttcattaaaatcattttcaactcctcccaggtgttggtggtttgggggagttacataagcagtcaggtcttgatgagtagaggaggagggaacaaacactttcagcaaaggcagaa

SEQ ID NO: 573542 - DNA, 498 bp, Homo sapiens
tttaatatcatagaagtttaggaacacaagatggaaaaaaggcctctgggtaactgacattgaggcagtctttagggaagctccatttccgatagagaagtagacacaaagtcagcttgaagcagggactaggtgaagaagctgttggctggtcgcatggggaaataaataagggatgcatatgccatatttctggatttctttctttcttgcccagcctctatatatgcatagagtttggtgaaaacttacaaaaaataaaaatgaaaccaattttgtttgttgactcaaatacaatgctttgtgttagaatcaagataaattcatgcctctcccttctattgtcaccgtcagytttgaaattaaacatcagcttttcttcttcattaaaatcattttcaactcctcccaggtgttggtggtttgggggagttacataagcagtcaggtcttgatgagtagaggaggagggaacaaacactttcagcaaaggcagaa

SEQ ID NO: 573543 - DNA, 471 bp, Homo sapiens
  misc_feature 1, 2, 3, 4, 5, 6, 7, 8, 9: n = A,T,C or G
nnnnnnnnngccagctttacctttaaagtgtaataattccaaatgttgtttccaaattcacattcccacccccaccacttggtaactatagcgcttccttcacaaggccaagtgcagagatttcttgaggaaataatgagaactattatacattcttatttcaaggacccttaaaattatargattgccatatttgatactaatttaagcttctgtcattgcccttttttcaatccagtctccacacagctaccacagtgtgcaagtagaagtctcagccgtatcaccacactcctcctttaatgtccctactccattgcttcttttctccttcagaagagtttaagcttaatgaagctgggcaactttacatatttttccacgagctggagatcacttggtgtaaagtaaaaatgatcagtaaatattttcaaataacagaatccatgaataatagttttgtttctttga

SEQ ID NO: 573544 - DNA, 533 bp, Homo sapiens
caaaaaccttactggtgccagtgaactttctcaaagagaaatacataccgtttttctctctgtctcccttttttataaaacctctaactttctctttatgttttggacatactaaagacacccattctgcatgtatgtgtgaaactgtaatacttgtatctcaaataaaacattttaatttcagatgtttgtctctatatttatttgactttgacaatctgatattatttagcattatttccagtctcccaaataatgtcaaaattttgttatgttagataggaatatcttgttattcaacttgaaggtaaactgcttgatcaatgcatgtaattcsttgacagattgtcagcacctctaagacaacatgtagatattgctcattattaactcatttcatcttttcatgataaattacaaaaatttaattttcatttttaaaatgcaaaccattatgccttgtattatggcattcttgcattactataaaggaatacctaagcactacataatttatactgaaaaaaaagatt

SEQ ID NO: 573545 - DNA, 491 bp, Homo sapiens
catgaggtcttttatattagcaaactgaaattgttaactataaaaagtcaaaaatcaaaggtgctctcatgtatttataaggaccttgaatggctcagattcatcaggaaaaaaaaacattccctcagagagtctgatctcaagctgatgtttctttattgwatttgattctaaaccatcatttttgttgaatcctctgtgctttcagaatgctgaaatgtaaaatatttttaacttatgaaagagataatttatttttattttctcctatacgtttttaagtagccccttaaaaaatagacaaatccatccagggtcaaaagaactcaactcaattctctatcactgtgaaaatagacttagttcttcattacaaaagtgctacaataactacaaaaattatacctcctggagtatatatttacatatccatgcaaaaagggaatagattaaaagatgtttatgaatgtctaaaatcttaagtcagttta

SEQ ID NO: 573546 - DNA, 491 bp, Homo sapiens
catgaggtcttttatattagcaaactgaaattgttaactataaaaagtcaaaaatcaaaggtgctctcatgtatttataaggaccttgaatggctcagattcatcaggaaaaaaaaacattccctcagagagtctgatctcaagctgatgtttctttattgtatttgattctaaaccatcatttttgttgaatcctctgtgctttcagaatgctgaaatgtaaaatatttttaacttatgaaagagataatttatttttattttctcctatacrtttttaagtagccccttaaaaaatagacaaatccatccagggtcaaaagaactcaactcaattctctatcactgtgaaaatagacttagttcttcattacaaaagtgctacaataactacaaaaattatacctcctggagtatatatttacatatccatgcaaaaagggaatagattaaaagatgtttatgaatgtctaaaatcttaagtcagttta

SEQ ID NO: 573547 - DNA, 491 bp, Homo sapiens
catgaggtcttttatattagcaaactgaaattgttaactataaaaagtcaaaaatcaaaggtgctctcatgtatttataaggaccttgaatggctcagattcatcaggaaaaaaaaacattccctcagagagtctgatctcaagctgatgtttctttattgtatttgattctaaaccatcatttttgttgaatcctctgtgctttcagaatgctgaaatgtaaaatatttttaacttatgaaagagataatttatttttattttctcctatacgtttttaagtagccccttaaaaaatagacaaatccatccagggtcaaaagaactcaactcaattctctatcactgtgaaaatagacttagttcttcattacaaaagtgctacaataactacaaaaattatacctcctggagtatatatttacatatccatgcaaaargggaatagattaaaagatgtttatgaatgtctaaaatcttaagtcagttta

SEQ ID NO: 573548 - DNA, 610 bp, Homo sapiens
gggacccatttgaggaggcagtatgtccattctcagagcacaaacaccatgccaggagaaccactgctctcttcagagctgtcagatgggaggtttaagtctgcagaastttctgctgccttttattcagctatgccctgcccgcagaggtggagtttataaaggcagtaggccttgctgagctgtgagtgactctaccctgttcaagcttcctggccactttgtttacctactcaaacctcaaaaattgtggattcacctccatctgctcagctgcagcatgaaggttaatctcagaccgctgcactggcagtaagcaaggctctatgggtgtaggacccaatgaatcaggcacaggagagaatctcctggtctgccagttgctaagactgtgcgaaaagtgcagtatttgggcaagagtgtcctgtttttccaggtacagtctgtcatgccttcccttggctaggaaaggaaaatcccccaaccccttgcacttcctgggtgagttgatgccctgccctgcttcagctcaccctccatgggatgaactcactgtccaatcagtcccaatgagatgaatcaggtagctcagttggaaatgcagaaatca

SEQ ID NO: 573549 - DNA, 530 bp, Homo sapiens
actttcattaggcagtatcaagaatgttcattaatgctatttctaatttatgatacgatcatctaaagaggacatcccagcaacaagaggccaaaggaaagggaaaagaaatgaaaagaacgaccatactttctacacatccaacctcttctctaccacctctcagcaagacctcccacagccaatcactgctttctcttgcggacttaccctctactctgtgaacacatgagccagagaaccctgagaagtccctgagtcccttccaggggctctgcaaggtcaaaagtcttttcataaaaatacacaggttttgtttacctttgccactttcattctctcayaagtataattagactttcccagaggctacctgacatgggatgtcacaagaaattaaacatagaagcagaaaggagaaccaagttttcttctattaaaccagactttaaagacatacctaaaaatataaaacaacgtcactgttctcaccaactttactgcttaaaaatgataatttgaaataaaaa

SEQ ID NO: 573550 - DNA, 465 bp, Homo sapiens
atacctgtagctttgttcttgctcaaaattgcttctgccactcagggatttttgtgattctatatgaattttaggatttttttttctatttctgtgasagataccattgggattttgatatggattacattaaatgtgtagattgctttgagtaatatggacactttaataatacagtactaactctttcaatccatgggttgtctttcaatttactttggtttaaatttctgtcatcaatcttttataatttgtagtgtttaagtctttcacttgtttggttagttagttccaaagtagtttatttgatactgttttttaaatttccctttcagacaattctttgttagtttttagaaatagcaatgatttttgtatgtcgattgtgtatcctacaactttagtaaatttattatatagtcagtccttcatatccatgtgttttgcaaccatgaactcaatcaa

SEQ ID NO: 573551 - DNA, 465 bp, Homo sapiens
atacctgtagctttgttcttgctcaaaattgcttctgccactcagggatttttgtgattctatatgaattttaggatttttttttctatttctgtgagagataccattgggattttgatatggattacattaaatgtgtagattgctttgagtaatatggacactttaataatacagtactaactctttcaatccatgggttgtctttcaatttactttgrtttaaatttctgtcatcaatcttttataatttgtagtgtttaagtctttcacttgtttggttagttagttccaaagtagtttatttgatactgttttttaaatttccctttcagacaattctttgttagtttttagaaatagcaatgatttttgtatgtcgattgtgtatcctacaactttagtaaatttattatatagtcagtccttcatatccatgtgttttgcaaccatgaactcaatcaa

SEQ ID NO: 573552 - DNA, 465 bp, Homo sapiens
atacctgtagctttgttcttgctcaaaattgcttctgccactcagggatttttgtgattctatatgaattttaggatttttttttctatttctgtgagagataccattgggattttgatatggattacattaaatgtgtagattgctttgagtaatatggacactttaataatacagtactaactctttcaatccatgggttgtctttcaatttactttggtttaaatttctgtcatcaatcttttataatttgtagtgtttaagtctttcacttstttggttagttagttccaaagtagtttatttgatactgttttttaaatttccctttcagacaattctttgttagtttttagaaatagcaatgatttttgtatgtcgattgtgtatcctacaactttagtaaatttattatatagtcagtccttcatatccatgtgttttgcaaccatgaactcaatcaa

SEQ ID NO: 573553 - DNA, 465 bp, Homo sapiens
atacctgtagctttgttcttgctcaaaattgcttctgccactcagggatttttgtgattctatatgaattttaggatttttttttctatttctgtgagagataccattgggattttgatatggattacattaaatgtgtagattgctttgagtaatatggacactttaataatacagtactaactctttcaatccatgggttgtctttcaatttactttggtttaaatttctgtcatcaatcttttataatttgtagtgtttaagtctttcacttgtttggttagttagttccaaagtagtttatttgatactgttttttaaatttccctttcagacaattcwttgttagtttttagaaatagcaatgatttttgtatgtcgattgtgtatcctacaactttagtaaatttattatatagtcagtccttcatatccatgtgttttgcaaccatgaactcaatcaa

SEQ ID NO: 573554 - DNA, 391 bp, Homo sapiens
cttgcttttggtctgttctatttcttttttgttccattttggtagattgcatctttctaagaatttatccatttattctaggttatccaatttattggcatataatcgcttaatwgtcctttataatcatttgtattcctgtacatttcctataatgtctccattttcatttctgattatatttacttgagtttctctttttttcttagtgtagctaagggtctgttatttttgtttgtatttccaaaaattcaactctaactttgttgatttttctattgttttctattttatagttattttatttatattctaatctttattatttacttcattatgctaactttgggtttagttagtttctctttttctaattgtttatttgtaaagt

SEQ ID NO: 573555 - DNA, 391 bp, Homo sapiens
cttgcttttggtctgttctatttcttttttgttccattttggtagattgcatctttctaagaatttatccatttattctaggttatccaatttattggcatataatcgcttaattstcctttataatcatttgtattcctgtacatttcctataatgtctccattttcatttctgattatatttacttgagtttctctttttttcttagtgtagctaagggtctgttatttttgtttgtatttccaaaaattcaactctaactttgttgatttttctattgttttctattttatagttattttatttatattctaatctttattatttacttcattatgctaactttgggtttagttagtttctctttttctaattgtttatttgtaaagt

SEQ ID NO: 573556 - DNA, 391 bp, Homo sapiens
cttgcttttggtctgttctatttcttttttgttccattttggtagattgcatctttctaagaatttatccatttattctaggttatccaatttattggcatataatcgcttaattgtcctttataatcatttgtattcctgtacatttcctataatgtctccattttcatttctgattatatttacttgagtttctctttttttcttagtgtagctaagggtytgttatttttgtttgtatttccaaaaattcaactctaactttgttgatttttctattgttttctattttatagttattttatttatattctaatctttattatttacttcattatgctaactttgggtttagttagtttctctttttctaattgtttatttgtaaagt

SEQ ID NO: 573557 - DNA, 391 bp, Homo sapiens
cttgcttttggtctgttctatttcttttttgttccattttggtagattgcatctttctaagaatttatccatttattctaggttatccaatttattggcatataatcgcttaattgtcctttataatcatttgtattcctgtacatttcctataatgtctccattttcatttctgattatatttacttgagtttctctttttttcttagtgtagctaagggtctgttatttttgtttgtatttccaaaaattcaactctarctttgttgatttttctattgttttctattttatagttattttatttatattctaatctttattatttacttcattatgctaactttgggtttagttagtttctctttttctaattgtttatttgtaaagt

SEQ ID NO: 573558 - DNA, 478 bp, Homo sapiens
tcttttactgaatcctgtaagttttgttgagttgtatgttcatttttgtttgtcccaagatatttttaaaattcccttttgatttcttcttttacccaayggttgtttaagcatgtgttgtttagtttctgcatttttgtaaatgtttctgttttctttgttattgacttctaattttattccattgtggaatgagaagatacttggacattatatcaaacttcttaaatttgtagtatgccttgtgacctaagatttgatctatctcagagaagattctgtgtgcccttgagaagaatgtatattctgctgctattggatggaaagttgtgtatcctgtcgtgtttaatctactgtgttgttcaagtcagctgtttcctctttttttattccctcctagatgttctatccattattgaatttggggtactgaagttggctactattattttagtgttactgatttctcccctagctt

SEQ ID NO: 573559 - DNA, 478 bp, Homo sapiens
tcttttactgaatcctgtaagttttgttgagttgtatgttcatttttgtttgtcccaagatatttttaaaattcccttttgatttcttcttttacccaatggttgttyaagcatgtgttgtttagtttctgcatttttgtaaatgtttctgttttctttgttattgacttctaattttattccattgtggaatgagaagatacttggacattatatcaaacttcttaaatttgtagtatgccttgtgacctaagatttgatctatctcagagaagattctgtgtgcccttgagaagaatgtatattctgctgctattggatggaaagttgtgtatcctgtcgtgtttaatctactgtgttgttcaagtcagctgtttcctctttttttattccctcctagatgttctatccattattgaatttggggtactgaagttggctactattattttagtgttactgatttctcccctagctt

SEQ ID NO: 573560 - DNA, 478 bp, Homo sapiens
tcttttactgaatcctgtaagttttgttgagttgtatgttcatttttgtttgtcccaagatatttttaaaattcccttttgatttcttcttttacccaatggttgtttaagcatgtgttgtttagtttctgcatttttgtaaatgtttctgttttctttgttattgacttctaattttattccattgtggaatgagaagatacttggacattatatcaaacttcttaaatttgtagtatgcyttgtgacctaagatttgatctatctcagagaagattctgtgtgcccttgagaagaatgtatattctgctgctattggatggaaagttgtgtatcctgtcgtgtttaatctactgtgttgttcaagtcagctgtttcctctttttttattccctcctagatgttctatccattattgaatttggggtactgaagttggctactattattttagtgttactgatttctcccctagctt

SEQ ID NO: 573561 - DNA, 513 bp, Homo sapiens
gacagtttttgatttcaagtctattttttctgatctaaatatagatacccttgctcttttttgtttaccatttgtgtacagtatcttttcccatcccttcactttgagcctctaygtatctttatatctaaagtgactcccttataaatatgtactgatgagtatcttttatgcattgtgccactctatgtcttttaattagatagtttaatactttcacatttaaagtcattgttgataggtaaggagtaacttgcgtttggttaattgtttttcatatgttttgcagttctttttttttttcctctcttgctgtcttcttagtttggttatttcttgtagtggtttggtttcatttatttttcttcacattctgtgtagctcctataagcttttgatttgtggttgcaaatttacatcttctataagcagatgtcttaatgttatcagcttttttggaatcattttctttctgtttcctcttcagacatatttgcaaatactgtttttcaa

SEQ ID NO: 573562 - DNA, 577 bp, Homo sapiens
gacagtttttgatttcaagtctattttttctgatctaaatatagatacccttgctcttttttgtttaccatttgtgtacagtatcttttcccatcccttcactttgagcctctacgtatctttatatctaaagtgactcccttataaatatgtactgatgagtatcttttatgcattgtgccactctatgtcttttaattagatagtttaatmctttcacatttaaagtcattgttgataggtaaggagtaacttgcgtttggttaattgtttttcatatgttttgcagttctttttttttttcctctcttgctgtcttcttagtttggttatttcttgtagtggtttggtttcatttatttttcttcacattctgtgtagctcctataagcttttgatttgtggttgcaaatttacatcttctataagcagatgtcttaatgttatcagcttttttggaatcattttctttctgtttcctcttcagacatatttgcaaatactgtttttcaagacacaagtaaatagggttctggttagaaatttatcaatacgaaaaaaaagatcctctgagtct

SEQ ID NO: 573563 - DNA, 513 bp, Homo sapiens
gacagtttttgatttcaagtctattttttctgatctaaatatagatacccttgctcttttttgtttaccatttgtgtacagtatcttttcccatcccttcactttgagcctctacgtatctttatatctaaagtgactcccttataaatatgtactgatgagtatcttttatgcattgtgccactctatgtcttttaattagatagtttaatactttcacatttaaagtcattgttgataggtaaggagtaacttgcgtttggttaattgtttttcatatgttttgcagttctttttttttttcctctcttgctgtcttcttagtttggttatttcttgtagtggtttggtttcatttatttttcttcacattctgtgtagctcctataagyttttgatttgtggttgcaaatttacatcttctataagcagatgtcttaatgttatcagcttttttggaatcattttctttctgtttcctcttcagacatatttgcaaatactgtttttcaa

SEQ ID NO: 573564 - DNA, 577 bp, Homo sapiens
gacagtttttgatttcaagtctattttttctgatctaaatatagatacccttgctcttttttgtttaccatttgtgtacagtatcttttcccatcccttcactttgagcctctacgtatctttatatctaaagtgactcccttataaatatgtactgatgagtatcttttatgcattgtgccactctatgtcttttaattagatagtttaatactttcacatttaaagtcattgttgataggtaaggagtaacttgcgtttggttaattgtttttcatatgttttgcagttctttttttttttcctctcttgctgtcttcttagtttggttatttcttgtagtggtttggtttcatttatttttcttcacattctgtgtagctcctataagcttttgatttgtggttgcaaatttacatcttctataagcagatgtmttaatgttatcagcttttttggaatcattttctttctgtttcctcttcagacatatttgcaaatactgtttttcaagacacaagtaaatagggttctggttagaaatttatcaatacgaaaaaaaagatcctctgagtct

SEQ ID NO: 573565 - DNA, 269 bp, Homo sapiens
cattttctaatacttgcaaaggcactgtgtggacagtggaaaccctgtatgagctcrtgacacaggcctggccaatgaatatacttctaatcctggcacagatgaaactagaaatggacatgaaatccaagcctcacacccaaagtcaatctctagtctcttattgaaactattagaagtgtttctgtttttgctttattctggggctgtggaactaaggaaatgtaaactgggggagtgatgatggccacattgcagcacaaagggaa

SEQ ID NO: 573566 - DNA, 269 bp, Homo sapiens
cattttctaatacttgcaaaggcactgtgtggacagtggaaaccctgtatgagctcatgacacaggcctggccaatgaatatacttctaatcctggcacagatgaaactagaaatggacatgaaatccaagcctcacacccaaagtcaatctctagtctcttattgaaactattagaagtgtttmtgtttttgctttattctggggctgtggaactaaggaaatgtaaactgggggagtgatgatggccacattgcagcacaaagggaa

SEQ ID NO: 573567 - DNA, 548 bp, Homo sapiens
ccgctcagacccacacactgatctcttctgagaaaaccatcacagtcatacccaaaataatgctttcccagctttccagggattccttaatccagtcaagttgacacctgaaattaagtctgcaagtccaccccttgtagatttggcactcatatggacctccttaaaccatacataatttccaaataaaaagaaaacaaagcaacagttgtacctaacacgatgcaactaacgtggtacaactcttctgtgattgtgattttmtggattttagatgttaagaatttagactttaggattgggcatggtggctcatgcctgtgttcccagcactttgggaggccaagtcaggaggatcacttgagcccaggagtttgaaatcagccagggcaataaagtgagaccccaagatatggtttggctgtgtctccaaccaaatcttatcttgaattgtagttcccataatcctcacatatcatgatggggacccagtgagaggtaattgaatcatggaggcagttacccccatgctcttctcatgatagtga

SEQ ID NO: 573568 - DNA, 606 bp, Homo sapiens
gcatcagacacaaattatttttcatctttctcacttggagtttcagatagcagcattttaatcatctcttccattaaaccaagattacacaaaagcgtttgaggacactgaggactggcacttctaatttttcttcagaaaccagtactcaaaatgtctggtttggaggtcagttacactgctgtctttgtataatcagccattaaaaaatattttggggacatttctcagaagtctcatccccatatttttgttcttaacacatctcaccacaaactctaccacacctatggtttgcaaactttgggaaatgtcagtatatgccattatcatggttattagtactattatttgttaaaagcactttgaaggcaatttatgtgacttatatatagttagtattttaatctggacattctccagttatatgcaaagattaaaactcrgcagcttcattttatagaattggcatcttttatatggctatggggactgcttggtgtctataaattattataaattattatgtatatttgttggactgaaatcaaacttaaaatcttccacatttcaagtgcttttattctgagcagtacgtacaaaaaa

SEQ ID NO: 573569 - DNA, 606 bp, Homo sapiens
gcatcagacacaaattatttttcatctttctcacttggagtttcagatagcagcattttaatcatctcttccattaaaccaagattacacaaaagcgtttgaggacactgaggactggcacttctaatttttcttcagaaaccagtactcaaaatgtctggtttggaggtcagttacactgctgtctttgtataatcagccattaaaaaatattttggggacatttctcagaagtctcatccccatatttttgttcttaacacatctcaccacaaactctaccacacctatggtttgcaaactttgggaaatgtcagtatatgccattatcatggttattagtactattatttgttaaaagcactttgaaggcaatttatgtgacttatatatagttagtattttaatctggacattctccagttatatgcaaagattaaaactcggcagcttcattttayagaattggcatcttttatatggctatggggactgcttggtgtctataaattattataaattattatgtatatttgttggactgaaatcaaacttaaaatcttccacatttcaagtgcttttattctgagcagtacgtacaaaaaa

SEQ ID NO: 573570 - DNA, 606 bp, Homo sapiens
gcatcagacacaaattatttttcatctttctcacttggagtttcagatagcagcattttaatcatctcttccattaaaccaagattacacaaaagcgtttgaggacactgaggactggcacttctaatttttcttcagaaaccagtactcaaaatgtctggtttggaggtcagttacactgctgtctttgtataatcagccattaaaaaatattttggggacatttctcagaagtctcatccccatatttttgttcttaacacatctcaccacaaactctaccacacctatggtttgcaaactttgggaaatgtcagtatatgccattatcatggttattagtactattatttgttaaaagcactttgaaggcaatttatgtgacttatatatagttagtattttaatctggacattctccagttatatgcaaagattaaaactcggcagcttcattttatagaattggcatcttttatatggctatggggactgcttggtgtctataaattattataaattattatgtatatttgttggactgaaatcaaacttaaaatcttccacatttcaagtgcttttattctgagcagtacktacaaaaaa

SEQ ID NO: 573571 - DNA, 423 bp, Homo sapiens
agttattttaaatctgtatcttctgttgtcaagatctgtaatcagttctgctcgctggactggggacaggaaccaagggaacatgagggtgaacgggttgrcatggagtccaggaacacactgtgcctacatgcagaatgtttgtgccaggaaagccagtcagcaggcagatggtctcagataccaagctagtgttgggaagcaagattcagtctcttgaaggcggtgttcctcattctgtggtttgtatcacttgcttcagaatgacctggagtacttgttaaaatgcaaattttgagcccaatcctagacctcctaagcctacatctctacggatgggtctcagtagtcgatattggaaacgtgcgggtccctaggagatgcttatgcatatagatttgaactgttgtgtttaagggttag

SEQ ID NO: 573572 - DNA, 423 bp, Homo sapiens
agttattttaaatctgtatcttctgttgtcaagatctgtaatcagttctgctcgctggactggggacaggaaccaagggaacatgagggtgaacgggttgacatggagtccaggaacacactgtgcctacatgcagaatgtttgtgccaggaaagccagtcrgcaggcagatggtctcagataccaagctagtgttgggaagcaagattcagtctcttgaaggcggtgttcctcattctgtggtttgtatcacttgcttcagaatgacctggagtacttgttaaaatgcaaattttgagcccaatcctagacctcctaagcctacatctctacggatgggtctcagtagtcgatattggaaacgtgcgggtccctaggagatgcttatgcatatagatttgaactgttgtgtttaagggttag

SEQ ID NO: 573573 - DNA, 423 bp, Homo sapiens
agttattttaaatctgtatcttctgttgtcaagatctgtaatcagttctgctcgctggactggggacaggaaccaagggaacatgagggtgaacgggttgacatggagtccaggaacacactgtgcctacatgcagaatgtttgtgccaggaaagccagtcagcaggcagatggtctcagataccaagctagtgttgggaagcaagattcagtctcttgaaggcggtgttcctcattctgtggtttgtatcacttgcttcagaatgacctggagtacttrttaaaatgcaaattttgagcccaatcctagacctcctaagcctacatctctacggatgggtctcagtagtcgatattggaaacgtgcgggtccctaggagatgcttatgcatatagatttgaactgttgtgtttaagggttag

SEQ ID NO: 573574 - DNA, 435 bp, Homo sapiens
aggataaagaaatgattctaaaagcatcgagagaagagaaacaaataacattcagcggaactccaatacatctgacagcagacttttcaggggaaaatttacaggctgtgagattggcatgacatattaaaaaactgaaggaaaaaaagacttttactttagaataatgtatctggcaaaaacgtcctttaaacttgayggaaaaataagaactttttccaacaaacaaaaactgagggatttcattaacaccagacctgtcctacaagaaatgctaaagggatatcttaacctaaaagaaaacaagttagtgagcaataagaaatcatctgaaggtacagaactcactagcaatagcacatggaaaaacactgaatattacaatatggtaattatggggtgcaaaaatctcaaatagagtaaacaataaaccaa

SEQ ID NO: 573575 - DNA, 435 bp, Homo sapiens
aggataaagaaatgattctaaaagcatcgagagaagagaaacaaataacattcagcggaactccaatacatctgacagcagacttttcaggggaaaatttacaggctgtgagattggcatgacatattaaaaaactgaaggaaaaaaagacttttactttagaataatgtatctggcaaaaacgtcctttaaacttgacggaaaaataagaactttttccaacaaacaaaaactgagggatttcattaacaccagacctgtcctacaagaaatgctaaagggatatcttaacctaaaagaaaamaagttagtgagcaataagaaatcatctgaaggtacagaactcactagcaatagcacatggaaaaacactgaatattacaatatggtaattatggggtgcaaaaatctcaaatagagtaaacaataaaccaa

SEQ ID NO: 573576 - DNA, 435 bp, Homo sapiens
aggataaagaaatgattctaaaagcatcgagagaagagaaacaaataacattcagcggaactccaatacatctgacagcagacttttcaggggaaaatttacaggctgtgagattggcatgacatattaaaaaactgaaggaaaaaaagacttttactttagaataatgtatctggcaaaaacgtcctttaaacttgacggaaaaataagaactttttccaacaaacaaaaactgagggatttcattaacaccagacctgtcctacaagaaatgctaaagggatatcttaacctaaaagaaaacaagtwagtgagcaataagaaatcatctgaaggtacagaactcactagcaatagcacatggaaaaacactgaatattacaatatggtaattatggggtgcaaaaatctcaaatagagtaaacaataaaccaa

SEQ ID NO: 573577 - DNA, 435 bp, Homo sapiens
aggataaagaaatgattctaaaagcatcgagagaagagaaacaaataacattcagcggaactccaatacatctgacagcagacttttcaggggaaaatttacaggctgtgagattggcatgacatattaaaaaactgaaggaaaaaaagacttttactttagaataatgtatctggcaaaaacgtcctttaaacttgacggaaaaataagaactttttccaacaaacaaaaactgagggatttcattaacaccagacctgtcctacaagaaatgctaaagggatatcttaacctaaaagaaaacaagttagtgagcaataagaaatcatctgaaggtacagaactcactagcaatagcacatggaaaaacactgaatattayaatatggtaattatggggtgcaaaaatctcaaatagagtaaacaataaaccaa

SEQ ID NO: 573578 - DNA, 313 bp, Homo sapiens
aaaattaattagacaaaaaggaagacagcaagaaataaaatawataaacaaaagaactacaaaagaaacacaatacaattaacaaaatggcagtagtaactccttaactgcaaataataaccttatatgtaacaatgttaaattctccaataacagacagaaggtcactgaaaaaataaaaatataaaatcaaatgaattctgtttataaattgtttataaaaataaaaatataaaatcaaataaattatgtttatttaaggataaacatggaatgaaagtgcagggatggaaaattatattctatatggtaa

SEQ ID NO: 573579 - DNA, 313 bp, Homo sapiens
aaaattaattagacaaaaaggaagacagcaagaaataaaatatataaacaaaagaactacaaaagaaacacaatacaattaacaaaatggcagtagtaactccttaactgcaaataataaccttatatgtaacaatgttaaattctccaataacagacasaaggtcactgaaaaaataaaaatataaaatcaaatgaattctgtttataaattgtttataaaaataaaaatataaaatcaaataaattatgtttatttaaggataaacatggaatgaaagtgcagggatggaaaattatattctatatggtaa

SEQ ID NO: 573580 - DNA, 313 bp, Homo sapiens
aaaattaattagacaaaaaggaagacagcaagaaataaaatatataaacaaaagaactacaaaagaaacacaatacaattaacaaaatggcagtagtaactccttaactgcaaataataaccttatatgtaacaatgttaaattctccaataacagacagaaggtcactgaaaaaataaaaatataaaatcaaatgaattctgtttataaattgtttataaaaataaaaatataaamtcaaataaattatgtttatttaaggataaacatggaatgaaagtgcagggatggaaaattatattctatatggtaa

SEQ ID NO: 573581 - DNA, 313 bp, Homo sapiens
aaaattaattagacaaaaaggaagacagcaagaaataaaatatataaacaaaagaactacaaaagaaacacaatacaattaacaaaatggcagtagtaactccttaactgcaaataataaccttatatgtaacaatgttaaattctccaataacagacagaaggtcactgaaaaaataaaaatataaaatcaaatgaattctgtttataaattgtttataaaaataaaaatataaaatcaaataaattatgtttatttaaggataaacatggamtgaaagtgcagggatggaaaattatattctatatggtaa

SEQ ID NO: 573582 - DNA, 559 bp, Homo sapiens
aaaataaatctccaagaagatatcataattaaaatatgcacatgaatcagcaactattccaaacacataacacaaataatgacagaattaaaaggagaaataggctgagtacagtggctcacgcctgcttgtaatccctgcatcttggcgggggcagaggcaggaggatggcttgagccaggagttgagactaacctgggcaagacagcaacacttcgtctgtgtaaaaaacaaaattataaataaaaataaagggaggawtagagaccaccaccaaaatgataggagactttaataatggagaggacaacctgggagaccaaatgaagacagaggattgagcaaggagtgattcaaccaaatccaacagacttttagaaacggtcttctcaacaacagaatgcgcatgattctggtgcgcacatggaacattcttgagactatatcacaaatcggaccacaaagaaatcaattcaagaaaattaaaatcatacgaagtatcatttacaactaaaatggaatggaactagaagtgaataccagaagaaaattttaaaaa

SEQ ID NO: 573583 - DNA, 559 bp, Homo sapiens
aaaataaatctccaagaagatatcataattaaaatatgcacatgaatcagcaactattccaaacacataacacaaataatgacagaattaaaaggagaaataggctgagtacagtggctcacgcctgcttgtaatccctgcatcttggcgggggcagaggcaggaggatggcttgagccaggagttgagactaacctgggcaagacagcaacacttcgtctgtgtaaaaaacaaaattataaataaaaataaagggaggattagagaccaccaccaaaatgataggagactttaataatggagaggacaacctgggagaccaaatgaagacagaggattgagcaaggagtgattcaaccaaatccaacagacttttagaaacggtcttctcaacaacagaatgcgcatgattctggtgcgcacatggaacatkcttgagactatatcacaaatcggaccacaaagaaatcaattcaagaaaattaaaatcatacgaagtatcatttacaactaaaatggaatggaactagaagtgaataccagaagaaaattttaaaaa

SEQ ID NO: 573584 - DNA, 557 bp, Homo sapiens
aaaacaaataaaaaacagaaaccaagaaaaccagaaaaacaaatgttgggcaggatgtggaggaactgaaaccctgtgcaatgctggtgggaaggtaaaatggtgcatgtatttaaatgccactgaagtgtacacgtaaaaatagaaaaactggcaaattctatattctgtatattttacctccacacacacatgaaaccaatggagaaaaaraaaattaatcaaaatagacaattaaaaagaaataaaactaataagcaatttagatgattgagttatagctacaattgttttcaggaaaagaaataatgctttattcagaatcattatcaacaatgttatgtttagcaagtctttcttataaatgtaatagttaataattttaaattagttttattttgtatgttctatgccactttcaccaagtacacttaaataaaatcatttaaatataatatctcattaatgttttgcaaatgaagaagaaatttctggcagacaagctcctcaaaattttcacactctgtccaagtagggaaatgataaaataacattac

SEQ ID NO: 573585 - DNA, 578 bp, Homo sapiens
cagtgataaaaacaatttaaagaattacaataaatagaaagatatcccatgttcatggactagaagaattaatattgttgaaagactcatactactcaaatcagtctgtaagtccaatataatctctatcaaatgtccaacttcattcgtcacagatattaaaaaatatcttaaaatccatgtgaaactacaaaacaccccaaatagccaaataaatcttaagcaaaaagagcaatgctagaggtattacactatctaatttcaaaatatattacaaagctatcctaactaaaacagcatggtattggcataaaaacagacatgtagaccagtggaacaaaaatagagagctcaggcataaatgcacatatttacatgcaacttattttagacaaaggtgcaaacattcaattgggaaaagacagtcttttcaacaaatggttcwgggaaaagtgcatatccacatacaaaagaatgaaagtagacccctatctctcatcatataaaaaaatcaactcaaaataaattaaatatttaaatgtaaggcccccaaactatgaaactagtagaagaaaaca

SEQ ID NO: 573586 - DNA, 185 bp, Homo sapiens
ccaaaaacattaaaaatagacttatcacataatccagcaatcccactactgggtatatattcaaagaatattaaatcagtatgtcaaagagatttctggactctcatgtttattacagcactattcacaatagccwagaatcaacctaagtgtccatcaatgaatgaatggagaaagaaaatgtg

SEQ ID NO: 573587 - DNA, 408 bp, Homo sapiens
catgaaagtgagtagctcaattgaagtgaaagtaaaagtcaatgaaagattaaattagaaaatatattgcttggcatttagtagttacttcagaaatattaataaatcttaagaaaattaagaacaccaaagcattcatagtgggccattatcataataygaatttatgtggcaatattttattctttccagtgaagggagtaattcaggcttgattacaggttagaaaatgatttttccaggtgtgacccactgaccacattcattgtatttgaattgcttgagcaatttgtttcaggagaaaatggaaagattttaagatggaccaacgaaattaccactgagtgtctttaatggaaatctcagccttgtctagaataacctgagttatctgtttctatggggtct

SEQ ID NO: 573588 - DNA, 408 bp, Homo sapiens
catgaaagtgagtagctcaattgaagtgaaagtaaaagtcaatgaaagattaaattagaaaatatattgcttggcatttagtagttacttcagaaatattaataaatcttaagaaaattaagaacaccaaagcattcatagtgggccattatcataatatgaatttatgtggcaatattttattctttccagtgaagggagtaattcaggcttgattacaggttagaaaatgatttytccaggtgtgacccactgaccacattcattgtatttgaattgcttgagcaatttgtttcaggagaaaatggaaagattttaagatggaccaacgaaattaccactgagtgtctttaatggaaatctcagccttgtctagaataacctgagttatctgtttctatggggtct

SEQ ID NO: 573589 - DNA, 458 bp, Homo sapiens
gccaaatctaacaagagaccaacatggcattcatggtgatcacacctctagtcaaattttattttagttcattggctatactattaatatcctgtaatactcaaaaattttgtcttaattctgtgaataattsacttattaatcaccctatacactacttaatgaatggaatggtgcttggaataaagataattatagggctaaaagggttttctctagaggcaggttataggatttttttgtctgactggaataaaacaaaattaatcaatattttctgcaaccaatggcttttgacttagtcatctattaatatctatcaatcactataacctcagtcctatttcctccattcttctttttgctatcataaaaactggtccatttttttcctgttagatctatatgtttcacctcttttcttttcatccaaacaactggtcatcaacttagtacag

SEQ ID NO: 573590 - DNA, 450 bp, Homo sapiens
tcaaaaacttcaacagccctgagtgaaaagcccaaacacatttatctaccattcaaagacgcttyattgtctgttctctgtgcatctcagtagtctctttttaccacactgtctatatactgcatgagccatttatatgaaactatctgacactccaaggcatcttatactatatattcaaccatgtatccctagtacctagcacagtcctggcatatagtttgctactaaacttttacagaatgaaggaattatcttgtatccaggttccaagttttaaggtgattcttcactaaaaaaagtattacagttcacaaataatctacttccctttttacaaatgggatcaattttaatcttatctcctaataacattactttcatttactctgatctaaatatactgtcctaagagagcaataagaaagagagttgaagctggagtttgaa

SEQ ID NO: 573591 - DNA, 450 bp, Homo sapiens
tcaaaaacttcaacagccctgagtgaaaagcccaaacacatttatctaccattcaaagacgcttcattgtctgtyctctgtgcatctcagtagtctctttttaccacactgtctatatactgcatgagccatttatatgaaactatctgacactccaaggcatcttatactatatattcaaccatgtatccctagtacctagcacagtcctggcatatagtttgctactaaacttttacagaatgaaggaattatcttgtatccaggttccaagttttaaggtgattcttcactaaaaaaagtattacagttcacaaataatctacttccctttttacaaatgggatcaattttaatcttatctcctaataacattactttcatttactctgatctaaatatactgtcctaagagagcaataagaaagagagttgaagctggagtttgaa

SEQ ID NO: 573592 - DNA, 666 bp, Homo sapiens
attgtctgttctctgtgcatctcagtagtctctttttaccacactgtctatatactgcatgagccatttatatgaaactatctgacactccaaggcatcttatactatatattcaamcatgtatccctagtacctagcacagtcctggcatatagtttgctactaaacttttacagaatgaaggaattatcttgtatccaggttccaagttttaaggtgattcttcactaaaaaaagtattacagttcacaaataatctacttccctttttacaaatgggatcaattttaatcttatctcctaataacattactttcatttactctgatctaaatatactgtcctaagagagcaataagaaagagagttgaagctggagtttgaagaattgtacatggtcctgtgataccctaccttgttttaacctgagtgactctctcctagcagagagagagccggacagactccattttagtttcttcacgtgcatccccctttacctcccacccttaattgcataactagtgtaaactaactcaaagcaggtccaggaatgcacttactgataagatattgaggcaagctgcaccagctgctcctgggtacgcactcggtgaatgtcacgcaaaacccctgcatttctctctttgtgatggtttaagcccc

SEQ ID NO: 573593 - DNA, 450 bp, Homo sapiens
tcaaaaacttcaacagccctgagtgaaaagcccaaacacatttatctaccattcaaagacgcttcattgtctgttctctgtgcatctcagtagtctctttttaccacactgtctatatactgcatgagccatttatatgaaactatctgacactccaaggcatcttatactatatattcaaccatstatccctagtacctagcacagtcctggcatatagtttgctactaaacttttacagaatgaaggaattatcttgtatccaggttccaagttttaaggtgattcttcactaaaaaaagtattacagttcacaaataatctacttccctttttacaaatgggatcaattttaatcttatctcctaataacattactttcatttactctgatctaaatatactgtcctaagagagcaataagaaagagagttgaagctggagtttgaa

SEQ ID NO: 573594 - DNA, 440 bp, Homo sapiens
ttatactcttgggatccagcrctttccctctccatcacatggctacttgcttatttgttgtgtaaaatattgtccttagttttcacctttctaggagacacaggcagacgtacacaactagcgcttctggcacacagtaggtaggtgcatcacaaacatctgctgagttcacacactcttgccttctcaaaccttcctgtcaagtcttcagtgaaaaggaattgctgattgagcaagaattaaacttctagagactcctggatccactgaagtttgagacaaggtgagatttgtttactgtcatattcctagctcataacatattgtagtcacttaaaaaagtttgctgaataagtgagtaaattgattcatacgtcatacttagctatatattttctgagtagaattgataaagttaatagtttaagtctagtataatt

SEQ ID NO: 573595 - DNA, 239 bp, Homo sapiens
tgggagagggagagcacagtgactggaggactttacatyaaactcagtgctgccatgtcagtaaagacctggcagaattcatcacctgctgactaaagaacccctgtacccagaataaaaaaacagtgacaaccaggtaatacaccatgggcattgggctctgagaagtgctaagttcaggtgtgacccagtacatttctagctgtggtagctatggtgaaagacttctgtttgagaaa

SEQ ID NO: 573596 - DNA, 574 bp, Homo sapiens
tgtatatgagggcctgcaaaatggatttccacatactcaaaacaatagacaaaaatggcatagaagattggaaaatgtaacaggaaatgctcatgtcagtgtgtatcaaattatagaagaatttcaaaaagagcagtgccatgtagaaaatgaatgtgaatgtattttatgagagtcaaatcctaaaaacaaaaaaggcaagaattcatcgtgatgcaagacttcaaaatatagttaatgatcatgaaagccagccagctatgatgaactctgcaattgctcataatctatccatgtaatatactttttatatgtcaattttctttttagtgtttctttttccattttttccactaatttaaattgtcagcattattttttacaacttgctacgctatgtatttcatcttagtatcatttccaatactggaggtataaattttgcaaagacttttagagagttctaatttgttttatgagttttttttttgcaaatttgactccacaagagtgyattatcacaacactgactttgtgtgtaagcattgtacatgtacataaaaacattaaagtt

SEQ ID NO: 573597 - DNA, 574 bp, Homo sapiens
tgtatatgagggcctgcaaaatggatttccacatactcaaaacaatagacaaaaatggcatagaagattggaaaatgtaacaggaaatgctcatgtcagtgtgtatcaaattatagaagaatttcaaaaagagcagtgccatgtagaaaatgaatgtgaatgtattttatgagagtcaaatcctaaaaacaaaaaaggcaagaattcatcgtgatgcaagacttcaaaatatagttaatgatcatgaaagccagccagctatgatgaactctgcaattgctcataatctatccatgtaatatactttttatatgtcaattttctttttagtgtttctttttccattttttccactaatttaaattgtcagcattattttttacaacttgctacgctatgtatttcatcttagtatcatttccaatactggaggtataaattttgcaaagacttttagagagttctaatttgttttatgagttttttttttgcaaatttgactccacaagagtgtattatcacaacactgactttrtgtgtaagcattgtacatgtacataaaaacattaaagtt

SEQ ID NO: 573598 - DNA, 587 bp, Homo sapiens
gaaatttcaatacaatgtgatgaaaattttaaattatctctctcttgcacatttccattgcttgtttgaacattcaggagaatagtactgctttcccattgaatgcatacataaatgtaagaatgaaggttggccctccctccaaattcattaaacattaaattttttaagtaaaagataagagrgctgtatgaaaattaaaattcataattacttccaatatagaaaataattgaaatagataaaaacacaaccaaatagaaatggatattgctaaaaatcaccttcttaattaaattagcaacaaaagtgaaattattgttctatccatattggtgacattgcttcttaaattatgtcaaattaaatgtattctactgtgagttcaggaaaaattgacaataaaggaatagtatcatacacaaagaaatataactcactgttttagcctagcaactagtgtttacagaacaagttacagattattctgcaatacaaaacaatcctaaagagtttttaaccttaaatcaaaattcaaattagaattagaaatgaaatgatgttctcatttcagcaatgaatacaga

SEQ ID NO: 573599 - DNA, 587 bp, Homo sapiens
gaaatttcaatacaatgtgatgaaaattttaaattatctctctcttgcacatttccattgcttgtttgaacattcaggagaatagtactgctttcccattgaatgcatacataaatgtaagaatgaaggttggccctccctccaaattcattaaacattaaattttttaagtaaaagataagagagctgtatgaaaattaaaattcataattacttccaatatagaaaataattgaaatagataaaaacacaaccaaatagaaatggatattgctaaaaatcaccttcttaattaaattagyaacaaaagtgaaattattgttctatccatattggtgacattgcttcttaaattatgtcaaattaaatgtattctactgtgagttcaggaaaaattgacaataaaggaatagtatcatacacaaagaaatataactcactgttttagcctagcaactagtgtttacagaacaagttacagattattctgcaatacaaaacaatcctaaagagtttttaaccttaaatcaaaattcaaattagaattagaaatgaaatgatgttctcatttcagcaatgaatacaga

SEQ ID NO: 573600 - DNA, 587 bp, Homo sapiens
gaaatttcaatacaatgtgatgaaaattttaaattatctctctcttgcacatttccattgcttgtttgaacattcaggagaatagtactgctttcccattgaatgcatacataaatgtaagaatgaaggttggccctccctccaaattcattaaacattaaattttttaagtaaaagataagagagctgtatgaaaattaaaattcataattacttccaatatagaaaataattgaaatagataaaaacacaaccaaatagaaatggatattgctaaaaatcaccttcttaattaaattagcaacaaaagtgaaattattgttctatccatattggtgacattgcttcttaaattatgtcaaattaaatgtattctactgtgagttcaggaaaaattgacaataaasgaatagtatcatacacaaagaaatataactcactgttttagcctagcaactagtgtttacagaacaagttacagattattctgcaatacaaaacaatcctaaagagtttttaaccttaaatcaaaattcaaattagaattagaaatgaaatgatgttctcatttcagcaatgaatacaga

SEQ ID NO: 573601 - DNA, 587 bp, Homo sapiens
gaaatttcaatacaatgtgatgaaaattttaaattatctctctcttgcacatttccattgcttgtttgaacattcaggagaatagtactgctttcccattgaatgcatacataaatgtaagaatgaaggttggccctccctccaaattcattaaacattaaattttttaagtaaaagataagagagctgtatgaaaattaaaattcataattacttccaatatagaaaataattgaaatagataaaaacacaaccaaatagaaatggatattgctaaaaatcaccttcttaattaaattagcaacaaaagtgaaattattgttctatccatattggtgacattgcttcttaaattatgtcaaattaaatgtattctactgtgagttcaggaaaaattgacaataaagraatagtatcatacacaaagaaatataactcactgttttagcctagcaactagtgtttacagaacaagttacagattattctgcaatacaaaacaatcctaaagagtttttaaccttaaatcaaaattcaaattagaattagaaatgaaatgatgttctcatttcagcaatgaatacaga

SEQ ID NO: 573602 - DNA, 610 bp, Homo sapiens
aaaacactccttagcaaatgcaaaataactgaaatcataacaaacagtcaccaggaccacagcacaatcaaattagaactcaagactaagaaattcactcaaaaccatacaattacatggaaattgwataacctactcctgaatgacttttgggtaaatgacattaaggcagaaatgaaaaagatctttgaaactaccaagaacaaagatacaatataccagaatctctgggacaaagctaaggtagggttaagagagtaatttatggcactaaatgcccagatcaaaaaactagaaagatctcttgttaacagcctaacttcacaactaaaagaactagagaatcaagagcaaaaaaatcccaaagccagcagaagaccagaaataaccaaaatcagagctgaactaaaggagataactcacaaaaaaatctattcaagagatcaacaaacccaagagctggtttttggaaaataaaataaaataaaatagatcactcactagactaataaagaagaaaagagagaagattcaaataacacaatcagagatgataagggggatattaccactgacccaacagaaaagcaatcctcggagaatattataa

SEQ ID NO: 573603 - DNA, 610 bp, Homo sapiens
aaaacactccttagcaaatgcaaaataactgaaatcataacaaacagtcaccaggaccacagcacaatcaaattagaactcaagactaagaaattcactcaaaaccatacaattacatggaaattgaataacctactcctgaatgacttttgggtaaatgacattaaggcagaaatgaaaaagatctttgaaactaccaagaacaaagatacaatataccagaatctctgggacaaagctaaggtagggttaagagagtaatttatggcactaaatgcccagatcaaaaaactagaaagatctcttgttaacagcctaacttcacaactaaaagaactagagaatcaagagcaaaaaaatcccaaagccagcagaagaccagaaataaccaaaatcagagctgaactaaaggagataactcacaaaaaaatctattcaagagatcaacaaacccaagagctggtttttrgaaaataaaataaaataaaatagatcactcactagactaataaagaagaaaagagagaagattcaaataacacaatcagagatgataagggggatattaccactgacccaacagaaaagcaatcctcggagaatattataa

SEQ ID NO: 573604 - DNA, 610 bp, Homo sapiens
aaaacactccttagcaaatgcaaaataactgaaatcataacaaacagtcaccaggaccacagcacaatcaaattagaactcaagactaagaaattcactcaaaaccatacaattacatggaaattgaataacctactcctgaatgacttttgggtaaatgacattaaggcagaaatgaaaaagatctttgaaactaccaagaacaaagatacaatataccagaatctctgggacaaagctaaggtagggttaagagagtaatttatggcactaaatgcccagatcaaaaaactagaaagatctcttgttaacagcctaacttcacaactaaaagaactagagaatcaagagcaaaaaaatcccaaagccagcagaagaccagaaataaccaaaatcagagctgaactaaaggagataactcacaaaaaaatctattcaagagatcaacaaacccaagagctggtttttggaaaawaaaataaaataaaatagatcactcactagactaataaagaagaaaagagagaagattcaaataacacaatcagagatgataagggggatattaccactgacccaacagaaaagcaatcctcggagaatattataa

SEQ ID NO: 573605 - DNA, 605 bp, Homo sapiens
ggataccccattctctgtgatgtgataattaggcattgcatgcctgtattaaaatatttcatataccccataaatatatatgaccactatgtgcccacaaaaatcaaaaattaaaaaaaaatctaatttcacataatcaaattcccacacataggtactttaatgtatggcatattttgaaatcaaataatggacaatcctgcttcaaactgaagcttcaacaagcaagaaattacctgtgatagcaagaacctccctccctcagccccgggcattcacgctcccctagtgaatggtgtacccttgcttatgttatggtccgtgttttccctcatctctatgtctgttcaaaggccattttatgaggacaagagtaactgcttgtattttcagatagaggggggtatccatgaaccacagcagcaaggaactcttctaataacktcatgaatgtgaattatatcatacctgcacagactggtctctccaacaggaaattagcttcaaaagtgaaaggtcagcctcaggtacatgggattcattcttacctagaaatatacagaacacacttgtatctttagagtattaaaaatggataatggctc

SEQ ID NO: 573606 - DNA, 551 bp, Homo sapiens
tgattctatagtaacagtagctgcttaggctttttgctggggcacccataggaaaagcaggggcctccttgattctggttagcaatcccctgtctttgcagaaacacttatattaaatcttaaattccaatccccttcccagttacgagtgctaaaaaacaaacaaacaaacaacaacaacaacaacaaaacactggataactaaccctaataagagtaactatctaaggagaaaggaggcaacccagactggggctatttagakggaacattatctgtaatcataaatgtgagaagtggcctgacacagtggacaggaaatggggttaggaatcagatttggattggaatggccggcccctctactgaatagctgttgccctatgagtccttaacttccttgagtcccattttttttttttaacggtaaaacagagatgctgcctcctactgtgcagggttgtttttacattaaatgagataatatatgtaaaaccattaacataattcttggaacaaactaagcacaagttaattggaagctaataata

SEQ ID NO: 573607 - DNA, 551 bp, Homo sapiens
tgattctatagtaacagtagctgcttaggctttttgctggggcacccataggaaaagcaggggcctccttgattctggttagcaatcccctgtctttgcagaaacacttatattaaatcttaaattccaatccccttcccagttacgagtgctaaaaaacaaacaaacaaacaacaacaacaacaacaaaacactggataactaaccctaataagagtaactatctaaggagaaaggaggcaacccagactggggctatttagatggaacattatctgtaatcatamatgtgagaagtggcctgacacagtggacaggaaatggggttaggaatcagatttggattggaatggccggcccctctactgaatagctgttgccctatgagtccttaacttccttgagtcccattttttttttttaacggtaaaacagagatgctgcctcctactgtgcagggttgtttttacattaaatgagataatatatgtaaaaccattaacataattcttggaacaaactaagcacaagttaattggaagctaataata

SEQ ID NO: 573608 - DNA, 551 bp, Homo sapiens
tgattctatagtaacagtagctgcttaggctttttgctggggcacccataggaaaagcaggggcctccttgattctggttagcaatcccctgtctttgcagaaacacttatattaaatcttaaattccaatccccttcccagttacgagtgctaaaaaacaaacaaacaaacaacaacaacaacaacaaaacactggataactaaccctaataagagtaactatctaaggagaaaggaggcaacccagactggggctatttagatggaacattatctgtaatcataaatgtgagaagtggcctgacacagtggacaggaaatggggttaggaatcagatttggattggaatggccggcccctctactgaatagctgttgccctatgagtccttaacttccttgagtcccattttttttttttaacggtaaaacagagatgctgcctcctactgtgcagggttgtttttayattaaatgagataatatatgtaaaaccattaacataattcttggaacaaactaagcacaagttaattggaagctaataata

SEQ ID NO: 573609 - DNA, 607 bp, Homo sapiens
cattttacaaatgtagtaattagggcttttaaaaaggaaaagacatgcccaatagaacacaaatagtgaatggcagagctggatcttgaatctcagccatctatcttatttatctccaaaaccactgttctagtcattatttatcctttaatttcatttgtccattaattgaactcatccactaattcaaaagttatttgctaattccttctagatattgttctaggaaccagggacacagcaatgaataaaactgtyacaaaaatataacttctatggagcttacaacttagtagcaggaggcagatgagattttttaaagtaacagatgtcagatagatagtgaagaggcttatggagaacagtacaacagcgaaaggggtagggagtgctgctgcagtgataaagtggcattggagcaagacttgatggatggtagcgggtggagggtgagcaggttgagctatatgaaggtctagggaaagaacaccacaggcaaaggtacagctaatgcaaaggtcctcagacctgcttgtcatgcttgggtaagagtaaaaaggctagggtagctggaatgagttaagcagggggtgagcactaagagaga

SEQ ID NO: 573610 - DNA, 492 bp, Homo sapiens
tgttttataaatgttcaaatgttatgtctatgttttaaaattataaaatgttcaatctatgtttttaaatgttttataaaygtcacccaccttattttctaaatgaagaaagtaaggcccagaaaagctaaatgactagcctaaagccacacagctagtgtaatcacaaacataggtaaaatctatgttttatatatgttatttattttgacactgctaaccagttatagaaagactagttatgtcctttcacagaaaaaaaaaatcagatcatatctgtgccagtaactctcttaccatttcgtaagcaactgtagaagcttgacatatttaaaatgtcattcccagcacctctcatcttattatgtatactttccattctgaaagaactgttagaaaaaagattgacagcatattactaaaaagcatgaaaaattatttgaggaaataaatcaaagatatgggtacatgaccactttagcaaatttggaa

SEQ ID NO: 573611 - DNA, 543 bp, Homo sapiens
tgctattttaggttacatgaytactgactaatgcaacaaatttaaaaaacccaatatgttcacatctgtcaaagaattatcctcaggtatcattggagccttatgaaggcaggttttaccctaggccagtgttctaatcataggaatcttccgaaactgccagggatgttctgataagtaggcaggtgttgccttaaaatatagttaaatcatgtgcccaggtgttaagcacacaaggatttctcaaccttcacaaccacagtaaaatctttgtgaaatggtcacatttgttggaaggatttggtgtgacaaatccaatatacatgattttgatttctcaaaaaataatatctgggctctgacagcagatcaaatcttgagtggctgcagtagagaagcagtctctaatcctgacaccttcattctataatttgtttcaatgaagaattctttaaagagtcaaccaacgtgtgacaacatttgaaaggctatttaatgaaaggcgtaccaaaagtccataagcttccctaaagtgcaccagac

SEQ ID NO: 573612 - DNA, 543 bp, Homo sapiens
tgctattttaggttacatgattactgactaatgcaacaaatttaaaaaacccaatatgttsacatctgtcaaagaattatcctcaggtatcattggagccttatgaaggcaggttttaccctaggccagtgttctaatcataggaatcttccgaaactgccagggatgttctgataagtaggcaggtgttgccttaaaatatagttaaatcatgtgcccaggtgttaagcacacaaggatttctcaaccttcacaaccacagtaaaatctttgtgaaatggtcacatttgttggaaggatttggtgtgacaaatccaatatacatgattttgatttctcaaaaaataatatctgggctctgacagcagatcaaatcttgagtggctgcagtagagaagcagtctctaatcctgacaccttcattctataatttgtttcaatgaagaattctttaaagagtcaaccaacgtgtgacaacatttgaaaggctatttaatgaaaggcgtaccaaaagtccataagcttccctaaagtgcaccagac

SEQ ID NO: 573613 - DNA, 543 bp, Homo sapiens
tgctattttaggttacatgattactgactaatgcaacaaatttaaaaaacccaatatgttcacatctgtcaaagaattatcctcaggtatcattggagccttatgaaggcaggttttaccctaggccagtgttctaatcataggaatcttccraaactgccagggatgttctgataagtaggcaggtgttgccttaaaatatagttaaatcatgtgcccaggtgttaagcacacaaggatttctcaaccttcacaaccacagtaaaatctttgtgaaatggtcacatttgttggaaggatttggtgtgacaaatccaatatacatgattttgatttctcaaaaaataatatctgggctctgacagcagatcaaatcttgagtggctgcagtagagaagcagtctctaatcctgacaccttcattctataatttgtttcaatgaagaattctttaaagagtcaaccaacgtgtgacaacatttgaaaggctatttaatgaaaggcgtaccaaaagtccataagcttccctaaagtgcaccagac

SEQ ID NO: 573614 - DNA, 615 bp, Homo sapiens
accaggaataaacttagaatgaaaacctctggcaaacaactaagtccctcatctgctctgtgggatcatgattagaccaataaatcaaactggttaccagcctaagcttttaagaatttgacaatcacctacaccacccacctcattttgtaaatgaggaaagtaaggcccagaaaagcaaagtgactagcccaaagccacacagctagtgtaatctcaacactcaaaagcaacagttattactaaactgtactatgtataaatgaatcactaaatagcctcttctattttattctattttaatatgccaaaatataaaataaatggtaaaatttgaggtatgaaattttcaaagttttccttctctgaygatataaaaatatatcatcataagcatttacttaaatgtttttgctcatacttgattcacaccatgtataatggatttcaagacgtatatgtgtctatgtatgtatatgtgtatgtatgtatgtatgtatctatctatcaactcattcaacatcccacactatgtctttcctggcacatattatgagaacattgaatatttgttgagttaatgaattttaaatcatatagatttattgccaaatt

SEQ ID NO: 573615 - DNA, 609 bp, Homo sapiens
aaaaactcaaaaaactcaccttgttgacttgcatttgattttgccccaaaggctggcacagtgggttcccatacttaaattatgttcttgctaatttatgaggcattccttgaatactctattccctcatatcaacccattactctctataatcttccttgctttttttcttctttctagaacttaggatttccttacagaatatgaaaaatttatttctttattgtatgtttcctccactagcattcaagccacacctttgcaggaattttgtatgttagttgcttccagtgcctacaaaacaatgcttctayacagcattatcaagagactcaattaatgtttgttgaattaataattagcaaatttatacaatggaacaccatttaaataatttaaaatggtggtgtaaattatatcgatcggtgaaaaacatgttattaggcagacaaaataattctccttttgtaaaattttacgtacaaatatataggtatttaaaaatttgacacatatctctatctacatttgtatatataaatatacatatatagggaacatgtaaatacaaataaatgaataaagtcacaaaggatatgaaccaaaatg

SEQ ID NO: 573616 - DNA, 609 bp, Homo sapiens
aaaaactcaaaaaactcaccttgttgacttgcatttgattttgccccaaaggctggcacagtgggttcccatacttaaattatgttcttgctaatttatgaggcattccttgaatactctattccctcatatcaacccattactctctataatcttccttgctttttttcttctttctagaacttaggatttccttacagaatatgaaaaatttatttctttattgtatgtttcctccactagcattcaagccacacctttgcaggaattttgtatgttagttgcttccagtgcctacaaaacaatgcttctatacagcattatcaagagactcaattaatgtttgttgaattaataattagcaaatttatacaatggaacaccatttaaataatttaaaatggtggtgtaaattatatcgatcggtgaaaaacatgttattaggcagacaaaataattctccttttgtaaaattttacgtacaaatatatagrtatttaaaaatttgacacatatctctatctacatttgtatatataaatatacatatatagggaacatgtaaatacaaataaatgaataaagtcacaaaggatatgaaccaaaatg

SEQ ID NO: 573617 - DNA, 619 bp, Homo sapiens
cagaaattaaaatgatctttatactatggtgtgttgtgtttttggtttggttttctgaaatttttttacagtgatgatatatttaattttcaataataaaaaaggaaagtttaaaaagaaaaccattacaaattataaatggtaaaaaatgaaatggagaacaaattayaagagcaaatttgtcaaataagggttaatataattattaataaataatttttgcaaatcaataagaagaggctcttacagatggatgaatgggcaaagataataacaattcacaaaacaaatattcaaaagttacaatatgaaaaatttttactacaagtagtaaccagaaaaatgaaattaaaataataccattcattggcctattaatttcaccattatgttcatcaaagcagccagacataaaagaattagctgtatgtaattccatccccgttattttcaaaagccgggagaaaacaaaaccaatagggtttaagggatcccttcaataaccaattaatctccaaaaatagtggcttcctttttaggactgggaggtatagtttctggggtgctcacatgttttatttctggatctatgtggtgattatgaaggtgtgtgctttat

SEQ ID NO: 573618 - DNA, 505 bp, Homo sapiens
cctctgaactttggagagtttgggagtaaaataatgctgataccatctaccatgtgaatgctataaacagcaggtggggagtaggcaaaggcacacagggttgaattctttgtctggagtacaaagactttgggaaaagatactgagtctgaaagtctgcaagtagaatcccagatggctggcaggccaaaattattcctctactacccacaagagcccagaataattaaaaccaacgccaatgacacgaaatgcaaactgtaagcaatccaaagtacatataaaaaggaaaaacagaaaggaccaactgttcagacaaaaaaaaaaaaatgtaataggtgtgaaagtacaagtctaacacttttatctgaagaacaaagaagtgtactgatttattttctttttccttcagcctactatgttcttcttccttttctccctgattcagaaaracaaaatgcttaaacaagactggttttactcctggcttttgaaggtagaaacg

SEQ ID NO: 573619 - DNA, 537 bp, Homo sapiens
cagcagctgctaaaaacattttagatatttccttatattcctgaatgaagaaatttagaaattggctgatttgactcttttctcctacactaaggaaaatgagagagagaagggaaatgccttgttctaagttacccatctggcaaatagcgccaaccaagattcccaagtctgtttctcctaagatgacattatccacttagattcttcaaagaatgaaataatattttttatttattatttttaaaagatacaagggtcttcattagctaaacattcattttacaatacaccacagtcactgagctgtataaggaaggaaaagtcgtcatcatgtgaaaacattcactaatgaactagtcacatataaaattagtacrtaaacactccttgccttataacataaagacctagccccatctattagacttggactggttatctgatgatgcaattcaattgtagagtagatagcaaatactgttaaagatgcaggattacactaacagtgatagcagaactctgagtcataaccaa

SEQ ID NO: 573620 - DNA, 573 bp, Homo sapiens
caatatcagctgaggagagagacagcgagagagagagagagagagagtgagagagagagagagagacataaaatcagcaaaacaaaaaacccaagagaaaaaatttttctctagaaatgagcttgcaaaccaaacttctataacacagggaaactaatactcagaaagawagctacaaatataaaagctgaaacatatattaactccagataaaatcagtgccacagaagggactgaaaatgtattatttatgactatcaaagagaaatcagaggaatgacattcataaaaatgaccacgaagttatggaagaaaaaaaaagtaaaaataaaatgaataaaagagaaagaaagtttttagaaatattaggaaaagtataataattatattaaaaaatatagcaggggcagaacttctaggttaattaagttaggtccactgaaaatatgctccttcaaaaaggcaaaaagatcttgagaaataaccaaagctttgtgacaaggatcttttcttccctagtaaaatggctggatgtgagtaaaaacagtgagtgtcctagcattttaatttgcc

SEQ ID NO: 573621 - DNA, 394 bp, Homo sapiens
  misc_feature 378, 379, 380, 388, 390, 392, 393: n = A,T,C or G
agcttatggagcaaattgaggtagatcccttcacttatgaaaatgataaattaattcagaattggggccatttttgccttgccatctatagccctacacacatgtggatagaaaagctttgggaattcctattctccttgggtgggagcttaaaatttattttcttaaaaaatcactacaagagtgacttagtggagtttcaaatgctgctgttaagtggaaaccctatcttaaggaaattaaagctgcaacagaaaaccaaataccrcatgtcctcacttataagagggagctaaacactgagcactcgtggacataaagatggaaacaacagacactgtggactactgggggggatggagggagatggggaagggnnntttttttncngnng

SEQ ID NO: 573622 - DNA, 528 bp, Homo sapiens
tcacattcttttttttttttttttttttggtacagactggccttgcaccaaattacagagaaacatactgaaaaatcagaaaatttttctaactttaaaatatcaagaaggtattatttgtgctctgatacgtttattaagccatggttagctgggtgcagtggctcatgcctctaatcccagcactttcggaggacaatgcgagcagatcacctgaggtcaggagttccagacagcctgaccaacatggcaaaaccccgtctctactaaaaatacaaaaattagccaggcatgatggcgggtacctgtaatcccagctacttgggaggcagasgcaggagaattgcttgaacccgggagggttgcagtgagctgagattgagccattgcactccagcctgggcatctcaagaaaaaaagaaaaaaaaagaaccatggtcactgcaacaccaagtttctcactaaggaagtctactccatctcctgacatctttgtttcttgtaatggcaacattctaccagtccacc

SEQ ID NO: 573623 - DNA, 602 bp, Homo sapiens
aaatcagcagtatcaagttgatgctttctaaacatcatactaacaagcttataattggccaagaggtcaggaaaggtataggtctgaaggaaaaacaacttagccagaactggctcaccattaagtagaccaaaggacaaattttttttaaaatagtgtttctcctcttttgagtgatttgtatgtgtattcacataacgaataaccaaccacaaacacttattttgggtatatatttgtgtggccaccagatatttcagtcaattcaattcaacacatacttattaaattgaaatcaatacccagagagtatgctcactaaaaaaaaagtatataaaatttatgaaatgtctcagaacatgagttctttcaaacaaccataccacaataacttctcacatgtctagcaactgattgacaagatcaagcttgtagactaccttaaaaaagtaagaagcagaagaaacaagacamaaatctctgaaaacccaaaagagagcttacaaaccagggctcccaaattgagcaaaaccagttataattttcagcaaatagggagctttacaagaaaatcttttaatgacaataataaaatatagttc

SEQ ID NO: 573624 - DNA, 585 bp, Homo sapiens
catcttttttaatgtatgatgtttgatttgggtttttatcacaagaatgaatgcaactcagattaataataatggaatgctcattcttagtttcttttctttctgtcatgcttgtggaagctgaaaataatatttcataaacagttatgtgagttcaatagactggaaattattatggctgaagaatatgtgtaaaccttacgggacatcccctgccccacatgataagtgtcaaaatcaaatttataactccaaagatactcttgctaagaaaataatagagttcctagtttaggagatataatatattttaaaataatagtactaaatagaaatytgaattttatgaacattctgaaatattaaagaggatatttcctaggttttgattatgcttaaatatacccagtctggaaatcaacacaaaattaccagtggatagtaaaaatcaattagagttctttcccaagtatcactcataaactactgacaaaacctgctctaattctcaagtgaagaaacttttaattataatatgatgtatgtgttcatgctgaatgaaattcagtatatcctgaaaacaag

SEQ ID NO: 573625 - DNA, 606 bp, Homo sapiens
accatttgttaaataaggtgtcattttccactttatgtttttgtttgctttgtcaaagatcagttggctstaagtatttggctttatttccgggttctctattctgttccattggtatacgtgcctgtttttataccagtaccatgctgtttttcagtgactatagccttgttagcacagtttgaagttggataaggtgatgcctccagatttgttccttttgtttagtcttgctttggctatgtgggctcttttttagctccccatgaattttaggattttttttctagttatttgaagaatgatgatggtattttaatgggaattgcattgaatttatagatagtttttggtagtatgatcatttttacaatattgattctacctatccatgagcatggattgtgtttccatttgtttgtgtcatctatgatttctttcagcagtgttttgtagttttccttgtagagatctttcacctctttggttaggtatattcctaagtatttttttttttgcagctgttttaaaaggggttgagttattgatttgattctcagtttggtcacttttggtgtatagcagtgctactgatttgtgcacata

SEQ ID NO: 573626 - DNA, 488 bp, Homo sapiens
tcctactggaattgctcttaattcttctagattttttttagcgctaaccataagaagtgtgttctcaatggccatgattgatcggctgctcacacattccacattttttctgcttcatgcatcatcatcagccatctccaacactccagtcctgaatctgtcctactttctgttacctgatttttgctggtgattcatgagccagaatagaaaaagaaaaaaaaaaaactccaccttggcttttcacartatagtatcccctggaaactctgtgagaaatctagttttggtcatcagactcatgcaaatgtaatattgattgacaatgatgtatatagatctacatagataacctgccttataaaaaccacaaaaatgttctattaatggcagaatgcatactgattataaactacttcagaatgatgtggaaacacttacgtaaatgcattttgttggacttctaattctctcttgtcactattatt

SEQ ID NO: 573627 - DNA, 606 bp, Homo sapiens
accatttgttaaataaggtgtcattttccactttatgtttttgtttgctttgtcaaagatcagttggctgtaagtatttggctttatttccgggttctctattctgttccattggtatacgtgcctgtttttataccagtaccatgctgtttttcagtgactatagccttgttagcacagtttgaagttggataaggtgatgcctccagatttgttccttttgtttagtcttgctttggctatgtgggctcttttttagctccccatgaattttaggattttttttctagttatttgaagaatgatgatggtattttaatgggaattgcattgaatttatagatagtttttggtagtatgatcatttttacaatattgattctacctatccatgagcatggattgtgtttccatttgtttgtgtcrtctatgatttctttcagcagtgttttgtagttttccttgtagagatctttcacctctttggttaggtatattcctaagtatttttttttttgcagctgttttaaaaggggttgagttattgatttgattctcagtttggtcacttttggtgtatagcagtgctactgatttgtgcacata

SEQ ID NO: 573628 - DNA, 599 bp, Homo sapiens
ttaaagtaaaatgatgtttacaaggtttgcaaagaagagaatttatgtggaatgaacaatatacaaagcaatatacttgaactgtgtttgcatggaaaatactttttytcattttctatatgctgttcaaacaactgagctattcattaaaatgatgtaataattatattagtcatttagcattgcacagataaaaccatgtaagttcaatatccattaaagttagaagattgaccacattcagctttgtaactgggggattttgcaggtacataaaaatgttaaaaggaattttaaatgaatgaaaacattccagttgaaaatggtaagaatgtgcattcagaattaaatgcactcttttccatacaatgactaaggaatacactaatgcaattgtaagtttagctactgaagcacctcttctggttcgaggacattttcccaaatctcaccacctaaaaaccccaaatttgtttcttcttctgactgaggtagttaatattttccagagaaacaccactcacatgtggtaaatagaggtaactaaaccactagagtaatgcttatggttttggaacccctacattttgaaagacttg

SEQ ID NO: 573629 - DNA, 599 bp, Homo sapiens
ttaaagtaaaatgatgtttacaaggtttgcaaagaagagaatttatgtggaatgaacaatatacaaagcaatatacttgaactgtgtttgcatggaaaatactttttctcattttctatatgctgttcaaacaactgagctattcattaaaatgatgtaataattatattagtcatttagcattgcayagataaaaccatgtaagttcaatatccattaaagttagaagattgaccacattcagctttgtaactgggggattttgcaggtacataaaaatgttaaaaggaattttaaatgaatgaaaacattccagttgaaaatggtaagaatgtgcattcagaattaaatgcactcttttccatacaatgactaaggaatacactaatgcaattgtaagtttagctactgaagcacctcttctggttcgaggacattttcccaaatctcaccacctaaaaaccccaaatttgtttcttcttctgactgaggtagttaatattttccagagaaacaccactcacatgtggtaaatagaggtaactaaaccactagagtaatgcttatggttttggaacccctacattttgaaagacttg

SEQ ID NO: 573630 - DNA, 599 bp, Homo sapiens
ttaaagtaaaatgatgtttacaaggtttgcaaagaagagaatttatgtggaatgaacaatatacaaagcaatatacttgaactgtgtttgcatggaaaatactttttctcattttctatatgctgttcaaacaactgagctattcattaaaatgatgtaataattatattagtcatttagcattgcacagataaaaccatgtaagttcaatatccattaaagttagaagattgaccacattcagctttgtaactgggggattttgcaggtacataaaaatgttaaaaggaattttaaatgaatgaaaacattccagttgaaaatggtaagaatgtgcattcagaattaaatgcactcttttccatacartgactaaggaatacactaatgcaattgtaagtttagctactgaagcacctcttctggttcgaggacattttcccaaatctcaccacctaaaaaccccaaatttgtttcttcttctgactgaggtagttaatattttccagagaaacaccactcacatgtggtaaatagaggtaactaaaccactagagtaatgcttatggttttggaacccctacattttgaaagacttg

SEQ ID NO: 573631 - DNA, 629 bp, Homo sapiens
aaaacaggaatcacaaatattaagtggaggagatatttaactctttcattcatgataataaggtaccttctagcaccttataactttgtatttatccaggaatgttcattcgacttttacaagattttttgattctaattaattagttaaggctaggcgtgtttcaaaatgaaacaaaaatagaaacagraatccttgtataagtgtttctagctgtatccttctagtacatttctcttttatttctataaaggatatatacaaatatgtaactttgacaaagaaaagcttttattgcatgagagaagggttactattttctagactttattttccctaaacatttgacagtattcattaccatcatgctaaaatcctgtcatcccagttacagtcctgtttgtttctagaaaggtaaatagaattgtaatgatgacagtttctcttttcacccccgtctgtccacttccgctcccctcttgttagtttccattatttgaaatatttaaaatgttgccatttctctatagtttccaatctctggctctattaaccatttagcctaaaattgatgataatgaactaatagtgtcagcttcccttctcagtcataaagcctttgtacttcc

SEQ ID NO: 573632 - DNA, 545 bp, Homo sapiens
ctgttaaagggggctaggcctaggcagcgaacaactccccccagaaacatttccacatccccagcaagagagtggccactggaaaaaagtctccatccacgtccacaaacagtggctggatcttccaagctaggcaactgctgttggacagatggagcccattgaaaaaaccctataatttacagtgtgaataaaatctgcagtcctaaataacattttcaatacaataacttatgaatgatttaaaaatagatctcattcgtcatctgtataggctttttggaagtaatgaggatatttataggaaaatcattaattaaaagatagagcagtttgaaatattgggcaactgaatagaataaaccactgyagtaccagaccaaagccaaacaaaaatcttaattacacattaatcaggggcacaaaaataatgtacaggatgcagaggtcaggaaagactaaaagatagctcaggcctgtgaaataagcagtgaaaaagaactcaaagatttgaattcaaagttactagctcaatatggtagcca

SEQ ID NO: 573633 - DNA, 554 bp, Homo sapiens
aaatttcaataatttccatgactttggtctctgaatattactgagtaaatctcttctttaccaaattgtagataaatatacaaaataagaaacattacttcttattttgtatatttatctacaatttggtaaagaagagaatttctatatacaagaagttaattggtcatatcagtaagctgaattccagtttttataccatacagataatgaagaaaaagagattcagaaacatctgaaaggatctgttcatcactaaaagaagtatggtggtgaatgatttctaagaatgtatagaaactaattcrcactctttatgcaatttagtttctgcaaagtcgtttgttttctttttaaggaccaaatcctatggtaaatacagaaatgtattaattttacttactgttcacaagttcaagaaaatactaagttgaaagcaggaatacattccaaagaagaaaataaatagatacccacatattgataaattgaagaacagtcagtaaagggaaaattctaggaagaatttatagtaaacttcccagcttgtattt

SEQ ID NO: 573634 - DNA, 571 bp, Homo sapiens
ttctcactctagaaagtgtcatggtttgcactaaaaactctatcgtgacttcactaaggtctcagaactgagatgcaacacaggaggaaagcgctgaatcagttgaggttaagagttttctacctggaaaaataagaagttaaatctaaaatggaaattaaattcattaatagagaaaataattatgtttttggcactcctgatagtgtgtgctgacatttcaaatctttcctaatttaaaaagcactcaaacctgagaagtttacacactcaagtccatctcactaagattacttcaatataataggatatataaagttttaatattttatgtacttaatttgtccctcaactttttagagtgcctttattctattagcaaatatagwattcactaatttattgttataatatggtggagagcaagggatgctttacaaaaggcttcacaagccctgctaagggaatttggatggtgttcaaggaagtcaaataataggtttgtgttgtagagttggcttgagcagcagtgtggaggatggactggaggcagtcaggagtccgctgctgc

SEQ ID NO: 573635 - DNA, 666 bp, Homo sapiens
gtttgaaaatctagattaaacaagtaattctctggaaaacttggtagtgatagaaagagtaagtagacaattatagtagaaatagggaaagaaaagccattagacaaaattaaatgtccatttatgtaaaaatacttaataaaataggattgctggatatttctttgatatgacaaaatacataarccttggctccaaagccaacaacctacttaattcagaaacatcagtgatttcccatcaaaataaggaaaacaacaaggatgcccactgttaccaacaactatttaacattgagttgaacatatttaccaatgcaattaagccaaatggaaacaccaagtcctgggtttaagcgattctcctgcctcagcctcccgagttgccgggattacaggcatgtgccaccacgcctggctaattttgtatttttggtagagacggggcttctccatgttggtcaggctggtctcgaactccaacctcaggtgatccacccgcctcggcctcccaaagtgctagaattagaagcgtgagccaccgtgcctggcctgttactattataatatcattcattctataaacaatgagtgctactgggtgacagagcatgtgggaggtgctgggtatatagcagtgatcaataatctttgtattcatcaggtc

SEQ ID NO: 573636 - DNA, 666 bp, Homo sapiens
gtttgaaaatctagattaaacaagtaattctctggaaaacttggtagtgatagaaagagtaagtagacaattatagtagaaatagggaaagaaaagccattagacaaaattaaatgtccatttatgtaaaaatacttaataaaataggattgctggatatttctttgatatgacaaaatacataagccttggctccaaagccaacaacctacttaattcagaaacatcagtgatttcccatcaaaataaggaaaacaacaaggatgcccactgttaccaacaactatttaacattgagttgaacatatttaccaatgcaattaagccaaatggaaacaccaagtcctgggtttaagcgattctcctgcctcagcctcccgagttgccgggattacaggcatgtgccaccacgcctggctaattttgtatttttggtagagacggggcttctccatgttggtcaggctkgtctcgaactccaacctcaggtgatccacccgcctcggcctcccaaagtgctagaattagaagcgtgagccaccgtgcctggcctgttactattataatatcattcattctataaacaatgagtgctactgggtgacagagcatgtgggaggtgctgggtatatagcagtgatcaataatctttgtattcatcaggtc

SEQ ID NO: 573637 - DNA, 624 bp, Homo sapiens
cattgaacaagtaattacagtcgcatgtgatgaatgtcaagctgggctgatacacagttcttttggaacaagcagctaggggacactggaccattttgtttcttgagagaactagagtgtagctgatagactctgctcaaaaattgtctattcaattttcaggtttggatgttgacatatatatactttacacatcttgcatcttttaatcctcaaaacgaccctgcygaatagatgcgtgttttcccatttatcgaccagaaaatttaaactcaaggtagctaaattaacatgcccttttcacacacataataaaagctaaggctgtaaaaatggacctgcttcaaaaacaagctgattttaggatttttttttaaaagatgagtaacagactgacaaagggagatcactaaaggaacatttcaatggttaattacaccaatataaaggtgaagggttatacctaaggtcacgtaggctttggttttggttttatagttaaattaacataaaaatgaagtcttactcttaggctaacttaggctttggttttacaatagatcaaaggtgatctgttgcccagactttggccttatttttgtgcccaactctataatacatatc

SEQ ID NO: 573638 - DNA, 595 bp, Homo sapiens
cacataataaaagctaaggctgtaaaaatggacctgcttcaaaaacaagctgattttaggatttttttttaaaagatgagtaacagactgacaaagggagatcactaaaggaacatttcaatggttaattacaccaatataaaggtgaagggttatacctaaggtcacgtaggctttggttttggttttayagttaaattaacataaaaatgaagtcttactcttaggctaacttaggctttggttttacaatagatcaaaggtgatctgttgcccagactttggccttatttttgtgcccaactctataatacatatccaaattcaggtgcctaaaccgaaggccccagatctaggtcccagggtttcccagagttattttgcccatctgtgcttatttgctttctctttcattcatgcagatactttcctgagtgaacttttggtgtcccctttcataatataagctccagaaagcggaagttcaattaaaccagaaaaacctgtttaattgaagccaaccattgtttattgaacactgattggtggaaagcactgtggtaagtgttgaggaaacaagcttggtaagacacag

SEQ ID NO: 573639 - DNA, 587 bp, Homo sapiens
tgtaactttaactgtttagtgtattaatgcctcactgggctyatggatgctacatattctccactacttgtttactagcttgtcaaaattattcaatatatgcagtgtcacaaagcacatggtcacatctcatatgtctgcttcaagggcaggaccaacgtgacctttactttttcttttacacgggataaaatcattctttaggaacaatgtctatttgcacagctacccaatctgctattgaagcagtctcaatcttcttcaatattgcttgttaaatgtttatagttaattttatagtaaagggctagatgtctgaatattttcaaatgcattctctattggagtgggttttaactgttcttctttcactatgttttataagatcgaaaacagacacatagaaaataatgaagtggcttaaaaaattctttcttggataatgaaaaacctgtatcatatagaagaatagaagactgcttccaaacatcctctgacttggaagacagttacacatttgtctgttacgtatttctcatccagaagcaaatattaaccagtcaacatcgaatgccatttgatttcat

SEQ ID NO: 573640 - DNA, 587 bp, Homo sapiens
tgtaactttaactgtttagtgtattaatgcctcactgggctcatggatgctacatattctccactacttgtttactagcttgtcaaaattattcaatatatgcagtgtcacaaagcacatrgtcacatctcatatgtctgcttcaagggcaggaccaacgtgacctttactttttcttttacacgggataaaatcattctttaggaacaatgtctatttgcacagctacccaatctgctattgaagcagtctcaatcttcttcaatattgcttgttaaatgtttatagttaattttatagtaaagggctagatgtctgaatattttcaaatgcattctctattggagtgggttttaactgttcttctttcactatgttttataagatcgaaaacagacacatagaaaataatgaagtggcttaaaaaattctttcttggataatgaaaaacctgtatcatatagaagaatagaagactgcttccaaacatcctctgacttggaagacagttacacatttgtctgttacgtatttctcatccagaagcaaatattaaccagtcaacatcgaatgccatttgatttcat

SEQ ID NO: 573641 - DNA, 587 bp, Homo sapiens
tgtaactttaactgtttagtgtattaatgcctcactgggctcatggatgctacatattctccactacttgtttactagcttgtcaaaattattcaatatatgcagtgtcacaaagcacatggtcacatctcatatgtctgcttcaagggcaggaccaacgtgacctttactttttcttttacacgggataaaatcattctttaggaacaatgtctatttgcacagctacccaatctgctattgaagcagtctcaatcttcttcaatattgcttgttaaatgtttatagytaattttatagtaaagggctagatgtctgaatattttcaaatgcattctctattggagtgggttttaactgttcttctttcactatgttttataagatcgaaaacagacacatagaaaataatgaagtggcttaaaaaattctttcttggataatgaaaaacctgtatcatatagaagaatagaagactgcttccaaacatcctctgacttggaagacagttacacatttgtctgttacgtatttctcatccagaagcaaatattaaccagtcaacatcgaatgccatttgatttcat

SEQ ID NO: 573642 - DNA, 448 bp, Homo sapiens
tcatcccctttggcttggaaaacctatgactacccacactcaggggccatcggcatggaaagtattakttcctgtgcagcccaggagctctataggaagcggtggaatcccaaaggtgggttgaaaggttcaaatcatagccaagaaaaataacttcagtcactgtcaacggtcaatatcatttaaatctctagaaatcttatgaaaaaaagataaaaattaaaaataatggctttctttagggtccttcccacagcaatgattcagaatactacatttttagacaggggaggagaaaatcataatgcccggtagaggggagatgtaattttattatctggcaagatagcggcttcatcattaaaaaattcaaccaactagaatacagcgtcctttgacctagcagataaaaggtcagacagcaattttgaataataaatgagacctg

SEQ ID NO: 573643 - DNA, 540 bp, Homo sapiens
aaggaaagattcactgggagacaaagatgcagacaaagaagaaagaaatagattctgggggaaaccgggaaatgtagggggagagagataaagagagagagaacatgtgcaagtaagcattttggataaagaatactcaacttttatatcagttttctccttctggctcatttgcctctttcccacttttatctctcgtccttcatgttgtaataaatatatttttttgtttgtggtattctttgtagttttgttaatatagcaaaccagctaatgttttatatttcactcgactctcctactatttcaccctatcacccataattcaattaaattaaaatgaactttgatttatttgttttacattcagaccacttatttgattattttgctgggtcaatggtttgccatttaaaaaaatatatatttctcagccctttactgtagtattaccttgcaaagacaaagggtttcacatccattacctaaaaagtcttayagcactccttcagaagaaagggctattaattttattttaca

SEQ ID NO: 573644 - DNA, 529 bp, Homo sapiens
ctttccacagacattgactgacacagctccacttctactataaatgtgtcctagaatctattgctcattctatagtaggaattcatagactccaatattaattttaacattttatccagtyttaatggcaattatccttaataattatccttagttgtcaacattaaaaacattatccatgacatctttaattccggtttgcctcgtcctatcacctggcagatttttggccttgatccagaagactccaaccattcaagccaaacatatttacaactgtggtataagaaagtagccctgatgtttacaaacaaaaacgaattctgaaaaatgtgctctaaagttaatactatgtatcacattagacaattgaaacttcattaaatattactccatagatactatcccccatctttcatctttatggaaatggcttaggggtggagtgaaggagaagcaaagattatttgattatgtcacaaaatgatgatttagcaattcaacatcccattaaagtatgtttaatggg

SEQ ID NO: 573645 - DNA, 277 bp, Homo sapiens
gcttagaaactatgctgtaatgtttaattccttttcccactgtttactagctgtgtggtcttcagcaaattactcaacctgtctgtgtttctgtttccttttatayctaataaggataaaatctatcctataaaatagctgtgaagattaagaaactatatgtaaagtactaggcacagcacagccataaaatgttcagtaaatgttagctgttagaagagtatgtatttaacaaacacaaatgtatatgaacgcaaaatttaaatgaattttaaaa

SEQ ID NO: 573646 - DNA, 523 bp, Homo sapiens
gaattaaaaaaaaaacagaatttttgagtcaaagggtatgagcatttaatatgttggtagattctgaaaaaatgttctccacagaggctgtaataatttgcaatgtcatttgcaaagcataagcatgactgtttccttcctctcaaaaaagcagttagactttatctttggaacactagagcataaatcaagggttttaagagaaggaacgctctgattagggttacattttagaaagctatattctacagcagtgtggaaaatggatggattagagataacccggtgttgattatgtgggagagcaaggatttttactgagcacgtattacatgtcagattttctgctaagcacttacactgcattatcacatttattacctataaccacactaactgttattactggtttcagacaaagacaaaatgaaacagaggctcatagttaattacttgtccaagtacatgctggtagtagyacatggcaaaaccgggattcaaatccaagcaagtattactatta

SEQ ID NO: 573647 - DNA, 594 bp, Homo sapiens
tatgtgtagggttatcatttctcatgagttaaaaactcagctgctatcaatgtaaacatacattataagtatatataccttgaacacatcattgatacatacaaatttgtttccttttgaagtttaccacaaagaatggtasgatatatactatatatatgacataaattttaattatgatatatttagcttgtaaaataatgtttaatttaccagtttttcttagagtaattgggagaaatggaagaatgcaaagtatttaggtgtggtagggagtttactgaaaacataatactaatctaaagttttctttcctttcacaggacttatggtctgtttctttctgcacatgagatcattctctttctctgaagaccagtcttctgtgatttgaaatacaagaagccagcctatccctgcctttatgtggtcattcttgtctacatcaagtactatgttgagcctctacactcccagcttccaagacctgggacacactatttcattttatcctaggtctccacccatcacaggtaatattagagatgacaaggattgcataactagcagctcatgtgtatgcactgtaggtac

SEQ ID NO: 573648 - DNA, 610 bp, Homo sapiens
tctacataattacacaaaaaaggaaagggaaaaattgacaatgaaacccaaacttgtcaataaatggtaarcgattacagatgaataaaaggagatgaaaaatcggaccaaatattaacttatacaaattggaaaagatttaaaaactgattcaaagaggatgggtgattgagataatgaccaaccataaagaaagagaaataacctcaaatgggcatgaagaaccacagcaactcagaaggtgttactaatgagatttgaaatttgatgatcctaatgggcatttggtgttgtttggtctaaaagcaaggaggcaagctttcccttccctatgtaatgtcaacaaaatttcttactccatgtaggacatggagcactaatggttcatctaaacaagctacatttatgaaggcagaaaaaaattataaaacaatttaaaaaattaagaaaaaatactgctctacaaataaaacactaaatagatgctttgacaaaaggtggacacagggtttctatgcacctcctgcttttgtcagtttctgctttgcactgaaagtgtcttgcatctcttaaaataattttaatggtctctctctttcagaaaaaagct

SEQ ID NO: 573649 - DNA, 616 bp, Homo sapiens
tattgggtgtattagtctattttcacactgctataaagaaatacccgagactgggtaatttataaaggaaagaggtttaattgactcatagttctgcaaggctggggaggcctcaggaaactcacaaacatggcagaaagtgaaggggaagcaggcaccttctttacaaggcggcaggagagagaagcgcaagcaggggaaatgccagatgcttacaaaaccatcagatctcatgacaactccctcactatcatgagaacagcatggaggaaaccgcccctgtgatccaatcacctccctctcttgacacgtgggaattacagatccctccctcagcacgtggggattacagttagagatgagatttgggtggggacacagagtcaaaccatataattgsgctattgggtactcactttcctgtgatgcccccatgcatataataaattggtatgccttttctcctgttaatttgtctaccgtctgtctatttcagcagactcacttatcaaagctccaaagggtacagagaagtttctcttaccccttcaggctctatcagcctaacagaaactctaaagcaaagaatgtttgtgaaaggaggtcaatatgggcc

SEQ ID NO: 573650 - DNA, 543 bp, Homo sapiens
ggtattaagagttctcaaaaactgatttcaatgtactttaaatactaatggactattggactttaaggataacatgtatcaacaattagcatgttgtaagccaaagttttgaaattatgttcccaatcataaatctaatcaccatcataagtagattacatgaacctatctgtggttctctttccaacataattctcacttctagttttctctttcaatttccagattgggtaaccagtccatctaattttaaaattctaagatgtactgtgtttattctgtactgtaaaataatttaatttcagttgtaaattttagagttttctttgatgacctttttaggcaaggcttagtagttcagtaacatatactcttcatttaatcagccagcaatatttactctctgctaagcccaaagctaagctgtgaggacataaagatgaaagtgaatgaataggataagaagccccttttctaayggtggagacagaatggctgatgatttactacatggactgggaagtgctataatacctaaagggt

SEQ ID NO: 573651 - DNA, 628 bp, Homo sapiens
agcaaaacattttgtcataacaacagaaaaaaaagattctctagaagaaatcaattaacagataytggatatgcagtctctgcaaagctggggtgtagcattgtaagttattccaataaagatgtaattaatattgaagacttttatttggaatatgaattaacagaaatataagttttattgcttaaaaatttaaaaggttccttttgggaaccgaaaaagccatctggtaaatgctaaaaatgtacaagatttggcatacacatacgagttgaaaggaataagggttgggggtacaggggaaaaagtggaagaaatttaaaacttcatttgtgtagattaattttaattatctaatagacaatctcatttaaatatcaaggtattcatgtgttaaagacaaatttgtatatgataagcaaataaataatttagcacctagaatacattacctacttttcaaaaagcattgtagtcatttaggtttaaaatatatcccatcttatttttagctccttataaaattgagagagaaatttcatcatttcccttttgcccatatacattcttctaaacttctttactgtttctgccctctctgtatcatcttaaagattgcatcacctta

SEQ ID NO: 573652 - DNA, 628 bp, Homo sapiens
agcaaaacattttgtcataacaacagaaaaaaaagattctctagaagaaatcaattaacagatattgratatgcagtctctgcaaagctggggtgtagcattgtaagttattccaataaagatgtaattaatattgaagacttttatttggaatatgaattaacagaaatataagttttattgcttaaaaatttaaaaggttccttttgggaaccgaaaaagccatctggtaaatgctaaaaatgtacaagatttggcatacacatacgagttgaaaggaataagggttgggggtacaggggaaaaagtggaagaaatttaaaacttcatttgtgtagattaattttaattatctaatagacaatctcatttaaatatcaaggtattcatgtgttaaagacaaatttgtatatgataagcaaataaataatttagcacctagaatacattacctacttttcaaaaagcattgtagtcatttaggtttaaaatatatcccatcttatttttagctccttataaaattgagagagaaatttcatcatttcccttttgcccatatacattcttctaaacttctttactgtttctgccctctctgtatcatcttaaagattgcatcacctta

SEQ ID NO: 573653 - DNA, 566 bp, Homo sapiens
attacaagacagcaaaacattttgtcataacaacagaaaaaaaagattctctagaagaaatcaattaacagatattggatatgcagtctctgcaaagctggggtgtagcattgtaagttattccaataaagatgtaattaatattgaagacttttatttggaatatgaattaacagaaatataagttttattgcttaaaaatttaaaaggttccttttgggaaccgaaaaagccatctggtaaatgctaaaaatgtacaagatttggcatacrcatacgagttgaaaggaataagggttgggggtacaggggaaaaagtggaagaaatttaaaacttcatttgtgtagattaattttaattatctaatagacaatctcatttaaatatcaaggtattcatgtgttaaagacaaatttgtatatgataagcaaataaataatttagcacctagaatacattacctacttttcaaaaagcattgtagtcatttaggtttaaaatatatcccatcttatttttagctccttataaaattgagagagaaatttcatcatttcccttttgc

SEQ ID NO: 573654 - DNA, 628 bp, Homo sapiens
agcaaaacattttgtcataacaacagaaaaaaaagattctctagaagaaatcaattaacagatattggatatgcagtctctgcaaagctggggtgtagcattgtaagttattccaataaagatgtaattaatattgaagacttttatttggaatatgaattaacagaaatataagttttattgcttaaaaatttaaaaggttccttttgggaaccgaaaaagccatctggtaaatgctaaaaatgtacaagatttggcatacacatacgagttgaaaggaataagsgttgggggtacaggggaaaaagtggaagaaatttaaaacttcatttgtgtagattaattttaattatctaatagacaatctcatttaaatatcaaggtattcatgtgttaaagacaaatttgtatatgataagcaaataaataatttagcacctagaatacattacctacttttcaaaaagcattgtagtcatttaggtttaaaatatatcccatcttatttttagctccttataaaattgagagagaaatttcatcatttcccttttgcccatatacattcttctaaacttctttactgtttctgccctctctgtatcatcttaaagattgcatcacctta

SEQ ID NO: 573655 - DNA, 523 bp, Homo sapiens
agttccattttttccacctccttaccatcttttccgcctcaatagtggcccatcctagtgggtacgagatggtatctcattgtggttttaatttgcatttccctggtgattagtgatattgagcatcttttcatgtgtttattggcctcaggcttgttgttttttcataaaagaatcatctgtyttttctccagggctaataagagcagttaccagcatttttggaacaaagcagacggaagctggggtaagtgtgtggccatcagtgtacagattttcacccatccctcctctttcaggatgatgcacctgctcttggctggcctagtgtccctaagtccagaatccctcttgttcaacctgttcagagagggaacatctaggtgtctgctgggtgaggggaagagtaactgcttgtatgctaaatgggaatgggattcaaggaagttaactgtttctttcaaacaattttcctgtttcagccacacttgtacccccacttttagaggtcacagttgaccca

SEQ ID NO: 573656 - DNA, 595 bp, Homo sapiens
tctttaaaccacggtttcttgagagagaactgttaagtgtcttgtctattttctggtgattagtttagttaaaaactataaaataaaatctacaggtcacctaaacaggtacacttgaaactgaacacaccaaggatgccttttgtagagtcgatcttccactatatcttcagyacacctggaataccacatgtaacaatgtaccacccaacatatgggccaagtcatgacaccacagtcagtcattatcactgtgctttgcccctaaaccaaaggtaatgtgatcccattacactttgtgccactagtgtgcttaaaagatttcccacaccacactagagagaaagccccagacctcactaccacatacgaggccttctatgatgtgtcctccattacttctctgctccttgatcacacgtaccacacaggcctttcctaagtgacttctgtggccataaagaagaactcacttactcctggagatcttagagtaaatgaaataaagatgcacttactacaaataatggcagtcagggaagagtttccctgtagggtagtcacaaagcctttccacaagtagatatccttctgg

SEQ ID NO: 573657 - DNA, 648 bp, Homo sapiens
attctgcatttcctttagtaagagaagcatgatttatgagaaaagaataaaaatctaagaaaatcacttagcaaattatttgatttttagwtcaaactgatttagggcaaatttcttccacgttgcaagtatggaaaacgtagcttactggataacagcacagtatttaggagaatatctaggtttgcttccctgtttttagtaattttgtgtctgtaggcaagacacaaaacctctcttaagtcttagtttattcattttgaaaacggggtagtataggaagtatgtttcaaagagtaagatgtataccactggtggcatttaagatagctggtttggcaaggtgggcagattgctggagctcaggagtttgagaccagcctgggtaacatggtgaaaccccatctctacaaaaaatacaaaaattagccaggtgtggtggtacacatctgtagtcccagatacttaggaggcagaggtgggaagatcacctgagccaggaagactgaggctgcagtgagacaagatcacaccattgcactctagcctgggtgacagagtgaggcactgtgtcaaaaagaaaaaaaaaagaaagatagctggtgtggtgataaactcatatttaaaagtgtatttcaacacttttaa

SEQ ID NO: 573658 - DNA, 581 bp, Homo sapiens
aggggagggacaggagctcatagaggacaaataagcagagttgatgaaattatttatcatatacaatttgccataagaatattttgcaaaatgacatatgttgcaatgattaggctaaggaaatctgcctatgaaatttagaggaattactacacccagtgaatagcacctctataatcatattacattttgtcttaggacattagaaataaagataacagtttaatggttatgtattctaaaaattctatcaaccagcctgggcaacatgttgacatcccatctgtactaaaaataaaaattaaaaaaaaaaaaaaactagcttataatggtggtgcttgcctatagtcccagctactcaagaagctgacgcaggaggatcattttaktccaggaggtggaagttgcagtgagctatgatcatgccactgcactccagactagtcgacagagcctgcaccccccacccccccaaaaaaaatcctatcaagtaaggcactacatgccactgtaatgaaagtataaaaacatttcctgtaattttactaagttcttgtgaatagtttttttaaaataagcaa

SEQ ID NO: 573659 - DNA, 501 bp, Homo sapiens
tccaagaatgactcctgttttaagatttaacatttcatatgtagtaacattgctcctagtcctgaataaattaaaagaaaaccctttgtgagagataaaagaagtacttaacaatttaaccacctgtaatatgtaaatttataacatgttttcctgacaaaaacacatatttaatcacatgataaattaatgtattcatgaaaagcttacaataaagttgaaaattaaaggtgtacttttttttacagtttttaatttttttaagtaacagctaacattacgataaaaatcatagaacattttacaacataaatttagactcacttgttggccctaaaccataaacattatcattaggaagtgacagtgacgaagtttgttataaaatcaaatgatctaamcataaaaatagtttattttttatatgatacttctgttgcccagaaaaggaaaactggtacatgacttttatcaaggtacaaagtaaaagcaaatttaccc

SEQ ID NO: 573660 - DNA, 501 bp, Homo sapiens
tccaagaatgactcctgttttaagatttaacatttcatatgtagtaacattgctcctagtcctgaataaattaaaagaaaaccctttgtgagagataaaagaagtacttaacaatttaaccacctgtaatatgtaaatttataacatgttttcctgacaaaaacacatatttaatcacatgataaattaatgtattcatgaaaagcttacaataaagttgaaaattaaaggtgtacttttttttacagtttttaatttttttaagtaacagctaacattacgataaaaatcatagaacattttacaacataaatttagactcacttgttggccctaaaccataaacattatcattaggaagtgacagtgacgaagtttgttataaaatcaaatgatctaaccataaaaatagtttawtttttatatgatacttctgttgcccagaaaaggaaaactggtacatgacttttatcaaggtacaaagtaaaagcaaatttaccc

SEQ ID NO: 573661 - DNA, 556 bp, Homo sapiens
ttttttatatgatacttctgttgcccagaaaaggaaaactggtacatgacttttatcaaggtacaaagtaaaagcaaatttacccattatgattagggtattcctgtaatatatatcctattaagctattgctgttamttctgctttcagttttaattgcttaacttcaaaacattgttataaataatacaagctgttcttctagcaaatatttatgattataataggatctagaagtccttcaaacatttgacaattataagaggaaattgatagcagaataggtcagaaacagggcacttggctcagctcttgaagagatgatatactgtgaacttacattttcaatactctctaagtagcgatgctcctcaagttatggttttgttacttctggataaacctatcctatgaccttttcaacttacagtgggtttagccagatataaccccatcataagtcaaggagactagtgaatgtctatcacttgtgcaccatgatataatcgaaaatcgttcagttgcaccaccataagttggagactatctatagtag

SEQ ID NO: 573662 - DNA, 442 bp, Homo sapiens
gtgcctattaatatctaccatatgagaccagcctggttgacatggtgaaaccccgtctgtacaaaaaatgcaaaaattagcctggcttggtggtgcgcacctgtagtccyggctactcaggaggctgagacaggatgattgcttgaacccaggaggcagaggatgcagtgagcccagattgcacccctgcactccggcctggatgacaaatatggtatatatatatataccacttctgagatacatatatattaagtattatatatgtttcttactaacatatactgctatatatatatcacaatattggtaaaccatgctgatttatgtatctcacatgatgggatatattttattacttattcatgatgaacaattttataacactgaagctatttcattttaaatttgtcatacatgttatttgatatcactggttcca

SEQ ID NO: 573663 - DNA, 442 bp, Homo sapiens
gtgcctattaatatctaccatatgagaccagcctggttgacatggtgaaaccccgtctgtacaaaaaatgcaaaaattagcctggcttggtggtgcgcacctgtagtcctggcyactcaggaggctgagacaggatgattgcttgaacccaggaggcagaggatgcagtgagcccagattgcacccctgcactccggcctggatgacaaatatggtatatatatatataccacttctgagatacatatatattaagtattatatatgtttcttactaacatatactgctatatatatatcacaatattggtaaaccatgctgatttatgtatctcacatgatgggatatattttattacttattcatgatgaacaattttataacactgaagctatttcattttaaatttgtcatacatgttatttgatatcactggttcca

SEQ ID NO: 573664 - DNA, 599 bp, Homo sapiens
catggatatagataaacatacccaaaggggttgctttgagtgagaagagatgatggtcaaggatgaaaccaagtaaatattttgtgttaaaagaagacccaggagaagaagctggtgatataatcttaatgatataagctagtgatataataaaaataagtataatattcaaaaatatgrgtattatatgtatgttgacaaagaatacaaaagaaaataattttaacaacagatttctcaatagccaagtccaccagagatgtcaggtagacaaaaactgaaaaacaaccagttagttgagcaatttcacgagaacatcaatcttaataaaagcatttcccataaaatggtaaagtcagaagcaaacttctcaatatggtaaaagatttctgggaggcaaagaagtggaaagggtagtttgcaatttcaagatgcttgttgatgtgtgacagagtgggaaagtttttttcctatgtaatttgatatgcctattggcagaaaagaaaatgatggcaaggagggagattttgaataggattcaaaagagaggcaaattaacaaatctgagatttttgaggaagggaatgagtccagggaaa

SEQ ID NO: 573665 - DNA, 575 bp, Homo sapiens
aattttgggtttggtttgctcttgctcttcttattctttatgacccaatgttaggttgtttatccgatcagataaattgactgtaatgcatacttcagtatgtcaattgcatttttagctccaaaatttttgcttgattttaaaaaatatttttctctctttgttaaatttatctgatcagattctgagttccttctctgtgttatcttaaatttcattgagctttcccaattcaagctatttttgaattctctgtctgaaagatcacayattctgtcactctaggattagtcactggtgccttaggttgttcgtttggtgaggtctgttttcctggatggtcttgatatttgtggatgtttgttgatacctggacattgaagagttaggtgtttattttcatctttgcagtctggacttatttgtacccatccttcttggaaaggctgtccaagagttcaaagggaattgtgttttgatcaaaatgtttggtcactgcagctgaatctacgttgagggcaccccaagccgagtaagtatgtggcccttgcaaattcatagaggtactgccttgg

SEQ ID NO: 573666 - DNA, 608 bp, Homo sapiens
ccaaactatagcaagctatcattgcatcctgggggtaaatcacatttgatcatggtgtatcatcctttaaatgtgctgctgaattttctttgctagtattatgttgaggatttttccatcaacagcaatattagcctgtaatttcctttattttagtgtccttgtctgactttgaaatmataataatgcttgcctcatgtgatggctaatactgtgtcaacttgattggatggagggatacaaagtattaatcgtgggtgtgtctgtgtgggtgttgccaaaagatattaacattggagtcagtgggctggggaggcagatctacccttaatctgctgggcaaatctaatcagcttccagcgaatataaagcaggcagaaaaaggagagatgggcctagactcccagcctatatctttctcccatgctggatgatccctgccctcgaacatctataatataaaggagagtttattaagtattatatatattacatatttcatatatatataggtgtgtgtgtacatatatatgtatatatatatatatacaccctattagctctgtccccctaagataaccctgagtaatacacctcataaaaggaat

SEQ ID NO: 573667 - DNA, 640 bp, Homo sapiens
ttctcagtagtttgcatatttgaagatgttcattatggcctttttcataatagctaaagattgaaaatattctaaattttcaaaactaaacaattgaaataacgaagtattaaaaatagaattgagcatggtacttaagtgattataaaattatgcttatcatacttgaaaacactcactgtcttctggttacagtaatatggcagattaatattaggttgctgcaaaagtaattgtggttcttgccattacttgcagaaaataattacagcaaaagccacaattacttttgcrccaatcaaataaaacctgaaaactatcccctaggtacaactaataatcccagaagaagtacatctttttcaattgtttaggggtacaatcaagtatacaagaaaaaacaatttgtgctccaatagtaaagaaagtattgaaaagcagagtaattaatatgaaaacctagaaggggatttatttttattttattttattttatttttgaaatggagtttcactctgttgcccaggctggagtgcagtgggagatcttggctcactgcaacctccatctcccgggttcaatcgattctcctgcctcagcctgccgagtagctgggattacaggcacctgccaccacat

SEQ ID NO: 573668 - DNA, 582 bp, Homo sapiens
catgttgtctataggcactttttctacagtgttaacatcacctttatagtcactagatcacaataacctggattcagaaccatttcagctatttcaccaccagccagtgaagaaagtattgtagcctcattatcagtgttaaaacttcttctatatctacttcttccagcttacttaagagctgtgaaggtacattttttttgcatgtgtgattaggtcaatcatctttttcctcacttggtggacagaatcctccaaaatcaccaccttgttcatcattatcattgtacatagtgacaagccagaggttgtgccagacatgcatgcacaactgtttctttagtcactgtgttctaagcattgacaacagcacatacaccattctttatgctaaactccttctgaaaactttcatacccatgcctctgttcactattactagtatgctattcaagaaggtgtttttatatttactcttcattaatctaakgatattccagtcatatggctaaattaatggagtcacatttgataaaaagtacatggcataaactttatttttatgagaatttcagctgaaag

SEQ ID NO: 573669 - DNA, 607 bp, Homo sapiens
gcatgcacaactgtttctttagtcactgtgttctaagcattgacaacagcacatacaccattctttatgctaaactccttctgaaaactttcatacccatgcctctgttcactattactagtatgctattcaagaaggtgtttttatatttactcttcattaatctaaggatattccagtcatatggctaaattaatggagtcacatttgataaaaagtacatggcataaactttatttttatgagaatttcagctgaaagatgagcagaacagttgytgaggaataataaaatcttgcagttgtcatccagtccggcttctctgcagtgagcacaagccactggtaacaacgtttgtgaaactaaccaaaaagatgtccctggtgacccatatctatttatttatatttagagacagagtctcgctctgtcccccaggctggagtgcagtggtgcaatctcagctcactgcaagctccgcctgccaggttcacaccattctcctgcctcagcctcccacatagctgggtctgcaggtgcccgccaccacgcctggctaatttttttgtatttttattacagacagggtttcaccatgttagccatg

SEQ ID NO: 573670 - DNA, 540 bp, Homo sapiens
aaagcaggagaatgtatgttagtgaaagtaacagayaacagttttatgaggatgcagaatacacatgtgtgtgttatgtgtgtgtatgtaagagagacagcaggtgaatctacgtgtgtgaaagtaacagatgtattgtgtgtaaaagtttttatggaagagacttgcgtctcttccccttacgaggggaagcatcttctgaggaggacatgtttactgatattgcagttatagggtataaattgaagtttcaaagtcccagagggtcagaacagtatacaaccaagagacagtgtatactttgatattttaaagaaggaaggggtaagaaaaattgaaaatgtagatacgctgatatgaatagctgggtgctggatgaacaataaattaataaaattcctgactaatggctctctgaagaagaaagtaaagccactattgatcctcaagtagatgttcattgcaacggtcagcaaaacttttataaatgattttttagtaaattagaaaaaaactttgaacataacatgtagacaaatt

SEQ ID NO: 573671 - DNA, 547 bp, Homo sapiens
catagtaaaaccccgtctctacaaaaaattagccaggcgtggtggcatgcagctacagtcctagctatttgggaggctgaggtgggaggatcacttcaccctgggaggtcaaggctgcagtgagccatgatwgcatcactgcactctagcctgggtgacagagaaagaccctgtctcaaaaacaaataccaacccccgccaagatacccaaatgttaaatgttaataaagatgtgagagccatcagggaaccacaaaataaaaccatgagataccacaacacctaccagagtagctaaaagacaaaaagccagaagacaaataccaagggtgagcaagatgtggggcaactggaactctcatacattgatggagggagtgccttttagttcaaatactctggaaaactaattggtagttaactactaaagctcaacatgagcataccctatgaatcagcaattccattcctcagaattacccaaccaaaacatacatgtatgtactagatgacaagcgcaagaatgtacctagaagatacattacct

SEQ ID NO: 573672 - DNA, 547 bp, Homo sapiens
catagtaaaaccccgtctctacaaaaaattagccaggcgtggtggcatgcagctacagtcctagctatttgggaggctgaggtgggaggatcacttcaccctgggaggtcaaggctgcagtgagccatgatagcatcactgcactctagcctgggtgacagagaaagaccctgtctcaaaaacaaataccaacccccgccaagatacccaaatgttaaatgttaataaagatgtgagagccatcagggaaccacaaaataaaaccatgagataccacaacacctaccagagtagctaaaagacaaaaagccagaagacaaataccaagggtgagcaagatgtggggcaactggaactctcatacattgatggagggagtgccttttagttcaaataytctggaaaactaattggtagttaactactaaagctcaacatgagcataccctatgaatcagcaattccattcctcagaattacccaaccaaaacatacatgtatgtactagatgacaagcgcaagaatgtacctagaagatacattacct

SEQ ID NO: 573673 - DNA, 312 bp, Homo sapiens
tcctttgttttttatcatttttaatggcccaagtaccaaattagtatattcagtaaaaaaaaaaaagtcacattatttttctttgttaaaaagttattgcttaagttattgcatgcytactgttttaagatgaagtcaaatgtgctatttacttataagatggatctattcttgataggtgacttttaactttcctggttgcattgcaaggcggccttgcagtttaatcttgtaaatcaaatgctttctatccaatttttatgtctatatgaattttttaaaaccatttttagaggtctttgctacttatta

SEQ ID NO: 573674 - DNA, 312 bp, Homo sapiens
tcctttgttttttatcatttttaatggcccaagtaccaaattagtatattcagtaaaaaaaaaaaagtcacattatttttctttgttaaaaagttattgcttaagttattgcatgcctactgttttaagatgaagtcaaatgtgctatttacttmtaagatggatctattcttgataggtgacttttaactttcctggttgcattgcaaggcggccttgcagtttaatcttgtaaatcaaatgctttctatccaatttttatgtctatatgaattttttaaaaccatttttagaggtctttgctacttatta

SEQ ID NO: 573675 - DNA, 312 bp, Homo sapiens
tcctttgttttttatcatttttaatggcccaagtaccaaattagtatattcagtaaaaaaaaaaaagtcacattatttttctttgttaaaaagttattgcttaagttattgcatgcctactgttttaagatgaagtcaaatgtgctatttacttataagatggatctattcttgataggtgacttttaactttcctggttgcattgcaaggyggccttgcagtttaatcttgtaaatcaaatgctttctatccaatttttatgtctatatgaattttttaaaaccatttttagaggtctttgctacttatta

SEQ ID NO: 573676 - DNA, 266 bp, Homo sapiens
atctgtccacagtcacagaatttgtartgaaaagccagaattcaaaaccaggtcttttggactttgaggcccatgcttgctcttctacacctccaagaaaatgtgtccaaggggtcagtcttcactggatatttgtataccatgagcttggcaatataagcacaatggttagaatctcttgatatttatttgaaggggaagtagaacttctaggaaatgagtctttgtgtagggaaatatcacttctgaaagtaaagcaaattgaa

SEQ ID NO: 573677 - DNA, 266 bp, Homo sapiens
atctgtccacagtcacagaatttgtagtgaaaagccagaattcaaaaccaggtcttttggactttgaggcccatgcttgctcttctacacctccaagaaaatgtgtccaaggggtcagtcttcactggatatttgtataccatgagcttggcaatataagcacaatggttagaatctcttgatatttatttgaagggraagtagaacttctaggaaatgagtctttgtgtagggaaatatcacttctgaaagtaaagcaaattgaa

SEQ ID NO: 573678 - DNA, 584 bp, Homo sapiens
ccatcttgggaacacttgtcatcttttgatcatctaacagataaaaaatcaggggcaagtccttggtaccattgtacagtcctagcttggattaggcaagaggagtgtgcagtgtgtcatgctctctttcccttgactcttcagtagtaggagcacatgccaagtgaagcctttcttggcctggacccaggagtgactgtgatgggcagaaccccttgctgacctgcaatggccacatagacatgtggcactagggagttctctgagcaccagcctgacatctatcagcataagtgactgctccaattgcacacctctgagtgacatctcaaactgaatatgcscaaaccaaattcttacttccctctcttctcagaaatgctctccacagccatacccacttcatcatgcagtactatcaccctgccaattgtttaagctaaaacctagagatcttcctggatctttccccatgtctatttcatcagcaaatcggttctatttccaaacagaataaaggctattcactaatctgcatctccagcacaaccactctaatccaggccagggcgaatgcaattgct

SEQ ID NO: 573679 - DNA, 382 bp, Homo sapiens
ttctattttatttttcagatttcattttgtttttgtagttacaatattatatgtgacctatacaggggaacattctaatggggaacaaagtgatcatcatattcttagctmttatactttggaagtctgaatggtcttcaaaatgaatttggtatactttcttaacctgtgaattaaatgatagcttcaacttactttaaaggtaatgagtaatgctttgctaagactattttaaacacatagaatataataaaatttgaaattgtatgttcaaaaaagccatatattcaattgtttagtgatgtagccacttcccatccaaacgaacactgtagtgttgatgttattggcttggtatcccttcttttctttcgtacctagt

SEQ ID NO: 573680 - DNA, 546 bp, Homo sapiens
ttattctttaccttgccggtttcagcttagaaaccatctcctccaaccctttatgacatcttagactgggttaaatgatccatgttcctcatagcatcccattcttacccacttatcttgctgaattgaacttggctattttctyatctatcttccttaccagactccctcaagccctccttgaaggctaagattgggggtagggcttaagggctcactgaatatttgttgagtaactaaatgagtaaaaaatgtttaatttttggaaatcaacacttctggacagtttctatactagtttcaggtaatctgtgagtgatacagatttccaggaccctgctgggatgtgatgaatctttgcagagtaggtcctgaagaccaaatgtataaaaggttctttgggcagttctggtgtgcattatcatttagaaccataggttgaatagattgaaaacatttccccttatttctctcacctcttcccacaaattttccactttttctgtaatctacccttagagtaaaatttcccataatgtcacttat

SEQ ID NO: 573681 - DNA, 619 bp, Homo sapiens
aaatttgcaacttttaatatcagtacagtaagtggagaatggttttcaggagtcttcttattcccaaatcccctccctgttaaatctcttgtcttctttatgttcatttgttcttcatgatgagttcttctcaaatgtgaatcctgttttaactgtactgtatatggagtaggccttgttagaaagaggttcctcctcatcatctgtaataactttcttggccaataaatactaatactgaccctattttaaggccactataccctgaatgcctctgagcttaacgctacagagactctcagtgaatttctgatgttctgcataaaatcttagctaragagaaaacagctgtcatctgaatagtggattcacaggtgccttctcaggtagcagagcttaacattttctcaatgcaattgggtggttatgcccattttaaaattgatcaaattcttctctttactatgctgatctaattgtgcactgggttatttcttcctaatgacctaggcatcagctagtccactttgattagtgtctcgatcaggctaggggtacgctttgcagtcttttttttatacaaatgctgtaattcccactctactcccacccctcaacc

SEQ ID NO: 573682 - DNA, 493 bp, Homo sapiens
cttctcaaatgtgaatcctgttttaactgtactgtatatggagtaggccttgttagaaagaggttcctcctcatcatctgtaataactttcttggccaataaatactaatactgaccctattttaaggccactataccctgaatgcctctgagcttaacgctacagagactctcagtgaatttctgatgttctgcataaaatcttagctaaagagaaaacagctgtcatctgaatagtggattcacaggtgccttctcaggtagcagagcttaacattttctcaatgcaattgggtggttatgcccattttaaaattgatcaaattcttctctttactatgctgatctaattgtgcactgggttatttcttcctaatgacctaggcatcagctagtccactttgattagtgtctcgatcaggctaggggtacgctttgcagtcttttttttwtacaaatgctgtaattcccactctactcccacccctcaacc

SEQ ID NO: 573683 - DNA, 619 bp, Homo sapiens
taaaagaacctcaaaggacccatcaaacctaaccaagataaactcagaagtgtcttattcatagccttcaattaaaatagtagcatttataattgccatacagtgcaatgacccaatttttataaataatctaaatgttgcttttaaaggcaatggtgtcagaaagaaataaattcttctgaacaaatctgtcgattccttgcactatttctatagcaactagaaacaagttacaaggcttggcatcaggagattctaagtacgaaaaagcaaatcactttggattgtttatcaagttcagtacaaataataaagcagttaatctcattggacttcctaattagactttttaaagtccttcatggttttgtaaacatcatcaaaggaatgagtttccaccctggcacccttaaacacctcagaaggctcaaagttaatagtggggtcctcaagctatttgcagtatttcaaaaagcctaatgcaaatggcacacttatctgtgtaactgttatgarttctgagcctacatgatccaatatctacattgaatcacattcaagcaaagcatagtcctaaatagtatttaaaaagggagttttatttttcatcttaaacaca

SEQ ID NO: 573684 - DNA, 522 bp, Homo sapiens
ctgcctgactccctcattaataatgatttaggctgggtgcagcagctcatgtctgtaatctcaacattaaaaattagccaggcatcatgatatgtgcctgtgatcccagctactctgaagctgaggcaggagaattgcttgggcccaggagtttgaggctaagatggtgccactgcacttcaccccagatgacagagtgagaccctgtctcaaaataataataataatgacaaataaaatctttaacacattttcattttacacctgtatgagaatcatgatttgacctttttaaaaaattgccatttacacctttgcttattgtttgtttttcagctactatatgccaagcttagtgctagaagctgggcatataatgataatcaaaatagtcatagttcctgacttcaagaaatttatgtctagttgggagatagattttaaaaaaaactcagmtataagaaaatatttaaggtgcataaaggaaaattacagaatattctaagagaaaatcacagagaa

SEQ ID NO: 573685 - DNA, 589 bp, Homo sapiens
agaattaactaggcaaagagaaggaggaggaacagttcagacagaggaaaagtacaagacaaagtccctggagtggggtggagaaggattgcaacataagagggacagagtgacagcaaatgaagaccctggataccagatgaggcagggcctagtagcccatagtccgtagtttggatgttatgttcaacaggaggacactaaaaagttttgcaaagatccctccattttcacataaagaatgggtcagattggaagcaggggttgttaagaagatactaggcctaattgtatttctacaatatcttttttaaacactcatttcagtctgccttctaatataatggtgakaactagagttaacctcctaaactgaggacagagatcatgtgttatttatttctgaagccatctaggtttttgcttacataaaaggcatgaggtaaatgctcgttgaattgaacaccagtcagcattctgataataacaagagctaacatttattgggtgcctactatgattcagacactgtaccaagaactttgcatgaattatgtaatttaaaactcataacaattctatcaggcaa

SEQ ID NO: 573686 - DNA, 616 bp, Homo sapiens
gtccccctcccacacacacatgcacatctgtcaaagggagagaatggtaatacctatttcacaagttgctgtgaaatccaaaggagccaatgtatktgaaaagcactttatacactacaaagccctacagaaatgctagtgctatcactctgagtagtgattataaacatccttgattttcatgttaattaagacaaacagtagtagtattcaaaacacagataatccgaatctatttcctcatgttttggtaactgacttctaattagcatagactctatgtgcctctacgcatctgtcatcagagaatatgtggttcaacaggtcacagcacagatgaaatggagccctgaagaagttgtgatgactctgggtcacatttacagttatgtgtggcaggtgaactgaaacgtgtgagttttcactctctgtgtagtcctactttccaacatatgctactaatttttatttgtctttataataatatttccctggattactgcatttgaatgaatggtccagatttggctgaaaatgccaataaaattattttccattcactgagcaattaccacccaagagaggagacttcacctagattggtgatacattatta

SEQ ID NO: 573687 - DNA, 643 bp, Homo sapiens
gaaaggcaattaaagtccaactttgaaaacatatgacaataatattgaataatgttgcctttgtcagtgaggttgctaaatgggcaatagatcttaaaaagcaaatagtctctttcgtaaacagatcactactgaggttacttaaatggctgtaataggtcccatataccactggctgctgtagcaagtttttctagtttgctgtttctattttttatgagaaatgagcactttgtggtaattggcaatgcccattgacatactgatgaaaaatgagtctaaaaccacttggaaagtagcagacagccaagaaaagagaaaccattagagatttttaagaatcatatttaaaagaagctctcagacagcatgagagatgatatactgtcgaatgtttarctacaatatcagaatccataaattgagagacaacaatggcagctacaatatagttacttaataaatgaagtaatcactgctcaactacagttttaaaacaactttagcttcttttcatcatacaaatctgtctcctttactcttcactaaaatagcctccttgagggtagagatgttgtcaattttgttcattatctccagcacctagaatagtggctgacaagaggcgacactcaatgttttt

SEQ ID NO: 573688 - DNA, 536 bp, Homo sapiens
taattagctacctgatcacctcatatgcagyggtctttggagtgttgtccccagagcagtgctaccactaccgggaaacttcttcagaaatgcaaattattgggccccaaaacttaccatatcagaaactctagggcagggccctgcaatctgtatttttaaaagcacttcagatgacttttagacaaactaaaatgtgagaatcactgtgtaaagtatttgtgtaggctatgctaatggaacaccatatgttctccttgccccataaaagggcattataatttgggccttgggtgataacacccctccctcttttgtgcaaaccacaagattgtctccattgttaggacttaagatcagacaatttgaagagggtccacaacacctattatattcaactgtataggtagtagtgactgacagtaactatagcaacactagtaatcacagcaaatcctggagaacatttagtaaccccctataacatgatttactcatatatatcccacatatataaccttggaaagtaggagtta

SEQ ID NO: 573689 - DNA, 536 bp, Homo sapiens
taattagctacctgatcacctcatatgcagcggtctttggagtgttgtccccagagcagtgctaccrctaccgggaaacttcttcagaaatgcaaattattgggccccaaaacttaccatatcagaaactctagggcagggccctgcaatctgtatttttaaaagcacttcagatgacttttagacaaactaaaatgtgagaatcactgtgtaaagtatttgtgtaggctatgctaatggaacaccatatgttctccttgccccataaaagggcattataatttgggccttgggtgataacacccctccctcttttgtgcaaaccacaagattgtctccattgttaggacttaagatcagacaatttgaagagggtccacaacacctattatattcaactgtataggtagtagtgactgacagtaactatagcaacactagtaatcacagcaaatcctggagaacatttagtaaccccctataacatgatttactcatatatatcccacatatataaccttggaaagtaggagtta

SEQ ID NO: 573690 - DNA, 604 bp, Homo sapiens
tataacatgaacatggtttagagggtaaatggctggagtaagggatatctttaagcaacagggttatttaagtggccaagtcacagctgagtaactttgtaaatgagcctggtaaagtcaactccacagagaagaatatttgcatatttatgacctcattctgaagtggaaagcccctcgctcaggcaccatggtgggaggcattcagagaaggtaagttttggacactagaatcaaacaagttatacttcccaaaaggaaaaaatatgtatgattttgagtgaggttattctaattgaaaagccatccyaccatcagcgagttctcaagttttcccaagtaatctagaaagtaaacatgggcttgccagtcctctggcacctgcaatgcatttggggaaatcctgtctgcatttgatgtgcttacacaccctggagcccctcccctcccccatttagaagcacgtagagataggacaggtaaagtagttgctgctagccatgaaccaaccagtctatggggcaaattgctagtaaactagcatctccatgggccatgagagcttcaaggcttgaatctcttgccaaagtacagaataatcatg

SEQ ID NO: 573691 - DNA, 604 bp, Homo sapiens
tataacatgaacatggtttagagggtaaatggctggagtaagggatatctttaagcaacagggttatttaagtggccaagtcacagctgagtaactttgtaaatgagcctggtaaagtcaactccacagagaagaatatttgcatatttatgacctcattctgaagtggaaagcccctcgctcaggcaccatggtgggaggcattcagagaaggtaagttttggacactagaatcaaacaagttatacttcccaaaaggaaaaaatatgtatgattttgagtgaggttattctaattgaaaagccatcccaccatcagcgagttctcaagttttcccaagtaatctagaaagtaaacatgggcttgccagtcytctggcacctgcaatgcatttggggaaatcctgtctgcatttgatgtgcttacacaccctggagcccctcccctcccccatttagaagcacgtagagataggacaggtaaagtagttgctgctagccatgaaccaaccagtctatggggcaaattgctagtaaactagcatctccatgggccatgagagcttcaaggcttgaatctcttgccaaagtacagaataatcatg

SEQ ID NO: 573692 - DNA, 598 bp, Homo sapiens
caattatttgcaaaccctaccaaaagctgaccaaagatctaaacttaattctgaatctaatttttgttgggagagggtcaggaatttatactttgagtgtcaataatatatataaaattttaaacacagaacactttatatacacaaatatataaaaaatacaaagtatggggtgtgcatgtgttcgtgtgcctacatgtgcattctcctctagggtggttttataacaaatgracctcattgctacagtccgttttgaaactttctcttgactgggctagaatgatcccaaactacccaaaattgatttcacttaggtcctgtgtctctgacattattaagaagagatttttttcctttcgcaaacaatttaacaatttttcaaacatgggtaatgaccttacttttcctcttatccttttaccataggccttcgtgtgacacaactagaaaagcacatgagattatgaatgactttttgctgcctttcaaagcaggaaccatgaattagtattgattgtgctttctcatccatttcccacttatttggtttctttctctatgttctatgggaaagaaaaggctattttaagagtag

SEQ ID NO: 573693 - DNA, 598 bp, Homo sapiens
caattatttgcaaaccctaccaaaagctgaccaaagatctaaacttaattctgaatctaatttttgttgggagagggtcaggaatttatactttgagtgtcaataatatatataaaattttaaacacagaacactttatatacacaaatatataaaaaatacaaagtatggggtgtgcatgtgttcgtgtgcctacatgtgcattctcctctagggtggttttataacaaatggacctcattgctacagtccgttttgaaactttctcttgactgggctagaatgatcccaaactacccaaaattgatttcacttaggtcctgtgtctctgasattattaagaagagatttttttcctttcgcaaacaatttaacaatttttcaaacatgggtaatgaccttacttttcctcttatccttttaccataggccttcgtgtgacacaactagaaaagcacatgagattatgaatgactttttgctgcctttcaaagcaggaaccatgaattagtattgattgtgctttctcatccatttcccacttatttggtttctttctctatgttctatgggaaagaaaaggctattttaagagtag

SEQ ID NO: 573694 - DNA, 633 bp, Homo sapiens
taggtgaggagatcataagaggaggggaacaggagacatcaatctatgcctgcgtcacttattgattagtctggctctggctggaaaactaattcagatataaagaaaaaattatcccagaaatacacttcaccaaatagacaaaatatttgtttcaggagccaggcctgtgttaatctctcttgcccttccagttaaaaggcaaaaagcattagtcctgatgtaaatatttaatttccttgcttcaggcatatttttttggcctggcttagatcttgacaccttccatgtaatcaagttaagttcttccaagctttgtaaccctataaggaatagtctgtgtcttgggccaaggtttcagttaaagtattattttctacaattcttttcacctggaagagggaaaattttctttccaattgycacaatttcacacctcccagctgagagaatttgttcatccagtactcagtgtaccttctctgataggaagaagcaaacagtcattggtctaacttggaaacattttgtgatccccacataccttagcaaaaagctttaaaatgacttttctctcaccacatgctgaaaaataaatgatactctggcatctggttttgcagtctcaagtta

SEQ ID NO: 573695 - DNA, 567 bp, Homo sapiens
tgggcagaaatatagttataattaagcattaatctggtttgcactttgtcccacttctttgtggctaaaattcaatctgtaaaaatcactacagaactgccatccccctttgctacctttgtccagtgtcaagtctcttccttccctccccagagataaccaccatcttgaacttaccatttccttgcatggaatgattctgaccatttgcatccccggttttcttatagataggactctgacattggaatcataaggcttctgtttaatcattgctttagatgtttttcagactcaaattccagcaactcccacagacycccacagatgaatgggatcagcatgagaatacagctgattcatctccctgtttcttgacttcaccctgcactcgtcaaccaatcaatgatcactcttcaacccactccaaaacccttaaaagccctaacactaaattccttagagagatggatttgaggttccctgccatctcctcatttggtgaccttacaatgaaacctctttctctgctgcaacccagtgtctcagcatagtgacttgctgtgt

SEQ ID NO: 573696 - DNA, 489 bp, Homo sapiens
ttttataagtgctcgacagttcctgctttgtgtgcactttcctctctcacctgccatgtaagacgtgcctgcttccccttctgccatgattgtgtgtttcctgaggcccctccagccataaggaactgtgagtcaattaaacctcttccttttataaattacccagtctcagatatttctttatagcagtgtgaaaacataagcaatgctgcaattatctaaaattataattttagatatgtacattggcaactctcttagatattgcaatattcagctctaaagtggtggtgctaatgtatcttctcaccagtagggtatgagagttcctgtgactccccaccttcaacattgcaggtgcagccaaacttttaaatgattgcygatgctgatgggaatgaaaagatacattattgtagttttctattacatttactttattactaatgaggcagagtattttttcgtgtgtttaatagtcagttttct

SEQ ID NO: 573697 - DNA, 591 bp, Homo sapiens
atgcagggctccttcttaagtagctatattgactaattaccttcatcaggataattgcacctaaggaaagggttcaattatttctaccaagtggaatgttgacattgtttaatgaagaattaaagcatgtggtgacaaactatgtatttacaggggaaataaagcagttatgaacaatctgtttccaagaaagaattttaaagcatttctggtatactcttaagtattcagaataaagctgttaggcatttccacagcacgcaagactcagcctctatctgaggcagtacatgtcaatgaattggcatcaacmaggcactcaagggtctgacatcatgactgaagagcagaacagaaattaaattgggttcaactgttgtccactcacaccaccacatttcaaagtgactttcttcagtcattgtttcacacaaatggtaaacccacatcatccttcattgtaacagtagcacactttggaaaattgcaatgcagaaggattatagttaaaacctccagtgtattaactaaggcctagtgtggccactgatggataatagtcctaaaattcattccttcatttattcattc

SEQ ID NO: 573698 - DNA, 591 bp, Homo sapiens
atgcagggctccttcttaagtagctatattgactaattaccttcatcaggataattgcacctaaggaaagggttcaattatttctaccaagtggaatgttgacattgtttaatgaagaattaaagcatgtggtgacaaactatgtatttacaggggaaataaagcagttatgaacaatctgtttccaagaaagaattttaaagcatttctggtatactcttaagtattcagaataaagctgttaggcatttccacagcacgcaagactcagcctctatctgaggcagtacatgtcaatgaattggcatcaacaaggcactcaagggtctgacatcatgactgaagagcagaacagaaattaaattgggttcaactgttgtccactcacaccaccacatttcaaagtgactttcttcagtcattgtttcacacaaatggtaaacccacatcatccttcattgtaacagtagcacactttggaaaattgcaatgcagaaggattatagttaaaacctccagtgtattaactaaggcctagtrtggccactgatggataatagtcctaaaattcattccttcatttattcattc

SEQ ID NO: 573699 - DNA, 612 bp, Homo sapiens
cattcttgcaggaataaggcagtattgcattgtggttttgatttgcatttccctgataattagtgatgttgggcatttttttcatatttgctggccatttgtatatcttttttgagaattggctattcatgtccttagctcactttttgatgggattgtttgttttttcttgctgacttgtttgagttccttcagattctggatattagtactttgtcagatgtatagattgtgaagattttctccgactctgtgggttgtctgtttgctctgctgattatttcttttgctgtgcagaagctttttagtttaattaagtactatctatttatctttgtttttgttgcatctgctkttgggttcttgttcatcaagtcttttcccatgccagtgtctagaagggttttttccaatgttatcttctagaatttttatggtttcaggtcttagatttaagtatttgatccatcttaaattgaagttttgtataaagtaagagatgaggaatccagtttcattctcctacatgtgtcttgcccattatcccagcaccatttgttgaacagggtgtcctttcatcattttttgtttttgtttgctttgttgaagatc

SEQ ID NO: 573700 - DNA, 606 bp, Homo sapiens
aaataaatcattcatttaaccagtgataactctaaaaattaaaaaaaaaacatgaaaacctttattctttgagagaggagacttaattttccaaacaatgagtcctaataaaaacagcatgaagccaattaaatttgtttttcaaaattttataactaatatataaaattttaatcttgaccataagctattacttccataagccttttataacctgtattaagtagctagttaacgcttcaagaaaatctcattaatctgacacaggkgcccatatgtcagtcttacatcaatatgcccttgacattaatgattaatttatagaaaaattgaacttattgtatctcaaaattggcccttacaatcttatgagcccacctcttccacaatagtccctgggccttgaggagttgaatagctttaatttcttgccctgtgtctcaagaatgcagtttattttgattggcatcttctatggggcctgaagatgaggctttaattgctgtcagtgtttaagatttagcagtacttggtgtcatttttagacccaggagtcaaagccctgtaactcaatgtcataaggactttaaaagcacacaaagggag

SEQ ID NO: 573701 - DNA, 495 bp, Homo sapiens
ttgccactaaggtttctgctcctgggcktctgctgcggtaagttgtgatcttctaatttggtgaccagtgggttgtcctgtggcatcaattctctgatggatttaaaaagagttgctgattttaagtttgttcaatatttctcttgttgtaaggatgggagtgacaactttcaagctctttacctttcagactaaaaaccagatgtctcttgactcatttttatcctggctatgtattaaaattttctgcttcttagtatacttagtgattttttattggatcctggatgttgtgattttattttgtagaattctgaattttgttatatttctttaaataatgtttactgtgttcccacaggtaattagacaatttgcacatcaatttgatccttttgagtcttgagtttaaccattttcatagagtatagactagcttttcctttaggagtctttgatgaactgtgtaatcattcaggtttcttcatgaggctt

SEQ ID NO: 573702 - DNA, 403 bp, Homo sapiens
gttagttctgcctccatctctaaccagttggagggccaatctcatcttctttctgggcttctgtttctccatttttaaaataagggattatattagcttattttcatagcatatagttttatatttcttttaggatctatacagtgtaagtaatctttctcttactctctgtctctttctgtctctgtctctctttctgtgtgtgtatgtctgtataaatataaaarctgtgtgtatataaatataaaaactacaaaactctgatgaagaatacatagaagacatagatagataggtaaatgatagatagatagatattccatgtttatgggtaggaagactcaatattgttaagatttcagccttcctaatttgatctacatattcaccacagttccagtta

SEQ ID NO: 573703 - DNA, 403 bp, Homo sapiens
gttagttctgcctccatctctaaccagttggagggccaatctcatcttctttctgggcttctgtttctccatttttaaaataagggattatattagcttattttcatagcatatagttttatatttcttttaggatctatacagtgtaagtaatctttctcttactctctgtctctttctgtctctgtctctctttctgtgtgtgtatgtctgtataaatataaaagctgtgtgtatataaatataaaaactacaaaactctgatgaagaatacatagaagacatagayagataggtaaatgatagatagatagatattccatgtttatgggtaggaagactcaatattgttaagatttcagccttcctaatttgatctacatattcaccacagttccagtta

SEQ ID NO: 573704 - DNA, 635 bp, Homo sapiens
cagccactttggcagatagtttggcagtttcttacaaagctaaacataatcttagcatatgatctggcaatcacgtttcttggttacctaaatgagttgaaaacatgtccacacaaaaatctgcactcaaatgtttattacagcttcataattgccaaaatatggaagcaactaagacacttttctgtaggtgaatggttaaactatggtatattcagacaataaaatattattcagtgataaaaagaaatgagatcttaagccctcaaaatacatggaaaaacattaaatgcgtattgctaagggaaagaagccagtctgaaaaagctacatactctrtgattccaactatgtgacattctgaaaaaggcaacattacagagatagtaaaaagattagtggttttcagtgggctaaggagagggagggaaggagggataaaaaggagaagtacaggtgatttttagggcagtgaaagcattctgctatgtactgtgatggtgagtacatgagataaaacccatagacctgttcaacacagagagagtcctaatatgactacgagatttggttaaataatcatgtaccaatatttactcatcatatacattataacaaatgcaccgcactaatgc

SEQ ID NO: 573705 - DNA, 598 bp, Homo sapiens
aaatcttgtagctaaacagtatgccttgcttgtactagatgcttagtaagtatccattgataatgattaaatgactacaaaacagaaaaatggttgaagggaaataagaaagagaattttttcgaaatgattttctatttgacacatcaataaaaataattctatttttcaccaagctatctggagagattttcatccacgcctttatctcaagaggactttttcttcctcagtgtatttatatatcagcattgaatgtcagcttgattcttctcttaataactttaaagcagaactaaaaagacaaatctctctcacaaagagaatgtactctccaggtcttcctggatagaacacaacagctgtgccaacaagtgaagggaggaatgtttaaaggacaattctgaattctggtttggaagtgccttgtttcatagatcattgatggtgtaacatttcattgaactagatattgactactaacaaaacctaggaagcacaatgcaagtaaartgtatcttccttgaactccaaaaatagatgatcaaattgaatacctctaagttgaagattgaatacaagtatatcaatcacagga

SEQ ID NO: 573706 - DNA, 604 bp, Homo sapiens
tccattttgggcctccaacatcccctagaggccgaaaagtcaccttctggattttcagcatgagacagagaaagagaaggaatagaggctctcacaggaggtttttggtccaaacttggaagtggtatctatcacttctactcacactctatgacctagaactcagtcacatggccatacttaaccacaagaaacctgagtaatgtagcctaattgtgtgccccatgagaagagaacactgtgtagacaattatgactactttctgctacagatggaattgaaatytgagctgaagccagaaaagtttggagaaaaccttggccatagaacccaggtaggctctgtccttcaaattgtcaagcaaactttccatggggatgagagctattcagttaaccttgggactgagaatcttggctaatgagcatcaatctatttttctgccaacttcaaaaagaaactgattgtgcttcctaaattactgaatgagagagcaaggtcccctggggaagaataaacaataaagtttcaccagcatttaaggcttcctgtccctgtaaaacaatgcgttttggtcagttaaaaaaaaaaaaaaaaaaaaaa

SEQ ID NO: 573707 - DNA, 606 bp, Homo sapiens
aattctctgataaaacttaccatctttttatctgttttcctttatcattccctctattttcttgaatgtattaattatggtaatttaaacttttttttagctgactctaataactgcattatctatggatctgtttctattgtttatgttttttcttggttttaatcatgtgtccttgctttctggcatgtgtttggattattttgaatgttgcatattctatattaaaaatatttagtaatttcaggcgatatcttccttcagaaaatattcagtctcctgctagatcaatacagtgatgtcaagtcactttaacccaatcagggatggtgctgagtcaaggttgagatggaaccctggaaatgctcattccacatttagcaagtatcctgaaagaaaaattagmcatgtacttgaaaaccctcccctgcccaccacaagtccacacatacaaactggtgatatgcttgagattcccagcaagtctatgcaaaaactttgcttgttctctgttttccagtagtttctccttgtaggtgaaaagttcacagtttcagctcctgcctaatgcccagaattaacaaatgtccaaagaataaaagccac

SEQ ID NO: 573708 - DNA, 457 bp, Homo sapiens
tgattttactttttgtttttcaagagaagataaaccctcctctcacatgcacaaaaacatgccaatattatcaaaataccaggccagaaataaaccttaataaattccccaaagtaggaattgtaggcatcattctttctgatcaaaatgaawtagtttgataaattaacagtaaaaagctaaacaaaaactcattaaacaaaatattttttaagtctcctggactttgtcaagagagcccagtgtcattgtagaataataatagtcaagaaaatattgaagagaaataataaaagaactgccaatccatatattaatatactaaaaagcaaaaacaaagcaatgtaatgttcttgtaggaatatacagacataccaattaaacaaaactaaaaactagagtctagcgtgttttaaaaatactttattagtatattggtttccacaaataaactaat

SEQ ID NO: 573709 - DNA, 599 bp, Homo sapiens
ttatattcaggaaaaacatttaataacaggcatgagatctctattagccctcttgccttgcaatcaggggggtcayatatttaaaaatgtttcaaccacagtatagtggagatcagcctagatccgttaatgatgctgtggagcaaagtcctttcctttcctcagtctgtgatttgctctgagttatatagattgagcatgatataaacttttgttgtacagtttacccttgaacaacacaggcttgaactgtatgggttcacttatatgcaaattttttccaaaaaatatactggaaaattttgcggagatttgtgtcaatttgaaaaaatgcacagatgaaccacatagccttgaaatatcaaaaaaagtaataaaaaggtagctatgtcaagaacacataaaatatatgtaggtcatttcttaatcatttactgccataaaatatatacaaatatattataaaaagttaaagtttattaaaacttagtcacataaaactagactgtacatgctgccattcttgattgagagaaatgtaaacaaatgtaaagatgcagtattaaatgataactgtgtaaaattaactatagtgcatg

SEQ ID NO: 573710 - DNA, 551 bp, Homo sapiens
attaaaacttagtcacataaaactagactgtacatgctgccattcttgattgagagaaatgtaarcaaatgtaaagatgcagtattaaatgataactgtgtaaaattaactatagtgcatgctatactatggtaataatttcatagccacctcctgtagttactgtagtgaactcatgtggcaagtatctgcataaaacaatgtgtgaagctaatcatctccacgtgagcagttcatcactccagtaaatcatgcatcaaaggaaaaagtgatctctcatgcttctttcatatttttcgtgtttagtgcaataccctaaaccttgaaaaacaccatggtaatcatatgaagtgccactagtgatactggaactgctctcaagaagcagagaaaagtcatgacattacaagaaaaagaattgcttgctatgtaacataaactgaggtctgcaattgcagttgtccatcattttaggaaaaatgaatccagcgtaaggatcatcacaaaaaaaaaaaaaaaaggaaaggaaatccatgaagctgtcactgtag

SEQ ID NO: 573711 - DNA, 551 bp, Homo sapiens
attaaaacttagtcacataaaactagactgtacatgctgccattcttgattgagagaaatgtaaacaaatgtaaagatgcagtattaaatgataactgtgtaaaattaactatagtgcatgctatactatggtaataatttcatagccacctcctgtagttactgtagtgaactcatgtggcaagtatctgcataaaacaatgtgtgaagctaatcatctccacgtgagcagttcatcactccagtaaatcatgcatcaaaggaaaaagtgatctctcatgcttctttcatatttttcgtgtttagtgcaataccctaaaccttgaaaaacaccatggtaatcatatgaagtgccactagtgatactggaactgctctcaagaagcagagaaaartcatgacattacaagaaaaagaattgcttgctatgtaacataaactgaggtctgcaattgcagttgtccatcattttaggaaaaatgaatccagcgtaaggatcatcacaaaaaaaaaaaaaaaaggaaaggaaatccatgaagctgtcactgtag

SEQ ID NO: 573712 - DNA, 424 bp, Homo sapiens
gtgaattcaagctgagaagctgtctgcattttaaaggtgaaacaggtttagaagatgacaaagagggtcrctagttaggaggtgaccgagtagaccaggagagagatgaggagggcccagagcagacaatgcgaacagggatggaaaagggacttcggggaaaatatttagcacacagagatcgcctgcataaaaagacaagagagttatgaagccttggccattcctttttttttttcttttttttttgagacagggtgtggttctgttgcccaggctggagtgcagtggcgccgtcagagctcactgcagcctcaacttcccaggctcaagagacttagcagccctagtagctgggactataggcatgtactaccacacccagctaatttttgtatttttttggtagagagagggttttgcc

SEQ ID NO: 573713 - DNA, 422 bp, Homo sapiens
gaattcaagctgagaagctgtctgcattttaaaggtgaaacaggtttagaagatgacaaagagggtcactagttasgaggtgaccgagtagaccaggagagagatgaggagggcccagagcagacaatgcgaacagggatggaaaagggacttcggggaaaatatttagcacacagagatcgcctgcataaaaagacaagagagttatgaagccttggccattcctttttttttttcttttttttttgagacagggtgtggttctgttgcccaggctggagtgcagtggcgccgtcagagctcactgcagcctcaacttcccaggctcaagagacttagcagccctagtagctgggactataggcatgtactaccacacccagctaatttttgtatttttttggtagagagagggttttgcc

SEQ ID NO: 573714 - DNA, 421 bp, Homo sapiens
gaattcaagctgagaagctgtctgcattttaaaggtgaaacaggtttagaagatgacaaagagggtcactagttaggaggtgaccgagtagaccaggagagagatgaggagggcccagagcagacaatgcgaacagggatggaaaagggacttcggggaaaatatttagcacacagagatcgcctgcataaaaagacaagagagttatgaagccttggccattcctttttttttttyttttttttttgagacagggtgtggttctgttgcccaggctggagtgcagtggcgccgtcagagctcactgcagcctcaacttcccaggctcaagagacttagcagccctagtagctgggactataggcatgtactaccacacccagctaatttttgtatttttttggtagagagagggttttgc

SEQ ID NO: 573715 - DNA, 421 bp, Homo sapiens
gaattcaagctgagaagctgtctgcattttaaaggtgaaacaggtttagaagatgacaaagagggtcactagttaggaggtgaccgagtagaccaggagagagatgaggagggcccagagcagacaatgcgaacagggatggaaaagggacttcggggaaaatatttagcacacagagatcgcctgcataaaaagacaagagagttatgaagccttggccattcctttttttttttcytttttttttgagacagggtgtggttctgttgcccaggctggagtgcagtggcgccgtcagagctcactgcagcctcaacttcccaggctcaagagacttagcagccctagtagctgggactataggcatgtactaccacacccagctaatttttgtatttttttggtagagagagggttttgc

SEQ ID NO: 573716 - DNA, 421 bp, Homo sapiens
gaattcaagctgagaagctgtctgcattttaaaggtgaaacaggtttagaagatgacaaagagggtcactagttaggaggtgaccgagtagaccaggagagagatgaggagggcccagagcagacaatgcgaacagggatggaaaagggacttcggggaaaatatttagcacacagagatcgcctgcataaaaagacaagagagttatgaagccttggccattcctttttttttttcttttttttttgagacagggtgtggttctgttgcccaggctggagtgcagtggcgccgtcaragctcactgcagcctcaacttcccaggctcaagagacttagcagccctagtagctgggactataggcatgtactaccacacccagctaatttttgtatttttttggtagagagagggttttgc

SEQ ID NO: 573717 - DNA, 293 bp, Homo sapiens
ctgcttgcctacatggaggtgctgatttaaatgtgtggaaaaaaaaatctttggaattatttcacacagactttcatttgattcattgcttctgtcacattaaggtacaatgcaattggcttcaaaatcagcatatctaccttgtatgtctatctccatgttcttttattaagatgctcttgcagggttaataagtgtttatatttaaattgttatatctgtcagtcaaatatagtctccagtcaatcatgtgtctaggttaagayggagaagagggaaaagcagtaaaaatg

SEQ ID NO: 573718 - DNA, 554 bp, Homo sapiens
tttatttctttatgttgcccaattcctttggctaggacttcagtactatgttgaaaaaaaaagtggtgagagtgagtgtaatattgtgatataataaaatatatatatacttggtctctgtccctggttccaggcacaaagctgctaaaatccttgaaatctgcaaagcgatatgtatttttgtatgctaatgagatggctgatcactgagtactcctagataaccacaggatagttgccaggggtgccaaccatgtgaytggagggttgaaactttcagccacaccccccacctctagggaggggagaggggttgaaggctgatttggtcatcaaaggccaatcatacctacctaatgaagtctccattaaaaacctaaagatggctgggtgcagtggttcatgcctgtaatcccagcactttgggaggctgaggcaggcagatcacctaaggtcaggagtttaagaccagcctggccaacatggtgaaaccccatctctactaaaaatacaaaaattagctgggcattgtggtgcgtgcctgtagtcccagc

SEQ ID NO: 573719 - DNA, 487 bp, Homo sapiens
aaaaagtaatttaggaaaaattttgtatagattaattacaacttattacgtaaacttgaagagaacagagaatgtatataaaattttagttgtccaatttgctgcaggccaggaggtaagaaaatacttattgaatgtctacttagggtgctgccctgtgctggtattttactggttatctatttgatgcttataacaaccctatgaatttatgctgctttccctttttcatagatgagaaaactgaggttcaaagaagattatcattcctgtgaaacctccccccaaaatccatgttatcatccttttgaataatactggagtaatttstgtatccataaaagatggtgaatcctttttagataaattatttagttatgaaataaaggcaaagggattgaatttaacaggggcttgacttgctaaggtctgggcctcttttctaatgaccctgctgaatattacgggaaactattttagaagcaat

SEQ ID NO: 573720 - DNA, 602 bp, Homo sapiens
tgtaatcccagcactttgggaggctaaggcagaaggatcacttgagcccaggagtttgagaccagcttaggcaacatagggagaccccatctctaccaaaaccaaaaccaaaaccaaaacagaaaccagaaaaaaaaattagctggatgtggcggcatgcacctgtggtcccagctactagggaggctgaggtggaaggaccgcttgaacccaggaggttgaggctgctgagccgtgattgtgccactgcactccagcctgaatgacagagcaggactctctctctctctgtctctctctctctctcwcacacacacacacacacacacacacacacacacactaatagagttataaatgagatgctatagtaagacaaagaagtatttaactctgaaaagatcagggtgagttaaaatctgaaataagtcctgaaggataagcaggcattttccacatgaacaatcgtggccccaacagaggccattccatgggtggtggtgtgtacgaaggtctggaggcgagaaaatgcaaacattatggaaatggcaaacagagcacctatatttagtccactcacaaccaaaaataaagggtagatc

SEQ ID NO: 573721 - DNA, 515 bp, Homo sapiens
cttattcactaccacgagaacagtatgggggaaaccactcccatgattcaattatctcccactgggtccctcccacaacacatgagaattatgggagctacaattcaagatgagatttgggtggggacacagccaaaccatatcagcttscatttttcattcactacctcagttcctcactatcatgaatctctgtagaggcctgcttgaatgtccttacaccatgacagctggcttatccagagtgagtaatccaagagacagcaaggcagaagccacagtgtcttttatgacctggccttgaaagtcagacagcttcatttctgcagcatcctgtcagttacactagtgaggtcagccctatttaatgtaggagggagctgcacaaagacctgacttgtgggatccaagtatcattggggctatcttggaggctgcctactatactctctatagagattggttttgagggacttacaggacggacacagcgttagtaataaggtgggagtagg

SEQ ID NO: 573722 - DNA, 597 bp, Homo sapiens
gaaaatgacaacccattagcagattgtgaaataaatttagtgggtcatgattcgcatttattaaataataaacagaaagttggttgggtgtggtggcttacgcctataatcccaacactttgggaggccaaggtgggcggattacttgaggccagaagttcgagaccaacctggccaacatggcgaaactctgtctctattaaaaatacaaaaattagccggacatggtggcacacgcctgtaatcccagttgcttgggaggctgaggcaggagaatcatttgaacttgagaggcagaggttgcagtgagctgagatcatgccattgcactccagcctgggcracagagcaagactctgtctaaaaaaaataaataaataaaaataatagaaagtaatagcatatcacacataacaagggtaagtattattaagtgtgtgtgtactgaattgcaatgtaaaatgtatttcttattatgtgtgataagagaaaagggctgagcacagtggctcacacctataatctcagcattttaggaagctgaggcaggaggatcacttgagcccaggaattagagaccagcctgggcaacatagt

SEQ ID NO: 573723 - DNA, 563 bp, Homo sapiens
actttaacccagcaacaatcaaaatggataaagaaggttattacataatgataaagggctcaattcaacaagaagtcttaactatcctaaatatatatgcacccaatcctgaaaaacccagattcataagtcaagttattagaactatgaagagacttagataatcacatgacactagtgggagacttcaacaccccagtgacagttttagtcagatcatcgaggcaggaaaataacagatactcaggacctgaactcgatgcttaaacacatggacctaacagacatctacagaatactccacccaagaacaacagaatacacattcttctcatctgcacacagcatattctctaagatcaatcacatccttggccataaaacaattctcaaaaaattaaaagaaaattgaaatcataccagccacactcttggggcatagcacaataaaaatagaaaccaatactaagaatattttcaaaaattgaaygattacatggaacttaacaaattcctgaattacttttgggtaaataatgaaattaaggtaaaaatttaaaaat

SEQ ID NO: 573724 - DNA, 522 bp, Homo sapiens
tagaaatagataaattctcaatattaaaaaatttcaaaagaaacaatcaaaacagatgaaagtagttgcatctttggaatataaaatgaaaggtgagagtgaaggaaggctgggaagaaaatgttatttttataataaacctctaaaaaccctttgactctttaaacaaaaactaagtctgagattagagggagaaagaaagaaagagaaagagggagacaacaagaggagagaaactgtcacttgataatttattgaatttgtgattgttatagaatatttaatttgtttctttttttaacttttattttaggtttgggggtacatgtgaaggtttgttacataggtaaacacatatcatgagggtttattgtacatattattttataacccaggtattaaacccagtaccaaattgttgtcttttctgctactctccctccwaccattctcctgcctcaagtaaacaccagtatctgttgtttccttctttacattttaagttcttatcatttagcttcc

SEQ ID NO: 573725 - DNA, 522 bp, Homo sapiens
tagaaatagataaattctcaatattaaaaaatttcaaaagaaacaatcaaaacagatgaaagtagttgcatctttggaatataaaatgaaaggtgagagtgaaggaaggctgggaagaaaatgttatttttataataaacctctaaaaaccctttgactctttaaacaaaaactaagtctgagattagagggagaaagaaagaaagagaaagagggagacaacaagaggagagaaactgtcacttgataatttattgaatttgtgattgttatagaatatttaatttgtttctttttttaacttttattttaggtttgggggtacatgtgaaggtttgttacataggtaaacacatatcatgagggtttattgtacatattattttataacccaggtattaaacccagtaccaaattgttgtcttttctgctactctccctccamccattctcctgcctcaagtaaacaccagtatctgttgtttccttctttacattttaagttcttatcatttagcttcc

SEQ ID NO: 573726 - DNA, 574 bp, Homo sapiens
  misc_feature 26: n = A,T,C or G
gtcttttaacaccaggttgatctganattaaccagcaaccaggtttgtttgttatggcagcataaggcagtcaatcctgattgatacacactttaactgaggaagatttctccttctaactccctggtccttattttctatgttcactcaattagagatgccatgtctgtccttatgatgcctcttttacattgtacagcttcgtggatcttcagatgcattttactgctgtctccaattagaatacaaactccttcagggcaagaactgatccmaaataaattatgtaacgtctgtaagccacagttccttaacctgttaaatggaaatattaaaaaaattcctcatagcttttcaggagtgttaagataagcacacatagaatatcaaccacagagcctaatagaaaataaacaatcaaaaattacagtctaatttactttccttccattcatctttgtagcccccacaaaatttagcacgttgctagctcgaaattatagttatgcactgaatatctactatgtgccaaaccctaactagatgctattttcacccttaattaaatatgtat

SEQ ID NO: 573727 - DNA, 504 bp, Homo sapiens
attttgcaggctttcagatggaaaggacttgccttgtcttcaatgagactttggactgtggacttttgagttaatgcaaaaatgagttaagtctttgggggactgttggaaaggcatgattggttttgaaatgtgaagacatgaaattttggaggggccggggtagaatgatatgatttggctgtgtccccacccaaatctcgtcttgaattcccacgtgttgtgggaaggatccagtggaaggtaattgartcatgggggcaggttttccccatgctgttctcattgatattgagtctcagtagatccgatggttttaaaaatgggagtttccctgcccaagccctcttctcttatctgcttccatgtgagacatgcctttcaccttccctcatgattgtgaggtcttcccacacacgtggaactgtaagtccattaaatctctttcttttgtaaattgcccagtctcaggtatgtatttatcagcagtgtgaaaacaactaa

SEQ ID NO: 573728 - DNA, 504 bp, Homo sapiens
attttgcaggctttcagatggaaaggacttgccttgtcttcaatgagactttggactgtggacttttgagttaatgcaaaaatgagttaagtctttgggggactgttggaaaggcatgattggttttgaaatgtgaagacatgaaattttggaggggccggggtagaatgatatgatttggctgtgtccccacccaaatctcgtcttgaattcccacgtgttgtgggaaggatccagtggaaggtaattgagtcatgggggcaggttttccccatgctgttctcattgatattgagtctcagtagatccgatggttttaaaaatgggagtttccctgcmcaagccctcttctcttatctgcttccatgtgagacatgcctttcaccttccctcatgattgtgaggtcttcccacacacgtggaactgtaagtccattaaatctctttcttttgtaaattgcccagtctcaggtatgtatttatcagcagtgtgaaaacaactaa

SEQ ID NO: 573729 - DNA, 606 bp, Homo sapiens
agtcatttactacaaaaacaaaaactttgaagtggtttgaacataaaacaaagttaagaaactaacagaaaaaaaaagtagtcagtattcaaaaacaagcttcgggggaatttaccagagtatgaaagttatcaacacagagcgactggctcagagccctctcaagtgtgtgatacgactggaaacttcttctctgagataaacgccagatcatttatgagagagagctttcccattttcagacagctctcctgaggacagaaggatttatctgcagcagtggaattctagttatatggtaggaagactcctgcacacacctctttaaatggactgtacctttgccttaataggaaaagatctcctgtttttctggaaagacagaggcagctctggggcaggaaggtcttcctagttrtgagcaccgtgtctacggatggtttgtccttcgctcagtctcctgagccggagcaaaggatgtggctgggccaggaggcggggactgcatctacatgtgtggatgtgtgtgtgtgtggtgtgttctcatttccgcttccccttttgagcaggcaacagcagttgaatgagttcagggagaaaggcata

SEQ ID NO: 573730 - DNA, 606 bp, Homo sapiens
agtcatttactacaaaaacaaaaactttgaagtggtttgaacataaaacaaagttaagaaactaacagaaaaaaaaagtagtcagtattcaaaaacaagcttcgggggaatttaccagagtatgaaagttatcaacacagagcgactggctcagagccctctcaagtgtgtgatacgactggaaacttcttctctgagataaacgccagatcatttatgagagagagctttcccattttcagacagctctcctgaggacagaaggatttatctgcagcagtggaattctagttatatggtaggaagactcctgcacacacctctttaaatggactgtacctttgccttaataggaaaagatctcctgtttttctggaaagacagaggcagctctggggcaggaaggtcttcctagttgtgagcaccgtgtctacggatggtttgtccttcgctcagtctccygagccggagcaaaggatgtggctgggccaggaggcggggactgcatctacatgtgtggatgtgtgtgtgtgtggtgtgttctcatttccgcttccccttttgagcaggcaacagcagttgaatgagttcagggagaaaggcata

SEQ ID NO: 573731 - DNA, 604 bp, Homo sapiens
catgccactgttctaaaaatccacacactggatgatataaaaagactaccaaaaaataacaaaacttctctcatttctcttctaccaagctataagcaagagcattttttgttaccatatttctgaaacagctgacaacattcaccatcctctacttttaacttcattcatgtaacattttaattgctgcagttgtttctattcccaccattccatggaaatggctttttggaagtcattaccagcatcttggttggcatatccaaatgcattgttttaattctgcttctgaacatctctgcagctcccgtggcactttatgcctacctctttgacctttttttttctcttctgtccctttaaacttgatcctcaaggcctgttcttgaacttggtaagtacataaacttaaggtgattatctattttaaaataagacactactttctttttaatcttctaaagagtttattgtttactcccctatttcttactaagaaattataggggcacttaatatcgccttttctcctttgggycttttcactttcaactgattcaaaacagctgtggaattcatttaaaatgttacaaataagaaaatt

SEQ ID NO: 573732 - DNA, 612 bp, Homo sapiens
aagacaaatgttttgcaaggctatggaatacataatttaatagcagatatgactctgaaggacaagtggtaaatcatgaaagaaactagaaaaaaagattaattaatgaaaaaatttatttcggatgtcgaccaaagttttagcgtcaatgtttgctacctgttcaattcaattcaattcaattcagaaataagtttcagcattggtttgagaatgtggtaaaaatattgctgctgcaaatttgttacaaaccagattcacaattcaaggcccaattgaatgttgactatgtcaaaacatggcagatgtggtagctgcagaatagtttatttcactcttttrgaaattatcaagaatgagagattatgagttctgccagagatttctacttactagtctcaatatctcccttctttagcaaaagaactccagtttttagcttggcaaatggcagtccagaatgaagcctacatgtcccaacctccatgacgtttgtgatcttatgactaagttctagcaaaggaggttatcgaagtgccctttcaatgataaaagacatcgactgcacactatttacccatctttcatcctactcatagaaatcatatgtga

SEQ ID NO: 573733 - DNA, 514 bp, Homo sapiens
gcccactgcctagacagagatgatttatcaaggcaggggaattccaaaagagaaagagtaattcacacagagctggctgtgcaggagaccagagttttattattactgaaatccgtctccccaaacatgaggggatcagagtttttaagggcrtcttagtgagtgggggaagtcagtgagccaggagtgctgataggtcaggtcagagatgaaatcataaggagtcgaagctgtcttcttgtgctgagtcagttcctgggtgggggccacaagatcagatgagccagttaatcgatctgggtggtgctagttgatccatcaagtgcagagtctgcaaaatatctcaagcactgatcttaggagcagtttagagagggtcagaatcttgtaggctccagctgcatgactcctgaatcataattgctaatcttttttttttttttctgtcttgctctgtcacccaggctggagtgtagtggggcaatctcagctcaatgcaacctccacctactgg

SEQ ID NO: 573734 - DNA, 475 bp, Homo sapiens
tggggatacagagatgtataaggtggcctctgcctttagcagcagcagatggataggtcgaggaggggagatctggacagtgtcagactgagataccatgtgggaggcacagggtgcccggggactgggagagtgtcgctccctaagcaggtaggcagagagggagagatggcatttgctctgggctttgagtggtgactgggctggatgaaggtggagccacaatggagaggaggmtgagagggctggaagcaaaggtgtggagatgggagcctgggaatggcctatggaaatagttggccagggtcttgggccaagagcaagagctggaaacatagcttgctcctgattgtggaggcttttgaatatttgcctgtggactttgtatttactaaccattaaaagttattgaaaagactgggcacggtggctcacacctgtaatcccagcactttgggaagccaaggtgggcgga

SEQ ID NO: 573735 - DNA, 626 bp, Homo sapiens
taccatttgacaggctaatcagcaatatatgagacttccagtttatctacatccttgccaagatgttttattatagtcatactaaatagtaaatgtgaagtggtatctcaagctggttttgatttgcattttcctaatgactaataatgttgagaatcttctcatgtgtttgttgtgcatgtgtatattttctttgaaaaaaacattcagattatttgcttatttttaaaacagattatgttttccttcttttattgaattataaaagttctttacatattcttgatagaagtctcttatcagataygtaatgtgcaaatactttctccttgtgtatatatgtccatggattgtctcttcacttttgcatggtgtcctttacaacattatctgattttgagaaactcaaatattcccatttttcttttgacacttgtacttttgtgccaagagccaaggccctaatccaagatgatgaagttttaccacaatttttaaaatagttttactgttttagcctttcatttgtgacaatgatgcactttgagataattaacttttctgtattgtataaaggaaggattcaacttcattctttgcatgtgaatatccagtgatctcaggac

SEQ ID NO: 573736 - DNA, 570 bp, Homo sapiens
aggttgattccatgtctttgctattgtgaatagtgctgtgatgaacatatatgtgcatgtgtttttagggtagaacaatttatattcctttgggtatataaccaataatggaatttctggtggaatggtacttctattttacattctttgataaattgccaaactgctttccatgatggctgaattaatttacattctcaccagcagtatataagcactccctttgttccacaaatttaccagaatctgttattttttgattttttaataatagccattctgactggtgtgagatgttatctcattgtgattttgatttgcrtttctctaatgattcatgatgttgagcattttttatatgcttgttggccatgtgtatgccttcttttgaatagtgtctgttcatgtcatttgcccttttttagtggcgttgttttttgcttacaaatttgcttaagttccttatagattctgggtattagacctttgtcagatgcatagtttgcaaatattttctcccattctgtaggttgtttgtttactctgctgatagtgtcttttgctgtggag

SEQ ID NO: 573737 - DNA, 636 bp, Homo sapiens
  misc_feature 1, 2, 3, 4, 5, 6, 7, 8, 9, 10, 11, 12, 13, 14, 15, 16, 17,18, 19, 20, 21, 22, 23, 24: n = A,T,C or G
nnnnnnnnnnnnnnnnnnnnnnnnaaagaaaaggccacccttcccaactccttatacaggaactaaagagattccttaggcctgttgggactgtgattaagtttagctagaaagtcccatccacgcatgtgagatggttggtgactaccaaaacgggcaagtggagaggcagccagcagacaccaaataagtcacaagagcatctcaactaaaatttctgaacccaaaaggcttatgagactgagaaattatattctctggtcagtcatgaaacttgctgcttggtcttctgatcagagtttccagggactggcaaggcttaatcttaaatccatggaggggccgaggttactatcctgggtcagtgatggtcactagccagggagttaggtgagggtccttagagatgaaagaggcccattgagctgaatgaggtctggattctggttgtgaattctgtttctactactttcaatggccctggtcccctcctgcaggtcatttttaaaagctaagccyaaagtatctgagtggcttggataaggtggctactgtgaatatgccctcaagatagcactcatgagtgtgagattctctgcacttcagaagcctctacaaccaggtgctattatgctt

SEQ ID NO: 573738 - DNA, 596 bp, Homo sapiens
ttataataatgcagtgatttcaacttatacagctgaccttagcttttctttgagataccaggttaaaagtgggcagattttataaataggccagtcttcctaatggaagtttgaatgtatctccaagataccagttcattatgacttaattctcgattttgttattgatttattaaaaagatgcataacaagtatcttttaaatatcaagctctaaagtaagttttctcctctgaactccaactcacacatataactattttctgaaatggtttaattctgctctgaaagaacccacagcagtaggaataataggtttagcctcaagatttctgctgaagagcagaaaagaggcttctacctttcatggcccrtggtctgacttttacccaagcctacttcaatttttaaatttcctagatggtcattttgaaggtcaatcattggttcactttcacaatggagaagaatagttgccgcaacatacagaattgtttatcttgcccccattcccctcacataagatcttcaatggttcccccactttatcataactttgttattatcaaaataacaacacaaatagaaaatatattg

SEQ ID NO: 573739 - DNA, 509 bp, Homo sapiens
gcctcacccatgcccatccaaaatgtttctctgcaaaggggttttacaagttgagcatatttgccatggggattacatatacttccttatggggagtgcataaactgagctgtgcagggagaggaagtacttcacttgccctcccctaatcagtcaacctaccctaaaatgttygactttaggtcttattctaagatcaagaaattgcagacagagtgcaatttcaaatgcctttctcagcccccatcttttagtatatatttcagagacataaaaatttagagccagaagaaatcatagattcattgtgtttaactctgcattacagttttaagcaaacagacctagagtgatgaaatgattgccaagttcatgctcccacatctccagggtctggctctggctctttccacagcatcacagctacctcttgtgcaattattaggagactgatcctttcttcttccaaaactgcctcacgtgatccatccacctcagcctcccaaagt

SEQ ID NO: 573740 - DNA, 534 bp, Homo sapiens
ctgttgcccagggtggtatctcagctcactgcaacctctgccccccgggttcacgtgattctcatgcctcagcctccctagtagctgggactacaggcatgtgccaccacgcctggctaattttttgtatttttagtagagacagggttttgccatgttgcccaggctggtcttgaacccctgagctcaagcaatcctcccacctcggcctcctgaagtgctgggattayggacatgagccaccgcacctggcctatttttttttttttaattctttatttggcctggacagtgctaacaactaatgttttcccatttagttatgtccaagagtgttttctttgaccgtatacatttctcctctcttttacctgccctggctcttccattcctcagggaagaatatacaaacttctgtggacatatggttttatttctcttgaatatatatctagcagtggaattgctaggtatatggtaactcttaacattttgaggaactgccaaactgtttccaaagtggctgcactgttt

SEQ ID NO: 573741 - DNA, 621 bp, Homo sapiens
acacttttttttttttttaattggagacaaggtctcactctgttgcccaggctggagtacagtggtacaatcatggctcactgcagcctccaactcctgggctcaaacgatcctctgcctcagccttctaagtagctgggagaactacaggcgtgtaccatcatgcctggctaatttttaaaagttcattctttgtagagatggggtcttgctatgttgccctggctgggctgaaactcctgggctcaagcaatcctcctgcctaagcctcccaatgtgtcgggattacagacgtgagccacagcacccagccgaccctcataacttaaccacagtatgctgatgttttcctgacaatataactttaattaaaaaacataatttttgagggcataaaaaagaacttctataaccaccggtctgaacagaaccatgtcatcttacaagttccccaaaatagcaaatgtctctgtatttcatctttaaaagcttgacactgaggacttatttttcagggaatatgtagctattttttgtrttgttagcagttttcatttctgagggatggaataaacattaaaatattctttgttctctaatgtattgtttgaattaaaaata

SEQ ID NO: 573742 - DNA, 503 bp, Homo sapiens
aaggagcaccacaataatttaatcatatgttttggagagtttcatggaaattcatcctgagtgcaaatttatagaaccagcagcttctgttaaacagataggaagctcaaaagtgttatgaggctaagagggctgagaaatcaaaatactaagatgggacccctaaatcagggtttctcagtctcagcgctatttacattttaggccaggtaattttttgtcatggaggactgacttgtgcatttcaagatgtttagcaacatccctgagcccttcccrttgactgccaggagcagcctaccccagctgtgacaaccaaaaatgtctccagaaattccccaaatcaaggttaaggctgcaagtaagctgtgatcacaccactgcactcaagcctggttgatagagaccctgtctcaaaacaaacaaacaaacaaaaaagaaatcccccaaattcccccaatcaaaaaccactgctctcaatcaaagtctaggcttgtttagca

SEQ ID NO: 573743 - DNA, 616 bp, Homo sapiens
cctgtaatcccaactactcgggaggctgaggcaggagaatcgcttaaacctgggaggcggagattgcagtgagctgagatcatgccaatgcactccagcctgggctccagagcgaaactccgtctcaaaaaaagaggcagcggggaatgaaggaggacaataaaattgttgatggggtagccccagcaggagcagacayctgctggggcacagtatataaaaagttcagggacagaggaagaaaaagccttgaaagctttaaaaaagaaaaaaaaaacatgttttaggccaaatgaagcatgaaaaatacttaaaagcactagcagttctttcctttgttgggaagttgtaagatttgaactgctgagaatctgatttggatcctgtgctactccttcctgagactgttttcagacaaacccagctgttctagggaggaactcaggggaagtgtcaagtcctcttcactccaggcctcctcatctgccccaggccagaggcacccatccaaactagcttctcccccgccccgcttccctgctcctcccatcctcacactccccacccagcctgaccccttttatcggtcagggctctgagaaagtcttcacattct

SEQ ID NO: 573744 - DNA, 463 bp, Homo sapiens
tactgacttatgtaggcttaaaggaagccctccatttcatttaattgttgcatacaggaattttaaaatttttaattatttaggttatttgattatttttacctttccttgttttcttccattcctctacagctgcattgattcattgctgtggaactgtccatagactcagtatggcaggctcaggtctccttttttaaaaagcaaaacaaccaayatttatcatctaggtacatttatgttataaacacacaaagagctgcattaaatacaaggggaatatatcaagggttacccagtgtccaccaaaatccaatatttccttcttccataattattcaagttttatcaggtacaacattttcttttcttttctttttttgagacagagtctcgctctgtcacccatgctgcagtgcagtggcacaatctcagctcactgcaacttctgcctcccagggtc

SEQ ID NO: 573745 - DNA, 434 bp, Homo sapiens
taaggcagtgagtgaggaaatgagacctggaagagaaggcagccagaaaagttgttttcaggcaggttggcactgtgggagagtggctctgaatcccactggggaaactctgggagtcagtgcagaacagatatcctacctgagatgtgagggagcaggggtctatatgccccaactaaattaatcatcagtcctcagtccagagcactcctggggagcactgagaccctggcaaatctagtcgactgcatggaacagcaaagcagacttctgtggctagaaagggctcaggcaaggaaccrcaggggctggcggccagaagtcgggccagtgtgcacccaggtggtaaggccgagggacacgggccagcctcctgcattggagctgctgcagcagcctcgtcagtggtccctacctccagtttctccatccca

SEQ ID NO: 573746 - DNA, 553 bp, Homo sapiens
ggagaccaaacccaaaatattacaaaacatagatattaaaaatactgtgaacaacaatcagcccgctttctccacctctcctgtaccagctaaatatttacmtccctcatccgtagagggtttttggacaagacaggctggtgcctacatggtgaaagttgtttttctctcttttcttgtaatattgcaaataaacaaggatatctgctttctcttgagcaggacaacagccaaagagtattattgcatagttcctgtcccctatctgggctacgattgtgtctgagagtaatagcacttatttattaactggaagaaattttacaggcacctatgttgtttctgcatagcttctgaggctcctctcttaggccactcctctcaccatgcccccacagctagttggtaaaatggctttgaataatgactcgctttgagttatctagaaatgtcccattagttcactattttcataaccccatagacttggtttgacaagggtgaggtttatttatgagttctcaactggcacccaatttttaaaaaccacaga

SEQ ID NO: 573747 - DNA, 553 bp, Homo sapiens
ggagaccaaacccaaaatattacaaaacatagatattaaaaatactgtgaacaacaatcagcccgctttctccacctctcctgtaccagctaaatatttacatccctcatccgtagagggtttttggacaagacaggctggtgcctacatggtgaaagttgtttttctctcttttcttgtaatattgcaaataaacaaggatatctgctttctcttgagcaggacaacagccaaagagtattattgcatagttcctgtcccctatctgggctacgattgtgtctgagagtaatagcacttatttattaactggaagaaattttacaggcacctatgttgtttctgcmtagcttctgaggctcctctcttaggccactcctctcaccatgcccccacagctagttggtaaaatggctttgaataatgactcgctttgagttatctagaaatgtcccattagttcactattttcataaccccatagacttggtttgacaagggtgaggtttatttatgagttctcaactggcacccaatttttaaaaaccacaga

SEQ ID NO: 573748 - DNA, 440 bp, Homo sapiens
tcggccaggctggtctcaaactcctgacctcaagtgatctgtctgcawtggcctcccaaagtgctgggattacaggtatgagccactgcacccggcccattatttacttcttgtctttcttccccactagaatacaagctccctaagagctggactcttgtctaactcatttactgtatattccttttgcctagaccatgtctggcatatagtaggcacccaggaaatattttttgaatgaaggaataaaatgccttgttaccctatctcaaacataaggtccttgagggaaaatgcagtctttaaagatatttctgtatcccacatagcaccatgactagatacagaaactgttgagataacttaaatgtgcacagcaacctggaccagtaagttgaagagttatgctttagtggccagtcttcctggaggtggataaa

SEQ ID NO: 573749 - DNA, 598 bp, Homo sapiens
cctacctcacatggaacactcatcatgttatgttggaccrtaaactaaatctcaataaatataaaaggattacaactatataggccacatgccatggctcatgcctgtaagcccagcagtttgggaggccgaggcgggaagatcaggaggtcaagagatcgagaccatcctggccaacgtggtgaaaccccgtctctactaaaaatacaaaaataagctgggtgtggtggcgtgtgcctatatagtcccagctactcaggaggctgaggcaggagaatcacttgaacccaggaggcggaggttgcagtgagccgagattataccactgcactccagcctggtgacagagcaagactccatctaaaaaacaaacgagcaaagaaacaaacaactatatgaagtattttttctgactacaatataactaaattagaaatcaataacaaaaaaggatatcttgactatctgcaatgtttggaattaaataacatctataataaatcatttatcaaaaggaatcaatggaatttagaaaatattttaactgcatgaaatgaaaacacataataacaatatgtatgggatttaaccacaatgc

SEQ ID NO: 573750 - DNA, 598 bp, Homo sapiens
cctacctcacatggaacactcatcatgttatgttggaccgtaaactwaatctcaataaatataaaaggattacaactatataggccacatgccatggctcatgcctgtaagcccagcagtttgggaggccgaggcgggaagatcaggaggtcaagagatcgagaccatcctggccaacgtggtgaaaccccgtctctactaaaaatacaaaaataagctgggtgtggtggcgtgtgcctatatagtcccagctactcaggaggctgaggcaggagaatcacttgaacccaggaggcggaggttgcagtgagccgagattataccactgcactccagcctggtgacagagcaagactccatctaaaaaacaaacgagcaaagaaacaaacaactatatgaagtattttttctgactacaatataactaaattagaaatcaataacaaaaaaggatatcttgactatctgcaatgtttggaattaaataacatctataataaatcatttatcaaaaggaatcaatggaatttagaaaatattttaactgcatgaaatgaaaacacataataacaatatgtatgggatttaaccacaatgc

SEQ ID NO: 573751 - DNA, 598 bp, Homo sapiens
cctacctcacatggaacactcatcatgttatgttggaccgtaaactaaatctcaataaatataaaaggattacaactatataggccacatgccrtggctcatgcctgtaagcccagcagtttgggaggccgaggcgggaagatcaggaggtcaagagatcgagaccatcctggccaacgtggtgaaaccccgtctctactaaaaatacaaaaataagctgggtgtggtggcgtgtgcctatatagtcccagctactcaggaggctgaggcaggagaatcacttgaacccaggaggcggaggttgcagtgagccgagattataccactgcactccagcctggtgacagagcaagactccatctaaaaaacaaacgagcaaagaaacaaacaactatatgaagtattttttctgactacaatataactaaattagaaatcaataacaaaaaaggatatcttgactatctgcaatgtttggaattaaataacatctataataaatcatttatcaaaaggaatcaatggaatttagaaaatattttaactgcatgaaatgaaaacacataataacaatatgtatgggatttaaccacaatgc

SEQ ID NO: 573752 - DNA, 598 bp, Homo sapiens
cctacctcacatggaacactcatcatgttatgttggaccgtaaactaaatctcaataaatataaaaggattacaactatataggccacatgccatggctcatgcctgtaagcccagcagtttgggaggccgaggcgggaagatcaggaggtcaagagatcgagaccatcctggccaacgtggtgaaaccccgtctctactaaaaatacaaaaataarctgggtgtggtggcgtgtgcctatatagtcccagctactcaggaggctgaggcaggagaatcacttgaacccaggaggcggaggttgcagtgagccgagattataccactgcactccagcctggtgacagagcaagactccatctaaaaaacaaacgagcaaagaaacaaacaactatatgaagtattttttctgactacaatataactaaattagaaatcaataacaaaaaaggatatcttgactatctgcaatgtttggaattaaataacatctataataaatcatttatcaaaaggaatcaatggaatttagaaaatattttaactgcatgaaatgaaaacacataataacaatatgtatgggatttaaccacaatgc

SEQ ID NO: 573753 - DNA, 718 bp, Homo sapiens
atttgtcatctgtgtgtattattaataataattaatatttattgagtgagtactatatgccagtgatggtgcttagcactttacatgcattctcttctttaatcctcagaaaagtttatggaaaggcacaatgacgcattcagggtgtggtttagggtgcggctggcttggcacccaaatcctaccatttatttttcctcttctctggagttcccagccaaaaagcatattcaccaaagaatcagcagccatatgggtaagtaagtgctgatgtttttaatgtctcttatgaaataggattagagaagaatgctgaagtttaggagagtgaagtctttgtaggagaagcagacctggtgctacccscgcctcagccttcagcttgactagaggctggaacaaatcacagtgttgtctgcttcctaaagcggaaccaataatgggggaaagggtcttgaaatgtgactttaagatattgccactatgcccagtgaactcaggttctggctaatagatgaacctaggaaggatccagtgaggtaggatggacagaggagtatgacataaggaaggaagtgaagtgaagttgttgctccctatgggtcaaagaaaattagtgaatacagaggcacacaagcattgtcttttccattttacaagggagataataaaagcctaatgaagttaaatacttttcccactgtcacaaggctagaaa

SEQ ID NO: 573754 - DNA, 446 bp, Homo sapiens
agcactcttcataacatcaaagacatagaatcaaccttggtgcccatcaacagtggattgcataaggataatgtggtgaacatacacaatgaaatcctacacagccagaaaaataataaaatcatttcttttgcagcaaaatggatgttgctggaggccatttattctaagtaaattaatgcaggaggagraaacaaaatactgtaagtgggaactaaacattgggtatttgtggacattaagttggcaacaatagaaacagggatctactacaggggtgagggagggatcggagccagggctgaagaactaactattgcgtacaatgctcactacccaggtgataggatcaatcgtaccacaaacctcagcatcacacgatatgctcatgtaacaaacctccacatatatcccaagaactaaaataaaaattgaaatcatattta

SEQ ID NO: 573755 - DNA, 446 bp, Homo sapiens
agcactcttcataacatcaaagacatagaatcaaccttggtgcccatcaacagtggattgcataaggataatgtggtgaacatacacaatgaaatcctacacagccagaaaaataataaaatcatttcttttgcagcaaaatggatgttgctggaggccatttattctaagtaaattaatgcaggaggagaaaacaaaatactgtaagtgggaactaaacattgggtatttgtggacattaagttggcaacaatagaaacagggatctactacaggggtgagggagggatcggagccagggctgaagaactaactattgcgtacaatgctcactacccaggtgataggatcaatcgtaccacaaacctcagcatcacacgatatgctcmtgtaacaaacctccacatatatcccaagaactaaaataaaaattgaaatcatattta

SEQ ID NO: 573756 - DNA, 595 bp, Homo sapiens
gcagccagaactgaatccttttgtggattctagttccctctcctccacaccctgaaacaggtagagtcggggagcaaccagaaaagctgcatctgtgattctttttccccgatggaagacccataaatactttattatcaagagcccatagacaaggcagtggttacagcaaaacaaatatcaggaaggacagacttaagtttatcaaagctacaaggctcattggattaaaagaaagcttctgcttactgtgtaactaggttcagctatagctgtattagagttgaggatagcattgagtgattgtaaataaatttttgtatyttgcttgcaatacaaaaatcctttttatcggtgggtccaatgtaaacaggcatgcacacacacattaaatataattaacaagtatttattaagcacctattctgaacaaggtattgtggtttggctctctatggagacagtgttatataatgtacatactaaaaatattttattgaagactctcaacctgacagtggtgctgtatgtgtgaaagtgcctgaagagattggctttattattaatacttttttcccaaatgcttatttgaaga

SEQ ID NO: 573757 - DNA, 434 bp, Homo sapiens
ccattcaactcctcacattataattaaagaccacattgttattacatttcaatcatcactctttgcatgttgatccgattgattatactgtttttcttctttttatcaggaaacttaaagtccactaccatggttcttttrccttgttctgtcacaggtaaacgattctccctccaggttttcacattgattacttcactggtgaaatgtgtgatggcatatcttataccctcttttgtgtgtaagtctattactcaatcctttgcttgcttttttttttttccttcctttccagtaaactattcctgaaacccttctgtctgaaggtttatgcagattgatcacggtctgagtttggtggctgagatatcagctcttggccaagtattgtgccacaacagacgtctccgggaagggaggagaagcagtggtga

SEQ ID NO: 573758 - DNA, 337 bp, Homo sapiens
gaagataaaggaacatttttaaaaacaccctcatttattaaaatcaatatttgagatagtgtctaaacttacctgaaataaaattcaatctgtacaaaaattaagaattttaattctctatctcaagatcctagaagcatctctaatttcacaattcaaggcctatggaagacaatttggattgagcacaccagaatttattttttctttcctcttgtcttctattayagaggttgaaaagccaaaaacataaacaacataaacaaaaacaaaatgcttcacaggttttcttgtaactgtgagtcaccatatgattcactttgagccaatgaccccc

SEQ ID NO: 573759 - DNA, 337 bp, Homo sapiens
gaagataaaggaacatttttaaaaacaccctcatttattaaaatcaatatttgagatagtgtctaaacttacctgaaataaaattcaatctgtacaaaaattaagaattttaattctctatctcaagatcctagaagcatctctaatttcacaattcaaggcctatggaagacaatttggattgagcacaccagaatttattttttctttcctcttgtcttctattacagaggttgaaaagccaaaaacataaacaacataaacaaaaacaaaatgcytcacaggttttcttgtaactgtgagtcaccatatgattcactttgagccaatgaccccc

SEQ ID NO: 573760 - DNA, 576 bp, Homo sapiens
tgttttttgcgggggaggatatataccaaaagaaacctactctagcagtagaattgctggatcatacggtagctcaacttttagttttttatgtaaccttcaaactcttttgctgtgcagaaacatttaaacttgatatgatttcatttgtcatttttgccttttgttgcctgtacttgtgggacattgcccatgaaatttttgcccaaacccacgtcctgcagattttccccaaggttttcttttagtaatttcatagtttgagatgttacatttaaggctttaatacattgcattggatttttgtgtatggtgagagataggggtctagtttcattcttctgcatatgaatatctgattttcccagcaccatgtattgaagagaccctttcacccagtataaggtcttcgcacctttgtcagaaatgagttcactgtagttgtttggatgaaattatacactaatctcatgtgagacaatgtgtgttagttaagacatargctgagttattgtaatagaggaacatcaaaggcagtggtttcagtaagacagaactttatttatctcacatata

SEQ ID NO: 573761 - DNA, 584 bp, Homo sapiens
aagctgaataccagggaaggctttttaaaatttcaaatgcttgtgcttctgaacatcaagaggcaatctgtgaagagattcaaagcaagaaagaagacaggaaacataagaacaaagcttcttgtttccccatcaccaagtctagttaaaattttccagttgaagggagaccaaggaactaagatgagataagatgttcatggggctgagggacaatgtgctgcagacttgaaggaaccatgcagaatgaaggtaagtcatcatccagggaacagccagcccccactggagtggcactttatactgtcagcccatgggaacaccacrgatactaagtcagaaactctaaaacttctggatccattcaagtgagaatcatgtcgcttgtgccaaagaatgacatcaatagtctttcatactagcaactggtaagaagcgcccatccatagcagcctactgcctacttaatgttaatcagtactggctccagtggcccaagataattttctcaggccttgactgttatgaattaacctaactcaattttgccagtcaaaattatcagattcatttggttatcagta

SEQ ID NO: 573762 - DNA, 455 bp, Homo sapiens
tgcttgcttagccaccttagccactctctataagtaccttcatattcctttctcctcattattatcactttaagaactttcttgttcaagaacaacatggaatgttcctcaggtcccattgaaggcctcattagctctatgrccttctctgatctttagcatctttgagctcagaagctaacctccaacataaaaggaaatgagtgcattaaaaaaatgtatcactgttagctatcaagggtaggtcctagaactagggccacggtgaattgaaggaagagagaagttatgtatgcatcactcaatggtgggagagctggaatgtaacaatgggtgtcaccatctggttacttttgctggctgtcttgatgtctgaccactagggtatcaatccagactcttattttattttattttattttattttatttttgggacggaatctttctctgtcg

SEQ ID NO: 573763 - DNA, 467 bp, Homo sapiens
tatggattcttaaatagggaagtaccatgatggctaattttctggggccccaaagcaatcactacatcttcccagcatttactctatcctatctcattagcaaaatctcagccactgtatttattttcctaaattatcttttttgggggaaacattaacaagaattcagtataatccacataatgaaaagattttgctactggatttattctattagaaaaataaaaaattwaacataagccatatttgtgtatatatatatatatatacacacatctgtgtgtatatatacatacatatatttccattactttgcttgaaggaaaagctctgtttatgagcaattatttatacatctggcttataataaaatcatattatgcaaaagaacagaatcaactcaaagatgaaattctgattataacaatatgggggctttacaatattccattagggagaaaggaaat

SEQ ID NO: 573764 - DNA, 427 bp, Homo sapiens
ctttttttgtctctggaacattaaattaaaaagattctgccatcttcaggaatggcagaagtgatactatatttactgttacacctaccttcttggaaagggctatgaactcaagacatgggtgagagtgacagtgaaatattgcatttttagattaggaagacctccttgttgaatgaatatcacttttacatcattayaaagttggaagatacttgtattttcattctatttgagatgatgcgaagcaaatactatcctttaatgattacatattaatgtactttctgaaacactttaatattggaattttttttttctttgagatggggtctcactctgtcgtctaggctggagtgcagtggcacaatctcggctcactgcaagctccgcctctcaggttcacgccattctcctgcctcagcct

SEQ ID NO: 573765 - DNA, 335 bp, Homo sapiens
cactagcccgcctcttagaacctctcatttcctttccatcgtggaaatctatcctcaaggaaataacttctcagtgttccatctgctattctactactcctcagggatattcaggcccccctcccttccctacacatcaatgctcgaggatttgcccccacccaggactsgcaaattagctttactcaacgtgccctgagtcaggaactaaaatatctcttagtctaggtagatactttcactggataggtagaggcctttcctacagggtctgagaaggccactgcagtcatttcttcccttctgtcagacataattcctcagtttggccttcc

SEQ ID NO: 573766 - DNA, 335 bp, Homo sapiens
cactagcccgcctcttagaacctctcatttcctttccatcgtggaaatctatcctcaaggaaataacttctcagtgttccatctgctattctactactcctcagggatattcaggcccccctcccttccctacacatcaatgctcgaggatttgcccccacccaggactgscaaattagctttactcaacgtgccctgagtcaggaactaaaatatctcttagtctaggtagatactttcactggataggtagaggcctttcctacagggtctgagaaggccactgcagtcatttcttcccttctgtcagacataattcctcagtttggccttcc

SEQ ID NO: 573767 - DNA, 335 bp, Homo sapiens
cactagcccgcctcttagaacctctcatttcctttccatcgtggaaatctatcctcaaggaaataacttctcagtgttccatctgctattctactactcctcagggatattcaggcccccctcccttccctacacatcaatgctcgaggatttgcccccacccaggactggcaaattagctttactcaacgtgccctgagtcaggaactaaaatatctcttagtctaggtagayactttcactggataggtagaggcctttcctacagggtctgagaaggccactgcagtcatttcttcccttctgtcagacataattcctcagtttggccttcc

SEQ ID NO: 573768 - DNA, 335 bp, Homo sapiens
cactagcccgcctcttagaacctctcatttcctttccatcgtggaaatctatcctcaaggaaataacttctcagtgttccatctgctattctactactcctcagggatattcaggcccccctcccttccctacacatcaatgctcgaggatttgcccccacccaggactggcaaattagctttactcaacgtgccctgagtcaggaactaaaatatctcttagtctaggtagatactttcactggataggtagaggcctttccyacagggtctgagaaggccactgcagtcatttcttcccttctgtcagacataattcctcagtttggccttcc

SEQ ID NO: 573769 - DNA, 688 bp, Homo sapiens
aacaattatttaaatacttcagtccagagctaactggactaaactgaagaagatatttgatgaaaaaggatgaaattttttttcctgtattatccatattcactttcaagcagttgtcactgaaagtagtaagaagcaagctaacaaataagttaaaggacttttggaaatattttaataatacactgtacttgtttcctattgctattatgacaatgattcatgtccattccacacacaaaataaagtcaacccgttctcaggtctcmaaaactctcaacccactagagagtcaactcaagttcaaaatctcatataagtctcacaagtttaaaagtcctaaatctcatcatacaaatccctaaattaagtataaatgagactctggatatattccatcctggcacaaaatttctctccacctacgaatctatgacactcaagactctagttatctgctccaaaataaggtgatggaacaggcacaggataacagttgtatatattcccatccccagaagaagaaaatgaaaggaaaaaaggagggcccaggcaatttcaaaaatcaactcggcaaattccatcaggtgtgagagctgaaataatcctctctggcccgtgaatctgccctctaggccagagggtctgtcctccagtcctctgtatgtgtgttaggtgactaaaacca

SEQ ID NO: 573770 - DNA, 688 bp, Homo sapiens
aacaattatttaaatacttcagtccagagctaactggactaaactgaagaagatatttgatgaaaaaggatgaaattttttttcctgtattatccatattcactttcaagcagttgtcactgaaagtagtaagaagcaagctaacaaataagttaaaggacttttggaaatattttaataatacactgtacttgtttcctattgctattatgacaatgattcatgtccattccacacacaaaataaagtcaacccgttctcaggtctccaaaactctcaacccactagagagtcaactcaagttcaaaatctcatataagtctcacaagtttaaaagtcctaaatctcatcatacaaatccctaaattaagtataaatgagactctggatatattccatcctggcacaaaatttctctccacctacgaatctatgacactcaagactcyagttatctgctccaaaataaggtgatggaacaggcacaggataacagttgtatatattcccatccccagaagaagaaaatgaaaggaaaaaaggagggcccaggcaatttcaaaaatcaactcggcaaattccatcaggtgtgagagctgaaataatcctctctggcccgtgaatctgccctctaggccagagggtctgtcctccagtcctctgtatgtgtgttaggtgactaaaacca

SEQ ID NO: 573771 - DNA, 688 bp, Homo sapiens
aacaattatttaaatacttcagtccagagctaactggactaaactgaagaagatatttgatgaaaaaggatgaaattttttttcctgtattatccatattcactttcaagcagttgtcactgaaagtagtaagaagcaagctaacaaataagttaaaggacttttggaaatattttaataatacactgtacttgtttcctattgctattatgacaatgattcatgtccattccacacacaaaataaagtcaacccgttctcaggtctccaaaactctcaacccactagagagtcaactcaagttcaaaatctcatataagtctcacaagtttaaaagtcctaaatctcatcatacaaatccctaaattaagtataaatgagactctggatatattccatcctggcacaaaatttctctccacctacgaatctatgacactcaagactctagttatctgctccaaaataaggtgatggaacaggcacaggataacagttgtatatattcccatccccagaagaagaaaatgaaaggaaaaaaggagggcccaggcaatttcaaaaatcaactcggcaaattccatcaggtgtgasagctgaaataatcctctctggcccgtgaatctgccctctaggccagagggtctgtcctccagtcctctgtatgtgtgttaggtgactaaaacca

SEQ ID NO: 573772 - DNA, 594 bp, Homo sapiens
taagttcattttctggcacttcaagaaatttaaaatgactcctttctcattaaactagtcagagactattgtaggaactagtcatttttatcaggactgtatacagagtatatcataatctaaattgtggctttggtttcatggaggaagtaggcagaaagatactaagagtttgaattttcagcctggaaagctagtgaacctagttatatggtgttaaacaatccttacatggcagaacccatgctgactaagcctgaaacattaaccaaaatgttaggatgaagaygcagatcaactcaaactcgaggtagaaggaataggacttggctaagagaggctgtgggcctgtggtccacaatctaagtaggctgagccttcagtaatttggtatcttgcagttaaaaaattcaactatgatatttactcaatgaattgaaaacatatgtctcccctaaacatgcacaaagatgcttacagaagcttattcattattgccaaaatctggaagcaacaaagatgtccttcagtacataaatgaataaactatggtacatccagataatggaatgttattaagcactaaaaagaaat

SEQ ID NO: 573773 - DNA, 553 bp, Homo sapiens
atgggagggaacagacatatatttagggcctatgccaagcacaagatcgggaacagaagtgggcgttacagagtacgttcatcagctgcttgttcaagaggtggcctagctgttgtttcagtgtcttaaacagtcaagcatgtttagtcatgcctgcgggttcttttgcaatccagtttcctcagaaactgacaaggcttctatactattttcctcccagtgagttctgtttccaggacatacacaatattcttagatatacttcttacgtatagttttcaagcctgtcttacttttttgcttccccacctctacgcctckctctcagtttaattgcagctaatttgaaggctagtaggctcaagcaagaagatattgcatctcattttttttctcctcaaataagaaattcaagtctgaagaaagttagaaaatgttttcaaagttacaaaattaataattggcaaagttatcaggtgcagcggctcacgcctgtaatcccagcactttgggaggctgggctgaggcgggtggatcacctgagatcaggagt

SEQ ID NO: 573774 - DNA, 401 bp, Homo sapiens
agcaacggggaaaagagccctcagcagaatcagaccacgctggcaccctgatctcagacttccagcctccagaaccatgagaartaaatttctgttatttataaaccatccgttctatggtactttgtagagcagcctgaagtaactaagacaagttgataagaactggtgagaatgaggggacatgagacctttcatccattatcagtggggttatgaattgctatataatgttgaaaaagtatttaaaaatgggcctgggcatggtggctcacacctgtaatcccagcactttgggaggctgaggtgagttcatcgcttgagctcaggagtttgagactagcctgggtgacatggggatacccatctctacaaaaaatacaaaaattagccagggatgg

SEQ ID NO: 573775 - DNA, 598 bp, Homo sapiens
acaagtcttttgaactcctggtttactcatctgtaaaacagaggtaataatggcactcttgaacatttacaatacaataaagaacaatactacatgaaaacatgataattcaaaatagaaaatgctaagaaacatacaatagatatagagagtttgggagcttcagaacggtgtctacttccagttggctctcttgccatacattgcaatatataactatttatgtcctcatcattttcagtcataagtgatggcagaatcttgaaggaatgagcctgtaaggcactttaatgtagtaataggaaagtcatgtcacagtatgccaatcatggctcaggcagcaggaggcctggagaaatatgtcttattcctcccaaaggccagtgttaagggatatcagagagaaaacataaagttgctcaggaccactatcaccatgtgactctgcaggaaagcagaaactgttcataggtttgcaggctgctctccagctatgagggtgcttgtctcaatgggaagaacaattttcaaggtatcagaagactaaaaamttagtcccagcactaccacataatagctatgtgaccttgggaaagtc

SEQ ID NO: 573776 - DNA, 549 bp, Homo sapiens
ttctcacgctgctgttaacccagtatcttaaggcatggatggaatacccggtaccaacaccaccacctctccttcattttctgcacccatagcagtcattttaaattggccactatgatttttcactgttgaacctacacgcataatcagaaaatccttcagaagacaatgtcccagaaaattattgtcagttgatcagagacgacgaggtaaatgagatctaatcacctagtcacctatttctcaggcwtaccaatatgctgaatgagtttgaaaggaattaagcagcaaaacgaaacagaaaataatatattctgtgttttattcctactcaccatttaattatgtttctgtgtcctaatggaagaaaactggagcatgtgaggtgagcagatattgactgacaggtccccagtctcaaaaatgggtaactgaaagctaggcctatgtgggttgagaaaggatgggaaggaagaaaagatggagtgggtagctcggcctatacaaagtatttattttaagagaaaaagaagaaatttgttctatttg

SEQ ID NO: 573777 - DNA, 438 bp, Homo sapiens
tcatgtataattctttatactgttggcctgagcaactagagttaccattaacttagatgggaaaactgccaatggagcaattgtagagagagatgaggagtcagctggggacactcatgttcaaagcatctattccatggagatgtaaatggtggtgttggatgcaagactctgaaatagaatggagatgtctggctaagagatataaacgtgggagtcaccaatttgtatgtgatatttaaagctatgaaactggatgagatcactcaggcagtgagtgcagatggagaagagaagaggaccaaggactgagccctggggctctccaatagtaggaaataaaggtcagagagagagagagatgaaaaaagagtgagagaaagagagagacaccagaaaggagaaaaaccaagggasgatggtgccctggaagtcaag

SEQ ID NO: 573778 - DNA, 627 bp, Homo sapiens
cataggagtttacaacctctctatctccggtatcatgataaccactttcccatagatatgtgagcctgactcctcatgcctggagatagaattgcattgatgattttcatagggtcaagtttgcatgacctctcagcattacccagcctaacctcctattggaggtctaaatcctatttcttcttttggtggccctataagtctttctgctgccctttttgctgtgttctgctacttactgtgactacagcactttttaaaaatattttgttttattttattttaagttccwgtatacatgtgcaggtttgctacataggtaaatgtgtgctatggtggtttgctgcacctatcaacccgtcacctaggtattaatccctgcatgcattagctatttttcctgatgctctccctcccctcacctcaccctcctgacaggccccagtgtgtgttattcccctccctgtgtccatgtgctctcattgttcagctcccacatatggtgttgggttttctgttcctgcattagtttgctgaggataatgtcttctaactccatccatgtacctgcaaaggacatgatcttgttcctttttatggatgcatagtattctatggtatatatgt

SEQ ID NO: 573779 - DNA, 627 bp, Homo sapiens
cataggagtttacaacctctctatctccggtatcatgataaccactttcccatagatatgtgagcctgactcctcatgcctggagatagaattgcattgatgattttcatagggtcaagtttgcatgacctctcagcattacccagcctaacctcctattggaggtctaaatcctatttcttcttttggtggccctataagtctttctgctgccctttttgctgtgttctgctacttactgtgactacagcactttttaaaaatattttgttttattttattttaagttcctgtatacatgtgcaggtttgctacataggtaaatgtgtgctatggtggtttgctgcacctatcaacccstcacctaggtattaatccctgcatgcattagctatttttcctgatgctctccctcccctcacctcaccctcctgacaggccccagtgtgtgttattcccctccctgtgtccatgtgctctcattgttcagctcccacatatggtgttgggttttctgttcctgcattagtttgctgaggataatgtcttctaactccatccatgtacctgcaaaggacatgatcttgttcctttttatggatgcatagtattctatggtatatatgt

SEQ ID NO: 573780 - DNA, 310 bp, Homo sapiens
atggctttagcccagggagcagaggttgcaatgagctgagatcaagccactgtactctagcctaggtgacagaggaagactctgwctcataaaaaaaagaaagaaggaaagaaagaaagaaaccataggaaataaggaagaaatcatcatagcaataaagagaaaaaggcaaaaagttatcttacaaattgttaaaactctcaggtaacaacagataatatgcaaataagaaataagggaggtgttctacagtgtttctcgcatatattaataccttattaacaccttattaagattcttctaagaattg

SEQ ID NO: 573781 - DNA, 548 bp, Homo sapiens
ttatgtacccagtagtcattcaggagcaggttgttcagtttccatgtagttgagccgttttgagtgaatttcttaatcctgagttctagtttggttgcactgtggtctgagagacagtttattataatttctgttcttttacatttgctaaggagtgctttacttccaactatgtggtcagttttggaataagtgtggtgtggtgctgagaagaatgtatattctgttgatttggggtggagttatgagacagactttcactctttgttgcccagactggagtgcagtggcttgagctcagctcactgcagccttcttttgtcaggttcaagcagttctcctatctcagcctcccaagtagctgggattactggtgccctccaccacacctggctaatttttgtatttttagtagagacggggtttcaccatgttggccargctggcctcgaactcctgacctcaggtgatccacctgccttggcctcccaaagtgctgggattacaggtgtgagccaccacgcccggcccattctggataaatttct

SEQ ID NO: 573782 - DNA, 415 bp, Homo sapiens
agatctgctgtaacaaagtaccacaaactgaatgccttaagacaatggaaatttatagtcttacaattctggaggctagaagttcaagatcaaggtgttagcagggccatgctgtctctggtcgctttggggagaacctttccttgccttttctagatgtttgctgataattyttggtgtccctcagcttgtagatatatctatccttgtcttttctagctggtattttctgacagttcttaaggtttcttaggtggtagatacatcactgaaatcacatagccatcttctccctatgtgtctaaatatcatcttctctctgtgcttgtctgtctctgtgtataaatttccctcctttttaaagggcaccagtcatattatattaggacctaccagaatggcctcattataactc

SEQ ID NO: 573783 - DNA, 463 bp, Homo sapiens
ttttgccatgttggacacactggtctctaactcctggcctcaaatgatccacccaccttagccacccaaaatgctgggattacaggcttgagccactgcacctggcctaagttggtgtcagattttgatagaagtcagaaaaataggtcaggaatacattgtgcataagttacatgtcaggtaatggaacttgaaatttatcctccaggttagggtcactcaaaaattgtaaatgggccacacccaaagttcaggttgagctctaggttgcaagcaacagaaacccaactttctgactcaacccttctcccaatccccacacaycaaaaaaaaattaaaaggaatttactggctcctgtgttagggagattcaagaagagctaaacttcaagggaacagctgtatccccagccttaaaattgcatcatcaagatgcttatctattccaacttttatatctatt

SEQ ID NO: 573784 - DNA, 566 bp, Homo sapiens
agaattatttattacattagtgattcctatcrgaaaaaaatgctttgtctccttcaatcaaacaccattatattaaattacaaatgtcattcatttaataagagtaatttagtgtcactatgtgttagttactatactactcattgggacacaggtaactaagattgatttgcactctcaaggagctcatggtctattatgggagagatgttaataagctaaccattgctatcaatgacaataaaaaatggtgatattttaaaacgtttgaaaataatatttgccaaatgggtcagtaaatgctcacaaactgtagtttgggtggacatgggaatttttcttgtgaattatttgtgaaaaaggcattttagatcaggataattgtatgtgcaaatgctgatatgtttggcagaggcttagtttgttttcctcaaaagtaaaacctgagataatgtcttgaatacatgtggtttacttggcaggatgggagtgaacctagaaaacaggactaacggagaaggcctaagtgggaacaaaaaaggattaaaaatgaatgtaagatttca

SEQ ID NO: 573785 - DNA, 457 bp, Homo sapiens
gcaacaatggccataatcacaggtggatcgcaaggtcagaagattgagaccatcctgcctaatatggtgaaaccccgtctctactaaaaatacaaaaaattagctggacatggtggcgggtgcctgtagtcccagctacttgggaggctgaggcaggagaatggcgtgaacctgggaggcggggcttgcaatgagccaacatttcgccactgcactccagcctgggtgacagagcaagactccatatcaaaaaaaaaaaaaaaaaaaaaaagaagggccataatccacaaatccaaaaagaagggccataatccacaaatccaaaaatagtagatgttggcakggatgtggtgaagagggaatgcttctactctgctggtgggaatgtaaactagtacaaccagtatcgaaaacagtgtggagattccttaaagaactaaaactagaactaccattt

SEQ ID NO: 573786 - DNA, 589 bp, Homo sapiens
taccacatcttgctttacttttggacttctcctgctaaatttttcgaagtacagtgagaactgatgctttaagctaaatgtccctagctaaatttcaggttcaatcttggacttttattcattttatttcttcatttagtatcatgaaaaatccctcaccaacatatttttagtttagtgtagcttatggaatacataatttctgtagagttcaccatgtgatgccgcactatactttcatcagaatctgtgaggaagatcagaaccctggagaacagggaagagaaggagaaagggaacaaattggaaaaaaacatttatatgtagcgcagacaagagtaatatcaatgcctctgctttaacaacatttctaatgacatttatcaatrtaaataagttaattttataaagcataaagaatagaattaagttattaccattaccatcattgctaatatttattgaattttattctacctatcgtaaccaaattttacaaaagtcattcattcccagaagggttctatgaattcgttcctataattatatttattttacagatgaagaaaccaaagcacaaaaatttaac

SEQ ID NO: 573787 - DNA, 477 bp, Homo sapiens
acaataatgacagaattaaaggaacgtactttaatccactgggaaacatttagggaaacatttatagtagttccttgaagcaagttgtcaaagggaggcagaaagcaatctaatctgggcatttggagagttggttagtttccttaatgttaaatccctttgggtttttccccaagccctgcaatactaatatctgtgagctcaccaatgaaaaacatgattggaggggcattttaatagcaatatgctcattggaaaagattattcaaataaaaggaaaagaagcctgtctgaaataaagartttaccgtacaaaataagtttgaaagaaaaaaaatcaacatatgtacaaaaattaacaaacaaaatatctgaaaaacactattaaaattattagtgagaccttctcctatgccactataaaacataaaacaataaacttcagttgatattctaatcatctcagattttgaattc

SEQ ID NO: 573788 - DNA, 443 bp, Homo sapiens
attatgaaattctaatttataattcagggctaatattggtgtgccaatttatttttgccaaataaaatgaattaaacatttattttaataaaatctaagccatagtttgctttattttcccattgttagattattgaagtatactcaaatgagatagactagctcagacaaaggggtgtatgggattcaattgccaaatgatagatttctccctsccttcctcccttgaatatacaccaactttttttaaaaagaagttacttattgatacaataacactgtgtaacaaaatactagataatgcaacagctttaaaataataagcctttaagtcaggagtctgtgggttggcaatttatgctgcactcatatgggttcttctggtcttagatgggctcactcatatgtttggtggttggtagttgatagtttggtgataggag

SEQ ID NO: 573789 - DNA, 535 bp, Homo sapiens
gcccctggcctctctgaaatctcatgtccctttcacatttcaaaaccaatcatgcctttccaacagtcccccaaagttttaattcattccagcattaacccaaaagtccaagtccatagtctcatctgaggcaaggcaagtcccttctgcctatgaacctataacatcaaaaacaagttagttccttccaatatacaatgggggtacaggaattgaataaatcatcccatgttaaaaagggataaattggccaaaacaaaagggctgaaggatccctgcaagtccaaaatccaacaggatagtcattaaatcttaaagcagctaaatgatttcctttgactccatgtctcacatccagggcatgttgatgcaagaagtgggctaccaagactttggacaactctgtccctgtggctttttgcagggtacagtccccctcccagctgctttcacgggctggcatcgagtgtatgtggctttttcagcsacacgtgcaatctgtcagtggatctaccattctggaatcttgaggaca

SEQ ID NO: 573790 - DNA, 569 bp, Homo sapiens
  misc_feature 254: n = A,T,C or G
tttgataactgtaatgactctgtaggcacttaacaaatgttgcacaaatgagtgaataattgagggatgaatgaatgactgactaggacatgatatattctaaagctttgataatttatagtttaagtattataatttaaaaaactgaataaagatatttttctgttactatcattaccatgataaaagttaatgataatttctgccactggagcttacgtttcttgtgtacagatgcaataatctttttattnttttctgtttctatatttgttcagygcctagaatatagcaggcactctagaagagtttgaaggaataacttctggcaaaaatgcatgcatgctgataatatttctagataatacatccactatgtaagattaatagactcctacaatgcttataatagcattctggcagtccataatcttattcaactgctcttaactttctttttaattttatacattactctttgccaatattgttagtaaactctgtatcaacaggccctataatatcttctttcttgctaggcacttttcttatttttgttcatgatacca

SEQ ID NO: 573791 - DNA, 615 bp, Homo sapiens
attacataagtacatattatcaatacagatattttaattatcccagtggtatgtacaaacatcaacaaatatactcttaactgacataatcagaaatcccaatccaacaattgtatattttaattcaaattaaaatagattacttaacagatcaattcttatttatttattactatattagagatgggatctcagtatgttacccatgctggtcttgtattcttgatctcaaaagatcttcccaacttagtttcccaaagtgctggtgttataggcataagccatgatgcccggcccttctaggactaatcttgatcattaaaaatctgtgaatatactggcattggacctctagatataatttattttattttttatatttaattttaaaatgtagtggggtttgaaaagataatttcacattattgacattatttattaaagattggagttaaattctactcaggatgcttcttttgttatatattgacattctatagacaacagtgtctccaaatctgcatatcatttatatggcattctttagtctgacatagttagatgaaattcttcaaaacytatttatacttagcaaacttattgattcctcagtgg

SEQ ID NO: 573792 - DNA, 574 bp, Homo sapiens
ttatttattatactcatttgacactttaaactgttttgtcatttagtctcaaaatggtttggatttacaaatgagtacactgaggctcaaaaaggagtaggccgttttcaaaggtaactcagctagtaagtgacagagatggatctgaaatccaggtctcgattatcccaaaacttttgttctcactgtccaacgactgatttaagacaaaacgttgctgrcttctaatttcaagtgaaaaagtgttatttctaaggatgtccagaatggatgaaatgtaatttattaaacttcccctcttacgtattttggcaattctctctcatctttttagtatatgaagcagtgactcagaaaacaaattcccagagtgaatgaatacctgtagccccctagtggcctaagaatgttatccacttcacagtgaactgggataactcagaagcatttcctcatctgactgcctgtctccctaagagagacctatgtaacaaaagaatttctttttttttttttttttactttaagttttagggtacatgtgcacaacatgcaggttcgttacatatgtata

SEQ ID NO: 573793 - DNA, 555 bp, Homo sapiens
agcgagactctgtgtcaaaaaaaaaaaaaaaaaaaaaagtaagaaatgagtgaacatttcaaaatggcaggaactggttaagtttaaaactgaacactttcattttgacaagaaagcagtcattctttttctccattaacagagataaagaaaagcttttcaaatctgtatatggctacgttgattgacgtctgagttaaaaatgaaatctcagccgggygcggtggctcacacctgtaatcccagcactttgggaggctgaggtgggtggatcatgaggtcaggagatggaggccatcctagctaacatggtgaaaccccatctctactaaaaatacaaaaaattagctgggcatggtggcatgcacctgtagtcccatctactcaggaggctgacacaggagaatcacttgaacccaggaggcggaagttgcagtgagccgagattgtgccactgcactgtagcctggttgacagagcgagactccatctccaaaaaaaaaaaaagagagagagagagaaatctcatttccctgttgctcagtcatgttccta

SEQ ID NO: 573794 - DNA, 555 bp, Homo sapiens
agcgagactctgtgtcaaaaaaaaaaaaaaaaaaaaaagtaagaaatgagtgaacatttcaaaatggcaggaactggttaagtttaaaactgaacactttcattttgacaagaaagcagtcattctttttctccattaacagagataaagaaaagcttttcaaatctgtatatggctacgttgattgacgtctgagttaaaaatgaaatctcagccgggcgcggtggctcacacctgtaatcccagcactttgggaggctgaggtgggtggatcatgaggtcaggagatggaggccatcctagctaacatggtgaaaccccatctctactaaaaatacaaaaaattagctgggcatggtggcatgcacctgtagtcccatctactcaggaggctgacacaggagaatcacttgaacccaggaggcggaagttgcagtgagccgagattgtgccactgcactstagcctggttgacagagcgagactccatctccaaaaaaaaaaaaagagagagagagagaaatctcatttccctgttgctcagtcatgttccta

SEQ ID NO: 573795 - DNA, 444 bp, Homo sapiens
tttctctaatcacaatcaggaactgaaggtaggtggaggacatgctacttgtctgtttggctgagctcattttatttttatgaaaacacgattcaatattggctcttctcctaaaggtatattttgagcatcactagttagaaagggcacctgatgactcagtatgaagattcatgtcctactcagctttgacaactctgccaggctctggaggaacctcagagatttaagaaaggattgaaaaggttccctttaaaaaaaaaaaaactagctttgtagcactttgctgcctggtaaattctgtatggtgattgagatgctgcaagagatgtgtataataagcgaagtggctcwctgcactgattgcatgagcagatccacgtcccatatggtggatataggaactgcatatgtgtgcaagtgtagttttgcatctgcacgtga

SEQ ID NO: 573796 - DNA, 623 bp, Homo sapiens
atgacacagcagtaggggttacttgtatcagagataaaaacccctccccctcccttgttcaggtgtgctctcgccattgttccatctgagagatgcactcttctatagaagtaaaattgccttgctgagaaaattcgtgtttgagtgctatttcttttgcagcaccaaaaatttatttctagcaaatttgggggcccatctgggattctcattctcctctggggagggtctagacctctcccatgaggagacatgccctgctgcctcactgcagtggcctcgggggtaaggaattgagacccacccggtgtgatgaataaactcatrctctcagcaatgaagaaagaaaccggctggcaacctgggggaaaggatcctcacataccacagtgaccaggtaattctctgcacagaccaaggtaagaaacaccgcaggggcgacaaagtatttccttggtcgtcaggatattctgggggttgaaagtgtgtgtgaatgcatggagcctccagcagttggggcttaaggataggtgagacatctctaatatgagagattgagtctaatagccctagcaagcccccagagaaggataggtaagccatctgtaatacgagagattgag

SEQ ID NO: 573797 - DNA, 596 bp, Homo sapiens
atgtgtcaatagacttaaaaatatttctcttggttgggcgtggtggctcatgcctgtaatcccagcactttgggaggcctaggtgggcagattacctgaggtcagtagtttaagaccagcccaaccaacatggcgaaaccccgtctctactaaaagtacaaaaattagccaggcatggtggaggacrcctgtaatcccatctgctcaggaggctgaggcaggagaatcacttgaacccaggaggtggaggttgcagtgagccgagatcgcatcactgcactccaactggggcaacaagagtgagactccatcccaaaaaaaaaaaaaaattctcttatttgacatgatttatttcatttaaagaatctgtaagaaagaataatgaggaataataaggttaaaaaaccatgattttgaagattgcttaaagacttaagaaaatcctcatgctgtactgatatattattaagaagtgaaatatgttctacacaaaactgtgtatatatatatatatatatgcacagaaacacatatatttatgattgtgtatatttgtatatgattttatttttgtataatgtacatatattttacag

SEQ ID NO: 573798 - DNA, 300 bp, Homo sapiens
aagctaattcttgttggaatgattcagttccttgtggctgtcggactgaggtccagttttattttttttttgccagctgtcagctctcagttcmtagaggcatctgcattccttgctatgtggccctgtgtccatccacaagacagcaatggtgaacatgtggaatcctcctcatgcatcagatctctctgacttcctcttgtgcagccagccagagacaagctctcagctgggttcatgtgattaggttaggctcacctgaataatctccctatgttaaagtcaacgatatcataagat

SEQ ID NO: 573799 - DNA, 461 bp, Homo sapiens
acgcgtttattgcaggagtggggtcctgataaaagaataagttctgccgccttcctttttctcttgttctctcttgcatatgctcttttcccttctgccttctgccatgggatgatgcagtaagaaggccctcactagatgcctgtctctctttcttgtacttctcagcctccagaaacattagccaaataaatttctgttcttcatgaattacccagtttcaggtgttctgttatagcagcaaaaagtggactaagacaaccctcatgaagctaatgtggctctttaaggacagaatgctggagggcactgcatctcctcaggsctggataaatgctgtccaaatctttccctgaggacatctcttttctttctttctttctttctttctttctttttttttttttttttttttgagacagagtctcgttctgtccccccagtctggagtgcagtggcaa

SEQ ID NO: 573800 - DNA, 575 bp, Homo sapiens
tttcaagtgagaagtggtaagttaaaggaagctaactgagggacaagttagaatggtttataaaagaactatactaaagctgaaatgaaaaaaaactaagtttgaggattttactccactatttactatctggatgactgaagataattaatttctctcagtctatttcctcatctataaaatataactaaataataaatacacaaagataaataaataataacaatatgctcatcctcaaattcttagtgcccagcacacagtaagtgttcaaataatgcctgctgaatgtctgatcttcaccattttattggtaaatagaaaataagtatggggcaagcatttagtgttgtcagcatcaatgaaaataataaatacaaaaacacctcatgaaccataaagcactgtacaaatgcaagggcttttaaaaacccaaaggaacatgatggctttcccacatagaagatataaaatcctaacccactctctcttttcccttctgttacaatacaatggcagcaacagcaatttcagcattgggttrtgaaacaagttacaggagctaggcttcatgc

SEQ ID NO: 573801 - DNA, 531 bp, Homo sapiens
caaatctctttttcaccccatcaggagcatttgtgggggatgctatgcttaaactgacagtactgccatttctactctactgtggctgccccaagtggctctgggcactgcaaacctgaatccttggagagtttgctgtttgcagacttaagtaagcttctatctcgccactcatttttttttgaggtggagtttcactctccttgcccaggctggagtaaaatggcgtgatcttggctcactgcaacttccgcctcccgggttcaagtgattctcctgcctcagcctcccgagtagctgggattacaggcatgtgccaccacatctggctaattttgtatttttagtagagatggggtttcaccatgttggccgggctggtcccaaactcctgacctcaggtgatctgcccacctcggcctcccaaagtgytaggattacagaggcaagccaccatgcccggccatatcttgatactcttgtgattgtcttcgagctcctcccagttcagaaaaacttcctatttccatc

SEQ ID NO: 573802 - DNA, 464 bp, Homo sapiens
gtatcttacaataaagtaagctagagaaaagaaaatgttactaagaaaatcataaggaagaaaaaatatgtttactatgtattaagttgaagtgaatcattataaaggtcttcatccttgtcattgtcacactgagtaggctgaggaggaggaggaagaggaggtcttgctgtcttggggtgacagaggcagaagaaaatccacgtgaaagtggatccatgcagttcaaacccatgttgtttaagggtcagctgtaatatacattttgccaagtaaaaacagcaatttaaawacatgtaactaggtgttatgttcatttcttgactgggtaggatggctctgcataggaaataaaacaaagtagactagtgtgtttgttcatctgctggtatggcatgagcattacctaggattccaagtaacatagagaaatataaaagtcaaatgacatctgacaaactgtg

SEQ ID NO: 573803 - DNA, 572 bp, Homo sapiens
gttggttgatcatgttgttcaagtcttctgtatccttgatgattttctgcttagttgttctatcagttattgggtgggactagacatctccaactattatttttatttttatttattttatttcaataggcttttggggaacaggtggtgtttggttacatggataagttcttcagaggtgatttctgagattttggtgtacccatcacccaagtagtgtacactatacccaatgtgtagtcttttatcccttactcccctccctctcttccccccaagtccccaaaatccattgtatcattctcatgcctttgcgtcctcatagcttarctcccacctttaagtgagaacatgtgatgtttgggtttcctttcctgagttacttcacttagaataatggtctccaactgcaccctggttgctgcaaatgctattatttcattccttttaatggctgagtagtattccatggtgtatatatgtgtgtgtgcgcgcgtttgtgtatatatatatatatagagagagagagggcgcattttctttatttacttattgattgatgggcatttggg

SEQ ID NO: 573804 - DNA, 572 bp, Homo sapiens
gttggttgatcatgttgttcaagtcttctgtatccttgatgattttctgcttagttgttctatcagttattgggtgggactagacatctccaactattatttttatttttatttattttatttcaataggcttttggggaacaggtggtgtttggttacatggataagttcttcagaggtgatttctgagattttggtgtacccatcacccaagtagtgtacactatacccaatgtgtagtcttttatcccttactcccctccctctcttccccccaagtccccaaaatccattgtatcattctcatgcctttgcgtcctcatagcttagctcccacctttaagtgagaacatgtgatgtttgggtttcctttcctgagttacttcacttagaataatggtctccaactgcaccctggttgctgcaaatgctattatttcattccttttaatggctgagtagtattccatggtgtatatatgtgtgtgtgygcgcgtttgtgtatatatatatatatagagagagagagggcgcattttctttatttacttattgattgatgggcatttggg

SEQ ID NO: 573805 - DNA, 515 bp, Homo sapiens
aaaatagagaaacagtgctgacttcaagggtatgtgacttgtacagttgtacaggggcttgcatttggattaatgctctgctattgccgtcttaaaattattaaattttggacaaggggccctgcatttttatttttacagggctctgcaaaagaggcagctttctctgtgtagaagatggcggattctgtttcttgcctaaggrgttcaaaacattgtgtattagaatcatgttaggacagtaacgtaggaacttgcttaattgttctgagccttggttgcctctcttagtgcatataaagagactaccttgcatgctgtctaaggagagaaaccaaaggcttaaactataaggattattttcccaagtaagcagtagagacaggatgttgaaacttcctctcctctctatgagtccaatgagaaaaaactctgtcaataaggatttttgctgagttcaagatatgactcagcccaggattagtggcatcgaaactccaattgccggggaattc

SEQ ID NO: 573806 - DNA, 563 bp, Homo sapiens
tgtaaatatatatgcactgcacactggagcacccagatatataaagcaaatgttgttagagctaaagaaagagagataggtatcaatacaataataggtaagaacttcagcagaccactttcagctttggacagattctctagacaaaatcaacaagaaacattggacttaaactgttctgtagaccaaatagacctaatagacattgacagaatgtttcatccaacagcagcagaaaataattttgcatcagcacatgaaacattctctgggatatactgtatgttatgccacaaaacaaatctcaagaaattttaacaaatcaaatatagtattgagtatcttctaaggctacaatgaaacaaaactctaaaacaacaagaggaacttcagaaactgtataaatacatggaaagtaagcaatgtccactcaaacaaacgtggatctatgaagcaataagaaggaagtaaattttttttgaaacwatgagaatagaaacaaaacataccaaaaactatgggatacagcaaaatattactaagagagaactttatagcagtaa

SEQ ID NO: 573807 - DNA, 434 bp, Homo sapiens
gataagcagatgttgactacagaatatacaaccccccatattaataaaaaaaatcaactagtttgttcctctctgtcaattgtacatggagttcctggggatttgatgacaggttggctaaacatatatatttaagaggttacagaagaagctatgtgtcatgtgtgtgaagagaccaccaacaggctttgtgtgagcaacaaggctgtttatttcacctgggtgcaggtggcytgagtccaaaaaaggagtcagcaaagggtggtgggattatcattagttctataggtttgggataggcgtacaaagtacattcttaagggtgggggagaatattacgaagtaccttcttaagggttggggagactatatcttatcagttaggtggggcaggaacaaatcacaatggtggaatgtcatcagttaaggctatt

SEQ ID NO: 573808 - DNA, 524 bp, Homo sapiens
tcattatttgagccacagaaagactgatgcaaattggaatatctaaattcaaaatttaggacatgcagatgtgattacaacatctttctctttggtagcttgagtttacgtatttagataaacacaacacagtattattttttaaaaaatttcctggccagaggaaggattgccttcaagagtccaatatgatgcaaagattaacacatttttccagtctggaggtgctgctgctccctgagtgtaactttctctgtcatgtatttcctacagtttctttttgagaaaaaagaaatgctaaatgctatcaattttcagactgtcccacacttaaacctataccaagacattcagggacataacatgagtaaagattagagaaattgtgagaaaaaatttgaagaataagatgatggtaacttataatttgatagctgctctaagcttggctgagcgccctctggggttatcttgtacatcctgatcttgtggactaartaccttcttgtgtatcagttcccaca

SEQ ID NO: 573809 - DNA, 549 bp, Homo sapiens
ttcacatggtggcaggaagaagaagaaagagagccaagcaaagggggaaaccccttataaaaccatcagatctcgtgagaactcactcactatcatgaaatagcatgagggaaactcccccatcattcaattaccccccatctggtccctcccagaacacatggggattatgggaactacaattcaagatgagatttgggtggggacacagccaaaccrtatcggttattatctacccaacaccagcctgactctacatgggggtttaagaaaagtaaagagcatattgtccgatcatgttattctcctgcttaacaacttgtagttatttcctactctttataggatatagtctatcattctagggatactatattaggcccttcacaatttgacccctgtccacagtcatcagccttatttctcaccattccccaagtggctcccttattcttcctcccatctcattctcataccttcttaccttgtatactctgccctcagccaaaccatcctccttcatgcaccatgctgctgcaaatgcccatc

SEQ ID NO: 573810 - DNA, 549 bp, Homo sapiens
ttcacatggtggcaggaagaagaagaaagagagccaagcaaagggggaaaccccttataaaaccatcagatctcgtgagaactcactcactatcatgaaatagcatgagggaaactcccccatcattcaattaccccccatctggtccctcccagaacacatggggattatgggaactacaattcaagatgagatttgggtggggacacagccaaaccgtatcggttattatctacccaacaccagcctgactctacatgggggtttaagaaaagtaaagagcatattgtccgatcatgttattctcctgcttaacaacttgtagttatttcctactctttataggatatagtctatcattctagggatactatattaggcccttcacaatttgacccctgtccacagtcatcagccttatttctcaccattccccaagtggctcccttattcttcctcccatctcattctcataccttcttaccttgtataytctgccctcagccaaaccatcctccttcatgcaccatgctgctgcaaatgcccatc

SEQ ID NO: 573811 - DNA, 201 bp, Homo sapiens
atattttatatagctcaatttgagaagtaatgaccacatgttgttactttggtcttcaatgatctctaatttttagggwcaccgtgtcttgcttaaatatatcatagtaacaggttcagtgaatatctttattttttattttatttacttattttttttgagacggagttttgctcttgttgcccaggctgcagtgcaatg

SEQ ID NO: 573812 - DNA, 473 bp, Homo sapiens
tttttatgaaggtagagtcttactatgtttcccaagctggtctcaaacttctgggctcctcaagtgatcctcctgcctcagcctcccaagtagtttggattagagggatgcatcactgtgcatacttatgcttttaatattctgtacatttrttattgatttaaagtgcgttttacctttttctttaatagatgttggaagttctgatgaatctgcagtcaggtaggattttatagatttaaaaaattatgttaactaagaaaatatagatggaagaaacgaatatctgttgagtgttgtattgtgggctagacatcctaatatgttctatgcatttatcatctcataaagccatcacaacatctgtcttcctataacctgctgtttattaaataaacaactatggattagagctgattaattgcctcatgatcccatagttaacaaagtagctggcctacagtttgaccatc

SEQ ID NO: 573813 - DNA, 473 bp, Homo sapiens
tttttatgaaggtagagtcttactatgtttcccaagctggtctcaaacttctgggctcctcaagtgatcctcctgcctcagcctcccaagtagtttggattagagggatgcatcactgtgcatacttatgcttttaatattctgtacatttattattgatttaaartgcgttttacctttttctttaatagatgttggaagttctgatgaatctgcagtcaggtaggattttatagatttaaaaaattatgttaactaagaaaatatagatggaagaaacgaatatctgttgagtgttgtattgtgggctagacatcctaatatgttctatgcatttatcatctcataaagccatcacaacatctgtcttcctataacctgctgtttattaaataaacaactatggattagagctgattaattgcctcatgatcccatagttaacaaagtagctggcctacagtttgaccatc

SEQ ID NO: 573814 - DNA, 473 bp, Homo sapiens
tttttatgaaggtagagtcttactatgtttcccaagctggtctcaaacttctgggctcctcaagtgatcctcctgcctcagcctcccaagtagtttggattagagggatgcatcactgtgcatacttatgcttttaatattctgtacatttattattgatttaaagtgcrttttacctttttctttaatagatgttggaagttctgatgaatctgcagtcaggtaggattttatagatttaaaaaattatgttaactaagaaaatatagatggaagaaacgaatatctgttgagtgttgtattgtgggctagacatcctaatatgttctatgcatttatcatctcataaagccatcacaacatctgtcttcctataacctgctgtttattaaataaacaactatggattagagctgattaattgcctcatgatcccatagttaacaaagtagctggcctacagtttgaccatc

SEQ ID NO: 573815 - DNA, 275 bp, Homo sapiens
accacacccagccctaatcaatttctttaaatcaatctcaatgytgcccaggcatggtggctcacacctgtaatctcagccctttgcaaggccaacgtgggtggattgcttgagttcaggagtttgagaccagcctgggcaacataatgagaacacatctctgctcaaaaaataccaaaaggagtcaggcatgatggtgtgtgcctgtagtcccagctgcttgggaagctgatgtgggaggatcacttgagcctgagaggtggatactgcagtga

SEQ ID NO: 573816 - DNA, 245 bp, Homo sapiens
tcaaaaaaaatttcaccttgccccagcagctcagctgactcccgccccatgacacacatgtctaaaaagttgtgctgtgagtttctgaaatacattttaaaatagaattcatttaattatgaaaatgcaaacataaaatgaatttgtatctgttttagtcaagtaaaattagcgytaaatcaattaataaatggttaacatgttctacaatatgaaaaccatacccagttgcctcttcttctaat

SEQ ID NO: 573817 - DNA, 245 bp, Homo sapiens
tcaaaaaaaatttcaccttgccccagcagctcagctgactcccgccccatgacacacatgtctaaaaagttgtgctgtgagtttctgaaatacattttaaaatagaattcatttaattatgaaaatgcaaacataaaatgaatttgtatctgttttagtcaagtaaaattagcgttaaatcaattaataartggttaacatgttctacaatatgaaaaccatacccagttgcctcttcttctaat

SEQ ID NO: 573818 - DNA, 245 bp, Homo sapiens
tcaaaaaaaatttcaccttgccccagcagctcagctgactcccgccccatgacacacatgtctaaaaagttgtgctgtgagtttctgaaatacattttaaaatagaattcatttaattatgaaaatgcaaacataaaatgaatttgtatctgttttagtcaagtaaaattagcgttaaatcaattaataaatggttaacatgttctasaatatgaaaaccatacccagttgcctcttcttctaat

SEQ ID NO: 573819 - DNA, 516 bp, Homo sapiens
actaaacaaaaccattttaattaggtagaatgatacaattatacctactttgcaggatgacttaaygagtaggtcacattttaacacctctgacattggaatgtcacttataattcatgatttgttataactataattggtagcattttaaaaattatcttattgatatataaaatagcggggcatcacgcaatccatgagaccttacattaagtagaatatggtatactcagcaggtctagggcagttctaagcatgtaactgaaacttaaatacattttagttcttaaaggtactatggggaaagagcactgaaataacaataatgcattttttaaacaaattaattctttgattttcaaacaacttgaagccaaaggaaactcatgattcaaatgaatacatatggctcattgtattcaatatttatacttagagaatatatgcaaataagactttccaatgattaatattagtatttaagactgataaactttcgaaagagcagttaaaggt

SEQ ID NO: 573820 - DNA, 516 bp, Homo sapiens
actaaacaaaaccattttaattaggtagaatgatacaattatacctactttgcaggatgacttaacgagtaggtcacattttaacacctctgacattggaatgycacttataattcatgatttgttataactataattggtagcattttaaaaattatcttattgatatataaaatagcggggcatcacgcaatccatgagaccttacattaagtagaatatggtatactcagcaggtctagggcagttctaagcatgtaactgaaacttaaatacattttagttcttaaaggtactatggggaaagagcactgaaataacaataatgcattttttaaacaaattaattctttgattttcaaacaacttgaagccaaaggaaactcatgattcaaatgaatacatatggctcattgtattcaatatttatacttagagaatatatgcaaataagactttccaatgattaatattagtatttaagactgataaactttcgaaagagcagttaaaggt

SEQ ID NO: 573821 - DNA, 516 bp, Homo sapiens
actaaacaaaaccattttaattaggtagaatgatacaattatacctactttgcaggatgacttaacgagtaggtcacattttaacacctctgacattggaatgtcacttataattcatgatttgttataactataattggtagcattttaaaaattatcttattgatatataaaatagcggggcatcacgcaatccatgagaccttacattaagtagaatatggtatactcagcaggtctagggcagttctargcatgtaactgaaacttaaatacattttagttcttaaaggtactatggggaaagagcactgaaataacaataatgcattttttaaacaaattaattctttgattttcaaacaacttgaagccaaaggaaactcatgattcaaatgaatacatatggctcattgtattcaatatttatacttagagaatatatgcaaataagactttccaatgattaatattagtatttaagactgataaactttcgaaagagcagttaaaggt

SEQ ID NO: 573822 - DNA, 516 bp, Homo sapiens
actaaacaaaaccattttaattaggtagaatgatacaattatacctactttgcaggatgacttaacgagtaggtcacattttaacacctctgacattggaatgtcacttataattcatgatttgttataactataattggtagcattttaaaaattatcttattgatatataaaatagcggggcatcacgcaatccatgagaccttacattaagtagaatatggtatactcagcaggtctagggcagttctaagcatgyaactgaaacttaaatacattttagttcttaaaggtactatggggaaagagcactgaaataacaataatgcattttttaaacaaattaattctttgattttcaaacaacttgaagccaaaggaaactcatgattcaaatgaatacatatggctcattgtattcaatatttatacttagagaatatatgcaaataagactttccaatgattaatattagtatttaagactgataaactttcgaaagagcagttaaaggt

SEQ ID NO: 573823 - DNA, 563 bp, Homo sapiens
agatgtacttttcatctcatgtgtatatataactgatatatataacatatctgttatatatgtatacatatcagtaatatatatatatatatatcttacgatatataataaacaacataggccaggcgcggtggctcacacctgtaatcccagcgctttgggaggcggaggcaggcagatgacttgaggtcaggagttcgagaccagcctggccaacgtggtgaaactaaatatacaaaaattagccaggcatgctggcacctgcctgcaatcccagctacttgggaggctgaggttggaaaattgcttgaacccggcaggcagaggttgcagtgagccaagattgtgccattggacaccagcctgggcaaagaagcgagactccgactcaaaaaaatatatatatatataatgaattccctataaaatgaaaacatacttttcatctgaaaaaatatatatatataatatagtaaatatttttcaagtaagctctcttatctgacaacttttcgcccactgaaayaactcacggtatttttgataggggaacgagttctctc

SEQ ID NO: 573824 - DNA, 528 bp, Homo sapiens
ctggtcagaaccactatcatctcctacctggatgttgccacagcttggcctccctgcttctacccaaatcttcccacaatctttctcaactcagccaccatgggatgcttttaaatcagtagacagttcatgtcacctctctgctcagaacccttccgcatctcccatctcagacagaataaaagccaaagccccagcaatagcctcccagggcttacacaatctgtactgatctgagcccaacaactccctggcctcctcccctaccttctctccctctctctgctccacagggctctttcctgagcttcaaacacaccacggagttccctcttmgcatctttattctgtttgtttctgcctacaattctcttccctcagtaccttggccagctccttcccctccttcaagtctttgctcaattttcacttaggaggccaaccctgaccactctgtttaatattgctatgtgtccccattcctgccatgctcactcatttctttttactttcttttttttttaagat

SEQ ID NO: 573825 - DNA, 528 bp, Homo sapiens
ctggtcagaaccactatcatctcctacctggatgttgccacagcttggcctccctgcttctacccaaatcttcccacaatctttctcaactcagccaccatgggatgcttttaaatcagtagacagttcatgtcacctctctgctcagaacccttccgcatctcccatctcagacagaataaaagccaaagccccagcaatagcctcccagggcttacacaatctgtactgatctgagcccaacaactccctggcctcctcccctaccttctctccctctctctgctccacagggctctttcctgagcttcaaacacaccacggagttccctcttagcatctttattctgtttgtttctgcctacaatkctcttccctcagtaccttggccagctccttcccctccttcaagtctttgctcaattttcacttaggaggccaaccctgaccactctgtttaatattgctatgtgtccccattcctgccatgctcactcatttctttttactttcttttttttttaagat

SEQ ID NO: 573826 - DNA, 528 bp, Homo sapiens
ctggtcagaaccactatcatctcctacctggatgttgccacagcttggcctccctgcttctacccaaatcttcccacaatctttctcaactcagccaccatgggatgcttttaaatcagtagacagttcatgtcacctctctgctcagaacccttccgcatctcccatctcagacagaataaaagccaaagccccagcaatagcctcccagggcttacacaatctgtactgatctgagcccaacaactccctggcctcctcccctaccttctctccctctctctgctccacagggctctttcctgagcttcaaacacaccacggagttccctcttagcatctttattctgtttgtttctgcctacaattctcttccctcagtaccttggccagctccttcccctccttcaagtctttgctcaattttcacttargaggccaaccctgaccactctgtttaatattgctatgtgtccccattcctgccatgctcactcatttctttttactttcttttttttttaagat

SEQ ID NO: 573827 - DNA, 528 bp, Homo sapiens
ctggtcagaaccactatcatctcctacctggatgttgccacagcttggcctccctgcttctacccaaatcttcccacaatctttctcaactcagccaccatgggatgcttttaaatcagtagacagttcatgtcacctctctgctcagaacccttccgcatctcccatctcagacagaataaaagccaaagccccagcaatagcctcccagggcttacacaatctgtactgatctgagcccaacaactccctggcctcctcccctaccttctctccctctctctgctccacagggctctttcctgagcttcaaacacaccacggagttccctcttagcatctttattctgtttgtttctgcctacaattctcttccctcagtaccttggccagctccttcccctccttcaagtctttgctcaattttcacttaggaggccaaccctgaccactctrtttaatattgctatgtgtccccattcctgccatgctcactcatttctttttactttcttttttttttaagat

SEQ ID NO: 573828 - DNA, 521 bp, Homo sapiens
aatgatggtacaggcattgtgtaagctttccatattcaaaaggaagacattttccagaaagcttcttatttctatctgagacctcctcaacctggccttcactrtccatgtttctgccaggatttttatcacaaccatttaaccagtctctaagatagtccaaaaattttctcatctgtcttcttttgagccctccaaactcttccaacctctgcccattacctagttacaaagctgcttccacattttcaggtatctttatagcaatgctgcaatcgtcatttgccattttctgtttgattcattttgaaaaagaggtttaattggctcatggttctgcagggttgacaggaagcacagggcttctgattctgggaggcctcagaaatctttcaatctttgtacaaggcaaagaaagagtgagttgtctcacatggcaagaggaaaacacgcagagtagggaggtgacgtagagttttcagtggtcagatctcatgagaagtcactcatgattgtgagga

SEQ ID NO: 573829 - DNA, 440 bp, Homo sapiens
ttgatttctcatctgtgcatcaagagaggaacctgggaggtgcttaatcagctgccaatggcaagatttactytaatttagaataggaaacaacaacagttagattttctgtctttccctccttttttttttttttctatctggtctgtttctgaaatgtaataaagctaagaattaacaaaaaaaaaagccacaaaccttcaggcaatttcagtctgaagcaaatgcattctttcttcctccaaactgcaaacattccagaaggggcatgtgtcaaagacagtaagacagattcaagtttatgctcttcttcaccagactgacctcgagaggaggcatactaagcccttgaacgccccttttcctctagaaacttcccttctctcagctggaggcagatagcacagagtgcagattctgaagtgagaaaagcctgaatt

SEQ ID NO: 573830 - DNA, 314 bp, Homo sapiens
atttaaatataaaaaatgcaaacgaaaatgatctagaacagagatcaacaaaatttttctgtaaagcgctagtcagtaaacatttcaggctttgggggccatgtggtctgtattgcggctacacagctgagctgttgcagtgtgacagcagccagggcacaatatgtaaataaatgggygtggctgtgtttcaacaaaactttatttacaaaaacaggtagggagctggattggcctttgggttagaacttgctgacctctgaactagaacaatacaaactagtctgatgaaaggaatatctatgtggaacaaa

SEQ ID NO: 573831 - DNA, 477 bp, Homo sapiens
gaatagattcacttgtctcataatgtattttctcatctagaagtagccagcacttactggttgtggaatgacccattaatactatacttcagttccaacacaaacagctaaagtattcttctgcagaactccgtgtatgagtggttttcaaaacttggctacatattggaattctctggggagctctaaaaccactgttgtctggatcctagcccatgattctgatttaattgggctgaggtgggcmtaggcattgcaagtattaaaagctctcaaggtaattttaatgttcagtcaaatctgagaacagctactttgatattcttaaccagtagttgtagaatatgcagttttttcttatagacaatgttttttcctaaaaacagtgttcctacagacatatttctatggttgctctaacaagttaccacaaaattagtgaatttaaaaagagtatttattatcttacagcacggt

SEQ ID NO: 573832 - DNA, 579 bp, Homo sapiens
gttccagcttctatatggtttttctactgcagtgtctacattggtctctttatagaattttcacaatgcaatgcaataattattttgcacattagtcctttctagatgaccaactktgtagggttaagagtagtttcctatttaattttgaatttaaatagcataatatataatatgcacatatatttttcgttgaaatttttaaaaagaaagtagccttaagctactttcaaccaaaaatttggtatcagggctgagcatggcagctcacacctgtaataccagcattttgggaggctgaggtgggaagatggtttgagtccaggagtttgagactaggttggacaacacaggaggacttcatgtttactaaaagaaaaaaaaaatagccaggaattgtggtgcatgccttgtgatcccagctacttgggaggctgaggtgggaaggacacttaaggccaggtgttgaggcttcagtgagctgtgatcatgccactgctctccagcctccagcctctgcgacagaacaagactctgtctcaaaaaaaaagaataataataataatagtgataacttgc

SEQ ID NO: 573833 - DNA, 546 bp, Homo sapiens
  misc_feature 1: n = A,T,C or G
ntggatgttaagatgtgcatttatttaaatttagtagaaaatccaaatagcttttccaaggagcagtatcagttcatatactgtctgtgaaagaacatatcttcacctacacttggtattagcagacttctgaagataagccatttttgttaattgtagtagtatctgtgtatgttattctgtattactttgaaaccaaacatgttgagcaaactttgctatttttaaagtttctattcaagtctgctgcccattattttactgattatcaccttctaattgrtttgtagaaattctgttttcacatatatgtggttgtaaatatcttcaactttttcaaatatttttcactcactttatgatgtgttttcacaaacaagtatttcttaattaatcataatttaacttccttggtatctctctgattcctttgtgcagattttatttttaatattttgtctagcttttccagttgttctcactgggagagttggtctcaattactctgctaacccctgccatgatacagtgtttttaaagtataat

SEQ ID NO: 573834 - DNA, 576 bp, Homo sapiens
aagatccaaaaactgcaaacaatccaaatatccatcagtgaatgaataataaagaatatgtggttctagaggacaagatagccaactagacagtcagatgaaacagctcccaccaagggaccagatgactgttgtgctcctaacagatattcagaggtaacctacccagagtggatggagagaagacagagaagctgagctgaagggggaggaagcagggaatgctgcatagagctgatatgcactaggactcatttctagcccccagtgggtttaggggaacaggtgagttgaactggcaaggaacaatctgttctcaccacaggcctcaggaaccccagtaggagaagtcctctcaaccaccagggacactcacattggcagggagaactgcttagagaagtggtagcagcaccaagccagctgaygtggagccaaaagagtttggtgtgggggcatccgtagcagagcatggccagggatggctattcctctaggctttactttctcccataggagactttagccctaagggaactgtcaaacctgaagtctgcaaggcagtcttgccaccag

SEQ ID NO: 573835 - DNA, 572 bp, Homo sapiens
tcatgaatcagccttcccactccttccccatactgtaccttcccccaggcccatggcaactcctcacattgttttgctgactcatttctgcacaggcaggttttgctttccttgcccagccagctcaaaggaatgcagtccatgccccctactccaccaaccaccattgcagagtcttggtaggcacagagccagccagccttgcgctaacactatgcagagagcaggggatcctcccacaccctgagcaatcacttcttctatcagggcattttgaaggcacccagaccggcamccaccagtgtgccaaccctgaggcaacaccacctccagcatgaccacgcacaaagttgccagcaagggttctcctgcacactcccagctgcattgcctctgccactgtggtgaacacccagaggcagacaccccagtacccactagcactctgccaagctgctgctacaaagacaaatcctgctgtcagtgccaataaaatgcttttgctgataccacctatgagagtacagtgaccagcagtttgtgagcaccttgccccctcttcaagaacagtg

SEQ ID NO: 573836 - DNA, 570 bp, Homo sapiens
gagtgactggtaagtggttttaaataaatttgtgcatgtaatacatacttaaaagttaatattttgagatggcagatcccttaagcaaatattttactaatgaaagcaactccatcaaatgacaaggtgggcatttaacttacagttcattttatgttcagaaaattaggaacgtttttagtttcctaatacctttttctgagcctctctctcatgagtggatatgtgcatttacctgtgcatacacatacctccccaggtgtgtatatctgtatatgtaaaggatttggagaattggagtggagtaatatgaaaagaaaaatgtctcctctttctgtgattagggattctttttggtggttggggaagctattaaagttgattcatctgagcttttctagaataaagaataaggctgctttgaatgaaatattttttatttaatgaaaatgagarctcacttctcaatatatatgtacgagattataaatcaatttctctttcttttctatctgagtttctccttaacccgttgcctttaccttcactataaaagaggaaaaattaaaa

SEQ ID NO: 573837 - DNA, 558 bp, Homo sapiens
ctagtgcatatttatctacacatcctccacagcagacagaatcataactgtattctgttatgttcttgtgttgcttgcctttatttttatctctctaaatatatattgtaaattttttcaaattgtttttctccaactccctcagtaagtattatagatttcatttcagatcagctgcataagacaggaggaaaaaaaacctatttttttaattaattggagttatacatgaaatacaatttattgaataggtaatcttttttcaaatcgttttttacatagaaactaagcatatagtagctcatttttatttactatttgtttgtttaaagaaataaagagacaacagaggagattagaaagtctttttggaaccagaatcattagayatgggtgagaaaaggcaggagttatggacaatggctctaaggtttctggctttggtgatcactgaattacagagaaccacaggaggaaacggaagcacatttctagccaggaaagaacatggtgataaatggagtcttgggatttgtaggtttcagtgtagctgtgacc

SEQ ID NO: 573838 - DNA, 567 bp, Homo sapiens
caaatacaacatgttctcatttattagtgggagctaaatgatgagaatacatgaacacatagagggcaacaaaagacattggggcctatcagaggttggarggctaggaagagggagaaaattggaaaaaataactaacgggtactaggcttagtaaatgcatgatgaaatactctgtacaacaaacccccaagacacacatttacctatatatcaaacctgcacatgtatctcttaacttaaaatgaaagctaaatttaaaaaaaaatgtggtatatacaggcaatgggttattattcagtcttaaaaaggcaggaaaatctgacaaagctacatcatgaatgaaccttaaagacattatgctaaatgaaataagccaagcacaaaagaacaaatattgttgattacactagcacttatgtgttttattccagcttattttgcacttacctagcaccttctacaaacctgtttcctcatatatgtaacgatcagggtaaagatggaaggtacatacacacacaaacttctggtggcttccaaacagattgtaaaagaaagtactca

SEQ ID NO: 573839 - DNA, 567 bp, Homo sapiens
caaatacaacatgttctcatttattagtgggagctaaatgatgagaatacatgaacacatagagggcaacaaaagacattggggcctatcagaggttggagggctaggaagagggagaaaattggaaaaaataactaaygggtactaggcttagtaaatgcatgatgaaatactctgtacaacaaacccccaagacacacatttacctatatatcaaacctgcacatgtatctcttaacttaaaatgaaagctaaatttaaaaaaaaatgtggtatatacaggcaatgggttattattcagtcttaaaaaggcaggaaaatctgacaaagctacatcatgaatgaaccttaaagacattatgctaaatgaaataagccaagcacaaaagaacaaatattgttgattacactagcacttatgtgttttattccagcttattttgcacttacctagcaccttctacaaacctgtttcctcatatatgtaacgatcagggtaaagatggaaggtacatacacacacaaacttctggtggcttccaaacagattgtaaaagaaagtactca

SEQ ID NO: 573840 - DNA, 561 bp, Homo sapiens
tatttcaatattaatttctgttctttgycctttaaatattaacattatattttattgagggcctactatgtgcctgacattgctttaaatcctttttataactcaatgcattcaatcatgcaaaaaccttataaagcaattattgtcaatcttatttgcaagtgaagagagtaaagtttagacagattgtgatatgctcacaatttaatagttactaagcagctaactacagaattgagttgtatgttaattgtctatatgttatagatggtagtatatacacaaactttatattctgtgaagaagggatagaatcagctttattctttattttattaatagttcctaccatgctatccagtatatacttggtacttaataattaaatgaaagaatcagacatttatggtgtcaggaattttccaagcagttgtgctttttgcaaattactgagctatgctatcagataaaggatttttttcttactccatatttttggcagaaaatgtttattttatttatttgggtaatagggggccgattccttgaaaataaattaat

SEQ ID NO: 573841 - DNA, 561 bp, Homo sapiens
tatttcaatattaatttctgttctttgccctttaaatattaacattatattttattgagggccyactatgtgcctgacattgctttaaatcctttttataactcaatgcattcaatcatgcaaaaaccttataaagcaattattgtcaatcttatttgcaagtgaagagagtaaagtttagacagattgtgatatgctcacaatttaatagttactaagcagctaactacagaattgagttgtatgttaattgtctatatgttatagatggtagtatatacacaaactttatattctgtgaagaagggatagaatcagctttattctttattttattaatagttcctaccatgctatccagtatatacttggtacttaataattaaatgaaagaatcagacatttatggtgtcaggaattttccaagcagttgtgctttttgcaaattactgagctatgctatcagataaaggatttttttcttactccatatttttggcagaaaatgtttattttatttatttgggtaatagggggccgattccttgaaaataaattaat

SEQ ID NO: 573842 - DNA, 561 bp, Homo sapiens
tatttcaatattaatttctgttctttgccctttaaatattaacattatattttattgagggcctactatgtgcctgacattgctttaaatcctttttataactcaatgcattcaatcatgcaaaaaccttataaagcaattattgtcaatcttatttgcaagtgaagagagtaaagtttagacagattgtgatatgctcacaatttaatagttactaagcagctaactacaraattgagttgtatgttaattgtctatatgttatagatggtagtatatacacaaactttatattctgtgaagaagggatagaatcagctttattctttattttattaatagttcctaccatgctatccagtatatacttggtacttaataattaaatgaaagaatcagacatttatggtgtcaggaattttccaagcagttgtgctttttgcaaattactgagctatgctatcagataaaggatttttttcttactccatatttttggcagaaaatgtttattttatttatttgggtaatagggggccgattccttgaaaataaattaat

SEQ ID NO: 573843 - DNA, 561 bp, Homo sapiens
tatttcaatattaatttctgttctttgccctttaaatattaacattatattttattgagggcctactatgtgcctgacattgctttaaatcctttttataactcaatgcattcaatcatgcaaaaaccttataaagcaattattgtcaatcttatttgcaagtgaagagagtaaagtttagacagattgtgatatgctcacaatttaatagttactaagcagctaactacagaattgagttgtatgttaattgtctatatgttatagatggtagtatatacacaaactttatattctgtgaagaagggatagaatcagctttattctttattttattaatagttcctaccatgctatccagtatatacttggtacttaataattaaatgaaagaatcagacatttatggtgycaggaattttccaagcagttgtgctttttgcaaattactgagctatgctatcagataaaggatttttttcttactccatatttttggcagaaaatgtttattttatttatttgggtaatagggggccgattccttgaaaataaattaat

SEQ ID NO: 573844 - DNA, 630 bp, Homo sapiens
atcattccaggcagcacattagaatcacttttcaaaagrgtaataattagagacctcaccaaaccaattaagtcagaatttccaaggctgggttccaagcggtagtaatctaatttccctaggacagtgtaatgtactgaaaaatagtagtttggaaactcaagatatgacaagttatatagtcttttgaatctttcagaacacatattttaagacaccattggtttatatgtaagaaattatattacaacatttgcaacctaaccaacatgaaaacattaattagtgattgaaagttcctcaagagatatttgtctattcttatggacctttatgttaagaggatgctttcctagcaattaaaataataactttcctatgactatacaattgatttcttaatacaggtcagaatagtgttaatccttcaatcaatttttggtacacttattacaatattcaaagtaagtctctcacaaatcgtacattaactcactcattgtgttcattaggaaaagtaagaaagatacatgtcatttatttttaactttttgttaatggttgcattcatgttcacatattgtaaatttcaagaaactatgtaggaattaaaaggagagtttgataagc

SEQ ID NO: 573845 - DNA, 630 bp, Homo sapiens
atcattccaggcagcacattagaatcacttttcaaaagggtaataattagagacctcaccaaaccaattaagtcagaatttccaaggctgggttccaagcggtagtaatctaatttccctaggacagtgtaatgtactgaaaaatagtagtttggaaactcaagatatgacaagttatatagtcttttgaatctttcagaacacatattttaagacaccattggtttatatgtaagaaattatattacaacatttgcaacctaaccaacatgaaaacattaattagtgattgaaagttcctcaagagatatttgtctattcttatggacctttatgttaagaggawgctttcctagcaattaaaataataactttcctatgactatacaattgatttcttaatacaggtcagaatagtgttaatccttcaatcaatttttggtacacttattacaatattcaaagtaagtctctcacaaatcgtacattaactcactcattgtgttcattaggaaaagtaagaaagatacatgtcatttatttttaactttttgttaatggttgcattcatgttcacatattgtaaatttcaagaaactatgtaggaattaaaaggagagtttgataagc

SEQ ID NO: 573846 - DNA, 630 bp, Homo sapiens
atcattccaggcagcacattagaatcacttttcaaaagggtaataattagagacctcaccaaaccaattaagtcagaatttccaaggctgggttccaagcggtagtaatctaatttccctaggacagtgtaatgtactgaaaaatagtagtttggaaactcaagatatgacaagttatatagtcttttgaatctttcagaacacatattttaagacaccattggtttatatgtaagaaattatattacaacatttgcaacctaaccaacatgaaaacattaattagtgattgaaagttcctcaagagatatttgtctattcttatggacctttatgttaagaggatgctttcctagcaattaaaataataacttkcctatgactatacaattgatttcttaatacaggtcagaatagtgttaatccttcaatcaatttttggtacacttattacaatattcaaagtaagtctctcacaaatcgtacattaactcactcattgtgttcattaggaaaagtaagaaagatacatgtcatttatttttaactttttgttaatggttgcattcatgttcacatattgtaaatttcaagaaactatgtaggaattaaaaggagagtttgataagc

SEQ ID NO: 573847 - DNA, 617 bp, Homo sapiens
cattcctgttctaaagctttttaatacattttcactcctgctctaaaacttgcttcagtctctccttctgccttatgcccctccattgaattctttcttctgaggaggcaagaattgaggtttgctgctagtaacactcccatcctccaccctcaggtagtacccagtgtgtgttattttcatctttgtgtccacgtgttcgcatcacttagctccacttgtaagtgagaatatgtggtattyagttttctattcttgtgttagtttgctcaggaaaatggccttcagctctctccatgttcctgcaaaggacatgttctcatttgtttttaattgctgcatactgttccatgacgtatacgtaccacattttctttatccagtctaccattgttgggcatttgggttgattccatgtctttgctattatgaattgttctgcaatgcatatatgtatgcatgtgtctttatggtagaacactttatattcctttaagtatatacccagtaatgagattgctgagtcaaatggtatttctgtttttagctttctgaggaattgttatgctgctttccatgatgatttaactaatttacacccccaccaataatgcata

SEQ ID NO: 573848 - DNA, 352 bp, Homo sapiens
aaaaccattcttgactgtctacactagattaagtctgatttgtcacatgctattatagaacattctgacatgtcctctacagtcacagatataaaaatatagttatttatgtaattatttgttcaagatctgtccttgtcaccagaagataagtaatctccatgaaacaggaatcatctttttattcaatataacacctttaggctgggggtgctaatctcagcactttgggaggctgaggcaagaggatcacttgaggccaggagttcaagaccagcttaggtaacataacaagatcttctccctactaaaagtatatatacrtaaaaaattagttgggcatggtgtcttg

SEQ ID NO: 573849 - DNA, 328 bp, Homo sapiens
ttaaagccaggagtctggatgaaatsaataaggcaatgagtgtagttttaaagacaaataaaaggattgagacctgtagcatgttcacatgctgacgaaaacaactgagtagacagtgaaaagtggatggtactgaaaagacgggtgggtagaatgtttttgaacaatgtccatgagttggcaaaagaggatggtatctaatatacaagtcaagggtttggcctttcttggagtataagggaagggatggggtagatggtaggtatcggaggagagtggacattccctataattgcttctatgttttcactgaattgggaagcaaagt

SEQ ID NO: 573850 - DNA, 538 bp, Homo sapiens
ttggcttactgtctcccagtacatacaagccatatattgatggtccaataagacaggccccagtatgtattaattgtgtaataaaactccaggattcgactactgagttagactcaccttacacattatggaactacctcaaaaacatatttgttccactataattagctttatgagcttgctaatgtattagaatttattcaacaatatcagcaggaatggtggtaacacagaactaacaagatgaaaagtgagatgctattttatgaaaaccactatcttttaaggtcattgataaaacttttcacctaatccagtggtcttcctccaaacccatcaaaccaatttcctccctagagatactgtcttaaatgcatggcattttatgagtacaaagaacttccacagatcataacataatgtcttcattcacatgtcagaattttctttctattataatggctggttattttaaaatagaagactatgaaccgccttaaatgtagtgacaacrtgttttctttctagtacactgtgt

SEQ ID NO: 573851 - DNA, 656 bp, Homo sapiens
ctactaaatgcaataggggaaaaccacttctcaaaactgacaaaacaagcaatggaaaaataactccctattcaataaatggtgctgggacaactggctagctgtatgaagaaggttgacactggaacccttccttacacaatatacaaaaatcaactcaaggtgaattaaaaacttaaatgtaaaaccaaaacactaaaaaccctggaagacaacctaggatataccattctggacataggaacttacaaagatttcatgacagagatgctaaaagcwaaatttgacaaatgggacctaatttaactaaagagtttctgcacagcaaaatgaattatcaacaaagtaaacagacagcctacagaatgagagaaagtatttgcaaactatatgtctgacaaaagcctaataatgcaaatctataaggagcttatataagttaacaagcaagaaaaaaacaactcctttaataagtgggcaaatgacatgaacagacacttttcaaaagaagacatacatgtggccaagaggcatgtgaaaaaaatgctcaacatcactaataattcgagaaatgaaaatcaaaaccacaatgagatatcataccattctacccagcaatcctatttctggatatatacccaaaggaatataaataa

SEQ ID NO: 573852 - DNA, 544 bp, Homo sapiens
atcctgttgcttaatgtatcatgaatgcttttaaacagatttttaaaaataatctttggctctcatagcatttgttatctgtcaggtcattgatctgctgcaagctatcactttagtgacaaacagaaatcctaaaggttattgaaaattttatttaatactgagattgtatttattcaaatgtttataataaattagaatttaacataaaaattcccatgatckatgattatgacactagtgaccatgggaaaaaaactaagtgaaattttagaggaaaacaaaaacatatttttagaaaccctcaaaggcatttatttgtctgtattgttaagttctattgctattgtttgctgattttatgttattctatctgaaatagtagctcttttgaaactgcatatattttaactttaccttgaagagaggaaggaatttattttcctttcaagtaattattgcttcagggatagtattaaggtgacaatctgaatattaacctatttgggctctgagaacaaaaaaaaaaaggaaacgtctaagt

SEQ ID NO: 573853 - DNA, 605 bp, Homo sapiens
tatttattttaaagcataaaaagagaaaatttctacttaattccataaacactgcattatattcaatccttatgaaataattccttccccttagaatgtacagtagtttataaacaaagttatgtttcactctatgtaggtaataatattattgtataacaaaaggtttttgaagcaaagaattaggaaaggagaggaagaacaaaggttgtgccataaacatagtcatttgcaataacttaaataagagtagaatacgtattttcttttagatctaagtgtctgaggcacaagccctcactgtataggtgtttgatagatgttccctaattcacatggagtagtgagagagtgtctgaagactaattttttaaatccttgtgacatgaaaggttttatatagtttataccacagaacttgttcaaagaggtastacaggaaaatattataagttggtttaagggatttcgggaattagcaagttattaaggaaatataagaacatttagaaataaataacccacctttggagttttattactgaaaataagtgttgccacgatactaccaaaaaaaaagaaaaagagaaagagaaaaaaaaaca

SEQ ID NO: 573854 - DNA, 612 bp, Homo sapiens
tacctgccacttcatatttgtttgcaaagtaacaacaaagtaaattctggaacttaaagatacccataaatagatgaagctgtgtaacatgttgttactgagtttattggttagctattgctacaatagtgttgcataacaccatctcaaaactccatgatttaaaacaactaattatcatgcatgtgtctccaggtaagctggggttcaactggtctaggtaggagttacccagaaggcttggcttctcatgtctctgctatacatggctctcatcctccacctgtgatgagtrgtgggctaggtgggcatgttcttttggtgatggctgatagcaaaaaaagtgcaaaaagaacaagtgaaatactgttgttcataataatctctaatgactcactgtatttcagtgttctcggttgttgtctccttttttactcctgatgttacttatttgggtcttctattttttctaagtctaaccaaaaatttgtgaattttgtttatatttttaataaacaaactttttgtttcaccttttggtttttttgggtctctgttttgttttgttttttgagacagagtctcactctgtcacccgggctggagtgcaga

SEQ ID NO: 573855 - DNA, 583 bp, Homo sapiens
atactaataagtaagaccttcaggaaccatgaatgacacatcccactttaaggctgtgagatccttgaaggcaagaatcatattttatgctttcctccttacaattattttatctcatatggggcttttaatttcattaaattttcactctcacattggtctgtacaagcctctacattagatgctctagacttaagaataaaatagatgatccccaatacaattgagttaaatgaaataaaatatatctaattcaaattatactgcaaacgttgaaatgataattatggaatagaatactaagcattttgtaatatataaaattacataatatatacaattgagcctctattgaggttcaataggggttctattatgttggaacctcattgtgattcagtggtagccattgctaccattgaaaatctgtgtcactcttagtttttaatatttaaatgtggaagcctaaatgaaaggaaagaatgatgcttatttttcctttatcctgaaacatgtggaaacataataagaatattattaaaattttatataattmatttatttaaatcaagacaaaaataat

SEQ ID NO: 573856 - DNA, 547 bp, Homo sapiens
atttactctgaaatctgaagattccctggacaagaattagaataaggaacacctatgtcattcttttaggacttgcttcagctgctgtcccttcctctttccagggtgacccaggaaggtgatcaggttgataatgtttttgcttcatatcttttctggattgaaaatagtaatttttttctcactttctttaagcttcaggagagattttcggtgtggctttagtgacaaagctcaggaagaaatcaattagagaacaacgcaaatcagttatagacaacacaagagaacccactgctaaattatgcagaagaccccagcagcgggagaagtatgcaggagactgattgcaaggccacacagttgaggcagccaggaatcactgaatcagtgagaaggacctcaggagttagaaaatgaactcgatgcatggattgctcrgacacctggattcagtgacagtggggagcatttactcattacatcataggaaatcaagcttgggttctctgttagtaactgtggttacccttgtggtacaaacatt

SEQ ID NO: 573857 - DNA, 543 bp, Homo sapiens
tggatactatgaaaatataaaaagatcatcagagacgattatgaacaactaactatacatgaaaaagtagaaaatctagaggaaatggaataaattcctggacacatacagcctactgagattgaattaggaagaaacagaaaacttgaacagaccaaaaacaagtaatgagattgcatcaggaccagatgacttcattgctgaattccaaactttcgaagaagaactaataccaattttcctcaaactattccaaaaaatggaagagaaaggaattgtccctaactcattctgtgatgccagcattaccctgataacaaaaccagacaaggctacaacaacagtaaaaactataggtcaatacccctgataaactcagactcaaaaattctcaacaaaatattagcaaaccgaatctagcagcacataaaaaaaatacatcatgatcaagtgggatttattctaggaatgtaagtttggyacaacacacacaaataaataaacatgatatatcacattaacagaatgaaggacaaaaaccat

SEQ ID NO: 573858 - DNA, 404 bp, Homo sapiens
aatctacagattcaatgtaatctctattaaaataccaatgtcatttttcacagacatagaaaaacaaccctaaaattcacatggaaccmaaaaagagccagaataggccaagcaattctggaaaaaaaaaaaaaaaaaaaaaaaaaaaaagaacaaagctggaggcattaaactacctcacttcaaaatacattataaggatacagtaaacaaaaaagcatggtattgatataaaaacagacctatagaccaatggaatagaacagagaatccagaagtaaatttacctatttacagccaaatgatttttgacaaaggcgccaagaacatacattaaggaaaggaccctcttcaataagtggtgctgggaaaattaagatatccatattcagaagaatgaaact

SEQ ID NO: 573859 - DNA, 537 bp, Homo sapiens
aacagcaacaaaaactttcaaattaaaaaaaaaagttatctgataaacatagaataaaatagtaggaacaagtatttagttgtatcttaagagttgatagaataacaaaaagatcctgggctatataaagtgaaggaatagaagagctcatttttacactctgtgcattttcagaccctcaaatcatcacttctagcttgggtaattaaactgttgtaagtgatatagaaaaaactgatgggaaagggaaaaagttaagggattagagtggttaaacttagcctcttagagaaattgggctataatttgattactgtcacttgagagagagatcctcgttaattgttayggatattttttttttcccccctcaggctgagtctcgctgtgttgcccaggctggagtgcagtggagcaatctcagctcactgcaacttttgcagcccgggttcaagcgattctcctgcctcagcctcccgagtagctgggattacagacacccaccaccacattcagctaatttttatatttttagta

SEQ ID NO: 573860 - DNA, 560 bp, Homo sapiens
cgctcttaccactaattctagccagtgcaataaacaagaaaaaaaaaaaagaagaagagggagaaggaaggagaaagaaggaggaaggagaaagaaggaggaaggagggaggaagaggaggaagaggaagaagaagaagaagaaatartaataaaaggcacagaggttagaaactgtccccatggttgtctacacagaaaatcccaatgaatctacacacacacacacttctagaaataataagtgaattcagtaaggtcacagaactggataaaaatacaaacactgactatgtttctatatgccagcaacgaacattagaaatcaagattaaaaataccacaccatagatagctcttattattttgaaatacatcccatcaatacctaatttattgagagtttttagcatgaagggttgttgaattttgtcaaaggctttttctgcatctattgagataatcatgtggtttttgtctttggctctgtttatatgctggattacatttattgatttgcgtatattgaaccagccttgcatcccagggatgaagcccact

SEQ ID NO: 573861 - DNA, 539 bp, Homo sapiens
atgactcaaaattaaaatctgtgacttttggttcacaaaaatctcttgacatcacctagagctgctgaatgcaagacagaaggaagtgagtaaaaactcwgaaaggaccgcaaaatacaaatgctccttaagttgaagtttttttccttgaactcaataaaggactaggaggggattcttgttatttaactatgtcaagaactattttacgccaacctgtccctagaatatgttttcgaaaatggatccacttttataacagaaaccttaaaggattctcctattatctgttattcctcatttcctttttttgtattaaggcaagggagaaattggctgagattagggttatcatgatcaacagaatctttatagcagatactgacatattaataatttaatgaggtacaacttgcttgtattataaacagaagccattattatcttctttttttttttttggagacagggtcgcactttgtttcccaggttggagtgcagtggcgtgatctcgcctcactgcaacctctgcctcctgg

SEQ ID NO: 573862 - DNA, 560 bp, Homo sapiens
ttctatggtcctaatagaaaaatgactcaaaattaaaatctgtgacttttggttcacaaaaatctcttgacatcacctagagctgctgaatgcaagacagaaggaagtgagtaaaaactcagaaaggaccgcaaaatacaaatgctccttaagttgaagtttttttccttgaactcaataaaggactaggaggggattcttgttatttaactatgtcaagaactattttacgccaacctgtycctagaatatgttttcgaaaatggatccacttttataacagaaaccttaaaggattctcctattatctgttattcctcatttcctttttttgtattaaggcaagggagaaattggctgagattagggttatcatgatcaacagaatctttatagcagatactgacatattaataatttaatgaggtacaacttgcttgtattataaacagaagccattattatcttctttttttttttttggagacagggtcgcactttgtttcccaggttggagtgcagtggcgtgatctcgcctcactgcaacctctgcctcctgg

SEQ ID NO: 573863 - DNA, 539 bp, Homo sapiens
atgactcaaaattaaaatctgtgacttttggttcacaaaaatctcttgacatcacctagagctgctgaatgcaagacagaaggaagtgagtaaaaactcagaaaggaccgcaaaatacaaatgctccttaagttgaagtttttttccttgaactcaataaaggactaggaggggattcttgttatttaactatgtcaagaactattttacgccaacctgtccctagaatatgttttcgaaaatggatccacttttataacagaaaccttaaaggattctcctattatctgttattcctcatttcctttttttgtattaaggcaarggagaaattggctgagattagggttatcatgatcaacagaatctttatagcagatactgacatattaataatttaatgaggtacaacttgcttgtattataaacagaagccattattatcttctttttttttttttggagacagggtcgcactttgtttcccaggttggagtgcagtggcgtgatctcgcctcactgcaacctctgcctcctgg

SEQ ID NO: 573864 - DNA, 602 bp, Homo sapiens
ctacaggcatgtgccacctcgcccggctaattatttttttggtagagtcagggcctcattatrttggtcaagctggtcttgaactcctggattcaagtgcttctcccaccttggcctcccaaagtgctgggattacaggcaggaaccacagtgcctggcccatgacaattttttatggcagtttgagctaagatggtgtcttgatcatttagccatatttctgtctactgaatacagttttaaccaatatcttcttgtttatgctaaaaaggttttattttgtgttccaatagaccaattggagaacctgccctgtattggtagtatcaataggactatatatttgtgacccagtatggaagggttttagatagacagtcattatgacaattgtttatgaccttggctctcattgcatatataacctccactcataaagtgtacttatccttcacctgcacattactttaaatatctcaacttatatttttttcttcttttaattttattttgatttgattttagattcaggaggtacatgtgcaggtttgttacatggatatagtttgtggtgctaaggtttgggcttctattgaacccat

SEQ ID NO: 573865 - DNA, 551 bp, Homo sapiens
agtgtctctctctgtcacccaggccggagtgcagtagcacaatcatgattcactgcagttcgatctcccgggctcagggaattctcccaattcagcctcccgagtagctgggaccataggcacacactgtcatgcctggctaatttgtttgtatttcgtagagacagggtcttgccatgttgctcaggctggtctcgaactcctgaactcaggtgatcagcccacyttggtcttccaaagtgctgggattatagacataagccaccttgccccaccaggcataaaaattccccaaaaagaagcaccgctttaaagaaatcccttggaatatgctgcagaccccctaagcactgccgggggtttcctttccactcacatcagcgtgttccatcctattaaagcccacagaacacaaatcaaatgattcctgctggccagagaatgggtctttggaaaacagagctgaggcttggtgcttgcgtcctgaggcgagttctaactgtgtccctgccagttcagtttctgtggcttcagagccatcggtaccagca

SEQ ID NO: 573866 - DNA, 551 bp, Homo sapiens
agtgtctctctctgtcacccaggccggagtgcagtagcacaatcatgattcactgcagttcgatctcccgggctcagggaattctcccaattcagcctcccgagtagctgggaccataggcacacactgtcatgcctggctaatttgtttgtatttcgtagagacagggtcttgccatgttgctcaggctggtctcgaactcctgaactcaggtgatcagcccaccttggtcttccaaagtgctgggattatagacataagccaccttgccccaccaggcataaaaattccccaaaaagaagcaccgctttaaagaaatcccttggaatatgctgcagaccccctaagcactgccgggggtttcctttccactcacatcagcgtgwtccatcctattaaagcccacagaacacaaatcaaatgattcctgctggccagagaatgggtctttggaaaacagagctgaggcttggtgcttgcgtcctgaggcgagttctaactgtgtccctgccagttcagtttctgtggcttcagagccatcggtaccagca

SEQ ID NO: 573867 - DNA, 274 bp, Homo sapiens
tagtttcaactctgtgacttcagtgcacatcacacaaagatgtttctcagaatgcttctgtgtagtttttatataaagatatctccttctccaaaatagatctcaaagttctccaaatattcacttccagattctatggaaagattgtctcaaaactgctcaatcaaaccaaaggttcaaatctgtgagatgaacgcacacatcacaaagaagtttctcagaatacttctgkgtagtttttatttgagggtagttccttttccaccacaaacca

SEQ ID NO: 573868 - DNA, 536 bp, Homo sapiens
atttgataacattttatttaactcaatatatccaaaagattattatttcagcaaataatcaatgtaaaacatattaatgggacattttatgttcttttgttttggtacagagtctttggaatctggcatttatatcttactcttacagcacagcatttcaagtgctcaatagccacatgtgcccagtaattactgtaatgtatggcatacctctaagtctttggttctttctgctagatctgttcaattctgaaaaggtgtattaaaatcttcaacttaaaattgtattttgtgacaattttccttccacctctaatactttttgccctttgtatttagttgctatgttatttggyacatacatgtttatgactatatcctctctgtaaaatacgtcctatatcattatatgatgtacctttttcctgtggagtgcttctagtcctcagttccactttgtatactattcacatcaatctaccctcctgcttgcttgcttcaatttttgtttctgtttttgcatttgactggtatca

SEQ ID NO: 573869 - DNA, 536 bp, Homo sapiens
atttgataacattttatttaactcaatatatccaaaagattattatttcagcaaataatcaatgtaaaacatattaatgggacattttatgttcttttgttttggtacagagtctttggaatctggcatttatatcttactcttacagcacagcatttcaagtgctcaatagccacatgtgcccagtaattactgtaatgtatggcatacctctaagtctttggttctttctgctagatctgttcaattctgaaaaggtgtattaaaatcttcaacttaaaattgtattttgtgacaattttccttccacctctaatactttttgccctttgtatttagttgctatgttatttggcacatacatgtttatgactatatcctctctgtaaaatacgtcctatatcattatatgatgtacctttttcctgtggagtgcttctagtcctyagttccactttgtatactattcacatcaatctaccctcctgcttgcttgcttcaatttttgtttctgtttttgcatttgactggtatca

SEQ ID NO: 573870 - DNA, 536 bp, Homo sapiens
atttgataacattttatttaactcaatatatccaaaagattattatttcagcaaataatcaatgtaaaacatattaatgggacattttatgttcttttgttttggtacagagtctttggaatctggcatttatatcttactcttacagcacagcatttcaagtgctcaatagccacatgtgcccagtaattactgtaatgtatggcatacctctaagtctttggttctttctgctagatctgttcaattctgaaaaggtgtattaaaatcttcaacttaaaattgtattttgtgacaattttccttccacctctaatactttttgccctttgtatttagttgctatgttatttggcacatacatgtttatgactatatcctctctgtaaaatacgtcctatatcattatatgatgtacctttttcctgtggagtgcttctagtcctcagttccactttgtatactattcacatcaatctaccctcctgcytgcttgcttcaatttttgtttctgtttttgcatttgactggtatca

SEQ ID NO: 573871 - DNA, 274 bp, Homo sapiens
tagtttcaactctgtgacttcagtgcacatcacacaaagatgtttctcagaatgcttctgtgtrgtttttatataaagatatctccttctccaaaatagatctcaaagttctccaaatattcacttccagattctatggaaagattgtctcaaaactgctcaatcaaaccaaaggttcaaatctgtgagatgaacgcacacatcacaaagaagtttctcagaatacttctgggtagtttttatttgagggtagttccttttccaccacaaacca

SEQ ID NO: 573872 - DNA, 274 bp, Homo sapiens
tagtttcaactctgtgacttcagtgcacatcacacaaagatgtttctcagaatgcttctgtgtagtttttatataaagatatctccttctccaaaatrgatctcaaagttctccaaatattcacttccagattctatggaaagattgtctcaaaactgctcaatcaaaccaaaggttcaaatctgtgagatgaacgcacacatcacaaagaagtttctcagaatacttctgggtagtttttatttgagggtagttccttttccaccacaaacca

SEQ ID NO: 573873 - DNA, 274 bp, Homo sapiens
tagtttcaactctgtgacttcagtgcacatcacacaaagatgtttctcagaatgcttctgtgtagtttttatataaagatatctccttctccaaaatagatctcaaagttctccaaatattcacttccagattctatggaaagattgtctcaaaaytgctcaatcaaaccaaaggttcaaatctgtgagatgaacgcacacatcacaaagaagtttctcagaatacttctgggtagtttttatttgagggtagttccttttccaccacaaacca

SEQ ID NO: 573874 - DNA, 542 bp, Homo sapiens
attctcgtgcctcagcctcccaagtagctgggactgcagatgcctgccactacacgtggataatatttgtatttttaatagagacagggtttcaccattttggccrtgctggtcttgaactcctgacctcaggtgatccgcctaccttggtctcccaaagtgctgggattactaactttttaaaaagtagagaaatacactgagcttcctggaggccaaatgagattggagatgaaaagatgcaaatgacttggaacattgttgcttaactaagagtatcggatctcccacaccaccatcttagtgtgtttactgtgaggggttacttagtaaatttggaagcttaatttgctctattttattataatttccattgtgtctattctgtaatgagctacataaaactaatttgttggaccagttctggaaactggcaggtctcagcaagaaaagcattgactcgaaaagtgattagctgcttggttttggctgttgaattgcacatacagatgagagtgatagtaatgatcatctattgagtg

SEQ ID NO: 573875 - DNA, 644 bp, Homo sapiens
aggtgcttcctgcccttctggcctcctccatcaaagaagcccaccatgtcacatgcagagttccttggcatttggtgtcctcagcattcatgtgacatttgtttcaaaggatgctaaaatttcaagtcctctcaactcgggccatgttcacaagacccaagcttttggtgtccctctgccccaggttcactstgtgggatcttggtcagtaaaaaagaacagaagacagtttgatgagttcaggtgacagtgtgtgtggccactccatgaatgattaaaacttctacagtcccaagggtggggcagggttttctgtggctagaaggctgggtcctaggcatctccttgaggctgtgagccactcatccaaaatacgagggcattggcactgctgtgggcctgcccagcagaggaggatggtggcagctggacaatattctagagcccatttggccttggatcagctgctttccttggtgtgaagcaaatgtggctccacagatgggcataccccagaaagaaaacctcagctcccaccaaaaccttagctgagggaacatataccagactgaagggctcaggaagcccctggggctttcacataagtgcaagcacacagccccagctgcagttatgcaaagcta

SEQ ID NO: 573876 - DNA, 644 bp, Homo sapiens
aggtgcttcctgcccttctggcctcctccatcaaagaagcccaccatgtcacatgcagagttccttggcatttggtgtcctcagcattcatgtgacatttgtttcaaaggatgctaaaatttcaagtcctctcaactcgggccatgttcacaagacccaagcttttggtgtccctctgccccaggttcactctgtgggatcttggtcagtaaaaaagaacagaagacagtttgatgagttcaggtgacagtgtgtgtggccactccatgaatgattaaaacttctacagtcccaagggtggggcagggttttctgtggytagaaggctgggtcctaggcatctccttgaggctgtgagccactcatccaaaatacgagggcattggcactgctgtgggcctgcccagcagaggaggatggtggcagctggacaatattctagagcccatttggccttggatcagctgctttccttggtgtgaagcaaatgtggctccacagatgggcataccccagaaagaaaacctcagctcccaccaaaaccttagctgagggaacatataccagactgaagggctcaggaagcccctggggctttcacataagtgcaagcacacagccccagctgcagttatgcaaagcta

SEQ ID NO: 573877 - DNA, 588 bp, Homo sapiens
gggtacaataaatattagctgcatttactaggagtattttaaaactgattttaacacccatctcttccacctgtgggtcctcatgccaggtttttgcatctctcttatgatatatcataagaaatgctaatcatatgtcattgttgaattagaattttcagtgcatttgccttcctgttaaactgtgagtttctagaagatgcacagtstatatgtcttaagcatcattgtatacgctgaagcttttctcataggctctctaaaatgattttaaaaaactcttcacaattaaaacatttcacagttaaaaaattgaaactacaaccttttaatcataagtgtaagtagtttcaaagggtgtaatttcaaacgtattatgtgtgttcccatttaaaattgtaatagccacatcactcattgagatgtacccaattgcatccaggtgctgcagcaggttagcgcccatcacccttcatctaaaaagccaatgaatgggctctgctttaaaaatcataacttttaccttgatccttttcctgtttggactccaattttcatcccactttccccacataattttgttataat

SEQ ID NO: 573878 - DNA, 585 bp, Homo sapiens
ctggtgttgcttcatgtgcttggataagctgggactttgttcatgctgttccctttcctaaaacattctctagtcctcatccctacccttccccctttatttgtttaataaacgtttgtccttcagacctcaggtgaaatgtgacttcctcaggagtcttccttgatcctgcaaacagagaaaattcctcttctatagattcttatggctctgtgcttttcctgtggaatccttatccctttcatacatatatattaataagtgtgctttttgttcagtatctgtacctcttgttagtctaaaagcaccatgaggaagatatcacgatttttttgctcttttatgctgagaatttacatccaacatagaacaggtattcagtaaatatttgttgaatgaaccatgaatgattaatagcctcatctgtgcttaaattctagcttctccatttactaaatgcatggacttgggtaattttcgtaagctccacaagcttctctttttccattggatgaagaaggatagtcacaatmtaataagtaagattattcatctaaagtttttgacatatagaaagtactgaaa

SEQ ID NO: 573879 - DNA, 458 bp, Homo sapiens
tttcctctgcttcagaggtcactttgcatttgagttctccttaggctttcatttgaaactgcatgggatcacagtgattatcaggaaatgaaagatccaaccaatgatgaaatgtcatttagcattcttgctgattgtcttcccctcaccaccaacaaaaaaaaaaagtgtctcttatggagacgctgtcaatttatgctcaacatttgaaaacatattggcctaagaaaagggttctcacatttcagtcacaaattttattcacagctagggagttactgaatacagctacttagtctgcagaaraaaaggctgaaaagtaactgagtagttttatgctttttgagacaaccaagacatcaggtcacatcttatcttaacatgctacaacaaaaaggcacaagacaatgtctagaaattaatatgtactttttagtcaacattaaaaggaaattaga

SEQ ID NO: 573880 - DNA, 622 bp, Homo sapiens
taaagctcaaattttcattcactactatgtttgtcttgaattgtttccttctcaattctataactgatacagtagcaactcattgtgacttctggttaattccatgcatttaaagttttaactgaaacatttaagttaaattattggtaatattcattatgcagatgtaacttcataattaataattatgcagatgtcaccttgtaattagcaaatgttataaaagccttaccaaaaagtcatagtaaattggtttcatagaaaaagagcttgaaaataatggctaaattagcactgcaaaggactagaaatccacataggstagagttgacattatacatattcataagaatcatgcccttgagaatctgtctgaatttagaactcatctcttacaatctattctctctttaaatcctacaaggctacagctaacctaagtctacattaggataggaaaccttgaagtaaattagaaaaagccttttaagcagagaaattgtttttatgaagttcatgtactgtatgaaagttctatagtcgggggaggagccaagatggctgaataggaacagctccggtctacagctcccagcgtgagcgacgccgaagacaggtgatt

SEQ ID NO: 573881 - DNA, 423 bp, Homo sapiens
tcgctttggattgccttgactattcaggtycttttttggttccgtatgaattttaaaataggttttttctagtcctgtgaagaatatcagtggtagtttagtgagaatagcattgaatttataaattccccttggacagtatgactatttgcatgacatggattcttcctatccatgagcatggaatgtgtttccatttgtttgtgtgatctctgatgcctttaaggtttgtggtctccgggtagagatattcacttccctgcttagctgattcctaggtatttattatttttgtggcaattgtgaatgtgagttattcctgattaggctcttggcttgacagttgttggtgtatctggatgctagtgatttttgaatattgattttgtatatgagactttgctgaagttgcttatcagctta

SEQ ID NO: 573882 - DNA, 620 bp, Homo sapiens
agccgatggactttcgcaattcaggaaaactgtcagagaagactcattctcactgaaggttcatttaggttgtcagtagcaaagaaaaagatattgtacgaagctgccttggaggcactcgcataaaaattatgttaccatttatctatagttgcattgagttattcttataaactgatgatactaccaacccaaattgacaattcttgagaatacacacacacacacgcacatgaaaagttttcataaaaatgctgtttgataatttgtgtcctgttatctctaacaagtaaacaggtaaaaataaaataccttcatgcggtgaagaagtataaactgaaaaatagactcctattttgaaacctagaaaaaagttgtgctttaaacttttctctgtcaaatgagaattgcttaattcttatacttaaggaacrtgggaaatgaaaaggcagaatgtatagtgttggtcctttgatggaatttctgagaaaaaacaaactattccagatgatgactaaatcacatagttttaaatcttctgtagatttttaatggttttttttcaaaaacgcatattgttcaatataataaatatttgtagagtcaggaaaatgacaaat

SEQ ID NO: 573883 - DNA, 620 bp, Homo sapiens
agccgatggactttcgcaattcaggaaaactgtcagagaagactcattctcactgaaggttcatttaggttgtcagtagcaaagaaaaagatattgtacgaagctgccttggaggcactcgcataaaaattatgttaccatttatctatagttgcattgagttattcttataaactgatgatactaccaacccaaattgacaattcttgagaatacacacacacacacgcacatgaaaagttttcataaaaatgctgtttgataatttgtgtcctgttatctctaacaagtaaacaggtaaaaataaaataccttcatgcggtgaagaagtataaactgaaaaatagactcctattttgaaacctagaaaaaagttgtgctttaaacttttctctgtcaaatgagaattgcttaattcttatacttaaggaacgtgggaaatgaaaaggcagaatgtatagtgttggtcctttgatggaatttctgagaaaaaacaaactattccagatgatgactaaatcacatagttttaaatcttctgtagatttktaatggttttttttcaaaaacgcatattgttcaatataataaatatttgtagagtcaggaaaatgacaaat

SEQ ID NO: 573884 - DNA, 600 bp, Homo sapiens
tattattgactaagtggagggcaagtggtgaaggaggatccattaagtgttcataaagattgggagaaagtggcatcaagacagcacaaaaaggctgagttccccaaagaaggtggttgggtatcaaacactacccaggagaataagaattgagaagaggcctttggatttggtgatccggggattattgtgaaacagattcaatagacagctattgaagagtgacgtgaaagtgacactgcaggaggtggaagaataaacaagaaaaagtggagattgcgaatctagattacttctytaagggattggttaggaaaagatagaagaggagaaagaggcaaaaagaatagggagattgcttattttaggacataagagactagcaaacatggtggactgatagggaagtgccagtgtttccagataaatatagagctttaggctggcccagaatcttttctttactaagagctcaaaatacagataatattaattatgaaggagagtatggaaatataaattatagcagcaacatattgaataattgcaacaagtataggtgttgcttatttcatgtctatcatctaactattaattttt

SEQ ID NO: 573885 - DNA, 567 bp, Homo sapiens
agattgcgaatctagattacttctctaagggattggttaggaaaagatagaagaggagaaagaggcaaaaagaatagggagattgcttattttaggacataagagactagcaaacatggtggactgatagggaagtgccagtgtttccagataaatatagagctttaggctggcccagaatcttttctttactaagagctcaaaatacagataatattaattatgaaggagagtatgraaatataaattatagcagcaacatattgaataattgcaacaagtataggtgttgcttatttcatgtctatcatctaactattaatttttaccagataaaactagtacattagggaatacatttaatctacaatacaggaaagtcctgttgatatgattttgcctgtgggctgggtgactgtattagtagtgatgattttcttttttcttttttagcttctgtctttaatcttttcttttgcttcttcataaccagcatgagtgcaggggacacacataccatttggtacaagccttatttgtcttgccttgggtctggaaccacttttg

SEQ ID NO: 573886 - DNA, 392 bp, Homo sapiens
actgatagggaagtgccagtgtttccagataaatatagagctttaggctggcccagaatcttttctttactaagagctcaaaatacagataatattaattatgaaggagagtatggaaatataaattatagcagcaacatattgaataattgcaacaagtatagktgttgcttatttcatgtctatcatctaactattaatttttaccagataaaactagtacattagggaatacatttaatctacaatacaggaaagtcctgttgatatgattttgcctgtgggctgggtgactgtattagtagtgatgattttcttttttcttttttagcttctgtctttaatcttttcttttgcttcttcataaccagcatgagtgcaggggacacaca

SEQ ID NO: 573887 - DNA, 392 bp, Homo sapiens
actgatagggaagtgccagtgtttccagataaatatagagctttaggctggcccagaatcttttctttactaagagctcaaaatacagataatattaattatgaaggagagtatggaaatataaattatagcagcaacatattgaataattgcaacaagtataggtgttgcttatttcatgtctatcatctaactattaatttttaccagataaaaytagtacattagggaatacatttaatctacaatacaggaaagtcctgttgatatgattttgcctgtgggctgggtgactgtattagtagtgatgattttcttttttcttttttagcttctgtctttaatcttttcttttgcttcttcataaccagcatgagtgcaggggacacaca

SEQ ID NO: 573888 - DNA, 441 bp, Homo sapiens
gagaaatcaagagcaaaaaaggcttcaatatagtttatttttttttgccagtaactttcttgttgcacaactattatatatgaaattattctttctaaacatktgtgtgtgtgtgtgtgtgtgtgtgcacgtactcatgtgtttcagttcccaggttcttttcatggctgcacaacttagctgcaaggccttaggtgccttatttattctttccagatttcatgtccatcatctgcacaatgagcaggggggaatctatgtgctttgaggttgtttctggctttaaaattctataattgtatgattttctttctgcattatctttgtttggtgagagcttgccttaatctgatctattccagagcaaaatctctcaggttgacttgaagctttaatttttactctggttttcacacctttttgtttattaggtcataagta

SEQ ID NO: 573889 - DNA, 441 bp, Homo sapiens
gagaaatcaagagcaaaaaaggcttcaatatagtttatttttttttgccagtaactttcttgttgcacaactattatatatgaaattattctttctaaacatgtgtgtgtgtgtgtgtgtgtgtgtgcacgtactcatgtgyttcagttcccaggttcttttcatggctgcacaacttagctgcaaggccttaggtgccttatttattctttccagatttcatgtccatcatctgcacaatgagcaggggggaatctatgtgctttgaggttgtttctggctttaaaattctataattgtatgattttctttctgcattatctttgtttggtgagagcttgccttaatctgatctattccagagcaaaatctctcaggttgacttgaagctttaatttttactctggttttcacacctttttgtttattaggtcataagta

SEQ ID NO: 573890 - DNA, 441 bp, Homo sapiens
gagaaatcaagagcaaaaaaggcttcaatatagtttatttttttttgccagtaactttcttgttgcacaactattatatatgaaattattctttctaaacatgtgtgtgtgtgtgtgtgtgtgtgtgcacgtactcatgtgtttcagttcccaggttcttttcatggctgcacaacttagctgcaaggccttaggtgccttayttattctttccagatttcatgtccatcatctgcacaatgagcaggggggaatctatgtgctttgaggttgtttctggctttaaaattctataattgtatgattttctttctgcattatctttgtttggtgagagcttgccttaatctgatctattccagagcaaaatctctcaggttgacttgaagctttaatttttactctggttttcacacctttttgtttattaggtcataagta

SEQ ID NO: 573891 - DNA, 441 bp, Homo sapiens
gagaaatcaagagcaaaaaaggcttcaatatagtttatttttttttgccagtaactttcttgttgcacaactattatatatgaaattattctttctaaacatgtgtgtgtgtgtgtgtgtgtgtgtgcacgtactcatgtgtttcagttcccaggttcttttcatggctgcacaacttagctgcaaggccttaggtgccttatttattctttccagatttcatgtccatcatctgcacaatgagcaggggggaatctatgtgctttgaggttgtttctggctttaaaattctataattgtatgattttctttctgcattatctttgtttggtgagagcttgccttaatctgatctattccagagcaaaatctctcaggttgacttgaagcttyaatttttactctggttttcacacctttttgtttattaggtcataagta

SEQ ID NO: 573892 - DNA, 541 bp, Homo sapiens
tttgcatgtctgtcttttcttcaagagattacaaaacattttccaagtgtaataaatgaatcctttccttatgaatcccatttgtaaacaactggattgataggttctaagcaccttaatagagagtgatgtgtgagtttatttctaccactagatattgtaactgtgataaatgaatcaactatttataatggtaagttgattcyccagagattgcatttaaatttattagtataatttgcattagcactcctaactttaaaactcttcttaaattccctcacccttgtgactgatactcagtaggtgggaaggattatcacaggggaatgattggctagacaatgggttgtcctaaataatatagtttttcttgggataagaagtgaacaaagtttcttttgtcctggaagttaaatgggacttttttttcaatctaagatataaattgcattcctacattaagttatgtgtatggcaacgaaggcacttgcttatatttttaaggtaatgatttcattctttgcatgacattctgtcc

SEQ ID NO: 573893 - DNA, 501 bp, Homo sapiens
tgatgtgtgagtttatttctaccactagatattgtaactgtgataaatgaatcaactatttataatggtaagttgattctccagagattgcatttaaatttattagtataatttgcattagcaytcctaactttaaaactcttcttaaattccctcacccttgtgactgatactcagtaggtgggaaggattatcacaggggaatgattggctagacaatgggttgtcctaaataatatagtttttcttgggataagaagtgaacaaagtttcttttgtcctggaagttaaatgggacttttttttcaatctaagatataaattgcattcctacattaagttatgtgtatggcaacgaaggcacttgcttatatttttaaggtaatgatttcattctttgcatgacattctgtccattgaaattgagtaaaatgttttgttatataaaatttgttcctcacagcacgctgactgttaggtgttatagttgtgtaaactgag

SEQ ID NO: 573894 - DNA, 541 bp, Homo sapiens
tttgcatgtctgtcttttcttcaagagattacaaaacattttccaagtgtaataaatgaatcctttccttatgaatcccatttgtaaacaactggattgataggttctaagcaccttaatagagagtgatgtgtgagtttatttctaccactagatattgtaactgtgataaatgaatcaactatttataatggtaagttgattctccagagattgcatttaaatttattagtataatttgcattagcactcctaactttaaaactcttcttaaattccctcacccttgtgactgatactcagtaggtgggaaggattatcacaggggaatgattggctagacaatgggttgtcctaaataayatagtttttcttgggataagaagtgaacaaagtttcttttgtcctggaagttaaatgggacttttttttcaatctaagatataaattgcattcctacattaagttatgtgtatggcaacgaaggcacttgcttatatttttaaggtaatgatttcattctttgcatgacattctgtcc

SEQ ID NO: 573895 - DNA, 600 bp, Homo sapiens
tggtcattgaggctaaggtgaagccagttgcacttgatttattcagtacatgattccatgtctcaagaagtgaaaatccagtgaactgagcctgtgccctagttctcattaacaacttaatccaaatccacttgaaatgctcactcttraagtcgtcagtgatgatggcatgatttgtttgctgaggtctgttagttcaataggataattataaatagaatttataaacagttccgaataatactctatttcttgtaaatcaatgtaaaatttcccaaggagttgaaattaattttacgtttgtgcgatatacaaataagtgagagcccttcagtgttcagtgctcagtgtgcaaaactacagagtcatctcacatgtttctttgaaataaactatgtaaaactaagaaagtgggaaagaaaaattagaacaaaagatattctaggtgatttcttatagtcatatcatgatcaggttaatttatataagacacttgatacatttcatctacatcagcttgtttagaagtctagagtcaaagccttctctgatccagacttggtggactatctgagcagaagaatgtgctggcaggctgat

SEQ ID NO: 573896 - DNA, 623 bp, Homo sapiens
ttaattttacgtttgtgcgatatacaaataagtgagagcccttcagtgttcagtgctcagtgtgcaaaactacagagtcatctcacatgtttctttgaaataaactatgtaaaactaagaaagtgggaaagaaaaattagaacaaaagatattctaggtgatttcttatagtcatatcatgatcaggttaatttatataagacayttgatacatttcatctacatcagcttgtttagaagtctagagtcaaagccttctctgatccagacttggtggactatctgagcagaagaatgtgctggcaggctgattgagctatgtcattttattgagggtttgatccaggaaagaattaaaaccatactttgctctaccccctatacagtcatttagtactagaagtttgcttctataaacaaaaggccgtcatcacttcttcctctgttctttagatctttgaaaatcaagccaattcacagtggccctatatgtaatttttatagcctaaagaacatatcagaagtatctgtctaatctccctatccaccctccactattagatctagaaaaggcacgagcatcatataaaattcatgccagaaaactatctttatattaacta

SEQ ID NO: 573897 - DNA, 587 bp, Homo sapiens
aggaactagaatagacaaatttacaaagacagaaagtaaaatgatggttgccaggggctagagtgaggagggaatgggaattactgttttatgggtctgaagtttctatctggaaagatgaaagatgttctggagatggatggtggtggtagttacacagcaatgtgaatgtacttagtgctcctgaactgtatatttaaaataatcaagatggtaaatgttatgtgatatgtaattaattaattcacaattaataatgaaattttaaaagttgtaaaaaatggatttgttgccaaatgactagatttacgaattaaagcaatgtctgctatactaattaggatgtattactgaatcaacacagttttttgagaattattagacttttctgmaacgtacatagagagaaaatgtcaaatagatttggctgcctctgttcgaacaagcagaggtggcactaaatgttccaaattctattcatatgagggcacttcttcttaaaacacataactttatttctttgtagctctcttagtaaattctccagagagtaagagcaaaagctgggggtgtttgaggaatagcca

SEQ ID NO: 573898 - DNA, 435 bp, Homo sapiens
gctttcacttactgagtcctgtgtgagcccagactatttcagcacttaagagtccttcaatgactacctcagaggtggatctcagggtgtctggggctcctatgcacatatgtttcttgttgtttacaaagctctttggacttaatctgaatgagagttgccctaaaaagctggagacaaatgaytagccataaagttttatttttcaacatttaatttttagaataattaatttaataacagattttagggcatgtattccttgctacttagtggtttatgtctcttttaggagaatacctcattatgttctctatattgtcacataagagatgctggttctgcttttgattctaggagtcagtttaagtgaccatagatgatatacgtagtgtatatcatctagggctggaaggtaatcaattaacaaacggt

SEQ ID NO: 573899 - DNA, 589 bp, Homo sapiens
acagtgttggtgggaatgtaaggaatagtacacataagcaatggtaaaatttggcaaaaaaatcccatatatacacacacacacacacacacacacacacacacacacacacacatgcatatatggcatagcacaagaatgtgcaattcacagaatatatattatatagcaacaaaatatggaaagaggtcaattattatatatgtgtagaaatacacacagcactgtttaacacagctttaagtgtaagaacaaagcccataagatgttcatttcttcaatatttagtaaatatatcaaacattttctgtacacaaagcacatttgaaagcttgaaacttaaaatctaactagtttctaaaataccttaaaaaatactgtggcatggaagstagtgttcttttggaattttcattttcgatttatatgtgttttctgaaaacaacagaacacatacaacacctctccctgccgtattgttgtattaagcaatgttgggattgatgtgaagattaaatcttcatgtctgcctttatctgtctcctacttttacatgtttgacctgtgaattgaactgattttgtttact

SEQ ID NO: 573900 - DNA, 515 bp, Homo sapiens
ggggacgataataaggttatataaagattaaattagatagtatatataaagcatttggcatagtgcctggaacttggtaagtattcaaaaaatgtttgttactatggtaatgacgactgtactrtgactgctaccactatcggatagtggatgaattactcaacattgacttccaaatcacccttctgaggaatagagccgtaaatgttacctacggtaaaagttgtcatgtgactctactgtcctgcccacaattgattgaactggcagttggtacctacaaccaatgattctgagttatcgtgttgacatacttttgaatagtagaacttttgccaacctcagagagactgaagtctattcacagttatagcaccagtgactggctcaccttgggcaccatgtggctgggtaattatttgtgatactcattccacctttgtgctcatgagtcacggttccagtactgaactgaaactagtctatgtcttcctcacagtcacctacacccagaa

SEQ ID NO: 573901 - DNA, 515 bp, Homo sapiens
ggggacgataataaggttatataaagattaaattagatagtatatataaagcatttggcatagtgcctggaacttggtaagtattcaaaaaatgtttgttactatggtaatgacgactgtactatgactgctaccactatcggatagtggatgaattactcaacattgacttccaaatcacccttctgaggaatagagccgtaaatgttacctacggtaaaagttgtcatgtgactctactgtcctgcccacaaytgattgaactggcagttggtacctacaaccaatgattctgagttatcgtgttgacatacttttgaatagtagaacttttgccaacctcagagagactgaagtctattcacagttatagcaccagtgactggctcaccttgggcaccatgtggctgggtaattatttgtgatactcattccacctttgtgctcatgagtcacggttccagtactgaactgaaactagtctatgtcttcctcacagtcacctacacccagaa

SEQ ID NO: 573902 - DNA, 609 bp, Homo sapiens
tatgactgctaccactatcggatagtggatgaattactcaacattgacttccaaatcacccttctgaggaatagagccgtaaatgttacctacggtaaaagttgtcatgtgactctactgtcctgcccacaattgattgaactggcagttggtacctacaaccaatgattctgagttatcgtgttgacatacttttgaatagtagaacttttgccaacctcagagagactgaagtctattcacagttatagcaccagtgactggctcaccttgggcaccatgtggctgggtaattatttgtgatactcattccacctttgtgctcatgagtcacggttccagtactgaactgaaactagtctatgtcttcctcacagtcacctacacccagaatatcccatagcctacccatgcagtttartgatttaacccacaggcattgccttaataatatgttttgcagttgtgcctgcagacttgagagtgactgaccatcacaggggggattatttgccttctatttgagagctgccacttcctctaggaaagtcatgtattacaatggatcccagtgcttgtgtatgtgcacatgggatggaatgggaatga

SEQ ID NO: 573903 - DNA, 635 bp, Homo sapiens
acttttgaatagtagaacttttgccaacctcagagagactgaagtctattcacagttatagcaccagtgactggctcaccttgggcaccatgtggctgggtaattatttgtgatactcattccacctttgtgctcatgagtcacggttccagtactgaactgaaactagtctatgtcttcctcacagtcacctacacccagaatatcccatagcctacccatgcagtttagtgatttaacccacaggcattgccttaataatatgttttgcagttgtgcctgcagacttgagagtgactgaccatcacaggggggattatttgccttctatytgagagctgccacttcctctaggaaagtcatgtattacaatggatcccagtgcttgtgtatgtgcacatgggatggaatgggaatgaatgtgtcagaattaccttcactcccaacaagacatcctgaaaataccacgtgggtaagccagtgatttattccattatgacttttatatttccccttattaaggttcaagattattcgtaacatgggaagtataattgcacagacaggtagagattttggagtctttattgtttagtatatagctaggccactgaaatatcgagatcctataagag

SEQ ID NO: 573904 - DNA, 635 bp, Homo sapiens
acttttgaatagtagaacttttgccaacctcagagagactgaagtctattcacagttatagcaccagtgactggctcaccttgggcaccatgtggctgggtaattatttgtgatactcattccacctttgtgctcatgagtcacggttccagtactgaactgaaactagtctatgtcttcctcacagtcacctacacccagaatatcccatagcctacccatgcagtttagtgatttaacccacaggcattgccttaataatatgttttgcagttgtgcctgcagacttgagagtgactgaccatcacaggggggattatttgccttctatttgagagctgccacttcctctaggaaagtcatgtattacaatggatcccagtgcttgtgtatgtgyacatgggatggaatgggaatgaatgtgtcagaattaccttcactcccaacaagacatcctgaaaataccacgtgggtaagccagtgatttattccattatgacttttatatttccccttattaaggttcaagattattcgtaacatgggaagtataattgcacagacaggtagagattttggagtctttattgtttagtatatagctaggccactgaaatatcgagatcctataagag

SEQ ID NO: 573905 - DNA, 635 bp, Homo sapiens
acttttgaatagtagaacttttgccaacctcagagagactgaagtctattcacagttatagcaccagtgactggctcaccttgggcaccatgtggctgggtaattatttgtgatactcattccacctttgtgctcatgagtcacggttccagtactgaactgaaactagtctatgtcttcctcacagtcacctacacccagaatatcccatagcctacccatgcagtttagtgatttaacccacaggcattgccttaataatatgttttgcagttgtgcctgcagacttgagagtgactgaccatcacaggggggattatttgccttctatttgagagctgccacttcctctaggaaagtcatgtattacaatggatcccagtgcttgtgtatgtgcacatgggatggaatgggaatgaatgtgtcagaattaccttcactcccarcaagacatcctgaaaataccacgtgggtaagccagtgatttattccattatgacttttatatttccccttattaaggttcaagattattcgtaacatgggaagtataattgcacagacaggtagagattttggagtctttattgtttagtatatagctaggccactgaaatatcgagatcctataagag

SEQ ID NO: 573906 - DNA, 509 bp, Homo sapiens
tctcactgcccaagatatcttaagttttaacagtacagtcctgtcctgttgattctacctctataatagatcttaacagcatccattcttctggtcataattccttccagagtttataatccaacttcttttccttctctagccccactgaggttattcctcccagrttgatcccactgatgttcttccagtccctagacctctctaaacgcttcttgctcatgacctctgcatctggtagtctctctgactgccccttggtcttctctcttttgtgtggccatttccttctcatccttcaggtctcagctttgatgtctcttctttagaggaacttctcctaccactctgtctaaagttttttagtttatctcaaactcagtttatttcttcaaccatacttggtattgtcttttgtatctatttatttgttttctttctgttcccctcattgcactattaacttcactgaactattaaggtaatgggatatatctgtatttttcatc

SEQ ID NO: 573907 - DNA, 446 bp, Homo sapiens
gctgccatttctggttctcagaagaaacttttttatttgacttggatcagcctacagctagatgacaataacataaaataaagttgaagaaaaaaacagttgttaaataaatccattactttaacgagctctccttctgtatgttttataaggggaatatcaaactttttagactctaatgagagtttatcacataaatgtacactgaataaaaagaatcatgcagttgtgtcagaaaaagtagcaaaggcctttttatgagagctgacttgtaatatgtatataygttactggctaatttgattatggtaaatcatcattgtattttatttattaacttatgatttcacagttgccggctgagttccctttaacaaactccatatttattgaattccctctatgcacaaggtataatgggcatttattttttcagataggcaatc

SEQ ID NO: 573908 - DNA, 632 bp, Homo sapiens
agtagcgtttgtagtttcagctgctaatacagtatgcttcttgtatattctgggtgggtaaatatagaagactatttgtcacctgggttgatggattacaaataagtaagacaatgtgtttaggattctgaagcataaatgaaaagtcaaaaaccttatattatttacaatataacgtttatgctttcagatttgttatccctattacatcaataaaaatgrttgggttttaaaataagcatgcaactcatttttaaccatctcttttcattacatagttatttgctgcaagatagtatcaattaagcatagaaaaaaactgattagaatgaagaacttattatagatagctgcatttatttttaaagatcatgattcaagtatcttaaaatttttccactcataggacctatgactaatgacatgtttctccacccatgaaaagctggttgttttcagtacctaattaatgttcaagcttattgtacacacttatgcttagaacggtggcatttctgaaaaatcttcttggtcaacagccctctaataatattgatttctctttgtacaacattttgaatttgctaaggtgttacaagtagtataacataatttcaaaatgatatcgtgaa

SEQ ID NO: 573909 - DNA, 538 bp, Homo sapiens
cgaaagcagctccaatgtgctttccacactggcagatgtccaaatctaggtttgattctaaaatattcaaactgagaaaagtccagttttccagtccactaaaaatgagacaagtagatttaggcaattctgagatcagcacaaataacctaaaaatatttcacgaaaacctatcatgagcagagtggtacctgtcataatatacctgtgcaggtctcacagataaaaaaatatatatggggtgatattgatgggtgtagccccatgtgcttatttcccagcatasaccgcttcagtcatcctagtaaaatcagtctatagacacactgcaattatgaaagctatatttctggcaaataccttaaatgcatgctgttattgtttgattgtattgaaataaaatgaaagtgcttgacaattataagaggctactattaaagaaaccatgaaataagttagtatatccttctatactttgaaaggcataatttattttggtactcatgtttgtgctctgattttttcggtgcatattgta

SEQ ID NO: 573910 - DNA, 566 bp, Homo sapiens
tggagatgcttttaagaagttaaaaattgatgatgtttcatatttgtgtagcgcttattgtctaaataatttgaaaacacttaagcaccattcgatttcatagtttccaacaatttgacacgactctgagagaaagcactgagcagcctagccagtctcggggtgaacaccacagaacaagttttccaatttaggtaaaaatttagcctcctaggaatctaccaaatgaagygcaaggacaattatatgaggtataaattaaagcttgtgtacccaattaggaagacctcttgttagtgttattgttagtgcttcttgaaaacatagaaattcccattgctttactcatgagtttgtttgtgttttgaatgtgatgtgttaactattaaaatatgaggtgtgaaatattgttatacaaatgtaaatgattacaattttaatataatacctttaaagtattgtcaggtagggttaaattaattcacttgtgggtagtggtgaatctagagccagcctgtgcctctagatttctagttcattatcctcttaagttccaagttaggcgc

SEQ ID NO: 573911 - DNA, 482 bp, Homo sapiens
gtaagtacaattcaatgtgataatgtatgtcaattaattgaagcagtctgatagatgagcttctggtaaatgtacccaattttatatgagagactcagggttttacggactgtcaaagtaagacttagtaagaaatgcatcgtgattaaatgagtatacgatgtgtgaagaatgtttacaccagtacaaggaaacctagttggtcatctgctagaaagtcaaattggcagtggttgtttctaatgtatctttttcttgtgtgatgtgtcatatgtataatgattrcattttagataaagtgaatggatctatcaaacatttatcagactccttcactgtaaggtgctgtggaggtgcctcatttaaaccaccatagttaaacctcaaagagcagccctatggatctggcaattttattctcaacttcgttttagaggtgaggaaattaaagcaaagacaacttaagtaatttttccaaggtt

SEQ ID NO: 573912 - DNA, 521 bp, Homo sapiens
gctagagaaattgcagagaaccaggcttgattctttgcaggccacagagccatgagatttagtcagggaagtgacctgggtatttatacattgggtattttccacatgatgggccatttggagacaatagacatattggagattcttctaacaatcccacagagtaaaaatgtagttttgaaccagggcagtggagaaaaaatatttattgagtaaaattggcaagactgagtgtttgattagaaatgcatagtggaagagttcaaagaagagtttgcaatttctaattttgaggtcttataaattacatccagttttaattgtgttgagtttatatctgcataggatatgcaagtagagacatccagcagtcagttaagagtgtgattctgaagcttgggggagacagctgggctggctgggaatatctatgaatgtgtgtgtgtctgtgtgtgtagtgacataccttcacacacacaaatacctatrtacatttgcatctgcatttatatatacatgca

SEQ ID NO: 573913 - DNA, 601 bp, Homo sapiens
tgttctcgtggtagggaataagtctcatgagatctgatggtttataaggggaaactccttttgcttggtttttttttttttatatatatatatataaagaggagttctcctgcatatgctctcttcttgcctgctgccaggtaagacatgactttgcttctccttgccttctgccatgattgtgaggcctccctagccatgtgaactgtgagtcaattaagcctttttcctttataaatacccagtctcgggtaagtctttattagcagcatgagaacagactaatacaatgggtacaataaatggaatgttctagagcaaaaaggtccccaacctttttggcaccagggtctggtttcgtggaagacagtttttccaccratgggggttatagttttgggatgattcaagtgcattatatttattgtgcactatatttctattattattacactgtaatatataaggagataattatacaactcaccataatgtagaatcagtgggagccttgagcttgtttcctgcaattagatggtcccatctgagggtgataggagacagtgacagatcatcaggcattagattctcataaagagca

SEQ ID NO: 573914 - DNA, 559 bp, Homo sapiens
aatacccagtctcgggtaagtctttattagcagcatgagaacagactaatacaatgggtacaataaatggaatgttctagagcaaaaaggtccccaacctttttggcaccagggtctggtttcgtggaagacagtttttccaccaatgggggttatagttttgggatgattcaagtgcattatatttattgtgcactatatttctattattattacactgtaatatataaggagataattatacaactcaccataatgtagaatcagtgggagccttgagcttgtttcctgcaattagatggtcccatctgagggtgataggagacagtgacagatcatcaggcattagattctcataaagagcrtgcagcagagacccctcacatgtgcggttcacaagagggtgtatgctcctatgaaaatctaatgccgcggctgatctgacaggaggtggaactcgggtggtaatgcaaacgatggggagcagctgtaaatacagatgaagcttcactcacttaatggctgcccacctcctgctgtgtggccccctaacaggcca

SEQ ID NO: 573915 - DNA, 600 bp, Homo sapiens
tgatttcattcttttttatggctgggtagtattctatgatgtctgtgtaccacattttctttatccaatctacagttgatgggcacctaagtcatgtctttgctattgtgcataatgctgcagtgatgcaaaygcatgtgtcctttggtataactattttcctttggagtagctctgttttaagttctttgagaaatcttcaaactgcttttcgtagtggctgaactaatttacattcccacccacagtgtataagcattcccttttctccacaatcttaccagcacccaggataaaattttgagaaagaaagtgttaaagaaagagagaggtcattaattttctttatattttgggttgcaaagttttaaaaaatcatattatgactgttggatgtcaatgataatattaatgtttcactttgaaacaatattaacgtttcatagtattaatgtcacagctttttgttttacttttaggatatgtgctggaaatagcgaacaatttagaatcagaaaaactacttaattcccatttctattatctgctggtggtgtgacgtaaagccagccactcactgtaggcctatttctaatatgt

SEQ ID NO: 573916 - DNA, 593 bp, Homo sapiens
ttttagagataaactgagatatttaaaaataactattataaataggttgtttatatgctagggatactttttcttacagaattaagcgattaataagaatagttattagttaattaagcatctggaaatcttcagtttagtacaaggagcttaagtttcatacatttctatgacatcactttgtagtaggatacaactgctctttcctcatttcactgttgagaagacactaaaaaaaggaaaattagaaaagccaactagaactttgctttgtttggtgcggggcagatagagttataggggtgatgggaagaatgagttttgaatatacatcacacagtcggcaaggctccccccatatgtcatctcatgtactccttgtcataaccccctgaagtgggtgcacacggccccattttatagatgaggacattgagaagtaaaggggttaagggagctacgttcactttgactatagaaagaaaaactttgcgaactttgacaccaggtggagstgcagaagccgggaagtgtgttcataataaacaagtttatggatcatattatattgaaatcatacgagtaaatgaaca

SEQ ID NO: 573917 - DNA, 584 bp, Homo sapiens
gacaacattaaaattcattgtttaatattaatggtaagcttaggtatgtaaagcaagaccttctattatttttacatgaatgtgttagcatcagacataagtacatcttaaaaggagaggaatttggttcattttccataagcacccagaaattcagatgcttacgtaaagcttatctgaactacctaaacacagttaagtttgcgaatcttagcagagcaggactgcatgtgagattgtcagcatttagctgccaactcagacacaaatattaagaaagaagactatttctggcattctgttatttctatatctaatttccattgtcaaactaaaaacggaaaagtgaaatttgagaccaggatttgagactcagttcattcctagtccccaaggtggtagttaaattagctcatattgacaatgaattgttgtccttagatacgtgtttgagaaacagtcratgacttcttttaataagttaattgtgtatataagcgcaaagaaacagagtctaacaggtcaccaggtatctttcatttgtggaggtaagttagcaagttaagttaggtgactcattgtaa

SEQ ID NO: 573918 - DNA, 501 bp, Homo sapiens
agaattcttggattccaccaatgatctacttaatttgactctttaggagagaggtctaccaattgaatgtcatcagatgggtcttctgatcagatgtgcttgataaacatgacattaactcaatattctcagataattttgttatttggtctaaaaattggaaatactcattatcataaagtctattctgatccactcttgaatttggtcagctttgttgattagaacatactgattatgtggttgacggccagttgccttctgccccattgttgagaatcatacttttatctctgacttgtcaaaggtaaagaggaggaaatgaaatacccaataaacatagataagtcaacagaaatgtgcaggaaaacgtataaccttttgatactcaaaataattccaactttaagcttgtgtcatcttgtcggaggatcgttgttaytgtgtgcatgacaatagtacatttaaaaataatacctcaattcttgggagtagagagct

SEQ ID NO: 573919 - DNA, 583 bp, Homo sapiens
atattttcaagagaggttgctgtgttttgaatattaatgcagcagtttgtctactaaagggaccacataaagcaaaacattgttttgcaatcacagattttaattcaacttttcttttcctctctagacagttactgtgaaatgtccacaaaaccaaactttttgcttttagtatatcctcttctctcttagacaatgtacaaacctttaagaaataattaaatgtagaaatatttgtaatttatagatttatgtccatgtctgttttattgagccacatgaataaaacaatataactgccctttcaagacaattgaaaaatttcatcaagctctcaaaaaggtctcaaaaagcyttattgcttgtgtaacattgagtttcatctttcaaatgatgcaaaaatatgatgaaataactttcctaatcaacaaagctttgtttgctgattatattccttttcagaaatattcatttattctctcttttttttaaatttgtcaaattgaccgatgataagagaaaaattattttgtgaaatgaggaaatatttatctgaaaaagatgtgtgtgtgcacatatgtgt

SEQ ID NO: 573920 - DNA, 583 bp, Homo sapiens
atattttcaagagaggttgctgtgttttgaatattaatgcagcagtttgtctactaaagggaccacataaagcaaaacattgttttgcaatcacagattttaattcaacttttcttttcctctctagacagttactgtgaaatgtccacaaaaccaaactttttgcttttagtatatcctcttctctcttagacaatgtacaaacctttaagaaataattaaatgtagaaatatttgtaatttatagatttatgtccatgtctgttttattgagccacatgaataaaacaatataactgccctttcaagacaattgaaaaatttcatcaagctctcaaaaaggtctcaaaaagccttattgcttgtgtaacattgagtttcatctttcaaatgatgcaaaaatatgatgaaataactttcytaatcaacaaagctttgtttgctgattatattccttttcagaaatattcatttattctctcttttttttaaatttgtcaaattgaccgatgataagagaaaaattattttgtgaaatgaggaaatatttatctgaaaaagatgtgtgtgtgcacatatgtgt

SEQ ID NO: 573921 - DNA, 491 bp, Homo sapiens
acaaaattctgatgctatgcttacttttagcaactctagtaaagcttttccagtgctggcccttgatctggtagctcatgtaggctcagcattcggcagtgcaaggcagctttaatctaattctcacttcatttttccccccggctttctccttargacaagtctcaaggaagaaaaaaaaaaaaacgaaagaaagaaaaggaaagaaagaaagtcacaggcctggcacgtcataatacaaaaatgcaccactaattactgtggctgtaattcttgatccagccaaaatacaggtacacaattactttacttggggtcagactctgcttaacccctgcttcgtttcaccacctcttcagcacgttccctcttcttcaacagcagttatctcttgatagtaataactgaatagctgcctcagaagaagattcccttgggaagcatccaggtgaggagcaacaaagccaatgccccacacaggtttgggatgg

SEQ ID NO: 573922 - DNA, 491 bp, Homo sapiens
acaaaattctgatgctatgcttacttttagcaactctagtaaagcttttccagtgctggcccttgatctggtagctcatgtaggctcagcattcggcagtgcaaggcagctttaatctaattctcacttcatttttccccccggctttctccttaggacaagtctcaaggaagaaaaaaaaaaaaacgaaagaaagaaaaggaaagaaagaaagtcacaggcctggcacgtcataatacraaaatgcaccactaattactgtggctgtaattcttgatccagccaaaatacaggtacacaattactttacttggggtcagactctgcttaacccctgcttcgtttcaccacctcttcagcacgttccctcttcttcaacagcagttatctcttgatagtaataactgaatagctgcctcagaagaagattcccttgggaagcatccaggtgaggagcaacaaagccaatgccccacacaggtttgggatgg

SEQ ID NO: 573923 - DNA, 545 bp, Homo sapiens
tagaagaaacaccagggaaggaaattatgctcctaacagcatgaacatgtcacatggcgcttttgaacattagctttcttgtctttaaaattacggatttaaattgtgctcgtctcttccctataggccrcctgtattatacggtgacagaacaatcagtaaacatattgattgcaataatttgaaagatagaaaacatacttatagtgggtaggatggtgtccctataaaagatatttctatatcctaacccccagaacctgtgaatgtgatcttatttggaaaaagattctttgaagtgattaaagatctccagatgataggggaagggagtgtcattccaaggtgggtttcaaatttgtgcagccttagagcataaatcagttacctaagttatgtctgtgaattcctctacataagtgtacatttttaaatattacatattacacagtaagttatatgtgtatatactataagttttaattactctccattgaactatttctattccttctacagccaagctctttgcttttagataagaa

SEQ ID NO: 573924 - DNA, 533 bp, Homo sapiens
gtacatttttaaatattacatattacayagtaagttatatgtgtatatactataagttttaattactctccattgaactatttctattccttctacagccaagctctttgcttttagataagaacatcaaaatgcaatgggaggtgagcagcattttaactaattgatgtaattcctgttccaattcaattattacatttcagaattttttgtgtgtatcccaaaatagtagttgaaaacaatgacttttttatgactgtaagtttattgccaaagagctgaacaatgtacttaaggcttatttggcactttggctttcctgtctcaaataaaatggtagataagtatatttgaagtagatatcactatgattttaacactttcagtgaatgtttactttgagtatattttaaggattaatgtcttcacgacagccttgtaaggtaggtagattaagttcctgtggttccacaaagaacaggtagcagagctggaatccaagtctaggtgtcaaatttaaaagcccattttct

SEQ ID NO: 573925 - DNA, 551 bp, Homo sapiens
attacaagacaggaaaactatatgtcaatatctctcatgaacacagatgtgaaaatcctcaataaaatattaacacattgaatcaaacaatgtacaaaatgaattatatatcatgaccatgtggaatttattctaggtatgcaaggctggttcaacatgcagaaattagctaatgtaatccatctcaccaagagaataaattaaaatcatatgatcatatccgtaaatgtagtaaaaaagtttgacaaaactcaacatccgtttatgatataaattctcagcaaactaggattagataggagcttcttcaacttgagtttttttttttttagagaatctgcaaaagcccacagttaatatcatattcaatggttaaaaaaaaaatagttgctttccccctaagatcaggaacaagacaaaaaggatgttctctcttatctcttaccactcttagccaatattttattggaagtcctacccaatgaaataatmcaactaaaggaaagacaaggtatacagattgggaaggaaaaaattaatagtgctcacca

SEQ ID NO: 573926 - DNA, 606 bp, Homo sapiens
actttgtgtgatggtaaggtttgaacaaataactaagaacaaattatttcaattatttaaataattaagaaatgtcttgaccaagtcatatttaatatgtaaatatgtttacagtattatcgttgggctcatgtgtgggaagtatactgtatatattaaaatgaatttaattttaatcaactcaagtgtctacatcaaaggctttgcagtggggacagaaagatawgtcctctgccttcctggttcacagtcttgcttgcaatgtatatgagtgctggtctttgtaaacccctaggaaaatatcatactttataacactagtaacataataattgatctttaaatcataaattttaactaaaattctgatttcaaagattcttcttgtttctaattcacctaaatttgcaagagctttgtctttcaagaccatcggtctctttaatgcatagttaatggcctgtgaaatatttaaaatcactaggggaacaagccattcgaaggggaacagttttacaacacctataatcacccccttctaattgactagctgcacagggcagtgagttagacatctgtgttgccagcagaactctgccacttgaa

SEQ ID NO: 573927 - DNA, 618 bp, Homo sapiens
tgacacctctcaggctctaacaaatcctataatttatttgtttatcatgtctgttgcttatttcctgccttattcccatcatcccctagaatatatgcctcacaagatgaggaatcttgtgttacacttcctatttgattatcctaagtttataacagggtgagcaaatrcatgtgctcaataaataactgtgtgatgcatgaatggccactcctgagtctgccggctaccatctcccttccatgtctctgctctgccttgctcttttcaagctacatctaccaccactcacagcctccaggaactactgaactgtagcctgcgtcgacaagatgctgaatgctcagacaggctcagtgtgggaggccaaactccctctcctcccccatatctttatccacatcaccttcacacaaggttggataatacatcacagtttatgaagtgttggggctaactgaagagaatcccaatggaatacaggtgagatgtttaaatggtgcattttatgggcctatctttattctccaaaggaaaagaaccaaaaatttaaaatcgttcaacagggggttctcaggacacatgcgctagtcccttttcctacacacctgccctcag

SEQ ID NO: 573928 - DNA, 618 bp, Homo sapiens
tgacacctctcaggctctaacaaatcctataatttatttgtttatcatgtctgttgcttatttcctgccttattcccatcatcccctagaatatatgcctcacaagatgaggaatcttgtgttacacttcctatttgattatcctaagtttataacagggtgagcaaatacatgtgctcaataaataactgtgtgatgcatgaatggccactcctgagtctgccggctaccatctcccttccatgtctctgctctgccttgctcttttcaagctacatctaccaccactcacagcctccaggaactactgaactgtagcctgcgtygacaagatgctgaatgctcagacaggctcagtgtgggaggccaaactccctctcctcccccatatctttatccacatcaccttcacacaaggttggataatacatcacagtttatgaagtgttggggctaactgaagagaatcccaatggaatacaggtgagatgtttaaatggtgcattttatgggcctatctttattctccaaaggaaaagaaccaaaaatttaaaatcgttcaacagggggttctcaggacacatgcgctagtcccttttcctacacacctgccctcag

SEQ ID NO: 573929 - DNA, 618 bp, Homo sapiens
tgacacctctcaggctctaacaaatcctataatttatttgtttatcatgtctgttgcttatttcctgccttattcccatcatcccctagaatatatgcctcacaagatgaggaatcttgtgttacacttcctatttgattatcctaagtttataacagggtgagcaaatacatgtgctcaataaataactgtgtgatgcatgaatggccactcctgagtctgccggctaccatctcccttccatgtctctgctctgccttgctcttttcaagctacatctaccaccactcacagcctccaggaactactgaactgtagcctgcgtcgacaagatgctgaatgctcagacaggctcagtgtgggaggccaaactccctctcctcccccatatctttatccacatcaccttcacacaaggttggataatacatcacagtttatgaagtgttggggctaactgaagagaatcccaatggaatacaggtgagatgtttaaatggtgcattttatgggcctatctttattctccaaaggaaaagaaccaaaaatttaaaatcgttcaacagggggttctcaggacacatgcsctagtcccttttcctacacacctgccctcag

SEQ ID NO: 573930 - DNA, 522 bp, Homo sapiens
ggagttttttgttaccacagcataatatgccctcacctaattaataacatgtctggatacatttaactaacagaacagcttcagctactctgaaataaaattatttcataatttatgaaataataggagagagaaaagggaaattgccttctgctggagggtaggaaaactttcttgggaggtggttttacaaggaatgggtcagaayattaaaggtcagagaatgggaaggggcaatcagatagaagaaatcatgggaataaattcttagagggtaaaatacatggtaaaaatgggagtggtgtgtagaaatatgagaattggaacttatagtggaagataacattggaaatgtaaattgtagctggattgttgaagtccataaagacaacccaaggtctgagactttattctgtaggcaatagagagagcccctgaaagcttttcaggtgggaagtattattatcagagctgaactctaggcagggcaggttcagagaggtgcactgatggcaaaggaag

SEQ ID NO: 573931 - DNA, 522 bp, Homo sapiens
ggagttttttgttaccacagcataatatgccctcacctaattaataacatgtctggatacatttaactaacagaacagcttcagctactctgaaataaaattatttcataatttatgaaataataggagagagaaaagggaaattgccttctgctggagggtaggaaaactttcttgggaggtggttttacaaggaatgggtcagaacrttaaaggtcagagaatgggaaggggcaatcagatagaagaaatcatgggaataaattcttagagggtaaaatacatggtaaaaatgggagtggtgtgtagaaatatgagaattggaacttatagtggaagataacattggaaatgtaaattgtagctggattgttgaagtccataaagacaacccaaggtctgagactttattctgtaggcaatagagagagcccctgaaagcttttcaggtgggaagtattattatcagagctgaactctaggcagggcaggttcagagaggtgcactgatggcaaaggaag

SEQ ID NO: 573932 - DNA, 490 bp, Homo sapiens
gctcttcaaattgtatgttaaactgtaaaataagataaaagaaagctttcagagacaatgatgttggaagaacttattagcaatttaaggagaaatgttaggtcatccaaaaatgttagatcatctttaatacaacaaagtgaaagaaactacatggattgaaaatttaaagtgttttctaaagcatatagtaaaactagaaataatatttattaagtatgttaatgaattaaatgtttctgtacattaaatcaaaataagagtccaaaggaaaagtggatcagctatgaatatttgaaatgtgaaagttttctgtgtggttcccattccctcacttaaaataataaaagatgtccattcaggggccaagtttcatcaaggtcctgttttatcaaggacattcttaagtgaaactggcattgtttattctttaactgctagaaaccagtgttgaactagcraactggcttctcacagtgcgatgcccctg

SEQ ID NO: 573933 - DNA, 551 bp, Homo sapiens
ccaacaatgttcaagtctactactagccagtgaaaaagacagctgaaaagcatctcgcaggccagttgtcacatgycactgtgttgctgcttttgcctctttgcataaggggtttaagatgtcacactctaaagacaattgacttccaagtgcaacttctggctaatttgatttttagggaagacttgggggtggggcagttgaaggtatattttctgttcttaccttagatagattattatactgtaatatattatctcctgagtttcttaactttcacatgagaatcaaataatcaagagaaaattacattggttccccaaaaagtatcttcattgtaataattattataaaatatttatcattatagctagtttctggaaagaattcccatcagtttgaattaaattatatgtgcctctatggtaaattaatgtacttgatgataccaaattaaaaaaaaaaattcaagatcctagactcacagtggcaaaagttccttaactacctcctgttacaagaaaaattaaacaaattaaatactattactc

SEQ ID NO: 573934 - DNA, 566 bp, Homo sapiens
aaaagagatgcttcccaacaatgttcaagtctactactagccagtgaaaaagacagctgaaaagcatctcgcaggccagttgtcacatgccactgtgttgctgcttttgcctctttgcataaggggtttaagatgtcacactctaaagacaattgacttccaagtgcaacttctggctaatttgatttttagggaagacttgggggtggggcagttgaaggtatattttctgttcttaccttagatagattattatactgtaatatattatytcctgagtttcttaactttcacatgagaatcaaataatcaagagaaaattacattggttccccaaaaagtatcttcattgtaataattattataaaatatttatcattatagctagtttctggaaagaattcccatcagtttgaattaaattatatgtgcctctatggtaaattaatgtacttgatgataccaaattaaaaaaaaaaattcaagatcctagactcacagtggcaaaagttccttaactacctcctgttacaagaaaaattaaacaaattaaatactattactcc

SEQ ID NO: 573935 - DNA, 566 bp, Homo sapiens
aaaagagatgcttcccaacaatgttcaagtctactactagccagtgaaaaagacagctgaaaagcatctcgcaggccagttgtcacatgccactgtgttgctgcttttgcctctttgcataaggggtttaagatgtcacactctaaagacaattgacttccaagtgcaacttctggctaatttgatttttagggaagacttgggggtggggcagttgaaggtatattttctgttcttaccttagatagattattatactgtaatatattatctcctgagtttcttaactttcacatgagaatcaaataatcaagagaaaattacattggttccccaaaaagtatcttcattgtaataattattataaaatatttatcattatagctagtttctggaaagaattcccatcagtttgaattaaattatatgtgcctctatggtaaawtaatgtacttgatgataccaaattaaaaaaaaaaattcaagatcctagactcacagtggcaaaagttccttaactacctcctgttacaagaaaaattaaacaaattaaatactattactcc

SEQ ID NO: 573936 - DNA, 594 bp, Homo sapiens
cacatcctatctcctagccatttagcccattcacccacataactcctactcatttttcagataatagcctaaaagtcctttctttttgtgacttagatgcttggaagaagtcttaaagctccagaaaggagcacagcctgcctgagatcttgttgccaccttgatcatgccccggtttaggttaggcacccctaccatatggtctactccccagagcacctgcactgccatttcccagtcataccacttgtcattactttccartccatgtttactctgctaagctaacttcaagagagatagagatcaaatctgaattgttcactgctataaccccagatataaggacaatgcattcatacttataaagtgaataaataagtgaatcatatgggctatgataaatactacttgaagaggtaacaacaaagggccagggagatttgaaggaaggaaagagtctatccacatggggcagtcataggaggaaacgtcacagacgagaaatgcatttaagaagaaattgaatgttaaatgcgactttggtaggaggatattgaaggaggcaatctaggtagtgggaatagcacattt

SEQ ID NO: 573937 - DNA, 545 bp, Homo sapiens
acctgcactgccatttcccagtcataccacttgtcattactttccaatccatgtttactctgctaagctaacttcaagagagatagagatcaaatctgaattgttcactgctataaccccagatataaggacaatgcattcatacttataaagtgaataaataagtgaatcatatgggctatgataaatactacttgaagaggtaacaacaaagggccagggagatttgaaggaaggaaagagtctatccacatggggcagtcataggaggaaacgtcacagacgagaaatgcatttaagaagaaattgaatgttaaatgcgactttggtaggaggatattgaaggaggcaatctaggtagtgggaatagcayatttggaatctcagacagagttctcaataaacgtcatgccccttccccacccaagttcaaaacaagttgagaaataaaacaaagaataaacatagaagccaaaacaagaacttcattgctctattaatagatgccatgttgaagagccaaatgtgtctgctaatggaatccc

SEQ ID NO: 573938 - DNA, 516 bp, Homo sapiens
aatatatatctcctgaaagaatgcattaaatcttcttaatcctgtgaataactgytttaggtcatagaatagcaagcaccacaccatagaaatgacataatgaaaaccaatttgagattacaagagaaagatgagtcaaagtgcctggtcttccaacagactgctgcttgtacagtaatgttaacagcttcactatcttgtatatattacctgttttatctagttacattttaggttattttcaaacagttttctaaatgtaatacaagttgtaactctaagaactgagagctgcactccatttatgtcttaaagagaccaaataattccacatatcttgcccctatatatcattatttactaaacacagtattttttctcttttaaaaaaatatgaagataacctaaactttttagcagatgttattaaatgacacactaggatactttacattgagttcaaatcattttataatttgttattaaaacaaggagacattgtgcaaaggaagaatg

SEQ ID NO: 573939 - DNA, 516 bp, Homo sapiens
aatatatatctcctgaaagaatgcattaaatcttcttaatcctgtgaataactgttttaggtcatagaatagcaagcaccacaccatagaaatgacataatgaaaaccaatttgagattacaagagaaagatgagtcaaagtgcctggtcttccaacagactgctgcttgtacagtaatgttaacagcttcactatcttgtatatattacctgttttatctagttacattttaggttattttcaaacarttttctaaatgtaatacaagttgtaactctaagaactgagagctgcactccatttatgtcttaaagagaccaaataattccacatatcttgcccctatatatcattatttactaaacacagtattttttctcttttaaaaaaatatgaagataacctaaactttttagcagatgttattaaatgacacactaggatactttacattgagttcaaatcattttataatttgttattaaaacaaggagacattgtgcaaaggaagaatg

SEQ ID NO: 573940 - DNA, 607 bp, Homo sapiens
atgtaggcatgcaagtaatgccatttggctacatgcctgtctctatcagtctaatgctcctacttctcaccactctggccaacttctcacatagtttaataggagacagatttattccttccctgtgtctttggccatgctctttctcctgttgaaatatttcccactcctttcttcctaactcattctttaaggtccacctttttctgaaagctccarccaacataattacacgaatccctatgaatgccttccacaattaaaaacaataataattataggccctatcaccatttattaaaatctctttatgcaaaagacactacactaagcatttatacattaaattatatttatatattatgtaattctcattaaaattctatgacgtatgagtaatttgacattcaagagtttaactaactttccccttgtcattggatcagaggcaacagagctgggatttgcaaccacaagtgtcagactctaaaaccatctttctttaaaaatacaaatattgtgttcagctatttcttttatatgtaacacaaagctataagttccctgagggtaaagatttttaagatcttcagcaaaaaccctactg

SEQ ID NO: 573941 - DNA, 607 bp, Homo sapiens
atgtaggcatgcaagtaatgccatttggctacatgcctgtctctatcagtctaatgctcctacttctcaccactctggccaacttctcacatagtttaataggagacagatttattccttccctgtgtctttggccatgctctttctcctgttgaaatatttcccactcctttcttcctaactcattctttaaggtccacctttttctgaaagctccagccaacataattacacgaatccctatgaatgccttccacaattaaaaacaataataattatargccctatcaccatttattaaaatctctttatgcaaaagacactacactaagcatttatacattaaattatatttatatattatgtaattctcattaaaattctatgacgtatgagtaatttgacattcaagagtttaactaactttccccttgtcattggatcagaggcaacagagctgggatttgcaaccacaagtgtcagactctaaaaccatctttctttaaaaatacaaatattgtgttcagctatttcttttatatgtaacacaaagctataagttccctgagggtaaagatttttaagatcttcagcaaaaaccctactg

SEQ ID NO: 573942 - DNA, 575 bp, Homo sapiens
ggttttcactttttgacctgctcttgacctgggtaattcttgcagaccagtgagtttaacaaggcctgggatctattaaaagaatggtagcctgccttttactgagtagcacacygatggtttaaagtaaatgttatggtttgtcacaggaaccaatttggttaccgtttgttcttcctgcctctgcctgccgatatttttgcaagtgttttccattctttaaattctataaagaaatctgcatgctgttattttaaacttcagcatctctttttttagcaattcatattttaaaagtgggcagtgcactcagagtttcctttgtgtcctccttggtagaacttgaactcatggtgctttacatgaagcatggttatcttttgagcactacagagttattgtcctctcagatttgatgactagattttgaaatactgttaatacaggcattggcctgtgtttgaaagaaaaagcagtaagagataggcattcattacaaagtaaaaaaaaaataacgtttcaatgtttccatttatatatcatatcgttaatggactacatgggggtaggagggt

SEQ ID NO: 573943 - DNA, 541 bp, Homo sapiens
acaactgttacggtctgaatgttgatatccccccaaaatgcatatgttgaaatcttaaccccaaatttgatggcatttggaggtacagccttcaagaggtgagtaggccatgagcatggagccccagtgaatgtgattggtgcctttataagaataaacatgagagattatttatctctctcaggcatgtgacaatgcaatgagaagttggcagtctgcagctcagaagagggtcctcaccagaacctgaccatgctggcaccttgattcccagcctctagaacttcaagctgggcaactaccatctccagaagtgtaagaatcaaatttctgttgtgtataagccatgcagtctatgatacttcatgatagtagccagaactgactataatacagggtcatatacatattttatgcttcaaagtaatcatctgtaaaataaaaagtttgaaarcaaggatcactaagatctgtttaaaggagaaaaattctgaatctatatagaacaaaaacatcttatcaaagtgtttcagagaaagct

SEQ ID NO: 573944 - DNA, 585 bp, Homo sapiens
ctatatagaacaaaaacatcttatcaaagtgtttcagagaaagctgtgcttcagcacgaatgctatggaaaaacttacataaccaaatgacccgaattcaaatagatcagagtacgaacttttcaatgtccccatatggcatcatgtcatatctttaatcaaacagaaacaaaatcacaaattctacctggtacccattagaatcactagaagaggccaacatgcccataaacccttgtttttactctctcctccccaaaccacacatgtgtatacccatgcatgggtgtggggatgcgcgcacacacattcacaatcttgccttctctcttgttcaacaagtaaaaagaagatatgtctatgggtctcattttctgacatttgatagaaaaacacaagtatctaatcttgtccactgacctaatctagaagattagaagattccaagggatgaattctaagaatmactcatacttcctcaactactgcatttaatgacttcttgagaatacaagaattctgccaaacaattttctctaatctgctccagtcttcactgtcattcttataaatagctgtggacca

SEQ ID NO: 573945 - DNA, 630 bp, Homo sapiens
aaggatgtctaaccacattatttcactaatgtgaacattattatcattctcaataacattttatttccaagccatgatgggcaacaattaaaatagaacacaactgagatgtggcatattaattagatgtgaggatccctgcaaaaatacacatttctgtattcatcatacttgcccttattttagcttagaaaaagttctgcattgtcacattgctataacaattgcatatggaaattaggcatttgttaaaatcatacaagagaccaaaggtaaaaacattcaaaagctatttttgcctgatgttaaatcctcttacattttcatgtgatgttgcaaatacacatatacacaagagtggagccaagaaataggaaaagtttgtaaatatttatacacagataatatacaccatgttcatatacatactacttctaatctcctttgtctaatgatttattttatactctctcaatagacacaatttttcaactgttctatttttcttttgaaatagcagattgtttacgctagtgcttcaaagatatttatgtaattagggttctatttctaygttggcttttaaatccaagttcctcttgttttggaatgtcatgtgcccacaaataa

SEQ ID NO: 573946 - DNA, 540 bp, Homo sapiens
tcaccattaagtccctgtgtgattaaacaagaaactgaatgaatctggcttatgaagggttactgtgacacagttagctgtgttgtagcacttggctagtacttatgacataaatttaaatggaagacgaggtttttctttaaaaatacatatttccttgagcctaaaactataaaactaaaattatctggtttctccatatattaagatcattttaaaactcaattttttaacacaagcctaaacttgataytctttacaacacaatgaaattcatagcacttagcttctcataatttaaaaggataccagttaacatccaaaacatattattacaagaatatcttttcctggtttgttttttcaaggaagaagaagaaaagtttgacattttaaatttaacattacaagaagtttagtggcattcaaccaggttaaattaaccaaaggtatgtctgtatgtgtttgtgtgtgtgtgttgtgtgtgtatatatatacacattgctttctctcctttccaagcagttttgctctcaatgt

SEQ ID NO: 573947 - DNA, 470 bp, Homo sapiens
gtccatttaaacggaaaagtcatgtcttctttaaatatatatatatatatatataaatttccttcttcagtcacgtaatgatagttcatctttatyttggtggatatccattgattttgacattctctgcttttttatgttttagagtctgtgtttggtgctaggttaaatattattcttttcttgcatttctccatgaatatctacttgagttttgaatttgaacatatccagttttttaaaaaaattaaaagaggaatattttggaggagaaggcaactgcttttcatctcagtaaattcagaaaacaacactaacgtgttttgtaaatactgacttaaaaataggaatgaaggaataaatttgagagatttctaaagactctattaaaacatttgttaacacaagccttgtttacttcacacaattaatgtataatttaatatctatttttaaaaggtaaaattatt

SEQ ID NO: 573948 - DNA, 581 bp, Homo sapiens
gtcaagcaacttgcccagggctaaacagctggaaagggtaaagtcagaatttgaactcaagtagcaaggctctagaggtgttgtccttttatccaataygttactgtgtctttcacatgatctagactattagatgctatgtccttgctctcccactggcccccatgtggattgccattcatcaacatcacccttatggaaattactcttacaaaagtgacccaagttttttttttttaattgactttcttctccgtgtcaatggtttaaatcttcctgacccaccttccctaacagtgtaacattttcctgtacttttcccttttcacatggcgttatatgcttttttctttaacattaatctttaataacttttacgtttcataccataccatcagttttctgaactacatggtaagtttaagaataagggtagtgttcctgcccccatataaccagtatgctcagactggtaccctcttcagcttcttcttcagtctgctgagcactgccaaggaagaccagcctcagcaaaggcacctcaactccgtgactggagtggtagtgggagaggtggaggt

SEQ ID NO: 573949 - DNA, 581 bp, Homo sapiens
gtcaagcaacttgcccagggctaaacagctggaaagggtaaagtcagaatttgaactcaagtagcaaggctctagaggtgttgtccttttatccaatatgttactgtgtctttcacatgatctagactattagatgctatgtccttgctctcccactggcccccaygtggattgccattcatcaacatcacccttatggaaattactcttacaaaagtgacccaagttttttttttttaattgactttcttctccgtgtcaatggtttaaatcttcctgacccaccttccctaacagtgtaacattttcctgtacttttcccttttcacatggcgttatatgcttttttctttaacattaatctttaataacttttacgtttcataccataccatcagttttctgaactacatggtaagtttaagaataagggtagtgttcctgcccccatataaccagtatgctcagactggtaccctcttcagcttcttcttcagtctgctgagcactgccaaggaagaccagcctcagcaaaggcacctcaactccgtgactggagtggtagtgggagaggtggaggt

SEQ ID NO: 573950 - DNA, 544 bp, Homo sapiens
ggccattatattgatctctgttaaattttttttttttttcatttcattgaggagagtttgaattttgattgttaaacaaatgaagcaataaatccaccatttattgactcccttcyacatgctagatgctggtgttagaaatcacaaaatctaatggaagttttatatcataaacatttgataaggttattaaagagttataataaaatatgtgacaagtaggacacttgtatattctgtagcccagagaaagtctgtgaatttttaaaaataagttaaattatgattcttgaattgagtactaatatatgaataggagtttctcaggataagtgggtaagactactataaacaggtgctcaaatattaaaaatgtacaaatgtgaaagagtcaaataaaagaaacactgaaaagtattcattggagttagcaagttcattggcaactttaagagcagtttcattggagtcatgactgcaacaatcaggtttcacagttaagatctggacactaagtaaggaaaatagctttgaaaaagcttgg

SEQ ID NO: 573951 - DNA, 544 bp, Homo sapiens
ggccattatattgatctctgttaaattttttttttttttcatttcattgaggagagtttgaattttgattgttaaacaaatgaagcaataaatccaccatttattgactcccttccacatgctagatgctggtgttagaaatcacaaaatctaatggaagttttatatcataaacatttgataaggttattaaagagttataataaaatatgtgacaagtaggacacttgtatattctgtagcccagagaaagtctgtgaatttttaaaaataagttaaattatgattcttgaattgagtactaatatatgaataggagtttctcaggataagtgggtaagactactataaacaggtgctcaaatattaaaaatgtacaaatgtgaaagagtcaaataaaagaaacactgaaaagtattcattggagttagcaagttcattggcaactttaagagcagtttcattggagtcatgactgcaacaatcaggtttcacagttaagatctgracactaagtaaggaaaatagctttgaaaaagcttgg

SEQ ID NO: 573952 - DNA, 550 bp, Homo sapiens
aatgaagaaaaaaaataatgtaagagtaaaatacagaaagaattacaatgataacttggagaaatatgattactataaacaagtaaaagtgatttttaacatgactaatcttgatgattatgcaaaaatcttgtgttaggttcaatctgtccgtttaattagtttaatacaaaacctaataaaagtaaaatataaatattttgcacaaaaattcccctatagatgagaaatttggaacttgctartatcttgatgactttattttttaatttctacaacatagctagtatttcactaggtcagtttctattaaaacacaacttaataagcacaggcataaaaaaagatgaatttgcacacagatgctttatatgtgcaatgacacatctccataatgtatttcaatcacttttctgtctgcctatttggatgacagaacaagaaaatgaatcttgatcacctagatgaaaattgaagcatagcatattattgatatcttcattaaatacaacccctccccccaaaacacgatgctttcagaaatgtgttt

SEQ ID NO: 573953 - DNA, 641 bp, Homo sapiens
tcctaaacaaggccatttatttattaaatatttttgaagctctgtgttctaggtactgggattcagtagcaaacaaaactgataaaaaatccttgccctcattgagattgcattctactgggagatatcaacaataaacaagagacaagtaaaaatatgtgtcctaggttattttcttcagggaggagactgacatttactaagaagcactctcagagcccattcctatgaagtgctgagggagaagtaaattaagcaggagtggcaaagggagaagatgggctgtgatgagtctccacaggagccttagcaggtcccatggggagctctgaagctgaagcggctcttcagagtggctctccattgaagcaaaatggccaggcttttattcttccacatcaacagccagtagatgtgtgctgcctccagaaaggggaagtgaagatgggcaaggcaacagtcttccatcaaggctaagagtttcatggctaacaggactcagtgggacattcagctaagaagtaccacmaacactccaagtagctggaggaatgtgtacttcagttctgaaggggagaaatttgtgtggcacatcacagcatctaccacatacacattaagtagcaataaatgaaataaca

SEQ ID NO: 573954 - DNA, 520 bp, Homo sapiens
atgactgcaatgaagtgctcgtaagtgagaatgtagaaaatactgccaaggtgaattgactcacacctgtaaacccagcacttttggagtttaagcaggaggattgcttgagcccaggagttcaagaccagcctgggcaacatagggagacccccatctgtactaaaaataaaaataaaaaattagccgggcatggtagtgcgcacctgtagtcccagctacttgggaagctgagctgagagaatcattcgagcccaggaggccaaggctacagtgagccatgatccagccactgcactccagcctgggcgacagagggagaccctgtctcaataaaaataaaaaacaaaaaaagaaaaaattaacagtattcagaggatgaagttatttcagaagtaattayaaatcccaagctattatttctgcttccctatagaataaacttagaaatagccattgctggtcttaacatttttatttccagatttatcaacagagacaatgtcactttcagaaaaaa

SEQ ID NO: 573955 - DNA, 600 bp, Homo sapiens
atgatctctcatgactttagcaagattttagatttagcccagcatgatagagtcatcaatgaactggaaacacagtatgggtcacacayactattgagggctgcacagctattgagtggttatcactggctcagtgtcaaccgggtgggaaatgaatagaaaatcccaaatgtaaatttgtttaacatttgccatcagtgacctagagaaatgaagagcttatttaagtttgcagctggataaaataaatgtcctttctggcactaaaattctcaaaaatgaagagaagagatacaatagagtcagaattctgcatattattaactaagaaaatgtgttcacagaaataatcaagatcaatatcacatagaacagtacagtctttttgagaaatgtgataagaatatacagagtgagaaattactagctgttgtttgaccttttgatttctgcctctgtaacccaaatttacaaagggtgtgtgcatacacacacacacacacacatacacacacaagatataccaaaaacaagtgtaattcacatgaaagaaattgtggtgggtatctagcattttatatagaaacttcattttccttt

SEQ ID NO: 573956 - DNA, 600 bp, Homo sapiens
atgatctctcatgactttagcaagattttagatttagcccagcatgatagagtcatcaatgaactggaaacacagtatgggtcacacatactattgagggctgcacagctattgagtggttatcactggctcagtgtcaaccgggtgggaaatgaatagaaaatcccaaatgtaaatttgtttaacatttgccatcagtgacctagagaaatgaagagcttatttaagtttgcagctggataaaataaatgtcctttctggcactaaaattctcaaaaatgaagagaagagatacaatagagtcagaattctgcatattattaactaagaaaatgtgttcacagaaataatcaagatcaatatcacatagaacagtacagtctttttgagaaatgtgataagaatatacagagtgagaaattactagctgttgtttgaccttttgatttctgcctctgtaacccaaatttacaaagggtgygtgcatacacacacacacacacacatacacacacaagatataccaaaaacaagtgtaattcacatgaaagaaattgtggtgggtatctagcattttatatagaaacttcattttccttt

SEQ ID NO: 573957 - DNA, 548 bp, Homo sapiens
ggctgggaacgggtatgaaggttggggagagggggatgaagacaggttcttaaatggatgtaaacagacagaagtactaatacgttcyaatgttctaaagcagagtagggtgactatagttagtaataatatactgtatattttaaggtagctagaaaagaggacttgaatattactaagacataaaagtaagaactcaaggtaagttacaccccagacaccctgacttgattgttacatattctatgcaggtaacaaatactcacatgtagctcatacatatgcaaaatactatgtattaattttaaaaaattaaaaaataaaaagatgtaaagcagtaaataattaggatgagattatcgaggaattaagcacacaacaacgtgttaaaaagttgtttaatgctatgtgtacaatttccaagcagacaattctgcatgctttattcagcctcattctaagaaagatttttttaaataatgcaaaatgttagaatatgacaaaccatgaaatagaatagatgctagaggcaacgaatcacataaaac

SEQ ID NO: 573958 - DNA, 548 bp, Homo sapiens
ggctgggaacgggtatgaaggttggggagagggggatgaagacaggttcttaaatggatgtaaacagacagaagtactaatacgttccaatgttctaaagcagagtagggtgactatagttagtaataatataytgtatattttaaggtagctagaaaagaggacttgaatattactaagacataaaagtaagaactcaaggtaagttacaccccagacaccctgacttgattgttacatattctatgcaggtaacaaatactcacatgtagctcatacatatgcaaaatactatgtattaattttaaaaaattaaaaaataaaaagatgtaaagcagtaaataattaggatgagattatcgaggaattaagcacacaacaacgtgttaaaaagttgtttaatgctatgtgtacaatttccaagcagacaattctgcatgctttattcagcctcattctaagaaagatttttttaaataatgcaaaatgttagaatatgacaaaccatgaaatagaatagatgctagaggcaacgaatcacataaaac

SEQ ID NO: 573959 - DNA, 557 bp, Homo sapiens
tagaccttttccctaattttaaggagttatggattccaacaatttacaaagccagggcaggcaaaggaaaacagatgtctcactttcaagaattagatcctagtacaaatacagagtctgtgctttatgaactgcaaagcattacaaaaaccagtattatttctctatcatcatctcacagcagcagataagaatcttaggcaagcaaagggctagcactagcgaaytgggggactagccctggggttgaaaagccagaggcagacccccagacgtccatatgctaggtgtggccaactccaaggattcccaaatgaagtgaaactctccacacttccagtttggtgcaatcaagtccccatttcttccttcagcaaacatttattgggcacctcctctgttctgggccctgttacaaggcactgcagatactacagtaaacaaaacagacttatctctctactattataaagcttacactcataattttatataacaagaaagcattatgacattttcctgtaagccagtttatttacttacagcccaaaacaggc

SEQ ID NO: 573960 - DNA, 557 bp, Homo sapiens
tagaccttttccctaattttaaggagttatggattccaacaatttacaaagccagggcaggcaaaggaaaacagatgtctcactttcaagaattagatcctagtacaaatacagagtctgtgctttatgaactgcaaagcattacaaaaaccagtattatttctctatcatcatctcacagcagcagataagaatcttaggcaagcaaagggctagcactagcgaactgggggactagccctggggttgaaaagccagaggcagacccccagacgtccatrtgctaggtgtggccaactccaaggattcccaaatgaagtgaaactctccacacttccagtttggtgcaatcaagtccccatttcttccttcagcaaacatttattgggcacctcctctgttctgggccctgttacaaggcactgcagatactacagtaaacaaaacagacttatctctctactattataaagcttacactcataattttatataacaagaaagcattatgacattttcctgtaagccagtttatttacttacagcccaaaacaggc

SEQ ID NO: 573961 - DNA, 433 bp, Homo sapiens
atcctactttaaaacattataacatgttgatttcaaaataacaattctaaaactgcctaactcaatgattttttttaaccttgagatttgcttgtaaatctcagataaatctcagggtaaatttcagatactatttgaaagtcaaaaataataatagagattcttaaatagactaatgttaataagtatattacaagtatacctttagaaataaagatataaataacactaagagaaaacgtgaaactagaaaaatttatattttggggttttgtgcatttaatctgtcaaaactatcatgtgtagcaacarttcatgtttcttctacatttttatttattccttatgtttattactgactgcttgtactattatgatcagatttgtatcaagtttaccagaaatatgaaaaggtatgttattatgcatataa

SEQ ID NO: 573962 - DNA, 433 bp, Homo sapiens
atcctactttaaaacattataacatgttgatttcaaaataacaattctaaaactgcctaactcaatgattttttttaaccttgagatttgcttgtaaatctcagataaatctcagggtaaatttcagatactatttgaaagtcaaaaataataatagagattcttaaatagactaatgttaataagtatattacaagtatacctttagaaataaagatataaataacactaagagaaaacgtgaaactagaaaaatttatattttggggttttgtgcatttaatctgtcaaaactatcatgtgtagcaacagttcatgtttcttctacatttttatttattycttatgtttattactgactgcttgtactattatgatcagatttgtatcaagtttaccagaaatatgaaaaggtatgttattatgcatataa

SEQ ID NO: 573963 - DNA, 319 bp, Homo sapiens
ctttattgtgacaggaaatgttgataaattaccasttatgagaaaaaaaaaatctatgaggaaaagtataaaactaaaataccagatcagaaaagagtgatatttaaaggttatagtttccaaatttagcaaataaaaatataggatccccagttaaatctgaagttcagataaaaatgaataaattttagcatacatgtatcccatgcaacatttgggatgtacttacaacaaaaaaattagctattgcttatccaaaagttaaatataactcagtgtcttgtattttatctggcaagcctaataaaagtgaattttt

SEQ ID NO: 573964 - DNA, 319 bp, Homo sapiens
ctttattgtgacaggaaatgttgataaattaccagttatgagaaaaaaaaaatctatgaggaaaagtataaaactaaaataccagatcagaaaagagtgatatttaaaggttayagtttccaaatttagcaaataaaaatataggatccccagttaaatctgaagttcagataaaaatgaataaattttagcatacatgtatcccatgcaacatttgggatgtacttacaacaaaaaaattagctattgcttatccaaaagttaaatataactcagtgtcttgtattttatctggcaagcctaataaaagtgaattttt

SEQ ID NO: 573965 - DNA, 584 bp, Homo sapiens
tctgtacattcattatcttctttaaccctcacaacagccttctgaggtgagtgctattattatcaccattttacagatgaggaaactgaggtaggaaatgtcaaattacttgatcaaggtttgaatgggagtcagtgggaaggctgacctgaaactcaaagctttctgactttgtcagtctgcttttcctcccagttaggacagaagcagttgtatttgccccatccttcttgagagaaccctttacccygcctgcaccactctcattctcttaaaaatatgaaatattaaatataaggattgccacatcccatgcaaccccagtcaggtgcctcacaactctacaacctgaggccatatgaaggcaacccaggtatttctgggcacagagagaagtgaaccaaaggactgcccatttggtttactgtccataaaattactgagtaaaatgttaaacattttcttctcttcaaaataatgatcaactcgatctttcagaaaaaattttcaaagctttgaaaaggttttttttgaactcttcacttatttttatttataatggcatataataactgtacatattt

SEQ ID NO: 573966 - DNA, 584 bp, Homo sapiens
tctgtacattcattatcttctttaaccctcacaacagccttctgaggtgagtgctattattatcaccattttacagatgaggaaactgaggtaggaaatgtcaaattacttgatcaaggtttgaatgggagtcagtgggaaggctgacctgaaactcaaagctttctgactttgtcagtctgcttttcctcccagttaggacagaagcagttgtatttgccccatccttcttgagagaaccctttaccccgcctgcaccactctcattytcttaaaaatatgaaatattaaatataaggattgccacatcccatgcaaccccagtcaggtgcctcacaactctacaacctgaggccatatgaaggcaacccaggtatttctgggcacagagagaagtgaaccaaaggactgcccatttggtttactgtccataaaattactgagtaaaatgttaaacattttcttctcttcaaaataatgatcaactcgatctttcagaaaaaattttcaaagctttgaaaaggttttttttgaactcttcacttatttttatttataatggcatataataactgtacatattt

SEQ ID NO: 573967 - DNA, 655 bp, Homo sapiens
actcatgcgtttttggtgatgttggtgtaaataaacctacagtgctgccagtcatataatattacagcacatacaattatccacaatacataacacttgataatgacgaatatgttactggcttatatatttactatagtaaacttttattgctattttagggtatactgcctcaacttataaaaaaaaagttaactataaaacagcctcaggcaggtccttcaggaggtatccagaagaaggcattgttatagcagattacagctccatttgtgttactatttccagttttccactcttaatagagcttctactgggacaagaggtggagatggaaggcagtgatactgatgatcctgaccctgtgtaggcctaggctatgtgtatgtttctgtcttagtttttaacaagaaagttkaaaaagtaaaatatatatatatatatatgatctttgaaatagaaaaaagcttatagaataagaatataaagaaagaaaacatttttgtacagcgatacaatgtgtttatattttaaactaaatgttattacagaaagagtcaaaaagtaaaaaaatacaagtttataaagtaaaaaagccatggtaagctaaagttaatttattatttaagaaagaagatttttttttaatttagtg

SEQ ID NO: 573968 - DNA, 585 bp, Homo sapiens
cccattttatataccttaaactttccttctcacatctcattattctaagctaatctaaagaaatgtcttattttctttaatttcaaagcagatatttcagcaatactcttttcctcgccacacctttttgggccactaagaagaaaactaacttgtgccccctttgagtcctttcattgaaggaaactttgggaggcaaatagagccataacatctgcctatgggctttcgactgaagtactgggtactaaatctcatctcccacatgggaagtcagttcctgacttggggtcaggaaagaatgagagggaatcccctcagcggctccataaattatctacctatatgcacacacagcattcaaggagtcaagagtgccacacattcagaatatgaaaataacagcaacaacaacatttgatctgaatttattttttaaacaagaaagaaaartatttgatctgaatattaaaaaggaattaaaggccgggtgctgtggctcacacctgtaatcccaacactttgggaggctgaggtgggtgaatcgcttgagcccaggagttggagatcgggctggacaacaaa

SEQ ID NO: 573969 - DNA, 570 bp, Homo sapiens
gatgcaatgccaccgatatatgtctaggagtatgaggctgctgaaaaatactagacaagccaagaatgagttccatattcagattgtatgtttaaatctaggaaaactcttcaaaagacagggtctaggatattattatataatataaatgcttakgtattccaataataaaaactttttatgaaaagggaactcttctaaaggaaagccaagacaaggtaaggagaacaaaaaggttaaattgttacatgttagcatcagatggaaatgaggcacaaaggtgtaggtctttgaagtacagggtaaggatcttgggtttgctccaaaaataataagaaattatatgataagtaggtcatggcatagtaacatggagcagcagaatagttaacaccagcagtcagattaaatagggtgctagcaaatagaacagaatcctgacaaattaatgatactaattgtttactagatttcccatcttccttttactgagatgactgacacaagaactggggccatacattgggttagaagaagagttagaaaagacagaacttatctgtcaagatg

SEQ ID NO: 573970 - DNA, 507 bp, Homo sapiens
tggaatcagctggacagcttgttaaaagattgctagcccccactcccaaagtttctggtttagttaatctggggtggggcctaggaatttacatcactaagagctcccaggtgatgcttatgagtctggtccagggaccaggcttggagaaccactgatcagataaaaaggagttgaacattttaaaaacatcctaaatggtccacttaagaaactacattggcacactatgtttataaatcagaatataaaacaagtgaaatgatattgccaagaaaaataacctgaatccaactcaactttcaatttttcaaagtgcataggacacaagaacatgtttaaaaacacaacarggatataatcagcaaagttcagactgtaggtaaccctgtaggaaaaatatgtcgtttcttgaacaaagaaactacagggggaaaaaagagaaagagaaagaagggaaagtctattgattaaaagagtcttatggacatattaaccagttgtgat

SEQ ID NO: 573971 - DNA, 551 bp, Homo sapiens
ctattctgtctacatgtttatgattgaatttttcataacaaaaaatgtaaagaggctgggtgcagtggctcatgtctgtaatcccagcactttgggaggacaaggcaagcggatcacttggggacagtagttcaagaccagcctggccaacacagtgaaaccccatctcaaaattagctgggtgtggtggcactggcctgtaatcccagctatttcggaggctgaggcacaagaaactmgaacccaggaagaggaggttgcagtgagccaagatcacaccactgtactacagactgggtgacagagagagactctgtcaaaaaaaaaaaaaaaaagtgtatcgtgtatagagatgatttttctggaaagctgctttgaatttttagatttttttccatattcactttatggcaccaaattttccagagttcagcgtgcttctcagcttcaccaaacaaagggatgatagctagagagacaatatagcatataacaggttcctaataaaacatgttaagagaaaataaataccaactgatatgttctggctg

SEQ ID NO: 573972 - DNA, 615 bp, Homo sapiens
gttttttggatggagtctccctctgtygcccgagctagagtgcagtggtgccacctcggctcactgcaacgtccaccttccgaattcaagtgattctcctgcctaagcctccccagtagctgggattacaggtgcccactgccatgcccagctaatttttgtacttttagtagagacggggtttcaccacgttggccaggctggtctcgctctcctgacctcaagtgattcacctgtctcagcctcccaccaatgttcagttcttatcctttctctttctcagttcttgtccttcttcttgtaagttttttgaacatgccagtgaaaaagcagttcagccatttggtgaaagaaatttccatttaccaacataggaagagttcatattcacagactccaaacatagatagagtcagccctcctcattcacggtttctgcaatcctggattcaaaagatgtaaatcaaaaatatttcttataaagcatctctactaaacatgtacagacttttttctttatgttatttcttaaacaataaagcataacaatttaggtattacaagtaatctagagattatttaaagtatgcaggagtatatgcattggttatatgt

SEQ ID NO: 573973 - DNA, 615 bp, Homo sapiens
gttttttggatggagtctccctctgtcgcccgagctagagtgcagtggtgccacctyggctcactgcaacgtccaccttccgaattcaagtgattctcctgcctaagcctccccagtagctgggattacaggtgcccactgccatgcccagctaatttttgtacttttagtagagacggggtttcaccacgttggccaggctggtctcgctctcctgacctcaagtgattcacctgtctcagcctcccaccaatgttcagttcttatcctttctctttctcagttcttgtccttcttcttgtaagttttttgaacatgccagtgaaaaagcagttcagccatttggtgaaagaaatttccatttaccaacataggaagagttcatattcacagactccaaacatagatagagtcagccctcctcattcacggtttctgcaatcctggattcaaaagatgtaaatcaaaaatatttcttataaagcatctctactaaacatgtacagacttttttctttatgttatttcttaaacaataaagcataacaatttaggtattacaagtaatctagagattatttaaagtatgcaggagtatatgcattggttatatgt

SEQ ID NO: 573974 - DNA, 615 bp, Homo sapiens
gttttttggatggagtctccctctgtcgcccgagctagagtgcagtggtgccacctcggctcactgcaaygtccaccttccgaattcaagtgattctcctgcctaagcctccccagtagctgggattacaggtgcccactgccatgcccagctaatttttgtacttttagtagagacggggtttcaccacgttggccaggctggtctcgctctcctgacctcaagtgattcacctgtctcagcctcccaccaatgttcagttcttatcctttctctttctcagttcttgtccttcttcttgtaagttttttgaacatgccagtgaaaaagcagttcagccatttggtgaaagaaatttccatttaccaacataggaagagttcatattcacagactccaaacatagatagagtcagccctcctcattcacggtttctgcaatcctggattcaaaagatgtaaatcaaaaatatttcttataaagcatctctactaaacatgtacagacttttttctttatgttatttcttaaacaataaagcataacaatttaggtattacaagtaatctagagattatttaaagtatgcaggagtatatgcattggttatatgt

SEQ ID NO: 573975 - DNA, 597 bp, Homo sapiens
tccctgtgagggtcgtgacccaggtgtgggccatgcagccaacccgaggtccaaggggcgtcctggggagcataggttgatttgtgacagcttggagagatagagctaaatttaggtgaccttgaaatagaagtgtcaggttaccagggactaggtgttttcacgtcaggcagtgaactgatcgtttcagacactcaggagagagaatcccacacgggatcgaaagacgccagagaactgccaggccygtgggccttaagtcccagccatagggaagggctgcactgagcacgtccgaaggggcatagaaacggatgggcgagaagaaagcgcagggccgaggggagaggcaggaagggaaagtaggggtgcgccaagttccgggaggacaagcgttactatggcaaccctactgaatagactgaatagaggcgaccacttgctggtctgcgggaaatcgagctttcaaaacaagtcctgaagcaggaatgctggggaacgagatgtcacaattaccaggtgagaccagcggccctgctcaagctgtctctgacaggcaggaaaggtttggaaagcagccaagctcccccgaccgca

SEQ ID NO: 573976 - DNA, 560 bp, Homo sapiens
gaaagtcctgcatctcttcaatgatgcactttctctaggtattaagggtcaaaaacacacagcatttattatgcattcaatcatgtagctaaacaaaaaactgaagtctcctaaagccatttaaaccagccgttccaaagcctcctgccaccactttgttagtaccatcaamaacgttttcaactataaatgaaagaataaatggtattgctgctctccagatattaggcactgctccatatctttgaacatttgattttttaataactgtgtcaaaagcctcaaaaaaccctgaaattaattttccagctttactgtcatcagccagaagtaaaattcttaatttgcctgttagctgattctgttacattttaaatttattttttaaaaaatgattggacttctatcattataaagtatataaaattttcaaaaattaaggaactgttgccggaagtcagggaccccagatggagggaccggctgaaaccatgcagaagaacataaattgtgaagatttcatggacatttattagttccccaaattaatacttttataa

SEQ ID NO: 573977 - DNA, 560 bp, Homo sapiens
gaaagtcctgcatctcttcaatgatgcactttctctaggtattaagggtcaaaaacacacagcatttattatgcattcaatcatgtagctaaacaaaaaactgaagtctcctaaagccatttaaaccagccgttccaaagcctcctgccaccactttgttagtaccatcaacaacgttttcaactataaatgaaagaataaatggtattgctgctctccagatattaggcactgctccatatctttgaacatttgattttttaataactgtgtcaaaagcctcaaaaaaccctgaaattaattttccagctttactgtcatcagccagaagtaaaattcttaatttgcctgttagctgattctgttacattttaaatttattttttaaaaaatgattggacttctatcrttataaagtatataaaattttcaaaaattaaggaactgttgccggaagtcagggaccccagatggagggaccggctgaaaccatgcagaagaacataaattgtgaagatttcatggacatttattagttccccaaattaatacttttataa

SEQ ID NO: 573978 - DNA, 220 bp, Homo sapiens
caggtcttatttttctttttaacctgtatttctctgcatatttgtctttatcgttattttgtttctctttatttactttcttttttctattaatttytttttttaattttcattacatttccttcatttcaaattttctagatttatcttgcttgtaacattttaaaatttcttttagtttcttttatttccattcatatcccttcatattattttttct

SEQ ID NO: 573979 - DNA, 671 bp, Homo sapiens
tgtctatggtgagcaacaggcaaacagacaaaccaaaaaaagaaaaagagaatttgcacaaaataattctaagccagaagcaataacattttagataaatgaatttcatacaaagcagagaaaatagatttgctttcaaaatctttgaaatttctggtttgctggtaagatatcaacacttgtaaaattatctgtttcattctaatatttttcttttcaaaataggtatacaaacataaacaaatgattactttctctataaatctgttacaactaaagtttattttacatyacacgtctgtatatttaaatctatatatatcaaaactaaaggtctctatgtttaacagaccagatacgtcacatgttcaacagaaaaaagaatattttgtaactagttgttcagaattcagaaacatatagctccattatactcatataatcttcattacaaccatcataataacctgtagttacaagaaaaacaaaaatgttaatttgtaggaatcatattctccaaattatgttaagttaaagaccactgacaaagaaatcactagagatgttattccacagtcacacaatagtatattgttaccatctgttgacctacaaccttgggtaagatgagataattaacatcagtcggcaagacacacattaggtgtaaa

SEQ ID NO: 573980 - DNA, 407 bp, Homo sapiens
taattttctagaatctttcataatattctctcctctctactgaacatagtactaggttggtaattggagaatcccagcaagtcatgttactttttctaacaaaaccggtcttgctgtctctaaccctcatcwgatctgctgccttaagcaaataaaagagccctggaatgtgaggagacgtgagacagtagtcaaatactaagataggtaagcatgaatgaagcagataacacagaccagaggtacaaaggtcaaaaagaatgccagacctttaaatgtgatatgggacactgcttcaatggaaatgtttcctaaaaagcctttttccctcttgctctcaaataggagtatcttctgtcccatacccttaaattctctaaggactctacttcccattctgtgatttt

SEQ ID NO: 573981 - DNA, 560 bp, Homo sapiens
gaatgaagcaaatgacacaaawgacggatcccaatgtcaaggaggaagccagacctttaaacgtgcttccagaagctctgctccagtggaaatcatttctgggaagccttcatttctttctcttgctttaacatagggacattttttgtcccattcttgtgaattttccaagcactgtacttcaccttcagtaatgtattttgttgttgttcttgctggttttttttctttaagtttacagtgataatgaaagttgttttcatggcttaaaagaaaatgtgtgatttgactgcttttccattgcttgggagaaacagcaatatctgtatttttgagaaactctatattaaaccattttttaagttctcttttcggataatgtctaaatatataagttttggtgatgttgcagtttggatcagaaatcccaggaacaccacaaaaagatgtgtgcttcctgctttataattttctattctatggaggcttcaaatgtgattttatgggaatttatactcagtaattatatcaaaacactaagcatctccctaaatgaaaca

SEQ ID NO: 573982 - DNA, 336 bp, Homo sapiens
gacctactctcgtgaatgaattaatgtcattatttccagagtgggttagtcggcaggaaagtgggtctattataaaagtacgctctctggtgtgcaccttcagtcatcctcatgcctttggccattttgtgatgtggaaatacgattctcatcagatgtcaatgggatgctcttggacatccataatctaaaattgtgagctaagtaaactcctattttttagaaaataccaactctaaggccgggcrcggtggctcacacctgtaatcccagcactttgggaggccgaggcgggtggatcacctgatgttaggagtttaagaccagcctggccaa

SEQ ID NO: 573983 - DNA, 548 bp, Homo sapiens
tatcactcaataataaaatatgttaattatcattgttcagaacaatgtaattctttcttttcttttctttttttttttttttttgagatggagtttcgcttttgtggctcaggctggagtgcaatggtgcgatttcagctcaccgcaacctccacctcctgggttcaagcgattctcctgtctcagcctcctgagtagctgggattacaggcatgcgccaccacgcccggctaattttgtatttttagtagagatggggcttctccatgttggtcagcctggtctcaaactcccgacctcaggtaatctgcctgccttggcctctcaaagtgcygggattacaggcatgagccactgcacccggctttatttgataatagaatactttccaagaaagactctaaagcaactgtttaaagtaaaattatctcaagataaatgattttcttcacttatagagaaaagttatttaaatatacattttaaactacctttaaatttaccaagtgaacctaaaaattagttggcaaaaaaaatttattaaccaa

SEQ ID NO: 573984 - DNA, 615 bp, Homo sapiens
ccatcaacccatcatctacattaggtatttctcctaatgctatccctcccctagcccccaccccgcgacaggccccagtgtgtgatgttcccctccctgtgcccatatgttctcattgttcaactcctgctccttctcctataaatcctttccccactcctccacccaaggttattttctcttcatcagcccctaaacttcaagagatcttagcagcctgggagcataagggcactcttcctctcagcagcatccaaatttaccccatcttcatgctccagaatyaagtgagaggggcctatgacttgagcaacagtcaccaataagggaattcttgggcctaggcccagcgaatatcctttctgcaagtttgcccctgtggctgtatcaaccctgagtttccatcttttcgtatcaatctggctgacttctcttcctttgaaactagactcacagtgcatctcctcctggaaggcctccttcccagtggcccttggccgtcagatgctgctcctcagggttcccatgaaaatcaatactcacctcctcctagccacacagacatggaaggacagagctagatacaatgtgatgttgttcttactgggacaagga

SEQ ID NO: 573985 - DNA, 430 bp, Homo sapiens
tctaagtctcagcaacttagtgtacaagagctgtggtttatataagacttttttttttctaagttaaactgtaaatgatttggggcacaatttttgtggcttgataaagcactctatacattttaatgagttaaatctaaatgattcaaatctacaagctggctttcccttgaatacatgcaagtaaaaaacttaaggacttggcaaaatttattttaaattttgccaaatccaacattttgaaatgcaatttaaatgtttaaccaaatcccaaacatcactgcatttattcttttctgactagaagctgcagttttctaacagcccaagtcaaagcatctttytaaactatttgatatcttttaaaggattctcagcctttaaaatagtctctttaggtagcaacttcatgcagcaactttattcttcc

SEQ ID NO: 573986 - DNA, 571 bp, Homo sapiens
agactccgtctcaaataaataaaaaataaataaatagatagatagataaataaaaatactagtactgtgtaacccaaaagtaaaagataattatttattggtgcataaaatagtaagaaccagaaagaacgtaggccagttctcatttgagaatctgatgttactgagattaagtttttctacccacacacttttaaaaaaagtcattaagtatttaataactgcaatagctatctggaggcagaacatgtcacacatcctctatgatggtataaactagaagtagagagtcagaacttcggccagattttactgacaatttggtcaatgtggtagtttttagaatttaacaatgcttttttcaaaagaaaaggaaaaatcaatactctgaataacaaacagttggccctggcatctatttcacatttttcctggaaaatggcaccaattmcccaatgttatgttagggctttgttttaagatttgtagatagaaggaaagagtgccacctgctgaggaagcccagtgcttactccagcacagtggacacagcgtggccgccctgacttaa

SEQ ID NO: 573987 - DNA, 393 bp, Homo sapiens
gtcgtttcttgtccaacagacattctacttaatgattcttctttctttttgaccatcagtacaacacaaatgactagtcagccttttatgaaatgtacacctatgtgcatattacacatctacctgcgataccacaacatctatctcctttttaatactaatcttgcagtcctctaatttctttcagacaatagggtctggccatgtctgctttattttacgattttcttacrgaatgtgctccttgtcttaatttggatgctcaaacactcaatgatacttatcataattatatttacgttactgtttaaaatgtttttaaactacaaagaaatgtaagctaactttaacacttaaaaataatagcagtgttgaaaataaaaattataatct

SEQ ID NO: 573988 - DNA, 527 bp, Homo sapiens
gcacagaggaagggaaacatcacatactggggcctgtcgtggggtggggggaggggggagggatagcattaggagatatacgtaatgtaaatgacgagttaatgggtgcagcacaccaacatggcacatgtatacatatgtaacaaacctgcacattgtgcacatgtaccctagaacttaaagtataataaaaaagaagaaaagaaaaatgtttgcactgtgtcaatatctttccatttttttgtgaatgtcgatatgtactgcaaaggtcagcttttcatcaagtgtgcatctattgtcctgaaatgtttatttcaaagctcaaatgactagctccaattttaatatatgctttaaaataaaaagtgtgagcttcaaacaccataataaaaaatttgttcatgtaaatraatgcatttgttctcctttgtcttaaggtttaagggaataattgcattaccactttcaacttgccattgtctggcttttgaaaatattggtcaagttagttcttcgtacataataga

SEQ ID NO: 573989 - DNA, 579 bp, Homo sapiens
cacacccagctagttttttgtatttttagtaaagatggggtttcaccatactggtcaggctgstcttgaactcctgacctcaagtgatccacccaccttggcctcccaaagtgctaggattataggcatgagccaccatgcccggccagacacaagctcttatcatgcgagtggctgacctgcaatgaaaggtgcacgcacagcctcagcaggtgtctactgttacactgagggcaatgactggaaaagaatgggaccctgcaacttggaatgggaatgtgtgggaggaccctgatgaagcaggagacactgagtttgtaaacactgattaaacttttttgccagaaggaacagcttccccatccccagtagtagcaacatcacctccctgacccatgctgccatcagcctttccaccattgtctgaggagataaaccatgcactgcctgaggcaacagtgatggcctcccctgaggcagttgccaggcaagataacattgattttcctcagaagccacccccaacacctctgtttgcctctaggcctataactaaagcccccgtgggcctctgaaggt

SEQ ID NO: 573990 - DNA, 524 bp, Homo sapiens
cctacttctggaccaccaagaasaacaacaaggccaaattatctcagaaaaattttaagaggaagaactataaaaacaagagtggggaaattgccagaaacaataagttcctcttcaaatatcctggttctttctggttctgtaaaccaccattcccacctaattggtaatgcacagactctcccttcccatctaattgaccctattcgatttcaaacaataaccaatcagttcagtttagattgtgtggtccaactctggtccaatggggaaaggacacagaaacaggagctgtgttagggataaaaacccctgccctaccctgctcagtgtgctcttacgattgccatcagacataggcagcacccttctgcagaagtaaagttgccttgctgagaaattttccatttaagtgttggttcttctttgcagcaccaagtacctgtttctaacagaaagttcctcaaaaaactaaaaatagagctaccatatgatccagcaatgccactgctgggcatatacac

SEQ ID NO: 573991 - DNA, 524 bp, Homo sapiens
cctacttctggaccaccaagaagaacaacaaggccaaattatctcagaaaaattttaagaggaagaactataaaaacaagagtggggaaaytgccagaaacaataagttcctcttcaaatatcctggttctttctggttctgtaaaccaccattcccacctaattggtaatgcacagactctcccttcccatctaattgaccctattcgatttcaaacaataaccaatcagttcagtttagattgtgtggtccaactctggtccaatggggaaaggacacagaaacaggagctgtgttagggataaaaacccctgccctaccctgctcagtgtgctcttacgattgccatcagacataggcagcacccttctgcagaagtaaagttgccttgctgagaaattttccatttaagtgttggttcttctttgcagcaccaagtacctgtttctaacagaaagttcctcaaaaaactaaaaatagagctaccatatgatccagcaatgccactgctgggcatatacac

SEQ ID NO: 573992 - DNA, 524 bp, Homo sapiens
cctacttctggaccaccaagaagaacaacaaggccaaattatctcagaaaaattttaagaggaagaactataaaaacaagagtggggaaattgccagaaacaataagttcctcttcaaatatcctggttctttctggttctgtaaaccaccattcccacctaattggtaatgcacagactctcccttcccatctaattgaccctattcgatttcaaacaataaccaatcagttcagtttagattgtgtggtccaactctggtccaatggggaaaggacacagaaacaggagctgtgttagggataaaaacccctgccctaccctgctcagtgtgctcttacgattgccatcagacataggcagcacccttctgcagaagtaaagttgccttgctgagaaattttccatttaagtgttggttcttctttgcagcaccaagtacctgtttctaacagaargttcctcaaaaaactaaaaatagagctaccatatgatccagcaatgccactgctgggcatatacac

SEQ ID NO: 573993 - DNA, 490 bp, Homo sapiens
tgatggtgaacttaggaagaaaatataaacttgccatgcttttattaataaagaaaactcagactttttaatttaaacattttaaatcatttttactaagaaatgtaaacatatatggaaggtattataagagcagcatgggaagaaaagggaggaaaataaaggcatattaataaagctaatacatgtaaaaacaatctaacttggagtctaaatgaagcttggaagtaaaccaagtcatgtgtaaaatctcaagatarcatatttgttggtgtatttttaaaattaattggaatggaagttttcaattcaaatctcctccccaagattctgagtctttggttgtcttgcccttgacagggcatagttaatgcaatgggctatttactattaatcttttttacagaaatattaaacaccaagagatatcctactgaaacccctatctcaaagatagtgagatgttgacaggagcctattctccaaccca

SEQ ID NO: 573994 - DNA, 567 bp, Homo sapiens
atgaaagaaaattaaaaacctgtatccttttttccctttcagcaaaataaggcagtcacttttcatttaaccatctttgctacatataaaacctaaaaataagaacactttgtgtgtgtgtgtgtgttgtgtgtgtgtgttaaagaccaaacaaacatgacacaatgcctgctattatcttgggaaattagctgtacagcattcacaggctttcttccaagtgctccaaattcatttatttggtttttgaatagaaatttgtctggccgaacaactgtatgaatcagagaggatgttttttcccctcagaaatgacccttgacatccccagtcctgctgtctatctatacatgtctgtttgtctgtgtagccctatagagactggcttcatgagacccargtttttgtaacaaagaaaacaatctagttttacctttggaagctcaccaagaaccataaagaaaccatgtattcaggcaaaatgcagttcgttgggaaagggttttagggaatgttttcagcaaggacagtcttattaataatgcgaatagcaagttagacgtcatg

SEQ ID NO: 573995 - DNA, 584 bp, Homo sapiens
aaaatacaaaactgaatgtctcactaatattttctgtatgccaaaaaacaaattgcttagcctggtatttcacttcatcacagctctcatttctatgatacttataaccctgaaggcagcctgtatttctgttaattcctcaagtatacatacaccggactgttgtgtgactttttgtacctcccatttatctcacctttcccccatttccttggtgaagatcaatgtgttattctttccatataaagattaattactttctctgctatgaagagttcctttattactttctaggcataattaattgttctttctcagtgctctcacaactctttatataagatatatattataattttatatgaatttgctgaatayagttagtcactcttctgttagaagttaagattttgagtgaacaaacataatactttctcatctttgtattttcagaattcttcacaccactggatatattgaatgaaagaatgagtggtgcagagaacccataaatcatgaaatccgagaagttggacacaatgaatacagtgttctatgaagataaatattaataataaaattgt

SEQ ID NO: 573996 - DNA, 461 bp, Homo sapiens
ataaaaaatttaaactaccttattgcaaataagtctaatgtaaagacattcaatgttgaaaaatagatttattagtgagtgattatctttattatagaaaaattatgattcaatatagactactaaaactttctacagattgataatttgtgctaaataaaaattggttctaaatcaagatattgtttcattttcatgctcttaaaaaattcaagataactaaacagtcagaatgcccattctttttctttttttttttaartgatttttctcccctttattaaaaaaagattatacaatttgggctcatagtaaaaaattcaaacagtagaacagtgtgtacatagaaggcattccccactcccactccaggagtttgggtatcattctagaagtgttctgtcaatatataagcatttttcattcaaacacacacacacacacacacacgggatcccata

SEQ ID NO: 573997 - DNA, 461 bp, Homo sapiens
ataaaaaatttaaactaccttattgcaaataagtctaatgtaaagacattcaatgttgaaaaatagatttattagtgagtgattatctttattatagaaaaattatgattcaatatagactactaaaactttctacagattgataatttgtgctaaataaaaattggttctaaatcaagatattgtttcattttcatgctcttaaaaaattcaagataactaaacagtcagaatgcccattctttttctttttttttttaagtgatttttctcccctttattaaaaaaagattatacaatttgggctcatagtaaaaaattcaaacagtagaacagtgtgtacatagaaggcattccccactcccactccaggagtttgggtatcattctagaagtgttctgtcaatayataagcatttttcattcaaacacacacacacacacacacacgggatcccata

SEQ ID NO: 573998 - DNA, 629 bp, Homo sapiens
ctatttaaattcagcagctgggagaatccccttataaggaagacagaaaatacgtttatatccagactgcattactctttggaaaaatatgaccaatcagattttgggtattattgttacaaccttttccttcacctctgcatcatggtgatcaactaaagctcttattttctgggcacattcttctccatgtaacaggaaaaacaatgaaccttcagtgaaagtaggctgcacagctaaatggccttctattttgaggcagttctttatatkctgaaatagcgtaagtactcgaagaagaatctcctttgctacgtggctgtcataaagggaaaggaatgatgaatccaccttcgtgtttccatttccagtaagtaacacctggaacaggtctgtaatgtaactgtgaagcatgtgctggtggtcattggtaacagtcatgtttgtcaacaatctcagtccggccagctgcacagcagagttcagaggaccagagaagacatcctcacatacttgactgatgtatatctttatcttgatttgattttcaacattcacactcaggttatttagtgcatttaaagctttgtctttaatactctggttggaatggttgattttgtttgcaa

SEQ ID NO: 573999 - DNA, 595 bp, Homo sapiens
tcattcgtggtttcctgggaaaatgtcccagtggaggggaatgtcattgcagatgcaatgatcctggcttttggaatatgtgggaaaattatccatacaatgagagtggaatggactgattattgctaatttgtattagtcacctgcagagagataatgaaaaactgagcaccaccaccaagcagtaaatagctaaacatgtcataggtaasctggagactgaagacctaaaagagtcacagaggtctagagatgtctgcatctaaacgagggcagatctgtttttctgagatcaggaccttggttatgaacatgtgggattctgagacattggataacaacatctggataagtgtccctgaagatattggctgagcagattctcccaaatcctcagaactgacaggttgctgaccctttcataataagagctagcattttctctactctggaaagacatttcagaggcatgtcctcaacaaggcaacacgtttcctactcagtaatctcccccagatcattcttaaggccatgataaataccatggtgagagaagaacaagcatcattaataagttcagtgtggaaaaaagaaa

SEQ ID NO: 574000 - DNA, 595 bp, Homo sapiens
tcattcgtggtttcctgggaaaatgtcccagtggaggggaatgtcattgcagatgcaatgatcctggcttttggaatatgtgggaaaattatccatacaatgagagtggaatggactgattattgctaatttgtattagtcacctgcagagagataatgaaaaactgagcaccaccaccaagcagtaaatagctaaacatgtcataggtaacctggagactgaagacctaaaagagtcacagaggtctagagatgtctgcatctaaacgagggcagatctgtttttctgagatcaggaccttggttatgaacatgtgggattctgagacattggataacaacatctggataagtgtccctgaagatattggctgagcagattctcccaaatcctcagaactgacaggttgctsaccctttcataataagagctagcattttctctactctggaaagacatttcagaggcatgtcctcaacaaggcaacacgtttcctactcagtaatctcccccagatcattcttaaggccatgataaataccatggtgagagaagaacaagcatcattaataagttcagtgtggaaaaaagaaa

SEQ ID NO: 574001 - DNA, 518 bp, Homo sapiens
agattctcccaaatcctcagaactgacaggttgctgaccctttcataataagagctagcattttctctactctggaaagacatttcagaggcatgtcctcaacaaggcaacacgtttcctactcagtaatctcccccagatcattcttaaggccatgataaataccatggtgagagaagaacaagcatcattaataagttcagtgtggaaaaaagaaaaagttcattgtggtcctctctgtgaactaggactggtggaaagagaagtcatagaattggcatcaatgtcatccatgaagtgacagagccggggcacagggctaatcacaaggagccaggataccctaattactacagtgactggcaaggtragaggcgcatccaaggatgattgaccttcaggaagttgtggagatggctaatagatcacagtggcattcctcaagcaaactagacaggcagccaacaagggtactgattaaaatctagtacaaagaaaaaaggcgaggatggtagaga

SEQ ID NO: 574002 - DNA, 518 bp, Homo sapiens
agattctcccaaatcctcagaactgacaggttgctgaccctttcataataagagctagcattttctctactctggaaagacatttcagaggcatgtcctcaacaaggcaacacgtttcctactcagtaatctcccccagatcattcttaaggccatgataaataccatggtgagagaagaacaagcatcattaataagttcagtgtggaaaaaagaaaaagttcattgtggtcctctctgtgaactaggactggtggaaagagaagtcatagaattggcatcaatgtcatccatgaagtgacagagccggggcacagggctaatcacaaggagccaggataccctaattactacagtgactggcaaggtgagaggcgcatccaaggatgattgaccttyaggaagttgtggagatggctaatagatcacagtggcattcctcaagcaaactagacaggcagccaacaagggtactgattaaaatctagtacaaagaaaaaaggcgaggatggtagaga

SEQ ID NO: 574003 - DNA, 606 bp, Homo sapiens
gggtagtttaaataatagatatttatttctcacagttctggaggctaggaaagtccaaaattgaggcaccatcagatccggtgtctgacgagggatgctgtctggctcacagatcactgtcctctggttatatcttcacatggcaaacagaaagaagaaataagccctcggtgtctcttcttataagggcattaatcccatcgagaagtctccaacctcataatctaatcacacaccaaaggcctcatctcctaataccatcatattggggattagggtttcagcatattaatgtgggggaaaaataaactttgagtctatagcattggctcagaaaaacattgttatatgcaatgtttgtaaatatattgctatttatatacactaaagacattttctgtttaaaaagattctgctgtatcccctttgtaaagtctcatatcatagaaaaggcataaaaggargcaacagaagacttacatgctagtatcacttctgccataaattgcatcactttcagcatatcatcactttctgactcacctttttattctgaaaactatggtggttaatatttaaaaaaatattcaagtccctttaattcta

SEQ ID NO: 574004 - DNA, 590 bp, Homo sapiens
cactacctcctaggctccagtgactctccttccctcagccacctcagcagctggaactacaggcatgcatcaccatgcctggctattttttgtattttttgtagagactgggttttgccatcttccccaggctggtcgcaaactcctggcctcaagtgatccatttgcctcagcttcccaaagtgctgggattacaggcatgagccaccacactcagcccctgacctaaacttttaaaaagtctagtagcaaggataataatgtctatagcaagtaatagaaaataaacaaatttagacaataataataatatcagcaacatacagtgagatttattgaacacttagcagattgaaaaaggtggccataataattcacagttggacggcagctcctcccatgtggaggtagagtctactttatggcttgctttagtcactagaatacacagaaaagacagtgtrctagttacaagcctaggcctcaaggggccttctactcgtcctcttagaactatatctagccactaagggaaaagggtgtgggcaagcctgctgaaggatgtgtgaccacagggaggtgaactgagc

SEQ ID NO: 574005 - DNA, 555 bp, Homo sapiens
acctgaacctataggcattggagatacttgaggcatttaagtgaggaagagagacatttttataaggtcaatattttttcagatctggtttttctgaccttcgtagaggtcagtaacattcactgtatttgtggtagacatggatttctcccacccagatctctcttcatggaagaacttgctgtccccatgaggaatgcagtctgtagccgacctttgactatctgctccttcagggtctcccagtacttcacaaagatgcgccatccaaggtcaagtccttcctagcagcccacacccaatgactgagtgagacaggggtgtgaaggctcaccactgcctgtcaaaggacactctgatgggcaatatttcttccaaagcccaccgccagaaggtccaaggctttggaggctctgcatcacagcttaacttcttcctctgcccaatgttgcttcttccccatttccttcacagatatacattttgtaccctgtatgggttgaattgtgggcccccaaaatttgtatgttgaygtcccaacccctagtatctcag

SEQ ID NO: 574006 - DNA, 578 bp, Homo sapiens
gatgcttcagaacaggttcctatcaagattagagaaaacaagttacagaaaaacccattcttttcttagactctcctatgcttttttagcataaacaaaagatttgtttatctttccattttcatcattgcaatattacctgtacgttgtcttacctatatttaatgtctcattgtccatataatattttcaagaaataataagaacatgggactttgatcataaaacatctagtgtggctttgtggtgtctgtatttgggaagcttagtcttaattccttctatggttaacaacctctcatcttttggctgggcacggtggctcaatgactataaatcctagcactttgggagccgaagtgggcagatcacttgagcccaggagttcgagaccagcctagacaacatgacaaaatcctgtttttaccaaaaatacaaaaattagctaggcatggtggcrcaattgtggtcccaactactcaggaggctgaggtgggaggattgctgacgcctgggaggcggaggttgcagtgagccaagatcgcacaactgcactccaacctggttgacagggtgag

SEQ ID NO: 574007 - DNA, 582 bp, Homo sapiens
ggctcactgcgacctccgcctcccgggttcaagcgattttcctgcctcagcccccaagtagctgggattacaggcgcgagccaccatgtccctctaatttttgtattttagtaggggcggggtttcaccatgctggccaggctggtctcgaactcctgaccttgtgatccgcccgcctcagcctcccaaagtgctgggattacaggcgtgagccaccgcacccggccagattcagttttttttagatgttgagctgttcaaaggattccttcttcaatgagctttggtggttactttcaaggaatttatgagcttcatctaagttgtttaatttattggcataccatttttaaaaattatttgaatatctgtagaatctttagcattgccacttccttcctgacagtgttaattgtatcttttttttwtaaaactaatcggcttagctagagatttatcaatttcatttttcttctcaaaaaagctatttggtcaacagagacaagatggccaaatagacgcagacaggaagcaccactcccgctgacagaaagggagaccgggaaccctttcaggttctgg

SEQ ID NO: 574008 - DNA, 582 bp, Homo sapiens
ggctcactgcgacctccgcctcccgggttcaagcgattttcctgcctcagcccccaagtagctgggattacaggcgcgagccaccatgtccctctaatttttgtattttagtaggggcggggtttcaccatgctggccaggctggtctcgaactcctgaccttgtgatccgcccgcctcagcctcccaaagtgctgggattacaggcgtgagccaccgcacccggccagattcagttttttttagatgttgagctgttcaaaggattccttcttcaatgagctttggtggttactttcaaggaatttatgagcttcatctaagttgtttaatttattggcataccatttttaaaaattatttgaatatctgtagaatctttagcattgccacttccttcctgacagtgttaattgtatctttttttttwaaaactaatcggcttagctagagatttatcaatttcatttttcttctcaaaaaagctatttggtcaacagagacaagatggccaaatagacgcagacaggaagcaccactcccgctgacagaaagggagaccgggaaccctttcaggttctgg

SEQ ID NO: 574009 - DNA, 553 bp, Homo sapiens
aaagtcctcccaccctctttattgttaatatttttgtgtgataaaaacacaacgtaagatttacactcttagaaaattctaaatatacaatatagtattgttgtctataggcactacgctgtacagtagatctgtaggacttattcatcttgtgtaactgaactttctaccctttggctaatacctcctcatttccctctcctgtaacccctggcaaccaccattctactatctgcttctatgagtttggttatttgaagttcctcatataaatggtatcatgcagcatttgtccttctgtatctggcttgtttcacttagcataacatcctccgtatttattcatgttgctgcaatggcaggatttctttcttttttaaggctaaataatattccatggcatgtaccatatgacctagcaatcccatgactgggtatatatccaaagaaattgaaattgcaatttcaaagagatgcytgaactcctatgtttattgcagcactgtacacaatagccaacacacgaaagcaacctcaatgtccattgacatgt

SEQ ID NO: 574010 - DNA, 567 bp, Homo sapiens
taatacagtctctaagaatgctatacaaacacaaataaatataagaaataaaaggttaatttttttctattatgaacatatttaacaaggtaaaaatcaaggcaggcctctctgattttatgtcaccacatcaaacatatttttgttaccaaacacacagaggaaatagccaacttaaaataaatcatgttctaaaagctggaaattcattttctctttgaaacaatgttctaaaaatggccaggttccaaaattatttcaaaagggcttatttattttatgcgttacatcggcaatgaaaagtagtggaagacaatactatactatagcactcaaaacggaaaaactgttaactagaaaaaattttaaagtactttttatgtgtgtgtgtgacagggtctcattttattgttcaggctrgagcgcatcacacaatcacagctcactgcagcctcgatctcccaggctcaagcaattctcccacctcagcctccccagtagctggaactacaggtatgcaccaccacgcccagctgttttgttttgtttttattttttaatttttgg

SEQ ID NO: 574011 - DNA, 567 bp, Homo sapiens
taatacagtctctaagaatgctatacaaacacaaataaatataagaaataaaaggttaatttttttctattatgaacatatttaacaaggtaaaaatcaaggcaggcctctctgattttatgtcaccacatcaaacatatttttgttaccaaacacacagaggaaatagccaacttaaaataaatcatgttctaaaagctggaaattcattttctctttgaaacaatgttctaaaaatggccaggttccaaaattatttcaaaagggcttatttattttatgcgttacatcggcaatgaaaagtagtggaagacaatactatactatagcactcaaaacggaaaaactgttaactagaaaaaattttaaagtactttttatgtgtgtgtgtgacagggtctcattttattgttcaggctggagygcatcacacaatcacagctcactgcagcctcgatctcccaggctcaagcaattctcccacctcagcctccccagtagctggaactacaggtatgcaccaccacgcccagctgttttgttttgtttttattttttaatttttgg

SEQ ID NO: 574012 - DNA, 567 bp, Homo sapiens
taatacagtctctaagaatgctatacaaacacaaataaatataagaaataaaaggttaatttttttctattatgaacatatttaacaaggtaaaaatcaaggcaggcctctctgattttatgtcaccacatcaaacatatttttgttaccaaacacacagaggaaatagccaacttaaaataaatcatgttctaaaagctggaaattcattttctctttgaaacaatgttctaaaaatggccaggttccaaaattatttcaaaagggcttatttattttatgcgttacatcggcaatgaaaagtagtggaagacaatactatactatagcactcaaaacggaaaaactgttaactagaaaaaattttaaagtactttttatgtgtgtgtgtgacagggtctcattttattgttcaggctggagcgcatcacacaatcacagctcactgcagcctcgatctcccaggctcaagcaattctcccacctcagcctccccagtagctggaactacaggtatgcaccacmacgcccagctgttttgttttgtttttattttttaatttttgg

SEQ ID NO: 574013 - DNA, 373 bp, Homo sapiens
ctatgattgcaccactgccctccagtctggatgacagagtgagaccttgtcttaaaaaaaaaaaaaaaaaagaaaaagaaagaaacaaagggctaatttatattcatgttttctttgtcataaaatgtagaaagaaataaacacaaaattataatatctgcagcactgtagcactctcagaaaacaggatagctttctagtttcttacttgtcttttgcaagtctttaaaatcttgttgtggaattagccttgtcattaaaacctcttctttagaagggggactcatttcaaaggagaacatttggaagcatgacaacatgtatgtgctttttatckgccctggagaaaatgctgtaatgtcaatcagcaact

SEQ ID NO: 574014 - DNA, 584 bp, Homo sapiens
tattattacaggagacaaaagtagaagcaaggagagcaattagaagcttttacactaactgggcaatacattatggttctttccactacacagctcttcttctcttgcctctaagtcttttcttgatttcaacgaattcctggagtgagagaatgtgtattcttagtctctgtgccctctgacatgcccagcactatgtcctgcccacagcagaaggctcagtacttatttttgagtgaattatatggctcttctcatcaaggctgaggagcacatttttaaaaaatatatatttgtattttttgtacatagcatattgtctgtcccatagttaagactcaatgaatgtctgttggagtggggcaagacctcacttcagataaccagtttactgagagagatccttggataggcagaggcagcaaagagggtttgggccttgctagcatggagggtaggaggaaggcagggaaggtggagcatgttgagagaagagaggtggataaagtcacccagctctgagcaggccaagggtagatttggtctatattttaatttaargctggcctggtttcattgatggt

SEQ ID NO: 574015 - DNA, 289 bp, Homo sapiens
atataatcagacctttgggggactactgaacactagatttgaactgacactgattccaggaaacccaaaatgtcactgtagcctctcattcagaggaggggcttatataggtcaggtgatcaatggaagttttagctcaagttcatctcacaataggtgtcagaatccatyctgtagttatttcccagttccagaagaaataattggaatgacatacttagccactggcagaatctccacattggttccttgacttgtggactgggggctatgatgaagagggccaagg

SEQ ID NO: 574016 - DNA, 559 bp, Homo sapiens
ggcaagttatcccggcatagaggtggtagcaccaccatttgtctctccctcaaaaaaggcatatttgtaccaaagtgagtgatagtgcagccatttatgcaaatagccataatctggttgcatttatttttaaaagtaaataatgttctggaatacagccaaacactaggataatatttaatggagaataactagaggattttttttctattagtcaggaatcagacagggacatcactatattcagtactatttactgtcatgctgtaatagccaatgcaattagacaagataaaccagtttgtgtcataaagaaaaaggtaaaactatctctgtttgcatgtartataattatatatctgaaaaactcaaaagactgaaaggaaaaacttctataagtgataggaaaataacaggttaaaaatttaatatacaaaaatcaatagcctacatatatataaccaaaaaaaacagtgaaatatatattggaagagaagactctatttagggtagtacatatataaactttaaaaagtgttcaaaacctatttaaggaaaa

SEQ ID NO: 574017 - DNA, 500 bp, Homo sapiens
ttatttttcttttttcaaagcaactattgtttactctaatacaacatcctttcacaatctttgataagccaayattattctcagatcaaaccatttgcttattatattcttgtttaaaacattagaaacttgttatttctttttaaaaacataattttactttatccaagcatattacaaaagaatacccattttgggctttagggagaactgatatattctataacatggtaaaaatgcataagaatgcatgggtatagcaaatattgtgtgtagtataataaatatgtattatgttccctcctcctattgtttaagcaacttaaaattgattttatagaatatagatccaaacagggtttcagcatcatctgaacataacaaaaatctctctgaaaattaaaggaaaatataacctcatccagggtaatactctttgcataggttaaaatatgccttttccatattcccaaatgcattttttataataatttgcatga

SEQ ID NO: 574018 - DNA, 455 bp, Homo sapiens
gtgttcacaatgtaaacatgtgacaggttgagggctggaagctttgagtttccattctgtattacttctggtgccttgctcaagataggggtgcagaaaaatagaccatcacctgagagytctcggggaggactccactggtgctgagcgactgataattgagcacaccatctcggctgaccagggcatgggcttaggcaattccactcacaatcagagccagaggggcaggctccataagagcacctgcactaaaatcttcagggagctcatcggtccctccacctatctatcaggtttcttttttttttttttttttttgagatggagttttgctcttgttgcccaggctggagtgcagtggcacagtctcggctcactgcaacctgtgcctcccaggttcaagcaattctcccgcctcagcctctcaagtagctgggattataggcacccac

SEQ ID NO: 574019 - DNA, 570 bp, Homo sapiens
agagaagtaatgggagaagaagcaaccttctaaaagtgggtgataggcaaacagagggtggtctctatgttttctccrcaagagtgtttcagatgaactcagactactgatatcctagaaaagactgactacaaaaggcttggaaatagaaggatctgggtggccagagcatgtatgaactttggctcctgcctgggaccaaggtgcctggagggagctctctctggctctaaatactctcagagtagggttacctgacagggaagatgaaccctattctctatttctgtcagaatgactggtgtagctgtatatgtttgttaggtggtgcctatcttagagttcataggtggaattttttgaggtaaggatattaaatagatatttaattgaagctactttgaaataattatgaaatactttttttgtttttgagacagagtcttgcaccagcacccaggctggagtgcagtggcacgatcttggctcactggaaactccgcctcctggattcacgccattctcctgcctcagtctccagagtagctgggactacaggtgtatgccacc

SEQ ID NO: 574020 - DNA, 544 bp, Homo sapiens
gtcaaatacactcttccccaggtggctaaagcagctttaaaaaatattgttgtcactgtgtcagatcaagtggagaggagcagaaatatgacytgggagtctctattggtattaggcagcaggttaggtagaaattagattgcatttgctgggattccatataatgccctgagagagcaaaactgttcagttctctttattagtgctagatttatagttcaaaatgaagattaaattaagaaaaaatatcaaagttaatgttctaaagagctctttaaattcaagatgttcagtaatgtgctttagatctgatctggcattcccagctccagagtcactcttgagctaatctgctgggctcattgctattgaaccagtttgtataaatctactatcttcatgccagccctgtgcttggaaaaccgtaatagctttttttttttttttttttttttaaagacggagtcttgctctgtcgcccaggctgtagtgcagtggctcaatcttggctcactgcaacctcggcctcccagattcaagcaat

SEQ ID NO: 574021 - DNA, 544 bp, Homo sapiens
gtcaaatacactcttccccaggtggctaaagcagctttaaaaaatattgttgtcactgtgtcagatcaagtggagaggagcagaaatatgacttgggagtctctattggtattaggcagcaggttaggtagaaattagattgcatttgctgggattccatataatgccctgagagagcaaaactgttcagttctctttattagtgctagatttatagttcaaaatgaagattaaattaagaaaaaatatcaaagttaatgttytaaagagctctttaaattcaagatgttcagtaatgtgctttagatctgatctggcattcccagctccagagtcactcttgagctaatctgctgggctcattgctattgaaccagtttgtataaatctactatcttcatgccagccctgtgcttggaaaaccgtaatagctttttttttttttttttttttttaaagacggagtcttgctctgtcgcccaggctgtagtgcagtggctcaatcttggctcactgcaacctcggcctcccagattcaagcaat

SEQ ID NO: 574022 - DNA, 519 bp, Homo sapiens
aaccattataaacagatatcggttaaaacagtataaatagatttgggcaggtaaatgtacacttgagagtagcctgctagccacatcagacaaaaaatgcttgctaagcaatggaaagcattgtttaatccagcacgcatgccgaatagaggtcaggaagaggtagaaatgctcctacccttatactatgcgtgacttgctcatgggctccctataccatgcgtgactggctcatgggctccctttagcatgcgtggctggctcatgggcaaccttctggcctcagcctgtgtcacctccccacaaagccttccatgaccatcctaactactcctcttattcttcatcacaccacatcatcctggttttatcttctgaaaatcatcctttgtaattctcctatttaccgtcgaatcacttgcttatcatctgtcttcaccactagaaaytaaacctgtccatcgggttgcacactaacaccaagcacagtgcttaatgtagttgtcatttgacacttac

SEQ ID NO: 574023 - DNA, 614 bp, Homo sapiens
atatttctcccatttgcttttgaaagaaaagaaatatggctctgttcagcccggctcaccggcagtcagagtttaaggttatctctcttattccctgaacaattgctgttatcctgttcttttttcaaggtgcccagatttcatattgctcaaacacacatgctgtaaaatttgtgcagttaatgcaattattacagggtcctgaggcaatatacatcctcctcagctgacaggaataagagattaaagtaaagacaggcataggaaatcacaagggtctatatagattggggaagtgataagtgtccatgaaatctttacagtatatgtttagagactgcagtaaagacaggcataagaaattataaaagtattaatttggggaactaataaatgtccatgaaatcttcacaatccatgttctcctgccatggcttcagccggtccctccgtttggggtccctgacttcccgcaacatcctggatcttacccaagaccaaaaaggtggtacctayacagatctgcaggagtcatagcattactaggattgggattccccttaacacatatatgcctgcaatgaccaaagacttacatcacaacactcaatacc

SEQ ID NO: 574024 - DNA, 518 bp, Homo sapiens
ctgcctgccttggcctctcaaagtgctaggctgcaaacatragccatcatgcccagccgattaaatctattttcaacagctttcacatctagtctgcaaactgcaaattttgaagagacagcaaataagacctttgcaacaagaattttcaaagtaattcaacatttttaacatttcctttggcgtacgttacaaccattactacatgcccacattctagtgaacattttaggtattttatgggttctatcattgcatgaaactatggaaatatatcttttcacacttaagaaaaatctaacaatacagaaaacagtcacatcaaaggaatcaaatagcaagggaacacaaaccataccttacaaattgaagatactttatattgattttctgtaaaatcactaagacagttacttgtttgcttagaaaagacccaagcatgctgccaggtaaatttaaagtattttgaagagaaaaagtgagcatgatgggtttactgcaaattttatactcacaag

SEQ ID NO: 574025 - DNA, 584 bp, Homo sapiens
ccaaccagtgttattcaagggtcaacagtaaatataggtcaaaagctttaaaactatattctccgattttctaaataaaattaaactacattacataaaaaaatttaataggaaatttcttggaatttcaggcaggtaaattggggcgggggtgctggaaactatatactagataaaccattgtactattggatttccacataattcacatatgtgattaacacttccataatgagagaggcagtgcttagagatgtagcagaaaaggtagcatagggtagttcaagatgggacctacatgcatggctgaagaatctgtatggatcatttactgattcaaacataaaatgaatactatgaagagaagagatgaaatgaaattacatatacattctgaaagaagtaaagatttcctgatggaaaagtaaaacaaataatattaaagacactcctaagcactaagaaagaaattggctctgtgtgaaagaaagagatatcatgagcttaattattgataagtcattytgattctttaaaggtgatatccttaaggatagtacttacaatacttttttcttcaaaat

SEQ ID NO: 574026 - DNA, 548 bp, Homo sapiens
aacaacttgttggtttctttgattctttgtttgtttgttttgagacagagtcttctgtcaaccaggctgaagtccagtggcccaatctcagctcactgcaacttctgcctccttagttcaagctattctcctgcctcatcctccctagtagctgggactaaaagcatgcaccaccacacctggctaatttttttgcattttttagtagggatggggatttgccatgttgtccaggctagtctggaaatcctgacctcaggtgatccacccaccttggcctcccaaagtggtgggattacaggtgtgagccacctcacccaacaagaataacaactttctaaaggagtcgttttctctctctctctctctctctctctctmcaggatttgggagacatggtggcaaggtatgttaatggccatcaatgcaagctggagcacaaggcgtgctgtgaaaaacatcaagttgtttccaacaaagggaaaacataatttactaacaccataatgtgtcaatgtgattgtgtgtgtaagtgtgtgtacttatgt

SEQ ID NO: 574027 - DNA, 601 bp, Homo sapiens
atgtggagacatagtatgtgtgtagttcaaaccagagagatgagatgaaattgtaaaaggaagagtatacaaaatgagaagagatcatgktctgtgatgaaattgtgggaaagcaatagcataaaggtatcactgaggaacttgagaccaggaagaaactaagatgtgtttacccatgtagttaaaaaaagaaaattacatgttgggaggctgaggcgggcagataacttgaggtcaggagtttaagacaagcctggccaacatggtgaaagcctgtctctaccaaaattacaaaaattatccagacatggtgatgggcacctgtaatcccagctagttgagacactgaggcaggagacttgcttgaacccagaaggtgcaggctgcagtgagctgagattgtgctactgcacttcaccctgggtgacagagtgagactccatctcaaaaaaaaaaagagagtgccagacatggtcacttatgcctgtaatcccagcactttgggaggccgaggtgggcgattcatgaggtcaggagtttgagaccagcctgaccaagatgatgaaagcccgtctctactaaaaatacaaaaattagctgg

SEQ ID NO: 574028 - DNA, 601 bp, Homo sapiens
atgtggagacatagtatgtgtgtagttcaaaccagagagatgagatgaaattgtaaaaggaagagtatacaaaatgagaagagatcatgttctgtgatgaaattgtgggaaagcaatagcataaaggtatcactgaggaacttgagaccaggaagaaactaagatgtgtttacycatgtagttaaaaaaagaaaattacatgttgggaggctgaggcgggcagataacttgaggtcaggagtttaagacaagcctggccaacatggtgaaagcctgtctctaccaaaattacaaaaattatccagacatggtgatgggcacctgtaatcccagctagttgagacactgaggcaggagacttgcttgaacccagaaggtgcaggctgcagtgagctgagattgtgctactgcacttcaccctgggtgacagagtgagactccatctcaaaaaaaaaaagagagtgccagacatggtcacttatgcctgtaatcccagcactttgggaggccgaggtgggcgattcatgaggtcaggagtttgagaccagcctgaccaagatgatgaaagcccgtctctactaaaaatacaaaaattagctgg

SEQ ID NO: 574029 - DNA, 601 bp, Homo sapiens
atgtggagacatagtatgtgtgtagttcaaaccagagagatgagatgaaattgtaaaaggaagagtatacaaaatgagaagagatcatgttctgtgatgaaattgtgggaaagcaatagcataaaggtatcactgaggaacttgagaccaggaagaaactaagatgtgtttacccatgtagttaaaaaaagaaaattacatgttgggaggctgaggcgggcagataacttgaggtcaggagtttaagacaagcctggccaacatggtgaaagcctgtctctaccaaaattacaaaaattatccagacatggtgatgggcacctgtaatcccagctagttgagacactgaggcaggagacttgcttgaacccagaaggtgcaggctgcagtgagctgagattgtgctactgcacttcaccctgggtgacagagtgagactccatctcaaaaaaaaaaagagagtgccagacatggtcamttatgcctgtaatcccagcactttgggaggccgaggtgggcgattcatgaggtcaggagtttgagaccagcctgaccaagatgatgaaagcccgtctctactaaaaatacaaaaattagctgg

SEQ ID NO: 574030 - DNA, 553 bp, Homo sapiens
cctttaatctcagcactttgggaggctgggcgggaggaatgcttgaatccaggagttcaagatgagcctggacaacattgagataagctatttcttttcttttctttttctttttytttttttttttttttgagacggagtcttgctctgtcgcacaggctggagtgcagtggcaagatctgggctcacttcaacctctgcctccagggttcaagcaattctcatgcctcagccttttgagcagctggaattaaaggcacgtgctaagatgcccagctacttttttttttttccatatttttagtagagatggtgtttcaccatgttgcccaggttggtctcaaactccaggcctcaagtgatccacctgcctcagcctcccaaagtgctgggattacaggcatgagccactgggtctggccccagatactctatttctataaaactaatttttcaaaaaattagcagcatcatggcacacgtctatggttgcagctacttgggaggctgaggtgggatgatcacttgaaccttggattttgaagctgcagtg

SEQ ID NO: 574031 - DNA, 553 bp, Homo sapiens
cctttaatctcagcactttgggaggctgggcgggaggaatgcttgaatccaggagttcaagatgagcctggacaacattgagataagctatttcttttcttttctttttctttttttttttttttttttttgagacggagtcttgctctgtcgcacaggctggagtgcagtggcaagatctgggctcacttcaacctctgcctccagggttcaagcaattctcatgcctcagccttttgagcagctggaattaaaggcacgtgctaagatgcccagctacttttttttttttccatatttttagtagagatggtgtttcaccatgttgcccaggttggtctcaaactccaggcctcaagtgatccrcctgcctcagcctcccaaagtgctgggattacaggcatgagccactgggtctggccccagatactctatttctataaaactaatttttcaaaaaattagcagcatcatggcacacgtctatggttgcagctacttgggaggctgaggtgggatgatcacttgaaccttggattttgaagctgcagtg

SEQ ID NO: 574032 - DNA, 486 bp, Homo sapiens
  misc_feature 308, 310, 311, 314, 316, 319, 320: n = A,T,C or G
agtggcaaagtcaaaactggaatttaataaaagagtctgagcttgcctgtgtggttctgcttttcttagaaagttggatcaagtctgcaaatcagtacccaggaaaaacagcaaaagacctgctggtaaagacctgtccagattgctgacctggttcacmcagttcccaagcttgcctctgttacttccaaggaagaaagaatgcacagagaggaaaaaaacaaacaaacaaacgaaccagcggacaacactggagcctggtaacagagtgagactctgtcaagaaaggaagggaaaggaagggaagncnnggnanggnnagggcaaagtaaaggaaagaaggggaggggaggggaggaaagaaaagaatactggaacttgttgaaggcagagactttattttcatatcccggctatgtctggctactgtcttacctaatagatataaaatcagtcttggttggattaaccagaagaatcatcata

SEQ ID NO: 574033 - DNA, 661 bp, Homo sapiens
tgttcttggtgctggccacagctccacagctccattctatatggttgaacaatgtttttaagggaactcctttagcgaagtctcaacacagctrtgattagagtgccaaattagccagcaacattgaaaggacacattcatgtgttatgattgacatggaataatcaccacctccatcatctgcattctcatcaccatcattatcacaggccctcatcattcttatttgggattctgtataattcaaactgccttagaggcatcacgtaccctgcattcctcagcagcccatcctattgggtgtggctgtgagccatgtgctctggtgactcagagcagggcccacagagcaatctcttgtcagcctcacagaagagctccttagtctccgcatggagcacacagatattgtctgagctgttgatgttctgaggtctggtctgtctggctagggaagacagctttttgagtaccacattggtgttgaagttgggcttctctgaggtttttctgcacgaagggcagcgcattggtgctctgccttcttctgagcagaggcagaggcagggcctgcaaaagctgtgcccacagtcaatggtgaccggtctatgaagtagttcacgcaaatgcagcaaatgagctcattctggaagactcgcag

SEQ ID NO: 574034 - DNA, 546 bp, Homo sapiens
tgatttacactgaacaagcagttcaaacaaagtagacagggaagagaaatggctatcagtggtgtatggctcaacaggyaaaatttgctgccttctaaaatggctctacttgtaagattctgaagattccattagaaatacttgtatttaaagggcaataatgtgggaaaatgaatatgttgatttgcttgattataagaaccacttcactagaaataattatatcaaaacatcatgttgtactccttaatgtagtttaagaaaactaaaatgaattaaaaaaatctaggagtacttgtgtttagtaaaccagttttagatttcacccttgtacatttcacccattatctagaaccaattaaacatttggcactgaagaataattcagagcaacaactcctaggggagaactagattgtctggttggtgatcaaaaagaactaaagcatctctgaaggcaattagcccccaacactgtgaccaaggcccaggaggtggggcatgttctttctgccttccaaacactccttctggctgaacaaggtg

SEQ ID NO: 574035 - DNA, 546 bp, Homo sapiens
tgatttacactgaacaagcagttcaaacaaagtagacagggaagagaaatggctatcagtggtgtatggctcaacaggcaaaatttgctgccttctaaaatggctctacttgtaagattctgaagattccattagaaatacttgtatttaaagggyaataatgtgggaaaatgaatatgttgatttgcttgattataagaaccacttcactagaaataattatatcaaaacatcatgttgtactccttaatgtagtttaagaaaactaaaatgaattaaaaaaatctaggagtacttgtgtttagtaaaccagttttagatttcacccttgtacatttcacccattatctagaaccaattaaacatttggcactgaagaataattcagagcaacaactcctaggggagaactagattgtctggttggtgatcaaaaagaactaaagcatctctgaaggcaattagcccccaacactgtgaccaaggcccaggaggtggggcatgttctttctgccttccaaacactccttctggctgaacaaggtg

SEQ ID NO: 574036 - DNA, 329 bp, Homo sapiens
actaataatccctgcgatatgtgtagtgacttcatacttcaccccccccccggatattacggccaatatcagagtggagtgtgcaccccctgcaatatggggagtgatatcatcctctccccactggatgttatggacaatatcacaggaggtttactttctctgggttatggggaaaaatatcctcctgtccccgcctggatgttagacatatttagaggggggtgtccaccccctgtgatatggggagtagtaatatcctctcctgccctggatgttatggacaatatatagggagatrtacaatcccttcgatatggggagtaata

SEQ ID NO: 574037 - DNA, 466 bp, Homo sapiens
atggagctggataccattattctaagtgaattaatgcaggaacagaaaaccaaacaaacactgcatgttctcacttataagtgggggctaaacattgagtccacatggacacagagaagggaacaatagacacaaggtctactgtgggtggagggtgggggtagagtgaggatcaaaaaactccctattagatactacgttcactacctggatgactacgtaatctgtayaccaaatcccattgacacacattttacccatataataaacctgcacatgtacccgctgaacctaaaataaatgttggaaggaaataaagttacaaccaactcttgtactattgtgaggaaacaatcatatgtgttgacaaaaaaatcagctactaatagatttataatagtatatatgtagcagaaaaatatcagatataacttatatacccaaaagtatgacttaaaaacagcat

SEQ ID NO: 574038 - DNA, 466 bp, Homo sapiens
atggagctggataccattattctaagtgaattaatgcaggaacagaaaaccaaacaaacactgcatgttctcacttataagtgggggctaaacattgagtccacatggacacagagaagggaacaatagacacaaggtctactgtgggtggagggtgggggtagagtgaggatcaaaaaactccctattagatactacgttcactacctggatgactacgtaatctgtacaccraatcccattgacacacattttacccatataataaacctgcacatgtacccgctgaacctaaaataaatgttggaaggaaataaagttacaaccaactcttgtactattgtgaggaaacaatcatatgtgttgacaaaaaaatcagctactaatagatttataatagtatatatgtagcagaaaaatatcagatataacttatatacccaaaagtatgacttaaaaacagcat

SEQ ID NO: 574039 - DNA, 466 bp, Homo sapiens
atggagctggataccattattctaagtgaattaatgcaggaacagaaaaccaaacaaacactgcatgttctcacttataagtgggggctaaacattgagtccacatggacacagagaagggaacaatagacacaaggtctactgtgggtggagggtgggggtagagtgaggatcaaaaaactccctattagatactacgttcactacctggatgactacgtaatctgtacaccaaatcccattgacacacattttacccatataataaacctgcacatgtacccgctgaacctaaaataaatgttggaaggaaataaagttacaaccaactcttgtactattgtgaggaaacaatcatatgtgttgacaaaaaaatcagctactaatagatttataatagtatatatgtagyagaaaaatatcagatataacttatatacccaaaagtatgacttaaaaacagcat

SEQ ID NO: 574040 - DNA, 562 bp, Homo sapiens
taaagttttcataattatattgatgtctgtaggttctgtagttacatcctctatttaattcccattatctacattatgtagcttctctaatttttttcgagataaatcttgctagccattgtttattaaaaaaatttttttcaaagaaccaatttgtgggtatattaattagctccaccttttgttatttgctatgttgttggtttacatttttatctttatcatcttccttcttcttaatttggatatactttgctyattttttagcctcttaaaaaagaacctaaaggtcattgattgaagccttttattttcaatatattacatctataaatgtacctttaagaaacgatttatctgcatcccacattttattaagtttttaaaaaattttatttcagtttaaactattttttttgtgtgtgaaacttttcttggccaatgggtttttctgaagtattttgtttaatgttcaaatgttggggtgttattgtacatatcctactgttgtccatctctggttcatgatacgatgcatgttctccattgcacttagataaca

SEQ ID NO: 574041 - DNA, 562 bp, Homo sapiens
taaagttttcataattatattgatgtctgtaggttctgtagttacatcctctatttaattcccattatctacattatgtagcttctctaatttttttcgagataaatcttgctagccattgtttattaaaaaaatttttttcaaagaaccaatttgtgggtatattaattagctccaccttttgttatttgctatgttgttggtttacatttttatctttatcatcttccttcttcttaatttggatatactttgcttattttttagcctcttaaaaaagaacctaaaggtcattgattgaagccttttattttcaatatattacatctataaatgtacctttaagaaacgatttatctgcatcccacattttattaagtttttaaaaaattttatttcagtttaaactattttttttgtgtgtgaaacttttcttggccaatgggtttttctgaagtattttgtttaatgtycaaatgttggggtgttattgtacatatcctactgttgtccatctctggttcatgatacgatgcatgttctccattgcacttagataaca

SEQ ID NO: 574042 - DNA, 412 bp, Homo sapiens
tctaaatctgttgtcatctcaacattgtttacactgtcttcaccacgagtagatttcatctcaagaaaccactttctttgctcatccgtggaagcaactcatccwctcacgttttctccagaggctgctgcagtctcgccagatcttcaggctctgtctctgattctagtgctcttgttatttccaccatatctgcagttacttcctccacagaagtcgtgaacccctgtgtcatcagtgagggttggaataatcttcccaacttctctctctttcttttatttttttgagatgaagtcttgcctgggctggagtgcagtgatgcgatctcagctcactgcaacctccacctcccgtgttcaagcaattctcctgcctcagcctcccaagtgtttgggattacagtcacccc

SEQ ID NO: 574043 - DNA, 412 bp, Homo sapiens
tctaaatctgttgtcatctcaacattgtttacactgtcttcaccacgagtagatttcatctcaagaaaccactttctttgctcatccgtggaagcaactcatccactcacgttttctccasaggctgctgcagtctcgccagatcttcaggctctgtctctgattctagtgctcttgttatttccaccatatctgcagttacttcctccacagaagtcgtgaacccctgtgtcatcagtgagggttggaataatcttcccaacttctctctctttcttttatttttttgagatgaagtcttgcctgggctggagtgcagtgatgcgatctcagctcactgcaacctccacctcccgtgttcaagcaattctcctgcctcagcctcccaagtgtttgggattacagtcacccc

SEQ ID NO: 574044 - DNA, 412 bp, Homo sapiens
tctaaatctgttgtcatctcaacattgtttacactgtcttcaccacgagtagatttcatctcaagaaaccactttctttgctcatccgtggaagcaactcatccactcacgttttctccagaggctgctgcagtctcgccagatcttcaggctytgtctctgattctagtgctcttgttatttccaccatatctgcagttacttcctccacagaagtcgtgaacccctgtgtcatcagtgagggttggaataatcttcccaacttctctctctttcttttatttttttgagatgaagtcttgcctgggctggagtgcagtgatgcgatctcagctcactgcaacctccacctcccgtgttcaagcaattctcctgcctcagcctcccaagtgtttgggattacagtcacccc

SEQ ID NO: 574045 - DNA, 580 bp, Homo sapiens
gactgtttgagtccggggtttcaggctgcagtgaaccatgatcatgccaccgcactgcagcctgggtgacagaacaaaaccctgtctctagaaaraaaaaaaaagaaatccaagtttttatcaccttctgagagtaatcaacattcaggaggaacagagaagaacaaaagaccactgaatggttgagggtgggttgctggttaggttcagtggccagctgagtagtatctgaaaaattcattagtaaaattatggcactaggggtgagtcatgcagtcgaaggatgaatactaaatccagtacaaacacccatggtctttctttacatgaattccagtgaaaaatttctaagtgcctaaaatagcaagcggtctgaaatgatggcagcagtttattaaagactgaaaaaagaggccaggcacggtggctcacacctgtaatcccagcactttaggagtccaagaccagtggatcacaaggtcaggagttcaagaccagcctgtccaacatgctgaaaccccgtatctacagaaaatacaaagcttagccgggcatggtgacatgtgcctgtagtcccagc

SEQ ID NO: 574046 - DNA, 437 bp, Homo sapiens
ctaatatcaattctgatttttaaaaagctaattagaaaaagaattaattatagaaccaataagaggtttgaatagttacaagctattcaaaggagaattcaaaaaaccattcaggtatgaggccataaagtatgatgaaataaatttcattaatatattttaaaataaactgattagacaggcaacaacacctgggcacgggtctcctcacctccagcaacacaaacccaatcacgcagctatggggttgcaaaggctgcatagtgacaaacagactgctctgagctgagatttctttacttgtatctgtattctgagaccgggtctcactctgtcactctggctgcaatgcaggggtgcactcatagctaactgcagccgtgacctcctgggctccggggatcctcytgcctcaccctcaccatagctatggctac

SEQ ID NO: 574047 - DNA, 597 bp, Homo sapiens
caatgacttcatcaatcatgcctgcataatgaagcgttcataagcgcccttaacaactggagttggagaatgtctgggttgctgaacacaagggagataccaggaaggtaacatgcacaatagaggacatggaagttctgtacccctctcgacataccttgccctgtgtgtgtttttttttttttttttttgagacagagtctggctctgtctcccagcctagagtgccatggcacaatcgtggctcactgcgaactatgcctccctatctcaagccccatcctctcatcctctcacctcagcctcctgagtagctagaattataggcactgagtagctagaactatagataactgtgcctggctaatttttagaaaaatctttttgtagagatgcattttcaccttgttacccaggctggtcttaatctcctgagcacttaagcgatgctcccgcctcagtctcccaaagtgctgaaattacaggcatgagccactgtgcccagcatgtacatctctttcactgkctgtttctgagatttagcctttaaaatgaaccagtaaaagaaaataaattggtgagatgcagtggttcatg

SEQ ID NO: 574048 - DNA, 597 bp, Homo sapiens
caatgacttcatcaatcatgcctgcataatgaagcgttcataagcgcccttaacaactggagttggagaatgtctgggttgctgaacacaagggagataccaggaaggtaacatgcacaatagaggacatggaagttctgtacccctctcgacataccttgccctgtgtgtgtttttttttttttttttttgagacagagtctggctctgtctcccagcctagagtgccatggcacaatcgtggctcactgcgaactatgcctccctatctcaagccccatcctctcatcctctcacctcagcctcctgagtagctagaattataggcactgagtagctagaactatagataactgtgcctggctaatttttagaaaaatctttttgtagagatgcattttcaccttgttacccaggctggtcttaatctcctgagcacttaagcgatgctcccgcctcagtctcccaaagtgctgaaattacaggcatgagccactgtgcccagcatgtacatctctttcactggctgtttctgagatttagcctttaaaatgaaccagtaaaagaaartaaattggtgagatgcagtggttcatg

SEQ ID NO: 574049 - DNA, 496 bp, Homo sapiens
tatattttttaagtgataagacttgaaagttgaaattattctttgatccaagggcaccagaatgaatgttgggttagtaggcatgaaaacaatattcagctctttatacatctctgtaaaagcccttgagtaccaggggcattgtcagtgagcggtaatactttgaaaggaatcttatttcttgagcagtagttgtcgacagtgggcttaagatattcaataaaccatatttgtaaaccgatagtctgtcatccaggctttgttcccatttgtagagtacaagcagagctgygttttatcataattcttcagggcccttggattttcagaatagtaaatcatcattggtttcaagttaacatcaccaactgcattaggccttaataaaagagtcagcatgtcctttgaagccttaaatccaggcatcaacttctctctagctgggaacatcctggatggcatctccttctagtagaaggctgttttgtctccattg

SEQ ID NO: 574050 - DNA, 553 bp, Homo sapiens
agccataaaaagaaaaatatctggccagattcaggggcttacacctgtaatcccagtattttgggaggccaaggtgggcaggtctcttgagccccatattttgagaccagactggacaacatggcacttttggttagaagtgtttgaccataactactattccagaaaaagatctactcattagaactacaaatcataaaattataagttctacaaaaacaaatcaaccttatctaccacccagttctacccaattatatcatrttagaacagaaggtctcaccgtggactcgagagctgatacgagaaatgtcaccaccatcctgctctccacggaatcatcttcaacagactcctcatcttccatggactcctcatcttccatgggcagggtggaaactgcaacttgtgccatgatccctgtgcaaaaatgtagtaagaaattgaatggtagaaatgcagtgtcctaaactcacatccagagctgtgagagtttctcaccggctgccaaattgttttttgggtcagagaaaaaaataaaacttggtaacct

SEQ ID NO: 574051 - DNA, 445 bp, Homo sapiens
tcttgagccccatattttgagaccagactggacaacatggcacttttggttagaagtgtttgaccataactactattccagaaaaagatctactcattagaactacaaatcataaaattataagttctacaaaaacaaatcaaccttatctaccacccagttctacccaattatatcatattagaacagaaggtctcaccgtggactcgagagctgataygagaaatgtcaccaccatcctgctctccacggaatcatcttcaacagactcctcatcttccatggactcctcatcttccatgggcagggtggaaactgcaacttgtgccatgatccctgtgcaaaaatgtagtaagaaattgaatggtagaaatgcagtgtcctaaactcacatccagagctgtgagagtttctcaccggctgccaaattgttttttgggtcaga

SEQ ID NO: 574052 - DNA, 445 bp, Homo sapiens
tcttgagccccatattttgagaccagactggacaacatggcacttttggttagaagtgtttgaccataactactattccagaaaaagatctactcattagaactacaaatcataaaattataagttctacaaaaacaaatcaaccttatctaccacccagttctacccaattatatcatattagaacagaaggtctcaccgtggactcgagagctgatacgagaaatgtcaccaccatcctgctctccacggaatcatcttcaacagactcctcatcttccatggactcctcatcttccatgggcagggtggaaactgcaacttgtgccatgatccctgtgcaaaaawgtagtaagaaattgaatggtagaaatgcagtgtcctaaactcacatccagagctgtgagagtttctcaccggctgccaaattgttttttgggtcaga

SEQ ID NO: 574053 - DNA, 516 bp, Homo sapiens
tagactttcagacaaatacaatagaayagatttgagatcctacaagttagtcctcacatatatggtcaatgactgttcaacaaggtggccaagtctagtcaagggaggaaagaacagtctcttcaacagctggatgtcagtgcacaagagagaagttagacccctaccttgcagtatatacaaaaattaattctaaattaataaaagacttaaattaaggactaaaaatatgtaactcttagaagaaaacacacggtaaacctttatgacctttgagttttaagtgtattttgaaatatgacagaaaagcacagataacaaaagaaaatacacgaaaattagatttaatcaaaataaaaaaaccctttatgcatcaaaggatactatcaagggagtgaaaagacaacccataatatgtgagaaaatatgtatctgataaaatcaaaatgtgtatctgataaaagcttaatatcccacaactcaacaacagaatttctaagatcccaattaaaaaaa

SEQ ID NO: 574054 - DNA, 648 bp, Homo sapiens
gtgtggtactggaataagaccaatagactttcagacaaatacaatagaacagatttgagatcctacaagttagtcctcacatatatggtcaatgactgttcaacaaggtggccaagtctagtcaagggaggaaagaacagtctcttcaacagctggatgtcagtgcacaagagagaagttagacccctaccttgcagtatatacaaaaattaattctaaattaataaaagacttaaattaaggactaaaaatatgtaactcttagaagaaaacacacggtaaacctttatgacctttgagttttaagtgtattttgaaatrtgacagaaaagcacagataacaaaagaaaatacacgaaaattagatttaatcaaaataaaaaaaccctttatgcatcaaaggatactatcaagggagtgaaaagacaacccataatatgtgagaaaatatgtatctgataaaatcaaaatgtgtatctgataaaagcttaatatcccacaactcaacaacagaatttctaagatcccaattaaaaaaataggcaaaggacttgaacagacatttctccaaagaagatacacaaatgtctaagaaggaaaagaaaagatgctaaacaccattattcattaataaaatgcaaggcaaaa

SEQ ID NO: 574055 - DNA, 648 bp, Homo sapiens
gtgtggtactggaataagaccaatagactttcagacaaatacaatagaacagatttgagatcctacaagttagtcctcacatatatggtcaatgactgttcaacaaggtggccaagtctagtcaagggaggaaagaacagtctcttcaacagctggatgtcagtgcacaagagagaagttagacccctaccttgcagtatatacaaaaattaattctaaattaataaaagacttaaattaaggactaaaaatatgtaactcttagaagaaaacacacggtaaacctttatgacctttgagttttaagtgtattttgaaatatgacagaaaagcacagataacaaaagaaaatacasgaaaattagatttaatcaaaataaaaaaaccctttatgcatcaaaggatactatcaagggagtgaaaagacaacccataatatgtgagaaaatatgtatctgataaaatcaaaatgtgtatctgataaaagcttaatatcccacaactcaacaacagaatttctaagatcccaattaaaaaaataggcaaaggacttgaacagacatttctccaaagaagatacacaaatgtctaagaaggaaaagaaaagatgctaaacaccattattcattaataaaatgcaaggcaaaa

SEQ ID NO: 574056 - DNA, 648 bp, Homo sapiens
gtgtggtactggaataagaccaatagactttcagacaaatacaatagaacagatttgagatcctacaagttagtcctcacatatatggtcaatgactgttcaacaaggtggccaagtctagtcaagggaggaaagaacagtctcttcaacagctggatgtcagtgcacaagagagaagttagacccctaccttgcagtatatacaaaaattaattctaaattaataaaagacttaaattaaggactaaaaatatgtaactcttagaagaaaacacacggtaaacctttatgacctttgagttttaagtgtattttgaaatatgacagaaaagcacagataacaaaagaaaatacacgaaaattagattkaatcaaaataaaaaaaccctttatgcatcaaaggatactatcaagggagtgaaaagacaacccataatatgtgagaaaatatgtatctgataaaatcaaaatgtgtatctgataaaagcttaatatcccacaactcaacaacagaatttctaagatcccaattaaaaaaataggcaaaggacttgaacagacatttctccaaagaagatacacaaatgtctaagaaggaaaagaaaagatgctaaacaccattattcattaataaaatgcaaggcaaaa

SEQ ID NO: 574057 - DNA, 352 bp, Homo sapiens
gataaattcctggaaaaatacaactctcctagcttaaatcaggaagaattagataccccaagcagaccaataaagcaagcagcaagattgaaatggtaattttaaaattaccagcaaaaaaagctgagggccagacagattcacagcagarttctaccagacattcaaagaatgtcttctttcattcaaggaagaaatgataccaatcttttcatactattccacaagacagagaaagaagaaaccctcccttattcattctatgaagccagcatcaccctaataccaaaaccatggaaggacataaccaaaaaagaaaactacagaccaatatccttgatgaacgcagatg

SEQ ID NO: 574058 - DNA, 593 bp, Homo sapiens
tacgagggtctgaatttttgtccctcacttaagactgcagaacactgcttcgagggtctaaatgtctgtccttcacataggattccagaacactgctacgagggtstgaatgtttgtccttcacatagcatttcagaactgccatggtctgaatggttgtccctcacatagtattccagaacactgctatgagggtctgaatgtttgtacctcacataggattccagaacactgctacgagggtctgaaagtttgtccctcacataggattccagaagactgctgctggggtctgaatgtctgtccctcacatcggattccagaacactgctgctggggtttgaatgtatgtccctcacatagaattccagaagactgctgggagagtctaaatgtttgtccctcacataggattccagaacactgctatgagggtctgaatgtttgtccttcacataggattccagaacactccttctggggtctgaatgtttgtccttcacataggattccagagcactcctgctgtggtctcaatgtttgttaatcacataggattccagaacactgctacaaggatctgaatgtttgtc

SEQ ID NO: 574059 - DNA, 593 bp, Homo sapiens
tacgagggtctgaatttttgtccctcacttaagactgcagaacactgcttcgagggtctaaatgtctgtccttcacataggattccagaacactgctacgagggtctgaatgtttgtccttcacatagcatttcagaactgccatggtctgaatggttgtccctcacatagtattccagaacactgctatgagggtctgaatgtttgtacctcacataggattccagaacactgctaygagggtctgaaagtttgtccctcacataggattccagaagactgctgctggggtctgaatgtctgtccctcacatcggattccagaacactgctgctggggtttgaatgtatgtccctcacatagaattccagaagactgctgggagagtctaaatgtttgtccctcacataggattccagaacactgctatgagggtctgaatgtttgtccttcacataggattccagaacactccttctggggtctgaatgtttgtccttcacataggattccagagcactcctgctgtggtctcaatgtttgttaatcacataggattccagaacactgctacaaggatctgaatgtttgtc

SEQ ID NO: 574060 - DNA, 593 bp, Homo sapiens
tacgagggtctgaatttttgtccctcacttaagactgcagaacactgcttcgagggtctaaatgtctgtccttcacataggattccagaacactgctacgagggtctgaatgtttgtccttcacatagcatttcagaactgccatggtctgaatggttgtccctcacatagtattccagaacactgctatgagggtctgaatgtttgtacctcacataggattccagaacactgctacgagggtctgaaagtttgtccctcacataggattccagaagactgctgctggggtctgaatgtctgtccctcacatcggattccagaacactgctgctggggtttgaatgtatgtccctcacatagaattccagaagactgctgggagagtctraatgtttgtccctcacataggattccagaacactgctatgagggtctgaatgtttgtccttcacataggattccagaacactccttctggggtctgaatgtttgtccttcacataggattccagagcactcctgctgtggtctcaatgtttgttaatcacataggattccagaacactgctacaaggatctgaatgtttgtc

SEQ ID NO: 574061 - DNA, 593 bp, Homo sapiens
tacgagggtctgaatttttgtccctcacttaagactgcagaacactgcttcgagggtctaaatgtctgtccttcacataggattccagaacactgctacgagggtctgaatgtttgtccttcacatagcatttcagaactgccatggtctgaatggttgtccctcacatagtattccagaacactgctatgagggtctgaatgtttgtacctcacataggattccagaacactgctacgagggtctgaaagtttgtccctcacataggattccagaagactgctgctggggtctgaatgtctgtccctcacatcggattccagaacactgctgctggggtttgaatgtatgtccctcacatagaattccagaagactgctgggagagtctaaatgtttgtccctcacataggattccagaacactgctatgagggtctgaatgtttgtccttcacataggattccagaacactccttctggggtctgaatgtttgtccttcacataggattccagagmactcctgctgtggtctcaatgtttgttaatcacataggattccagaacactgctacaaggatctgaatgtttgtc

SEQ ID NO: 574062 - DNA, 580 bp, Homo sapiens
ggtgtgggcacagtgccacatcttccatcactttctgatatatcccaacaccactgaagagacagcctggagagagtgcaagaggaaggctgagaaggatgagatggtgagtgctggcttctttctgaccctcagcacacccccacgtggtgaccatcaacctttaggggtgggagagcaagactgatggcttcaaatacttccccaagaagatgggcacaggccactcagctcaacctcacaggcaatgagttgacatgcaagcagatgacagtgacaggcttttagaaagagcttcagaaggcggccagtttttcttcagcctcagccaggccttggaacttgactaggccatccacttcaccagagatgccttcaagaacatcagtgagctccttgccaatccgtccaggaaggacctggacccagccacggacctgttagtgctgtctcagggacaccagaccaacatcctggacatyatcctcatacacaaggaagctcttaccacagtcatggagaacaggcaacatgtggcagaagggaagacacaggtacagaggctgatggcatcattatc

SEQ ID NO: 574063 - DNA, 566 bp, Homo sapiens
ggcacaggccactcagctcaacctcacaggcaatgagttgacatgcaagcagatgacagtgacaggcttttagaaagagcttcagaaggcggccagtttttcttcagcctcagccaggccttggaacttgactaggccatccacttcaccagagatgccttcaagaacatcagtgagctccttgccaatccgtccaggaaggacctggacccagccacggacctgttagtgctgtctcagggacaccagaccaacatcctggacatcatcctcatacacaaggaagctcttaccacagtcatggagaacaggcaacatgtggcagaagggaagacacaggtacagaggctgatggcatcattatcacaggaacaggatttctttggccactttggctgaaattcaccacttccatccaatccactcaagcgagagacttgaaatcacagatggascatttcttgcaacaggagatactattttttcaaaaagtcacctaaaatttgatagtgttggatgactagctattcgattgtggtctttttccagttcaagggtactttcta

SEQ ID NO: 574064 - DNA, 631 bp, Homo sapiens
gggtaatgggtagaggttggaagagtttggagggctccaaagaagacagacagatgagaacatttttggacyatcttagagactggttaaatggctgtgacaagaattctgacaaaaacatggacagtgaaggccaggctgagggggcctcagataaaaataagaagctttctggaaaatgtctcccttttggatatggaaagcttacacaatgcctgtaccatcattgtaccttagacacagtgaacttgctttttatttcagagactcgtaggcaaaagagaatgtagccttgacccagatgagactttggactttgtaactttgagttaatgctgaaatgagttaagactttgggagactgctggcaaggcatgactgtattttgcaatgtgagaaggacatgagatttgtggggtcagggacagaataatacggtttttctctatgccccttccaaaactcatgtgaaagtacactccctaatgttagagttggggcctaggtggaaaaagctttaatcataaaggagtgggagtggatccttcacaaatggcaaagcaccaagcccttaatgccatcctcctgatagtgagtgagttctcatgagatctagtagtttaaaaggctg

SEQ ID NO: 574065 - DNA, 631 bp, Homo sapiens
gggtaatgggtagaggttggaagagtttggagggctccaaagaagacagacagatgagaacatttttggactatcttagagactggttaaatggctgtgacaagaatkctgacaaaaacatggacagtgaaggccaggctgagggggcctcagataaaaataagaagctttctggaaaatgtctcccttttggatatggaaagcttacacaatgcctgtaccatcattgtaccttagacacagtgaacttgctttttatttcagagactcgtaggcaaaagagaatgtagccttgacccagatgagactttggactttgtaactttgagttaatgctgaaatgagttaagactttgggagactgctggcaaggcatgactgtattttgcaatgtgagaaggacatgagatttgtggggtcagggacagaataatacggtttttctctatgccccttccaaaactcatgtgaaagtacactccctaatgttagagttggggcctaggtggaaaaagctttaatcataaaggagtgggagtggatccttcacaaatggcaaagcaccaagcccttaatgccatcctcctgatagtgagtgagttctcatgagatctagtagtttaaaaggctg

SEQ ID NO: 574066 - DNA, 631 bp, Homo sapiens
gggtaatgggtagaggttggaagagtttggagggctccaaagaagacagacagatgagaacatttttggactatcttagagactggttaaatggctgtgacaagaattctgacaaaaacatggacagtgaaggccaggctgagggggcctcagataaaaataagaagctttctggaaaatgtctcccttttggatatggaaagcttacacaatgcctgtaccatcattgtaccttagacacagtgaacttgctttttatttcagagactcgtaggcaaaagagaatgtagccttgacccagatgagactttggactttgtaactttgagttaatgctgaaatgagttaagactttgggagactgctggcaaggcatgactgtatyttgcaatgtgagaaggacatgagatttgtggggtcagggacagaataatacggtttttctctatgccccttccaaaactcatgtgaaagtacactccctaatgttagagttggggcctaggtggaaaaagctttaatcataaaggagtgggagtggatccttcacaaatggcaaagcaccaagcccttaatgccatcctcctgatagtgagtgagttctcatgagatctagtagtttaaaaggctg

SEQ ID NO: 574067 - DNA, 631 bp, Homo sapiens
gggtaatgggtagaggttggaagagtttggagggctccaaagaagacagacagatgagaacatttttggactatcttagagactggttaaatggctgtgacaagaattctgacaaaaacatggacagtgaaggccaggctgagggggcctcagataaaaataagaagctttctggaaaatgtctcccttttggatatggaaagcttacacaatgcctgtaccatcattgtaccttagacacagtgaacttgctttttatttcagagactcgtaggcaaaagagaatgtagccttgacccagatgagactttggactttgtaactttgagttaatgctgaaatgagttaagactttgggagactgctggcaaggcatgactgtattttgcaatgtgagaaggacatgagatttgtggggtcagggacagaataatacggtttttctctatgccccttccaaaactcatgtgaaagtacactccctaatgttagagtyggggcctaggtggaaaaagctttaatcataaaggagtgggagtggatccttcacaaatggcaaagcaccaagcccttaatgccatcctcctgatagtgagtgagttctcatgagatctagtagtttaaaaggctg

SEQ ID NO: 574068 - DNA, 272 bp, Homo sapiens
tctgagaggacaaaggtaaaggaagggccagagtggctgcagagatggtcacagtctatgggctgcacaggatgaaggaggccagggaacaggcagggtgggcagttggggttcagggagaggcaggtgcatgctgggaggtcagaccctgtgagggctttgggggcgtcaggttgggtaggctcsaggcactctcactcacataggattccataacactgctacaaggctctgagtgtttctccctcacataggattccagaacactgctg

SEQ ID NO: 574069 - DNA, 272 bp, Homo sapiens
tctgagaggacaaaggtaaaggaagggccagagtggctgcagagatggtcacagtctatgggctgcacaggatgaaggaggccagggaacaggcagggtgggcagttggggttcagggagaggcaggtgcatgctgggaggtcagaccctgtgagggctttgggggcgtcaggttgggtaggctcgaggcactctcactcacataggattccakaacactgctacaaggctctgagtgtttctccctcacataggattccagaacactgctg

SEQ ID NO: 574070 - DNA, 390 bp, Homo sapiens
gcggatcagcggccggagcctttggcggactctgcgtggacttggagctcacggcgtcttgcgacttggaggcggattcagaggacaggacagaacacttgggcaagtgaatctctgtctgtctgtctgtctgtctgtgtgtctgtctcattggttggttgatttccattttcttaaggggcacatacctcacaccgcacacacacagacacacacacacgcacacacacgcacacactcacacacacgcacacacactccttccttctgcgagttagaamattagtaggggcccctgggagctgcaggtttcctaatcatgtctgcacctaagaacagtagggtcttgtctggctcttcttatgaacggtcccccagcccggactcccc

SEQ ID NO: 574071 - DNA, 367 bp, Homo sapiens
gtctggatagcatatttttatgattagtgtctgcatagcatattttttctcatactttgtttgtgtctttgtgtttaaattgtgtctctgtggatgccatattgttgggtcttgccttcctctcaggtctggcagtctctgtcttaagtagagtatttgtccagttacattgtaactaatcattgctaaggttggatttaggtctgccatttttctasttattttctatttgtttgtttattatttttaagacagggtcttgctctgtcacccagactgtagtgcaatggtgcaatcttggctcgctgcaacctctgcctcccaggcccaaccaatcctcacttgatccccctgagtagctgggact

SEQ ID NO: 574072 - DNA, 367 bp, Homo sapiens
gtctggatagcatatttttatgattagtgtctgcatagcatattttttctcatactttgtttgtgtctttgtgtttaaattgtgtctctgtggatgccatattgttgggtcttgccttcctctcaggtctggcagtctctgtcttaagtagagtatttgtccagttacattgtaactaatcattgctaaggttggatttaggtctgccatttttctagttattttctatttktttgtttattatttttaagacagggtcttgctctgtcacccagactgtagtgcaatggtgcaatcttggctcgctgcaacctctgcctcccaggcccaaccaatcctcacttgatccccctgagtagctgggact

SEQ ID NO: 574073 - DNA, 609 bp, Homo sapiens
gatttttttttttatcttggaaaactctatacccattcaacaactattaattcccccttccttccacctcctggcaagtactattctactttgtgtttctaaaactttggcttatatacctagggttatataatatttgttgttttgtaagtaggttccatgttatatgtcagatgtgtcaggattttcttcctttctatggctgaataatatttcttcatatatatatatatattttctctctctctctctmtatatatatatccttttgtttatccatctattcctggatggacgttttggtttcttccacttgtggctgtgtaatgctcctgtgaacacaggtgtgcacatatctgttggagttcctgctactagttattctgtctctgtagaagttggatgcctggatcatatggtcattttattttattttttgtgaggagccagttcatatttccaccaatagtgttcaagggtttcagtttcacctgcacttgttactttctgttgggttagaagtgatgtcccattgtggtttctatttgcatttctttaatgactagtgatgttacacatcttctcatatatctcatgtatctgttggct

SEQ ID NO: 574074 - DNA, 609 bp, Homo sapiens
gatttttttttttatcttggaaaactctatacccattcaacaactattaattcccccttccttccacctcctggcaagtactattctactttgtgtttctaaaactttggcttatatacctagggttatataatatttgttgttttgtaagtaggttccatgttatatgtcagatgtgtcaggattttcttcctttctatggctgaataatatttcttcatatatatatatatattttctctctctctctctatatatatatatccttttgtttatccatctattcctggatggacgttttggtttcttccacttgtggctgtgtaatgctcctgtgaacacaggtgtgcacatatctgttggagttcctgctactagttattctgtctctgtagaagttggatgcctggatcatatggtcattttattttattttttgtgaggagccagttcatatttccaccaayagtgttcaagggtttcagtttcacctgcacttgttactttctgttgggttagaagtgatgtcccattgtggtttctatttgcatttctttaatgactagtgatgttacacatcttctcatatatctcatgtatctgttggct

SEQ ID NO: 574075 - DNA, 587 bp, Homo sapiens
ctaattgtttctaagtttagattctgaatgagaatcagcagaggtagaccactgctgctgaggcctggggattgctggggaaaaggcaggaaaccgatacggacctgaccatggaaggtttgcgtttcacggctcccatctgggtacccaaggaacctacatgtagctcrtgtgtggagagcctactttgcccactcaaagcaattgaggatggaacagtcttggggctggagctcattatttggaatgataaccacatctgcacagagaggacctgacaagatgttgtccttccatgtatatctgggaatcctctgtagggtctctctgtaaggacaggggcagtgttggctccttggcctctagttagcctcacaagtagtctagtaaaggctttgcaaacttgtcaccatctgtggacattctggccagctcttgttttcaccctactgacttcttcagacactaggcttttgctttagaccattcatggtttttcttcctcttcaaatcagtaatcaataaatactcttcaagtcaataaatttccactcctttaggaaaccctgatcttctggtcacaccaa

SEQ ID NO: 574076 - DNA, 587 bp, Homo sapiens
ctaattgtttctaagtttagattctgaatgagaatcagcagaggtagaccactgctgctgaggcctggggattgctggggaaaaggcaggaaaccgatacggacctgaccatggaaggtttgcgtttcacggctcccatctgggtacccaaggaacctacatgtagctcatgtgtggagagcctactttgcccactcaaagcaattgaggatggaacagtcttggggctggagctcattatttggaatgataaccacatctgcacagagaggacctgacaagatgttgtccttccatgtatatctgggaatcctstgtagggtctctctgtaaggacaggggcagtgttggctccttggcctctagttagcctcacaagtagtctagtaaaggctttgcaaacttgtcaccatctgtggacattctggccagctcttgttttcaccctactgacttcttcagacactaggcttttgctttagaccattcatggtttttcttcctcttcaaatcagtaatcaataaatactcttcaagtcaataaatttccactcctttaggaaaccctgatcttctggtcacaccaa

SEQ ID NO: 574077 - DNA, 505 bp, Homo sapiens
aggtgggttttgctgtacttgccctgacagcacacgggagtgcagcacacacaccaacccacaccaactgccattgaagacagagccttggtgggcacagaaccaagaaccccatccctgccagcacctcacccttgagctaatgctgtgcagagaaaaagggacattcttataccctgagcgaccactgtttctttgaggggcacagagaaggcaccatggtctgcactggccagcagctcaccctgaaccaacactacctccagtgcaacacacacacagcaggggagccctggcccacaccccagctgtcttgcctccaccactgggtgaacgcccgcagagtgaagggaattttgcatccactagcattccgccacagttrccacacttcggtcccctcagtgcagtggactccaaacctcgaggagccagagaacaaagttggggcctaagacaagttccctagagttaaagcacacagtccaggaattgggagctgcac

SEQ ID NO: 574078 - DNA, 386 bp, Homo sapiens
accttactggcttataaaaaacaaccaccattttatttgtttgaagttctgtggatctgcattttggtgtggtggattcasctgggtagttgatatatttgtgttgcctggatcacaaaaaggccttagtcacctggtgccttgactgagcctggttggtttaagatagtttccttcacaatctggtggtttgtggtgactcttggctaggccctgtgtctccaacagggtagctccagacctcttcacaatttctcccaaaaagggaagaaccaatggatatttgcatcacattttccattgtccattcactggacaagtcagatggaaaagcccaatttattgtcagagcataatatgagggcttggatagaaggaaaagtgtt

SEQ ID NO: 574079 - DNA, 525 bp, Homo sapiens
gtaaggttactggtacattgttacatctcagataattaaaaccttgaaaaactcatgagagatcacaagtagaaccttgatctgaaacggcatgtagcgatttatattgagtattaggttaaaaatgcaagaatggagcatagttaatattttacgttaaagctaaaactataattgcctacttmaaattttcagttaattagtttgtcactttttgttcttaaccaagaaatcaactagttttagtccataaacagttagaactgatgcacacatccgtttctccttactcattttaaacagctatctgaaataggaagtgtaatataatctttaaagaatctgaaaacatgacagaaatgtttaaactataaacatatattgtatatgttagcatattgtatacattgcatattaacataagctagaatcattgacataaatttatataaacaaaaggtgtaaaatatgacagtgttcttcttgatttttgtctttgcatatttctttattggcctttgtcaa

SEQ ID NO: 574080 - DNA, 616 bp, Homo sapiens
gcatattgtatacattgcatattaacataagctagaatcattgacataaatttatataaacaaaaggtgtaaaatatgacagtgttcttcttgatttttgtctttgcatatttctttattggcctttgtcaaatgtgacccactaactcctgaatgctttctctctccccattgattcctaaggatatcaccacagtgttggccagatgcacaggtcacaggggactgaatctcatcaccccacaaacataccattcaggttttgccaagaatgacactgtaaatgtaacraagcttccgtgcttgttagtgaacaccaactcagctcctctcctgtattcagaaatcagcatgagatgaaaacaacaagcaggccaggcacggtggctcacgcctgtaatcccagcactttgggaggacgaagcatgtggatcacctgaggtcgggagttcgagaccaccctgatcaaaacagagaaaccccatctctactaaacatacaaaattagctgggcatggtggcaaatgcctgtaataccagctactcaggagctgaggcaggagaattgcttgaacccgggaggtggaggctgcagtgagccgagatcacaccactg

SEQ ID NO: 574081 - DNA, 616 bp, Homo sapiens
gcatattgtatacattgcatattaacataagctagaatcattgacataaatttatataaacaaaaggtgtaaaatatgacagtgttcttcttgatttttgtctttgcatatttctttattggcctttgtcaaatgtgacccactaactcctgaatgctttctctctccccattgattcctaaggatatcaccacagtgttggccagatgcacaggtcacaggggactgaatctcatcaccccacaaacataccattcaggttttgccaagaatgacactgtaaatgtaacaaagcttccgtgcttgttagtgaacaccaactcagctcctctcctgtattcagaaatcagcatgagatgaaaacaacaagcaggccaggcacggtggctcacgcctgtaatcccagcactttgggaggacgaarcatgtggatcacctgaggtcgggagttcgagaccaccctgatcaaaacagagaaaccccatctctactaaacatacaaaattagctgggcatggtggcaaatgcctgtaataccagctactcaggagctgaggcaggagaattgcttgaacccgggaggtggaggctgcagtgagccgagatcacaccactg

SEQ ID NO: 574082 - DNA, 540 bp, Homo sapiens
acaccagactggcacatgtatacatatgtaactaactggcacattatgcacataaaccctaaaacttaaagtataataataataataataataataaaataaaattaaaaaatgaaaaatttgtttgccttgtaaataaactaccaaaaaaaaggaaaaacaagaggcagattatttgtggagataagtcttccccctatcaatgagtaaagatttttgccctttaaaaattttttaagtcatgattttaggtaaatgaatgacttacgttgaygtggaattctatttcataacatcaagtgtttaaacctttaatatatttaataggcttcccaaaatcaaattgcaacttcaaaattttatgttctgacctctaactttgggatactacagaggcccctgaagcacccaaaagagaggtaaacaggactatttaacatgttaagtcacatggctagcactgtcaaaataaaaaataatgttgaaccttctttaggttatattcagtgtatgtcatcaatccattctaaatttgtgtag

SEQ ID NO: 574083 - DNA, 540 bp, Homo sapiens
acaccagactggcacatgtatacatatgtaactaactggcacattatgcacataaaccctaaaacttaaagtataataataataataataataataaaataaaattaaaaaatgaaaaatttgtttgccttgtaaataaactaccaaaaaaaaggaaaaacaagaggcagattatttgtggagataagtcttccccctatcaatgagtaaagatttttgccctttaaaaattttttaagtcatgattttaggtaaatgaatgacttacgttgacgtggaattctatttcataacatcaagtgtttaaacctttaatatatttaatasgcttcccaaaatcaaattgcaacttcaaaattttatgttctgacctctaactttgggatactacagaggcccctgaagcacccaaaagagaggtaaacaggactatttaacatgttaagtcacatggctagcactgtcaaaataaaaaataatgttgaaccttctttaggttatattcagtgtatgtcatcaatccattctaaatttgtgtag

SEQ ID NO: 574084 - DNA, 540 bp, Homo sapiens
acaccagactggcacatgtatacatatgtaactaactggcacattatgcacataaaccctaaaacttaaagtataataataataataataataataaaataaaattaaaaaatgaaaaatttgtttgccttgtaaataaactaccaaaaaaaaggaaaaacaagaggcagattatttgtggagataagtcttccccctatcaatgagtaaagatttttgccctttaaaaattttttaagtcatgattttaggtaaatgaatgacttacgttgacgtggaattctatttcataacatcaagtgtttaaacctttaatatatttaataggcttcccaaaatcaaattgcaacttcaaaattttatgttctgacctctaactttgggatactacagaggcccctgaagcacccaaaagagaggtaaacaggactatttaacatgttaagtcacatggctagcactgtcaaaatamaaaataatgttgaaccttctttaggttatattcagtgtatgtcatcaatccattctaaatttgtgtag

SEQ ID NO: 574085 - DNA, 317 bp, Homo sapiens
cacgtcagcaatcccagcactttgggaggccaaggccagtggatcacttgaggtcaggagtttgagaccagcctggccaacggtgaaaccccacctctactaaaaatgtaaaaattagtaaaaattagccgggtgtggtggtwtgtgcctgtaatcccagctactctggaggctgaggcaagagaattgtttgaacccaggaggtggaggttgcagtgagccaagattgtgccactgcactccaacctaggtaacagagtgagactctgtctcaaaaaaaagcccaaaagtttaataaatagaccaactggtttata

SEQ ID NO: 574086 - DNA, 531 bp, Homo sapiens
gtgtgtctcatctgccaaacgtccctcccttcctcacactctgacactcaggaatagggtagatggtgtgtccaggcagtgtcaggccacctcactttctcctttgagacggcccagagcgtttggtgtgagtgtggagctgggaacctggagcctgaggccaactgtctctccctgtgtcttggaggaaaggccatgtctcaaaaaaacccccagggcctgacctctgggcacacatgcagggagggagggtctatgagctgagggggacattgtaatgagactttgagccccgttgctcawgggcctggtcagtggaccatggtcagagatgacctggtcatcaggacctagtcatgtgggacctgatcagcaggggcctggttagtggcggcctcctcagtaaaggcctcatcagtggggacctgttgacctaatcattggaagcctggtcagtggggggacctagtcagtggtggccttattagtggggcctgatcagttggaacataaacaatgaaaaactggttg

SEQ ID NO: 574087 - DNA, 531 bp, Homo sapiens
gtgtgtctcatctgccaaacgtccctcccttcctcacactctgacactcaggaatagggtagatggtgtgtccaggcagtgtcaggccacctcactttctcctttgagacggcccagagcgtttggtgtgagtgtggagctgggaacctggagcctgaggccaactgtctctccctgtgtcttggaggaaaggccatgtctcaaaaaaacccccagggcctgacctctgggcacacatgcagggagggagggtctatgagctgagggggacattgtaatgagactttgagccccgttgctcaagggcctggtcagtggaccatggtcagagatgacctggtcatcaggacctagtcatgtgggacctgatcagcaggggcctggttagtggcggcctcctcagtaaaggcctcatcagtggggacctgktgacctaatcattggaagcctggtcagtggggggacctagtcagtggtggccttattagtggggcctgatcagttggaacataaacaatgaaaaactggttg

SEQ ID NO: 574088 - DNA, 483 bp, Homo sapiens
gatgctgtggtctgaatgtttgtccctcacatagaattccggaacactgctacaagggtctgaatgtttgtccttcacataccattccagaacactgctgccgtggtctgaatgtatgtccctcacataggattccagaacactgctactaggttctgaatgtttttcccacacctaggattccagaacacttctgctggtgtctgaatggttgttcctcacrtatgattccaggacacggctatgagagtcttaatgtttgtccttcacataggattctagaacactgctcccgtggtctgaatgtttgtccttcacatagcattccagaacactgctgctggggtctgaatgtctgcccctcaaatcagattccagagcactgctgctggggtttgaatgtctttccctcacatagaattccagaacacggctgggagggtctgaatgtttgtccctcacatgggataccagaacactgct

SEQ ID NO: 574089 - DNA, 483 bp, Homo sapiens
gatgctgtggtctgaatgtttgtccctcacatagaattccggaacactgctacaagggtctgaatgtttgtccttcacataccattccagaacactgctgccgtggtctgaatgtatgtccctcacataggattccagaacactgctactaggttctgaatgtttttcccacacctaggattccagaacacttctgctggtgtctgaatggttgttcctcacgtatgattccaggacackgctatgagagtcttaatgtttgtccttcacataggattctagaacactgctcccgtggtctgaatgtttgtccttcacatagcattccagaacactgctgctggggtctgaatgtctgcccctcaaatcagattccagagcactgctgctggggtttgaatgtctttccctcacatagaattccagaacacggctgggagggtctgaatgtttgtccctcacatgggataccagaacactgct

SEQ ID NO: 574090 - DNA, 606 bp, Homo sapiens
tctttcctctctctgtcttgcttctactcctgccatatgaaacatttcattgctgcttggccttctggtataattgggaggcttcctgagtccccctacaagcagaaaccactatgctttctttacagcstgaagaactgtgagtcaattagacctcttttctttatgtagatacagaaaattaatgctgtgaagtgaagttatgaaatgacttctaggtgtttcccccattctcttggctattagcgctgagcttctttcaatgcaaatattggaggccatcttgatgtttcccctgataatggacttttcttcttttaccacattgccaggctgcagcaaagatagctgacagtgtagacgcaggttccaaattgggtagtggccagaggttagagagtttggagagcttggaagaagacagaaagatgagggaaagtttggaccattgcagagacttattaaatagttgtgagtaaaaggctgacagaaggatggacagtgaagaccagccttgtaaggtctcagatgaaaatgagtaacttactgggaaaaggagccaaggtttttttgttttgacttagcaaagtaattggctacacagtg

SEQ ID NO: 574091 - DNA, 606 bp, Homo sapiens
tctttcctctctctgtcttgcttctactcctgccatatgaaacatttcattgctgcttggccttctggtataattgggaggcttcctgagtccccctacaagcagaaaccactatgctttctttacagcctgaagaactgtgagtcaattagacctcttttctttatgtagatacagaaaattaatgctgtgaagtgaagttatgaaatgacttctaggtgtttcccccattctcttggctattagcgctgagcttctttcaatgcaaatattggaggccatcttgatgtttcccctgataatggactttycttcttttaccacattgccaggctgcagcaaagatagctgacagtgtagacgcaggttccaaattgggtagtggccagaggttagagagtttggagagcttggaagaagacagaaagatgagggaaagtttggaccattgcagagacttattaaatagttgtgagtaaaaggctgacagaaggatggacagtgaagaccagccttgtaaggtctcagatgaaaatgagtaacttactgggaaaaggagccaaggtttttttgttttgacttagcaaagtaattggctacacagtg

SEQ ID NO: 574092 - DNA, 606 bp, Homo sapiens
tctttcctctctctgtcttgcttctactcctgccatatgaaacatttcattgctgcttggccttctggtataattgggaggcttcctgagtccccctacaagcagaaaccactatgctttctttacagcctgaagaactgtgagtcaattagacctcttttctttatgtagatacagaaaattaatgctgtgaagtgaagttatgaaatgacttctaggtgtttcccccattctcttggctattagcgctgagcttctttcaatgcaaatattggaggccatcttgatgtttcccctgataatggacttttcttcttttaccacattrccaggctgcagcaaagatagctgacagtgtagacgcaggttccaaattgggtagtggccagaggttagagagtttggagagcttggaagaagacagaaagatgagggaaagtttggaccattgcagagacttattaaatagttgtgagtaaaaggctgacagaaggatggacagtgaagaccagccttgtaaggtctcagatgaaaatgagtaacttactgggaaaaggagccaaggtttttttgttttgacttagcaaagtaattggctacacagtg

SEQ ID NO: 574093 - DNA, 606 bp, Homo sapiens
tctttcctctctctgtcttgcttctactcctgccatatgaaacatttcattgctgcttggccttctggtataattgggaggcttcctgagtccccctacaagcagaaaccactatgctttctttacagcctgaagaactgtgagtcaattagacctcttttctttatgtagatacagaaaattaatgctgtgaagtgaagttatgaaatgacttctaggtgtttcccccattctcttggctattagcgctgagcttctttcaatgcaaatattggaggccatcttgatgtttcccctgataatggacttttcttcttttaccacattgccaggctgcagcaaagatagctgacagtgtagacgcaggttccaaattgggtagtggccagaggttagagagtttggagagcttggaagaagacagaaagatgagggaaagtttgsaccattgcagagacttattaaatagttgtgagtaaaaggctgacagaaggatggacagtgaagaccagccttgtaaggtctcagatgaaaatgagtaacttactgggaaaaggagccaaggtttttttgttttgacttagcaaagtaattggctacacagtg

SEQ ID NO: 574094 - DNA, 459 bp, Homo sapiens
tttattatctgaactgttttcaaaaattactttggcctatagaaaagatcatactgaaaaatgttactgtgaaattaattagcacatttaagcatttctgagaaacaacatgaagtactatattaagagtcattttttaggggcacgtctaaggcaaaataagaaatgaataaggcaagaaaccttaatgagatcaaacaaggatcacatttacagaaacgtttctagagtaaatataaaattataaatcatatggggatattttacgtaagtgttagcagatcaaacaagaaacaactcatatgactaatgtgactaatcattttgaataagtaacctcatttttttaaatgacacaagtttccttgggacactgaaacttttaaatcagtgatgcgaatacaaagatgaagtggatgatatattgtaaaaaaaakacatgccacattcttccataga

SEQ ID NO: 574095 - DNA, 384 bp, Homo sapiens
tggaaaccatcattctcagcaaactatcgcaaggacaaaaacccaaacaccgcatgttctcactcacaggtgggaattgaccaatgagaatacacagacacaggaagaggaacatcacacactggggcctgttgttgggtggggagagaggggagggataacattaggagatatacctaatgttaaatgatgagttaatgagtgcagcacaccaacatggcacatgtatacatatgtaactaacctgcacattktgcacatgtaccctaaaccttcaagtataataaaaaaagaaaaaataaataaataaaaatacaaaaattagtcaagcatggtggtgtgtgtggagtcccagctattcaggaggctgaggcaggagaattc

SEQ ID NO: 574096 - DNA, 384 bp, Homo sapiens
tggaaaccatcattctcagcaaactatcgcaaggacaaaaacccaaacaccgcatgttctcactcacaggtgggaattgaccaatgagaatacacagacacaggaagaggaacatcacacactggggcctgttgttgggtggggagagaggggagggataacattaggagatatacctaatgttaaatgatgagttaatgagtgcagcacaccaacatggcacatgtatacatatgtaactaacctgcacattgtgcacatgtaccctaaaccttcaagtataataaaaaaagaaaaaataaataaataaaaatacaaaaattagtcaagcatggtggtgtgtgtgkagtcccagctattcaggaggctgaggcaggagaattc

SEQ ID NO: 574097 - DNA, 419 bp, Homo sapiens
ggaattctccatgagggctccaccactgcagcaggcttctgcctgtacatccagacttttcatatatcctgtgaaatctaggtggagactcccaggcctcagttcttgtcctctgtgtagccacaggcttaaaaccacatggaagccactaaagtttgtggccaacatgctctgtagcagcagcccaagctgtacccaggcccctttgagccatggctgaacctggagaagctgggatgcaaggagcagtgtcccgaggcttcacagggcagcagtgccctggctctggcccatgaaaccattcttccctcctaggcctcgagaggggctgctgtgaaggtctctgaaataccttcaaggccgtgtccccattgtcttggctaatagcacttggyttctttttaatttatgcaaatttc

SEQ ID NO: 574098 - DNA, 518 bp, Homo sapiens
agatcttttatatacataaggaaagatgttgtcctccaatgaccctaacatgttccagctttccacagggctgtgagtcattccatgataatggcatatcactgaataattatatgtattttggatatgcatatgcatgtgactgctttggtaaaagaagtatggatgactcattgtttagctgaaatatttaataacttaaagtcattattagcaaattattggccaaaaattctgtgctgtcccactatagctcatgcatatgatgataacgaagatgaytgagaccatcctggctaacacggtgaaaccccacctctactaaaaataccaaaaaaaaaaaattagccgggcatggtggcaggcgcctgttagtcccagctactcaggaggctgaggcaggagaatggtgtgaccctgggaggcggagcttgcagtgagccgagattgcgccactacactccagcctgggtgacaaagcaagactccatctcaaaaaaaaaaacaaacaaaagaaa

SEQ ID NO: 574099 - DNA, 518 bp, Homo sapiens
agatcttttatatacataaggaaagatgttgtcctccaatgaccctaacatgttccagctttccacagggctgtgagtcattccatgataatggcatatcactgaataattatatgtattttggatatgcatatgcatgtgactgctttggtaaaagaagtatggatgactcattgtttagctgaaatatttaataacttaaagtcattattagcaaattattggccaaaaattctgtgctgtcccactatagctcatgcatatgatgataacgaagatgactgagaccatcctggctaacacggtgaaaccccacctctactaaaaataccaaaaaaaaaaaattagccgggcatggtggcaggcgcctgttagtcccagctactcaggaggctgaggcagkagaatggtgtgaccctgggaggcggagcttgcagtgagccgagattgcgccactacactccagcctgggtgacaaagcaagactccatctcaaaaaaaaaaacaaacaaaagaaa

SEQ ID NO: 574100 - DNA, 493 bp, Homo sapiens
aatcccattctttagagtaatatagtctatttgtcatagtggttgcttctgtaatacaaattgattgatatgtgattggtaactatgagactgaggtcaatacaatggggaagtagcattagttcagacgtaatctttcccggcatattaactttttgaaataatcagaaacaaacttctcacaacctaagggaaagctttagcactatatgaagatattaggaaaacactgagaatcctgcagaagtgtcctcttattaatgaaaatgagtggcttcaagaacagtttcacattccacagtattaatctgtcagctataacgatgtttgcagaccaagaggctgcaaaaacatttctctttgaatttttttttttttttttttttttgagacagagtctcactttgttgcccaggctggagtgcagtggcacgatctcagctcactgcaacctctgcctcccargttcaagcaattttcccgcctcagcctc

SEQ ID NO: 574101 - DNA, 372 bp, Homo sapiens
ctacaaaacgagagattcaaaactgctcaatgaaaagataggttcaactctgtgagttgaatgcacacctccaaagaagtttctcagaatgcttccgtgtagtttttatgtgaagatatttacttttccacaattgtcccaaagctctaaaatrtccacttgcagaccctctaaaagagtgtttcagaattgctcaatcaaaggaaaggttcaattctgtgtgaccaatgcactcatcacagagaagtttgtctgaatgcttctgtgtagaatggatttgaagataattccttttccaccacagtccgcaaagggctaaaaatatccacttgccgattccacaaaaagagatatttaaaactgatcaatcac

SEQ ID NO: 574102 - DNA, 214 bp, Homo sapiens
gataggttcaacttggtaattkgaaagcacacatgacaaacaatttctgagaatgtttctgtgtagtttttaagggaagatatttgatattcaaatgtaggcctcaaatcgctccaaatatccacttgcagattgtacaaaaagagagattcaagactggtcactcaaaagagaggtccagctctgtgagttgaatgcaaacctcacaaagatg

SEQ ID NO: 574103 - DNA, 214 bp, Homo sapiens
gataggttcaacttggtaatttgaaagcacacatgacaaacaatttctgagaatgtttctgtgtagtttttaagggaagatatttgatwttcaaatgtaggcctcaaatcgctccaaatatccacttgcagattgtacaaaaagagagattcaagactggtcactcaaaagagaggtccagctctgtgagttgaatgcaaacctcacaaagatg

SEQ ID NO: 574104 - DNA, 214 bp, Homo sapiens
gataggttcaacttggtaatttgaaagcacacatgacaaacaatttctgagaatgtttctgtgtagtttttaagggaagatatttgatattcaaatgtaggcctcaaatcgctccaaatatccacttgcakattgtacaaaaagagagattcaagactggtcactcaaaagagaggtccagctctgtgagttgaatgcaaacctcacaaagatg

SEQ ID NO: 574105 - DNA, 214 bp, Homo sapiens
gataggttcaacttggtaatttgaaagcacacatgacaaacaatttctgagaatgtttctgtgtagtttttaagggaagatatttgatattcaaatgtaggcctcaaatcgctccaaatatccacttgcagattgtacaaaaagagagattcaagactggtcactcaaaagakaggtccagctctgtgagttgaatgcaaacctcacaaagatg

SEQ ID NO: 574106 - DNA, 270 bp, Homo sapiens
ttcaactctgtgacttcagtgtccacctcacaaagatgtttctcagaatgcttctgtgtggtttttatataaagatatctccttctccaaaatggatctcaaagttctccaaatattcacttccagattctatggaaagattgtctcaaaattgctcaatcaaaccaaaggttcaactctgtgmgatgaacgcacacatcacaaagaagtttctcagaatacttctgtgtagtttttatttgagtatagttccttttccaccacagacca

SEQ ID NO: 574107 - DNA, 292 bp, Homo sapiens
cacaacaggcctcaaagctctccaaatatctgcaagcagagtctacaaaaagagagattcaaaactgctcaatgaaaagataggttcaactctgtgagttgaatgcacacctccaaagaagtttctcagaatgcttccgtgtagtttttatgtgaagatatttacttttccacarttgccccaaagctctaaaatgtccacttgcagaccctctaaaagagtgtttcagaattgctcaatcaaaggaaaggttcaattctgtgtgaccaatgcactcatcacagagaagttt

SEQ ID NO: 574108 - DNA, 292 bp, Homo sapiens
cacaacaggcctcaaagctctccaaatatctgcaagcagagtctacaaaaagagagattcaaaactgctcaatgaaaagataggttcaactctgtgagttgaatgcacacctccaaagaagtttctcagaatgcttccgtgtagtttttatgtgaagatatttacttttccacaattgycccaaagctctaaaatgtccacttgcagaccctctaaaagagtgtttcagaattgctcaatcaaaggaaaggttcaattctgtgtgaccaatgcactcatcacagagaagttt

SEQ ID NO: 574109 - DNA, 563 bp, Homo sapiens
gcctgtttgcaaacagtaggtctgggtttgacctattggaatacaccatgcaagaaactactcaaaaaggaaattccacttcatgaaccaggaaagttgtccaatagcctgtcccatctgagggtcctttacatgattagatactcaatatctcagttccacaacgttatttacagacatgttttcaaatattttgtgtaaatggcagaagggagctgggagcagtccccctgcctccattacttttttagctttcacatatgttcttgacttgtacagaaaatcccaaattttaaatgattccccaactcagccagttctatagatgaggccagatcatttttgagaattaagataagagtgggaacttgttaaaacaaaaatgaaaataaaacccacctcactcctgtatctctccctgattagacattaaagaggtgaatcactgcctctggctgcttcagccttccaggaatgaagagccatccaccttgcccttctcagccagccacaggcagctcttctgattcttccctcrcagcagtggcggtccagcccctccc

SEQ ID NO: 574110 - DNA, 656 bp, Homo sapiens
gaaaacttttacactactggtgggaatgtaaactagtacaaccactatggaaaacagtatggaaattccttaaagaaccaaaagtagatctacagtttgatccagcaatcccattactgggtatccatccaaaggaaaagaagtcattatatgaaaaagacacatgcacacacatgtttatagcagcacaatttgcaactgcaaagatatggaaacaacctaagtgcctattgaccaacaagtggataaagaaaatgtggtcaatatatacaccatggactatctctcagccataaaaagaaacaaagtaatgtcttttgcagcaacttggatggagccagagcscattatttgaagtgaaggaatgggaaactaaatgccatatgttaccacttataagtgggagctaagctatgaggacacaaaacatagagtaatgtaatggactttggggactcggaggtggaggctaggagggggttgggggataaaagactacatattgggtacagtgtacaccactcggatgatgggtgccctaaaaactcagaaaatcagtctggttgattgcatatcctgatagatttttttttcctaattctaccatgttttaggcaactcttgccttgaattcatacaagtttttactattattt

SEQ ID NO: 574111 - DNA, 598 bp, Homo sapiens
ctgggtgcagtggctcacacctgtaatcccagcactttgagaggccaaggcgggcrtatcaccaggtcaggagattgagacgatcctggctaacatggtgaaacctcgtctctactaaaaatacaaaaaaattagccgggcatggtggcgggcacctgtagtcccagctattcgggaggctgaggcaggagaatggcatgaacccgggaggcggagcttgcagtgagcccagatggcaccactgcactccggcctgggcaacagatcgagattctgtctccaacaaaaaagaaaaaaaaaaaaaagaaagcgactaatatcctatgactgaacccaaacataaggaggagttattctttttttttgtctatgtgttaattagagtcaatgtgattttcattctggatatggacttcatactgtcaaagagcaatactgtaattaggtcactttccatgttttcagagacagtgcctgtatcataaaaactgtactgtttttgataagtttcactgagaaacttcaagatatttatacttcattactatctactaaagtgaaatcttcattcttacacagtatacgctggaaataataa

SEQ ID NO: 574112 - DNA, 648 bp, Homo sapiens
cactggtaattcaggagcatgttgtttaatttccatgtgtttgtatagttttttgaatgttttaaggcttgttttgtcgttttctttcagactgaagaactctctttagcacttttttgtagaaaagacctggtgttgatgaagttcttcagcttttgtctggtaaaatatttatttctccttcatgttttaagaagattttcactggatatactattctagcataaaatattttttccttcagcactttaaatatgtcatgccacttcctcctggcctgtaaggtttccaccaaaaagtctgctgccaaacatattggagctccattgtatgttatttgtttcctttctcttgctgcttttagaatcctttctttatccttgacctttgggaatttgattattgaatgtctagaggtggttttctttgggttaaatctatctggtgttttataactctcttgtacttgaatgttgatatcttttccaggtttggaaagttctctgttattatccctttgaataaactttatatcccgatgtmtctctccacatcctctttaaggccaatagctcctaaatttgcccttttgaggctattttttctatatcttgtaggcctgctttattgctttttattcttttgtct

SEQ ID NO: 574113 - DNA, 634 bp, Homo sapiens
cagtggcatgatctcagctcactgaaacctctgcctcccgggttcaagcaattcttgtgcctcagccttccaagtagctgtgattacagactcccaccaccacaccagctaatttttgtatttttagtagagatggggttccaccatgttggccaggctggtcttgaactcctggcctcaagtgatccacccrcctcagccacccaaagtgctgggattaacaggcgcgagccactgtacccagcctgtattggatatttccaatagcttttccaacttccagatcccacatttccataaaacaaaaatcctgcctcataatttcatagctcctaaatttatattccatagccttaaacataatttcagatattctgttcaccctttcttgtgaaccttgctatcatttaaactgagtatttccaactcctctgtcaactgatttcccccagttggtaggcaacgtatcatagtggttaagagtacaaaattaggatcttaactgcctggatttaaatcatagcttcaccactaatattctgcatgactttaagcaagttatttctctgttctttaatttcgtcatctttaaaatgggataattacaatcctatctcatagcttaaccgagaca

SEQ ID NO: 574114 - DNA, 539 bp, Homo sapiens
aacatttaccttgggggaaagtcatgttgtatcactactggytatgtggagaaggtttaggtctgctagcttctgactgcctggatttcaaagccaagttatcttgcttttcaagtaggggagtctctctttctgtctctctctctctcacacacacacccccctccaatgcctcaggaaaggacaaaatcaaaacaatgagaggagaataataaaaatacatagattaggaaaagaataatggtctctatttccccatctctaattgagggctggactacaggctctgcagttgtgattttaagtacccaacgttctgaacaatgacacaacagtctgccacttttacctcacgacaggagagcagagggaagctaagagaaccttctgccaagctagaaaatgtatagccaggcagtggttggcaatggagggaaccctgacttggggatgaatgacggtccccataaggcacctgcaaacgtaagctgtaacccttagagaacccagaaaatgatatctcccctggaacgtttgcg

SEQ ID NO: 574115 - DNA, 282 bp, Homo sapiens
agtcaatttcctagaaagctatgaaagaaaataatgtaaaagatgaatagaaatgcaattgcaggagagtgttcgctttgctgggcctaagtcatctmattttaaaatatatctttgatagtgaaatattttgaattcttgaagaaatgaggttttagattttaaaacacttttcttaaattttgtttgctagacatctttcaatatcattcccacatcttttatctctacctcccaaattattttatatgatgctctatgctaatgataaaactctaaaaa

SEQ ID NO: 574116 - DNA, 636 bp, Homo sapiens
aggcttaattcatgcaacacaaacactccagctgcaatcagagcaatgaaagaaaaacttttgggaggaatgttgcagaacaaggtataagaaatgttgagactggggagttctcctcctcctcactgattgtgttacaactgaatgtggtgtgtaactcaagagccatgtttcaagtaagtatttgcttgattgtctcacctcaaagaccatgtttcttaagggcaaagactataccttatgacatctgagtttttgcaatgccacgttaagataaaagcaaaatcatcatcaaaatctagtgccacctaaaatattcccacagttattcctggccgcctaaaatattcttcttctgccgcctaaaatattcccacaattattcctgggaatcctggaggatrttacacatgagctcaaggatacttctggctcattagatttaccaccagacctaattttttcattgttgcttctttggctttgatcctttctccacgtgtaccaccatgtctactgacgctgtatcattttcacacatcactgctgattctgctggttaccgacactatgccgccttgcttgggcagcatcatctccacttgtagcactgttgatgaattggctgaatgactg

SEQ ID NO: 574117 - DNA, 537 bp, Homo sapiens
agagaaatatatttaaaacattcaacaaaaattacctgyaccttgaaacaagtagcatgtcagttttatatctctgacaatgggtcccatgattataaataaaataaacattgtagtgcttttcaattgaacactagcaaaatcaaatattagagctgtggctagtctttttcctaattgttatggtaccattcaaatcaaagggaaggactggtttctaaataattctgtattcattatctgaaatatgtgtttatatattgcaaataaaacataatgtaaagttgactttctaaagaaaaataaatatttccagagaaaaatgaatacttgagaagagtttttgaagaaataatatctgaaataagaatcagttcttgaaaccaacaaacaaaaaatcttaaagtttggtaatagaaatgccaggtattaaaggctggttatccatccaacgtcatatcaaatttcttacatcagaatatattacatgcacttggtgattatgtaaaaatctcttcagtgaccttatttaaaaaa

SEQ ID NO: 574118 - DNA, 656 bp, Homo sapiens
ctgtgagggacggtgccatgagggactgtgctatacggcccagatactatgcttttcccatggtttttgcaacccatagaccaggagattccctcgtgtgcaagcaccaccagggccctgggtttcaagcacaaaattgggcagctgtttgggcagacactgagctagctgcaggattttttttttcttttttgcactccaggggtacctggaaacccagcgagacagaaccattcactcccctggaaaaggggctgaagccagggagccaagtggtcttgctcagagggtcccactcccatggagcccagcaagctaagaaccactggcttgaaattctcactgacagcacagcagtctgaagttaacccrggacaatcgagcttggtgggaggaggggtgtccgccattactgaggctttagtaggcggttttcccctcacagtgttaactctgattgtgcagaactcaccacagtgtagccaaacacctggggccagactgcctctctagattcctcctcactgggcagggcatctctgaaagaaaggcagcagccccagtaaaggacttgtagaaaaaattcccatctccctgctacagagcacctgggggaaggggcagctgtgggcacagcttcagcagacttaaatgat

SEQ ID NO: 574119 - DNA, 609 bp, Homo sapiens
gtttggagtggacctccagcaaataccagcagagctgtggaagaggggcctgactgttagaaggaaaactgacaaacagaaagcaataacatcaatctcaatgaaaaagatgcccacagaaaaaccccatccaaaagccatcagcatcaaagatcaaaggtagaaaaatccacaaagatgaggaaaaatcagcgctaaaatgctgaaaattccaaaaaccagaatctctcttttccaaaygatcacaactcctctccagcaggggcacaaaactggacatagaatgactttgacaaattgacagaaataggcttaagaaggtgagcaataacaaacttctgtaagctaaaagagcatgttgtaaccccatgcaaggaagctaagaaccttgataaaaggttacaggaactgctaactagattaaccactttagagaagaacataaataacctgatggagctgaaaaacacagtgcgagaacttcgtgtagcatacacaactatcaatagctgaactgatcaaggggaagaaaggatatcagagattgaagatcaacttaataaaataaaccatgaagacaagattagagaaaaaagaatgaaaaagaat

SEQ ID NO: 574120 - DNA, 609 bp, Homo sapiens
gtttggagtggacctccagcaaataccagcagagctgtggaagaggggcctgactgttagaaggaaaactgacaaacagaaagcaataacatcaatctcaatgaaaaagatgcccacagaaaaaccccatccaaaagccatcagcatcaaagatcaaaggtagaaaaatccacaaagatgaggaaaaatcagcgctaaaatgctgaaaattccaaaaaccagaatctctcttttccaaatgatcacaactcctctccagcaggggcacaaaactggacatagaatgactttgacaaattgacagaartaggcttaagaaggtgagcaataacaaacttctgtaagctaaaagagcatgttgtaaccccatgcaaggaagctaagaaccttgataaaaggttacaggaactgctaactagattaaccactttagagaagaacataaataacctgatggagctgaaaaacacagtgcgagaacttcgtgtagcatacacaactatcaatagctgaactgatcaaggggaagaaaggatatcagagattgaagatcaacttaataaaataaaccatgaagacaagattagagaaaaaagaatgaaaaagaat

SEQ ID NO: 574121 - DNA, 609 bp, Homo sapiens
gtttggagtggacctccagcaaataccagcagagctgtggaagaggggcctgactgttagaaggaaaactgacaaacagaaagcaataacatcaatctcaatgaaaaagatgcccacagaaaaaccccatccaaaagccatcagcatcaaagatcaaaggtagaaaaatccacaaagatgaggaaaaatcagcgctaaaatgctgaaaattccaaaaaccagaatctctcttttccaaatgatcacaactcctctccagcaggggcacaaaactggacatagaatgactttgacaaattgacagaaataggcttaagaaggtgagcaataacaaacttctgtaagctaaaagagcatgttgtaaccmcatgcaaggaagctaagaaccttgataaaaggttacaggaactgctaactagattaaccactttagagaagaacataaataacctgatggagctgaaaaacacagtgcgagaacttcgtgtagcatacacaactatcaatagctgaactgatcaaggggaagaaaggatatcagagattgaagatcaacttaataaaataaaccatgaagacaagattagagaaaaaagaatgaaaaagaat

SEQ ID NO: 574122 - DNA, 609 bp, Homo sapiens
gtttggagtggacctccagcaaataccagcagagctgtggaagaggggcctgactgttagaaggaaaactgacaaacagaaagcaataacatcaatctcaatgaaaaagatgcccacagaaaaaccccatccaaaagccatcagcatcaaagatcaaaggtagaaaaatccacaaagatgaggaaaaatcagcgctaaaatgctgaaaattccaaaaaccagaatctctcttttccaaatgatcacaactcctctccagcaggggcacaaaactggacatagaatgactttgacaaattgacagaaataggcttaagaaggtgagcaataacaaacttctgtaagctaaaagagcatgttgtaaccccatgcaaggaagctaagaaccttgataaaaggttacaggaactgctaactagattaaccactttagagaagaacataaataacctgatgragctgaaaaacacagtgcgagaacttcgtgtagcatacacaactatcaatagctgaactgatcaaggggaagaaaggatatcagagattgaagatcaacttaataaaataaaccatgaagacaagattagagaaaaaagaatgaaaaagaat

SEQ ID NO: 574123 - DNA, 610 bp, Homo sapiens
gtgtctttatggtagaatgatgagagcttcttttcatgtgcttgttggccatatgatgcatcgttttaagagctccttctttctttttttttcttcaggaactcgtattggcttatttacaaaacaaactctaatctaactgtatattgtgctgttaaaggcagccagttgatttataaaataaaacctgaacagatattgcacagaatcttgatggaggggtgacccttacttctatttggcaccataaactgtaatggtgtttctcamcttttttaatttagtttttctcatgattactaaagtatttttacaaattatttttgtgtgtgattgattacacagcaattatttttgataattttcttactaaattataatttttgggctactttttaaagaaattcctggaaaagatagtagtaatttaaagataatgaatattttccagcttttaaatttgcaacaataattttagatttatagaagagctacagaggtagtatagagagtttgaatgatgatgcaggtgaccctaataataacatcttatataaccacagcacaattgccaaaacaaattaacattggtacattactatgagttaaa

SEQ ID NO: 574124 - DNA, 610 bp, Homo sapiens
gtgtctttatggtagaatgatgagagcttcttttcatgtgcttgttggccatatgatgcatcgttttaagagctccttctttctttttttttcttcaggaactcgtattggcttatttacaaaacaaactctaatctaactgtatattgtgctgttaaaggcagccagttgatttataaaataaaacctgaacagatattgcacagaatcttgatggaggggtgacccttacttctatttggcaccataaactgtaatggtgtttctcaacttttttaatttagtttttctcatgattactaaagtatttttacaaattatttttgtgtgtgattgattacacagcaattatttttgataattttcttactaaattataatttttgggctactttttaaagaaattcctggaaaagatagtagtaatttaaagataatgaatattttccagcttttraatttgcaacaataattttagatttatagaagagctacagaggtagtatagagagtttgaatgatgatgcaggtgaccctaataataacatcttatataaccacagcacaattgccaaaacaaattaacattggtacattactatgagttaaa

SEQ ID NO: 574125 - DNA, 559 bp, Homo sapiens
agtctaatttatcaatgcttttagcattgtatctaaaaactttctccacccaacgtagcacattttccgctgtttttttttttttcctcacaagttttacagcttaacattttacatttaagtctaggatccatcgtgagttaatttctacgtaagatgtgaagtaggggacaaggttcatgtttttgcaaatagaggaattgttcccgcacaatttttgaaaagacgatccttwctctatttaattgccttgacaactttatcaaaaataaattgatcagatttgtgtaagtcaatttccaaaacctatgtacatttcattcacctatatgtctaatcttttcaccaatacaacagtgtcttaattatgagccttataaaaaggttcaaaatctggtagaattggtcctgtaattttgtgggggttttttctcgtaactatttaagctattctactacctttaactttccatgtatgttttaggttcagtttatcatattaacaagaaagcatgctggaattttgattgagattgacttgaatctattgatcaaattt

SEQ ID NO: 574126 - DNA, 559 bp, Homo sapiens
agtctaatttatcaatgcttttagcattgtatctaaaaactttctccacccaacgtagcacattttccgctgtttttttttttttcctcacaagttttacagcttaacattttacatttaagtctaggatccatcgtgagttaatttctacgtaagatgtgaagtaggggacaaggttcatgtttttgcaaatagaggaattgttcccgcacaatttttgaaaagacgatcctttctctatttaattgccttgacaactttatcaaaaataaattgatcagatttgtgtaagtcaatttccaaaacctatgtacattycattcacctatatgtctaatcttttcaccaatacaacagtgtcttaattatgagccttataaaaaggttcaaaatctggtagaattggtcctgtaattttgtgggggttttttctcgtaactatttaagctattctactacctttaactttccatgtatgttttaggttcagtttatcatattaacaagaaagcatgctggaattttgattgagattgacttgaatctattgatcaaattt

SEQ ID NO: 574127 - DNA, 559 bp, Homo sapiens
agtctaatttatcaatgcttttagcattgtatctaaaaactttctccacccaacgtagcacattttccgctgtttttttttttttcctcacaagttttacagcttaacattttacatttaagtctaggatccatcgtgagttaatttctacgtaagatgtgaagtaggggacaaggttcatgtttttgcaaatagaggaattgttcccgcacaatttttgaaaagacgatcctttctctatttaattgccttgacaactttatcaaaaataaattgatcagatttgtgtaagtcaatttccaaaacctatgtacatttcattcacctatatgtctaatcttttcaccaatacaacastgtcttaattatgagccttataaaaaggttcaaaatctggtagaattggtcctgtaattttgtgggggttttttctcgtaactatttaagctattctactacctttaactttccatgtatgttttaggttcagtttatcatattaacaagaaagcatgctggaattttgattgagattgacttgaatctattgatcaaattt

SEQ ID NO: 574128 - DNA, 549 bp, Homo sapiens
ttcacatattttaagatattttctctgtacacatactttgaataaattcattctatagctccatgacacactactaatatgttcaatttcaaaggctaatctatgcctgtacacccaggatatacctgattagtatgctacaacagaaagaaaggattggttggcaataaatcattctttgtaagaagggtacacaaacagtttccattcwttaagtggtaaccttgacttgttccacaaggacacacctggagagctgacaggactaggactatattctgtgccctaatttggagagtaggttaattgagccttggtttagacttgtataatggatatttgacagtcgctttggccacttagcagtttgggtttagagaatcatgtgtcttccaccttttgcaatagatatcagatatttacacagcttgtcctataactaggacttgcattggctccatcaatcctgtgtacccattttggattctgaacaaaatttagtgatataaggaacaatgtagaatttggaatttatcctgagaatggtgg

SEQ ID NO: 574129 - DNA, 564 bp, Homo sapiens
atcttatcccacatagtttaaggaygattaccccaagaatcaatagtaccttattgacatagtaatttattatgtggacccatcttattctttccagttgaaaagactttatttatcatgggaagaaagaaagcagctgtttatttttcttgacaaaataaatgaaggttcagcatgtctggagaaagctgcttcctgagatgaaagctggctgtgaagagacactggccctctacagctagatgacagctttcagtgacatcaatttcatttaaatacactgtaacaattctgtgatattatatttaaagtacttttagacctctctgtaattcaaaaaatgcaggcgtcttgtgactttatcttttccaactagaggagactatggcaatgaagttcatacttttaggtgtactgtgagttactgttacagaatccaaaaccagagaaacaagaattggggtgtaacctactattttcagttgcaatgaagaaacatgctgaagctcatttttaaccaaaaatcatcaacgacatagatttttttcccactcactcacaatt

SEQ ID NO: 574130 - DNA, 508 bp, Homo sapiens
gcagctatacataaattatatggcttcagtttaaactagaaaggtcaactaccattggcattccatgtaataaagtcatcaaaagtttgtgttcttattaaagttctatctctgaagaaatatagctggtgatgacattcttttctcaagctagaagtagagagttcagttttcggaaggccaaatgacctggacataattttcctattatagtgcagttgacattttattctgggaacatgtgtttactagtaaaatgtgttcacatgacatacacctaccctattacatattaagagtctaaaagtgtttattgttagttgatagccttagatagtccctgtraagtaattttgttttttcacagtctgaacatcaagatttaatatagcagaaatacatgtctcaaaacttttgaaaaaatattcaaaaagactatttctaaagccatggtgatttttaatgatttgatctatagttttcttatgtgaatcatacatttcctttt

SEQ ID NO: 574131 - DNA, 508 bp, Homo sapiens
gcagctatacataaattatatggcttcagtttaaactagaaaggtcaactaccattggcattccatgtaataaagtcatcaaaagtttgtgttcttattaaagttctatctctgaagaaatatagctggtgatgacattcttttctcaagctagaagtagagagttcagttttcggaaggccaaatgacctggacataattttcctattatagtgcagttgacattttattctgggaacatgtgtttactagtaaaatgtgttcacatgacatacacctaccctattacatattaagagtctaaaagtgtttattgttagttgatagccttagatagtccctgtgaagtaattttgttttttcacagtctgaacatcaagatttaatatagcagaaatacrtgtctcaaaacttttgaaaaaatattcaaaaagactatttctaaagccatggtgatttttaatgatttgatctatagttttcttatgtgaatcatacatttcctttt

SEQ ID NO: 574132 - DNA, 591 bp, Homo sapiens
  misc_feature 210, 234: n = A,T,C or G
ctacaggggccaagtggtggcattcaaccactaaagcaagttgagagtagctactataatggacagcagagataaagtgagagtcacgatagtctaatttgttttgacatgtggtgttggctaatcaccgtgttcctagaagtgaaatagcrggaaagctactacattctttcctgatcccatatagcaaaaaacttccatgttctgttnaatagagtctaccttgatgcatanaacagaatcatagccaccccaatcaatgcccagacttaagtcaatttacagacccagaaccccttgaatgaaatgtaggtcagggctccttgaggaaagaccctgatacactacagataatttatactgttaatctttctcccatccttccccaaaggtaattgtgtattggagaaggggaaataatcagacttttcagagactagtggacattgactgtgaactgccattgattcaaggagacctaaactgtcattgtggctgtccagttttgttgcgggaagtcaggaaccccaaatggagggaccagctgaagccatggcagaggaatataaattgtgaagatttcatggacat

SEQ ID NO: 574133 - DNA, 591 bp, Homo sapiens
  misc_feature 210, 234: n = A,T,C or G
ctacaggggccaagtggtggcattcaaccactaaagcaagttgagagtagctactataatggacagcagagataaagtgagagtcacgatagtctaatttgttttgacatgtggtgttggctaatcaccgtgttcctagaagtgaaatagcgggaaagctactacattctttcctgatcccatatagcaaaaaacttccatgttctgttnaatagagtctaccttgatgcatanaacagaatcatagccaccccaatcaatgcccagacttaagtcaatttacagacccagaaccccttgaatgaaatgtaggtcagggctccttgaggaaagaccctgatacactacagataatttatactgttaatctttctcccatccttccccaaaggtaattgtgtattggagaaggggaaataatcagacttttcagagactagtggacattgactgtgaactgccattgattcaaggagacctaaactgtcattgtggctgtccagttttgttgcgggaagtcaggraccccaaatggagggaccagctgaagccatggcagaggaatataaattgtgaagatttcatggacat

SEQ ID NO: 574134 - DNA, 591 bp, Homo sapiens
  misc_feature 210, 234: n = A,T,C or G
ctacaggggccaagtggtggcattcaaccactaaagcaagttgagagtagctactataatggacagcagagataaagtgagagtcacgatagtctaatttgttttgacatgtggtgttggctaatcaccgtgttcctagaagtgaaatagcgggaaagctactacattctttcctgatcccatatagcaaaaaacttccatgttctgttnaatagagtctaccttgatgcatanaacagaatcatagccaccccaatcaatgcccagacttaagtcaatttacagacccagaaccccttgaatgaaatgtaggtcagggctccttgaggaaagaccctgatacactacagataatttatactgttaatctttctcccatccttccccaaaggtaattgtgtattggagaaggggaaataatcagacttttcagagactagtggacattgactgtgaactgccattgattcaaggagacctaaactgtcattgtggctgtccagttttgttgcgggaagtcaggaaccccraatggagggaccagctgaagccatggcagaggaatataaattgtgaagatttcatggacat

SEQ ID NO: 574135 - DNA, 647 bp, Homo sapiens
gactattgtcaaaaagatgaaagataagtgttattgaagatgtggagaaaagggaatmcttgtatactattaagtgagaacgtaaatttgtacagccgttatgcaaaaccacatagaggttcctcaaaatattaaagacagaattaccatgtgcttcagcaattccacttctgagtatatatccaaaggaattcaaatcaatatgaacaactgatgtctgcactcccatgttcactgcagcactattgataatagtcaatacatggagtctaccttagtgtccatcaaccaatgaatgcataaagaaaaatatggtgtgtttacaaaattgaatattattcagactttaaaaagcagaaaattctgtcatttgcaacacatgaatgaacctggaggaagttctgctaaataagccaggcacagacagcaaatactacatgatatcatttacatgtggaatctaaaaaagttgaactcatagaaatagagagtagaatgatggttatgaaagcaaaggataagagaggaaatgtggagatgttggtcaaaaggtacaaagtttcaatgagagaggaggaataaatgtttgagttttatatggcacaatgactacagttaatattttatatatttcaaaattgctgagc

SEQ ID NO: 574136 - DNA, 647 bp, Homo sapiens
gactattgtcaaaaagatgaaagataagtgttattgaagatgtggagaaaagggaatacttgtatactattaagtgagaacgtaaatttgtacagccgttatgcaaaaccacatagaggttcctcaaaatattaaagacagaattaccatgtgcttcagcaattccacttctgagtatatatccaaaggaattcaaatcaatatgaacaactgatgtctgcactcccatgttcactgcagcactattgataatagtcaatacatggagtctaccttagtgtccaycaaccaatgaatgcataaagaaaaatatggtgtgtttacaaaattgaatattattcagactttaaaaagcagaaaattctgtcatttgcaacacatgaatgaacctggaggaagttctgctaaataagccaggcacagacagcaaatactacatgatatcatttacatgtggaatctaaaaaagttgaactcatagaaatagagagtagaatgatggttatgaaagcaaaggataagagaggaaatgtggagatgttggtcaaaaggtacaaagtttcaatgagagaggaggaataaatgtttgagttttatatggcacaatgactacagttaatattttatatatttcaaaattgctgagc

SEQ ID NO: 574137 - DNA, 647 bp, Homo sapiens
gactattgtcaaaaagatgaaagataagtgttattgaagatgtggagaaaagggaatacttgtatactattaagtgagaacgtaaatttgtacagccgttatgcaaaaccacatagaggttcctcaaaatattaaagacagaattaccatgtgcttcagcaattccacttctgagtatatatccaaaggaattcaaatcaatatgaacaactgatgtctgcactcccatgttcactgcagcactattgataatagtcaatacatggagtctaccttagtgtccatcaaccaatgaatgcataaagaaaaatatggtgtgtttacaaaattgaatattattcagactttaaaaagcagaaaattctgtcatttgcaacacatgaatgaamctggaggaagttctgctaaataagccaggcacagacagcaaatactacatgatatcatttacatgtggaatctaaaaaagttgaactcatagaaatagagagtagaatgatggttatgaaagcaaaggataagagaggaaatgtggagatgttggtcaaaaggtacaaagtttcaatgagagaggaggaataaatgtttgagttttatatggcacaatgactacagttaatattttatatatttcaaaattgctgagc

SEQ ID NO: 574138 - DNA, 509 bp, Homo sapiens
cttccttaatgaagctgcagaccttactggtgagtgttacagcacttaaaggtgttatgtccagagtttgttycttcagatatatccagtgtttcttccttctggcaggttcatggtgttgctcactttaagaatgaagctgctgaccttaatggtgagtgttacagcacttgaaggtgttatgtgcagagttttttccttcagatgtgtccagagtttcttccttcttgcaggttcgtggtcttgctcacttccttaatgaagctgcagaccttaatggtgactgttacagcacttaaaggtgttatgtccagagtttttttccttcagatgtgtcctgagtgtcttccttctggcaggttcatggtcttgctcacttcactaatgaagctgcagaccttactggtgagttttacagcacttaaaggtgttatgtccagagtttgttcctccagatgtgtccagggtttctgtcttctggcaggtacatggtcttgctcacttcaaga

SEQ ID NO: 574139 - DNA, 509 bp, Homo sapiens
cttccttaatgaagctgcagaccttactggtgagtgttacagcacttaaaggtgttatgtccagagtttgtttcttcagatatatccagtgtttcttccttctggcaggttcatggtgttgctyactttaagaatgaagctgctgaccttaatggtgagtgttacagcacttgaaggtgttatgtgcagagttttttccttcagatgtgtccagagtttcttccttcttgcaggttcgtggtcttgctcacttccttaatgaagctgcagaccttaatggtgactgttacagcacttaaaggtgttatgtccagagtttttttccttcagatgtgtcctgagtgtcttccttctggcaggttcatggtcttgctcacttcactaatgaagctgcagaccttactggtgagttttacagcacttaaaggtgttatgtccagagtttgttcctccagatgtgtccagggtttctgtcttctggcaggtacatggtcttgctcacttcaaga

SEQ ID NO: 574140 - DNA, 585 bp, Homo sapiens
ccagcgtttcttccttctgacargttcatggtgttgctcacttcaagagtgaagctgcagaccttactgttgagttttaaagcacttaaagctgttatgtccagagtttgttccttcagatgtgtccagagtttcttccttctggcaggttcgtggtcttgctcacttctttaatgaagctgcagtccttactggtgagtgttacagcacttaaaggtgttatgtccagagtttgtttcttcagatgtgtccagagtttcttccttctggcagtttcgtggtcttcctcacttcaagaacgaagctgcagaccttactggtgagtgttacagcacttaaagttgttatgtccagagattgttccttcagatgtgtccagagtgtcttccttctggcaggttcatggtcttgctcacttcactaatgaagctgcagaccttactggtgagggtggcagcacttaaaggtgttatgaccagaggttgttccttcagatgtgtccagggtttctgtcttctggcaggttcatggtcttgctcacttcaagaatgaagctgccgacctttgtggtgagtgttacagcac

SEQ ID NO: 574141 - DNA, 585 bp, Homo sapiens
ccagcgtttcttccttctgacaagttcatggtgttgctcacttcaagagtgaagctgcagaccttactgttgagttttaaagcacttaaagctgttatgtccagagtttgttccttcagatgtgtccagagtttcttccttctggcaggttcgtggtcttgctcacttctttaatgaagctgcagtccttactggtgagtgttacagcacttaaaggtgttatgtccagagtttgtttcttcagatgtgtccagagtttcttccttctggcagtttcgtggtcttcctcacttcaagaacgaagctgcagaccttactggtgagtgttacagcacttaaagktgttatgtccagagattgttccttcagatgtgtccagagtgtcttccttctggcaggttcatggtcttgctcacttcactaatgaagctgcagaccttactggtgagggtggcagcacttaaaggtgttatgaccagaggttgttccttcagatgtgtccagggtttctgtcttctggcaggttcatggtcttgctcacttcaagaatgaagctgccgacctttgtggtgagtgttacagcac

SEQ ID NO: 574142 - DNA, 585 bp, Homo sapiens
ccagcgtttcttccttctgacaagttcatggtgttgctcacttcaagagtgaagctgcagaccttactgttgagttttaaagcacttaaagctgttatgtccagagtttgttccttcagatgtgtccagagtttcttccttctggcaggttcgtggtcttgctcacttctttaatgaagctgcagtccttactggtgagtgttacagcacttaaaggtgttatgtccagagtttgtttcttcagatgtgtccagagtttcttccttctggcagtttcgtggtcttcctcacttcaagaacgaagctgcagaccttactggtgagtgttacagcacttaaagttgttatgtccagagattgttccttcagatgtgtccagagtgtcttccttctggcaggttcatggtcttgctcacttcactaatgaagctgcagaccttactgstgagggtggcagcacttaaaggtgttatgaccagaggttgttccttcagatgtgtccagggtttctgtcttctggcaggttcatggtcttgctcacttcaagaatgaagctgccgacctttgtggtgagtgttacagcac

SEQ ID NO: 574143 - DNA, 519 bp, Homo sapiens
ccttctcctgtggaagtggattcctgagaaatgagctgtagtgattgttatatctcttctggatctagccactcactaagtctaccaggctctgggctggtacttggggttgtctgcagagagtcctgtaatgtgaaccatctgtgggtctctcagccatggatatcaacacctgttatggtggaggttgcagaggagtgaaatagaccctgtgagggttcttggctttggtggtttaatgtgctgtttttgtgctggttggcttcctttctggaggtggcactttctagagagcatcagctgtggtagtatggggaggaataggtggtgggtggagccctagaactcccaagagtatatgtcctttgtcttcagttgcsagggtgggtaaggaaggaacattgagtggacgcagggctaggcatatccgagctcagactccttgggcaggtcttgctgtggctgctgttggagggggtggcggtgaggttcccaggtcaatggagttatgttcttaga

SEQ ID NO: 574144 - DNA, 468 bp, Homo sapiens
tcatttattcatcacattatacccatgcaaatatgatcaaattgagatgcctcaatgtttcttctctgctattgtacaatttactcatttaattattcagccaatatgtaatgagtgtgtacactaaamcaaacattgagggagtggtgggtaattgattttcattgattctgttcaaaattacaaaccagaatgttatgatgaaaaagctttaatgttatgaaagtatatagcagaagtgcctgacctacatggaggatgacagagtaaagtgagaacataagagaaactcaggacccaaccttggagaagtccagcatttaaaaattgggtagaggagtatggacttataaggaaacctgaattgcagtcagagaagccttgcatggtaccagagaggcttaattaagaaagagtgcctttcaaggagagtggccagctgtgtcaaactcttctgagaggtcaaat

SEQ ID NO: 574145 - DNA, 521 bp, Homo sapiens
aggtacatagtcattagtttatccaaagtcaagatgaaggaaagaatcttaagagctgtgaggccaaagcatcaggtaatctataaaggaaaacctatcatattcaaagtagatttctcaggaaccctgcaagctagaagggattgggttcctatctttagtctccttaaacaaaactattatcacccaagmagtttgtatccagtaaaactgagcttcataaatgaagaaaagatacagcctttttcagacaaacaaatgctgagagaatttgccactaccaagccagaactataagaactgctaaaatgaactctaaatcttgaaacaaatcctggaaatgcaccaaaatagaatctccttaaagcataaatatcacatgatatgtaaaacaacaacagaatgaaaaaaacaaggtattcaggcaacaaatagcacaatgaatagaatactacctcacatcacaatactaatgtttaatgtaaatggcctaaatgctccccttaaaagatacaccatgg

SEQ ID NO: 574146 - DNA, 167 bp, Homo sapiens
acaaatgtttctaattttgatgaagcccagtacattttcttttaacactgtgcttttggtgccatatctaagaaactactgccaaatcmaaggccataaagatttattgttattttttattctaagagttttatagttttgcaattcagaaacataaaatcaaatac

SEQ ID NO: 574147 - DNA, 438 bp, Homo sapiens
gttcttacttaaaaatgggaaatacataatgcgtaaacatgaacaaagagtgtaaaatgataagacactgtagactcagaagggtgagagggtgggaaggggaagggtgatgagaaattacttagtggatacagtgtacattgttccagtgataaacacactaaaagctcagacttcactcctaccccatatacccatgtaacaaaattgcacttgcactccttaaatttatacaattttaaaaaatggttttagagttttggttctrtgattaattttataatgttttattgtggtaaagcctatgtaataagctttgccattttaaacataaaattcggaggcattaattacattcataatgttgtgcaatcatcaaaactatgtatttccaaaaagttttttcaccccaaactgaaactctgtactcattaagca

SEQ ID NO: 574148 - DNA, 438 bp, Homo sapiens
gttcttacttaaaaatgggaaatacataatgcgtaaacatgaacaaagagtgtaaaatgataagacactgtagactcagaagggtgagagggtgggaaggggaagggtgatgagaaattacttagtggatacagtgtacattgttccagtgataaacacactaaaagctcagacttcactcctaccccatatacccatgtaacaaaattgcacttgcactccttaaatttatacaattttaaaaaatggttttagagttttggttctatgattaattttataatgttttattgtggtaaagcctatgtaataagctttgccrttttaaacataaaattcggaggcattaattacattcataatgttgtgcaatcatcaaaactatgtatttccaaaaagttttttcaccccaaactgaaactctgtactcattaagca

SEQ ID NO: 574149 - DNA, 438 bp, Homo sapiens
gttcttacttaaaaatgggaaatacataatgcgtaaacatgaacaaagagtgtaaaatgataagacactgtagactcagaagggtgagagggtgggaaggggaagggtgatgagaaattacttagtggatacagtgtacattgttccagtgataaacacactaaaagctcagacttcactcctaccccatatacccatgtaacaaaattgcacttgcactccttaaatttatacaattttaaaaaatggttttagagttttggttctatgattaattttataatgttttattgtggtaaagcctatgtaataagctttgccattttaaacataaaattcggaggcattaattacattcakaatgttgtgcaatcatcaaaactatgtatttccaaaaagttttttcaccccaaactgaaactctgtactcattaagca

SEQ ID NO: 574150 - DNA, 438 bp, Homo sapiens
gttcttacttaaaaatgggaaatacataatgcgtaaacatgaacaaagagtgtaaaatgataagacactgtagactcagaagggtgagagggtgggaaggggaagggtgatgagaaattacttagtggatacagtgtacattgttccagtgataaacacactaaaagctcagacttcactcctaccccatatacccatgtaacaaaattgcacttgcactccttaaatttatacaattttaaaaaatggttttagagttttggttctatgattaattttataatgttttattgtggtaaagcctatgtaataagctttgccattttaaacataaaattcggaggcattaattacattcataatgttgtgcaatcatcaaaactatgtatttccaaaaakttttttcaccccaaactgaaactctgtactcattaagca

SEQ ID NO: 574151 - DNA, 402 bp, Homo sapiens
ctcatgtttaattagtcactgattcccatcaattttcccctatcatgtttaatagtaccaacacattatttctcttagaaaaacatgtttctagtttargttcttaatgtagcctatttttaaaatatctcaaagtttgccatacagtctttatttcttatttcttaaaatattttctacattttgatacaactaacctttctaaagcataaatatctcactttgtcacttgtctgccccaaaaaaaacataaaaatatcttcttggtctagaaagtaaaattataatgcttggcataatgtagacagaaatagaaattcccatttatcctttttctcctttgcccccacacttttcttccatgttcacatcagtacctaatgtcccagacatatggaattc

SEQ ID NO: 574152 - DNA, 402 bp, Homo sapiens
ctcatgtttaattagtcactgattcccatcaattttcccctatcatgtttaatagtaccaacacattatttctcttagaaaaacatgtttctagtttaggytcttaatgtagcctatttttaaaatatctcaaagtttgccatacagtctttatttcttatttcttaaaatattttctacattttgatacaactaacctttctaaagcataaatatctcactttgtcacttgtctgccccaaaaaaaacataaaaatatcttcttggtctagaaagtaaaattataatgcttggcataatgtagacagaaatagaaattcccatttatcctttttctcctttgcccccacacttttcttccatgttcacatcagtacctaatgtcccagacatatggaattc

SEQ ID NO: 574153 - DNA, 402 bp, Homo sapiens
ctcatgtttaattagtcactgattcccatcaattttcccctatcatgtttaatagtaccaacacattatttctcttagaaaaacatgtttctagtttaggttcttaatktagcctatttttaaaatatctcaaagtttgccatacagtctttatttcttatttcttaaaatattttctacattttgatacaactaacctttctaaagcataaatatctcactttgtcacttgtctgccccaaaaaaaacataaaaatatcttcttggtctagaaagtaaaattataatgcttggcataatgtagacagaaatagaaattcccatttatcctttttctcctttgcccccacacttttcttccatgttcacatcagtacctaatgtcccagacatatggaattc

SEQ ID NO: 574154 - DNA, 402 bp, Homo sapiens
ctcatgtttaattagtcactgattcccatcaattttcccctatcatgtttaatagtaccaacacattatttctcttagaaaaacatgtttctagtttaggttcttaatgtagcctatttttaaaatatctcaaagtttkccatacagtctttatttcttatttcttaaaatattttctacattttgatacaactaacctttctaaagcataaatatctcactttgtcacttgtctgccccaaaaaaaacataaaaatatcttcttggtctagaaagtaaaattataatgcttggcataatgtagacagaaatagaaattcccatttatcctttttctcctttgcccccacacttttcttccatgttcacatcagtacctaatgtcccagacatatggaattc

SEQ ID NO: 574155 - DNA, 417 bp, Homo sapiens
gaattctatcaaattatttcatttccttacatctcatgtttaattagtcactgattcccatcaattttcccctatcatgtttaatagtaccaacacattatttctcttagaaaaacatgtttctagtttaggttcttaatgtagcctatttttaaaatatctcaaagtttgccatacagtctttatttcttatttcttaaaatattttctacattttgatacaactaacctttctaaagcataaatatctcactttgtcacttgtctgccccmaaaaaaacataaaaatatcttcttggtctagaaagtaaaattataatgcttggcataatgtagacagaaatagaaattcccatttatcctttttctcctttgcccccacacttttcttccatgttcacatcagtacctaatgtc

SEQ ID NO: 574156 - DNA, 417 bp, Homo sapiens
gaattctatcaaattatttcatttccttacatctcatgtttaattagtcactgattcccatcaattttcccctatcatgtttaatagtaccaacacattatttctcttagaaaaacatgtttctagtttaggttcttaatgtagcctatttttaaaatatctcaaagtttgccatacagtctttatttcttatttcttaaaatattttctacattttgatacaactaacctttctaaagcataaatatctcactttgtcacttgtctgccccaaaaaaaacataaaaatatcttcttggtctagaaagtaaaattataatgcttggcayaatgtagacagaaatagaaattcccatttatcctttttctcctttgcccccacacttttcttccatgttcacatcagtacctaatgtc

SEQ ID NO: 574157 - DNA, 598 bp, Homo sapiens
cactttgtcacttgtctgccccaaaaaaaacataaaaatatcttcttggtctagaaagtaaaattataatgcttggcataatgtagacagaaatagaaattcccatttatcctttttctcctttgcccccacacttttcttccatgttcacatcagtacctaatgtcccagacatatggaattcattgtttcatgaatagagccaacacattctaactaccatgcatttagtcaaaccatctggccacctggaatttcctaccatcccccataaaatttaaattaaaaaattccactgttctgtcctctctgaagatgtcyctgaacccttattgaaactcattgacatatcctttggttcccgcagcctttattgtatatgtcataatttagcacatacattactctgccgtacattttagtaagttaatgacctgtctcttttcactgataaaacagtgtcaggattttttcatttttgtattccctactggtccacagagtggtatgaacatataatttgctaagttaattttaaattgacttaaacttactggtaacttcaccaattaactgttcttttccagtattaccctta

SEQ ID NO: 574158 - DNA, 211 bp, Homo sapiens
cactagttttctaattagaataattgaggagaaatacaagattttcacagaatgaaagcaaaagtcttccaagtatgagaaaaatagaacaaaggctgtttatatccatattgattatagtgggaaggtattattgtaataaatgtgatggttattaaagcaagtcttgattttaaggaaatgttttrtcttgggactgtgacaggagatt

SEQ ID NO: 574159 - DNA, 485 bp, Homo sapiens
agactccagtaaatgaaccagggaaggaaaatatttgtgtgttttgcgagtggtattcatatgtgtataaaattcccacagcactttgggtaacaatgctctgcacacttttcctgtgctccttttatccattccyacacttccagcatttcctttgacgtttgattttctttatttttttttactccaatattttcctgtaggtttcaaacctatattttaaaatgtcaactgattctcccccccgtcttcaccacctgcatctcaaatttgacatagccataaacacattttatattttggcaaataaatctatttcttttaaagcattgcccatctcagctaatgatgataatatcaagccagtcgccaagaaaatttagagtatatataccttgactcttccttctaaatgaattattaagttcagctgtttctaccttgaattacctttctattctgccatttctcttctgtgttgctgc

SEQ ID NO: 574160 - DNA, 485 bp, Homo sapiens
agactccagtaaatgaaccagggaaggaaaatatttgtgtgttttgcgagtggtattcatatgtgtataaaattcccacagcactttgggtaacaatgctctgcacacttttcctgtgctccttttatccattcccacacttccagcatttcctttgacgtttgattttctttatttttttttactccaatattttcctgtaggtttcaaacstatattttaaaatgtcaactgattctcccccccgtcttcaccacctgcatctcaaatttgacatagccataaacacattttatattttggcaaataaatctatttcttttaaagcattgcccatctcagctaatgatgataatatcaagccagtcgccaagaaaatttagagtatatataccttgactcttccttctaaatgaattattaagttcagctgtttctaccttgaattacctttctattctgccatttctcttctgtgttgctgc

SEQ ID NO: 574161 - DNA, 485 bp, Homo sapiens
agactccagtaaatgaaccagggaaggaaaatatttgtgtgttttgcgagtggtattcatatgtgtataaaattcccacagcactttgggtaacaatgctctgcacacttttcctgtgctccttttatccattcccacacttccagcatttcctttgacgtttgattttctttatttttttttactccaatattttcctgtaggtttcaaacctatattttaaaatgtcaactgattctcccccccgtcttcaccacctgcatctcaaatttgacatagccataaacacattttatattttggcaaataaatctatttcttttaaagcattgcccatctcagctaatgatgataatatcaagccagtcgccaagaaaatttagagtatwtataccttgactcttccttctaaatgaattattaagttcagctgtttctaccttgaattacctttctattctgccatttctcttctgtgttgctgc

SEQ ID NO: 574162 - DNA, 523 bp, Homo sapiens
ttttcttgttgtaaaatttttttcttctctcagtatggcttatgtctcattgcttctattgaacatagcacaattcaagtattaatacarcgcctttataaaagttgtgaatctcagaaatgaacaagcttacctccctagttatttattaaaagttacaagtcactttttttttaacttcctaataatcttagaggggtatattttgtgttttttttgctatatcttttataaagaatatctctaatgatttgaaagttagaaccaattttctgaaggattgagcctcgctccttgaacttgtgtgtttgtgggtggcacactatgtcttttgcagacccagtacctaccccttggtctagaacatattttcctccacctgccttttaagtttttatttcagcaggggtgggtggtttgtggttgaacgaaaatagaacgggctacaaaagcccttcctgtttgatattgaatctgctatttgagtcacccttacattatgaactgactgttaattaacaca

SEQ ID NO: 574163 - DNA, 523 bp, Homo sapiens
ttttcttgttgtaaaatttttttcttctctcagtatggcttatgtctcattgcttctattgaacatagcacaattcaagtattaatacaacgcctttataaaagttgtgaatctcagaaatgaacaagcttacctccctagttatttattaaaagttacaagtcactttttttttaacttcctaataatcttagaggggtatattttgtgttttttttgctatatcttttataaagaatatctctaatratttgaaagttagaaccaattttctgaaggattgagcctcgctccttgaacttgtgtgtttgtgggtggcacactatgtcttttgcagacccagtacctaccccttggtctagaacatattttcctccacctgccttttaagtttttatttcagcaggggtgggtggtttgtggttgaacgaaaatagaacgggctacaaaagcccttcctgtttgatattgaatctgctatttgagtcacccttacattatgaactgactgttaattaacaca

SEQ ID NO: 574164 - DNA, 484 bp, Homo sapiens
atctcacagagttgaacatttcttttgattgagtagtttggaaacactctttttttgtagaatctgcaagtggacatttggaactctttgcggccaatggtagaaaaggaaatatcttcacataaaatctagacagaagcaatctgagaaacttctttgtgatgcgtgcattaatctcacagagttaaacctttcttttgattgagcagattggaaactctctttttgtagaacctgcaagtggacatttkgcagcgctttgaggcctgtggtggagaaggaaatatcttcacataaaaagtagatagaagcattctgagaaagttctctgtgatgtctgcattcatctcctggagttccaactttctttaggagaaccagttttcaaattctctttttggagaatctgcaaggggacatttcaagcaccttgaggcttaagttggaaaaggaaatatgttcacaaaaaaaaacagaagaattc

SEQ ID NO: 574165 - DNA, 452 bp, Homo sapiens
cattaatctcacagagttaaacctttcttttgattgagcagattggaaactctctttttgtagaacctgcaagtggacattttgcagcgctttgaggcctgtggtggagaaggaaatatcttcacataaaaagtagatagaagcattctgagaaagttctctgtgatgtctgcattcatctcctggagttccaactttctttaggagaaccagttttcaaattctctttttggagaatctgcaaggggacatttcaagcaccttgaggcttaagttggaaaaggaaatatgttcacaaaaaaaaacagaagaattctgagaatcttttttatgatgtgtacgytcatctaacagagttgaacctttcttttgattgcgtagtttgggaacaccctttttgtagaatcggcaagtggacatttggagcgctttgcggcctatgatagaaaagg

SEQ ID NO: 574166 - DNA, 490 bp, Homo sapiens
acacacaatataattaagaaagataataagaaacatatataatttcaagattttcarttttttttttactaagccagagaagataaatgagttaatcattcatgtcagtaagtaaatacaggatcaaaaaacatacctaatggaaggaaattaataacagaaaagtaaaaattataatctagaaaatgaaagatataaatcgattcataaatggataagacttttaagactttttttgaagaaatcatttgaaactagaataagcaagaggaatagatcaaaacaaaaaggaaaacagtgaaggtgatatacacatcctcttactgaaaattaattttaaagaactgctttgtaaacactaaaattcagagtcatcaatgtgtctggatatggattcatttttatttcttctgctcagcacttgttttatactttaaattagagtcctcaagtctttcctctgcaatggaaattttatggcatcatgtca

SEQ ID NO: 574167 - DNA, 490 bp, Homo sapiens
acacacaatataattaagaaagataataagaaacatatataatttcaagattttcaattttttttttactaagccagagaagataaatgagttaatcattcatgtcagtaagtaaatacaggatcaaaaaacatacctaatggaaggaaattaataacagaaaagtaaaaattataatctagaaaatgaaagatataaatcgattcataaatggataagacttttaagactttttttgaagaaatcatttsaaactagaataagcaagaggaatagatcaaaacaaaaaggaaaacagtgaaggtgatatacacatcctcttactgaaaattaattttaaagaactgctttgtaaacactaaaattcagagtcatcaatgtgtctggatatggattcatttttatttcttctgctcagcacttgttttatactttaaattagagtcctcaagtctttcctctgcaatggaaattttatggcatcatgtca

SEQ ID NO: 574168 - DNA, 597 bp, Homo sapiens
gaaaatgaaagatataaatcgattcataaatggataagacttttaagactttttttgaagaaatcatttgaaactagaataagcaagaggaatagatcaaaacaaaaaggaaaacagtgaaggtgatatacacatcctcttactgaaaattaattttaaagaactgctttgtaaacactaaaaytcagagtcatcaatgtgtctggatatggattcatttttatttcttctgctcagcacttgttttatactttaaattagagtcctcaagtctttcctctgcaatggaaattttatggcatcatgtcaagtatacaaatagtgaaggcattgccagtgttttcttgtgtataagtattctctaccattagaatggaaacgtcatcaaagtgggcccttagtgagagtttgctgagtggatgaatactgtccttaaatatggcttctccattctctttggactccttttggaactcctatcatacatgtattggggactttcttgactggtctttctgacttttaaatccttttatctggataaattcatcattatctcccaattgactaattctttgtgtttattgcatttacact

SEQ ID NO: 574169 - DNA, 572 bp, Homo sapiens
tataaatcgattcataaatggataagacttttaagactttttttgaagaaatcatttgaaactagaataagcaagaggaatagatcaaaacaaaaaggaaaacagtgaaggtgatatacacatcctcttactgaaaattaattttaaagaactgctttgtaaacactaaaattcagagtcatcaatgtgtctggatatggattcatttttatttcttctgctcagcacttgttttatactttaaattagagtcctcaagtctttcctctgcaatggaaattttatggcatcatgtmaagtatacaaatagtgaaggcattgccagtgttttcttgtgtataagtattctctaccattagaatggaaacgtcatcaaagtgggcccttagtgagagtttgctgagtggatgaatactgtccttaaatatggcttctccattctctttggactccttttggaactcctatcatacatgtattggggactttcttgactggtctttctgacttttaaatccttttatctggataaattcatcattatctcccaattgactaattctttgtgttta

SEQ ID NO: 574170 - DNA, 597 bp, Homo sapiens
gaaaatgaaagatataaatcgattcataaatggataagacttttaagactttttttgaagaaatcatttgaaactagaataagcaagaggaatagatcaaaacaaaaaggaaaacagtgaaggtgatatacacatcctcttactgaaaattaattttaaagaactgctttgtaaacactaaaattcagagtcatcaatgtgtctggatatggattcatttttatttcttctgctcagcacttgttttatactttaaattagagtcctcaagtctttcctctgcaatggaaattttatggcatcatgtcaagtatacaaatagtgaaggcattgccagtgttttcttgtgtataagtattctctaccattagaatggaaacgtcatcaaagtgggcccttagtgagagtttgctgagtggatgaatactgtccttaaatatggcttctccattctctttggactccttttgraactcctatcatacatgtattggggactttcttgactggtctttctgacttttaaatccttttatctggataaattcatcattatctcccaattgactaattctttgtgtttattgcatttacact

SEQ ID NO: 574171 - DNA, 597 bp, Homo sapiens
gaaaatgaaagatataaatcgattcataaatggataagacttttaagactttttttgaagaaatcatttgaaactagaataagcaagaggaatagatcaaaacaaaaaggaaaacagtgaaggtgatatacacatcctcttactgaaaattaattttaaagaactgctttgtaaacactaaaattcagagtcatcaatgtgtctggatatggattcatttttatttcttctgctcagcacttgttttatactttaaattagagtcctcaagtctttcctctgcaatggaaattttatggcatcatgtcaagtatacaaatagtgaaggcattgccagtgttttcttgtgtataagtattctctaccattagaatggaaacgtcatcaaagtgggcccttagtgagagtttgctgagtggatgaatactgtccttaaatatggcttctccattctctttggactccttttggaactcctatcatacatgtrttggggactttcttgactggtctttctgacttttaaatccttttatctggataaattcatcattatctcccaattgactaattctttgtgtttattgcatttacact

SEQ ID NO: 574172 - DNA, 584 bp, Homo sapiens
ttgctgagtggatgaatactgtccttaaatatggcttctccattctctttggactccttttggaactcctatcatacatgtattggggactttcttgactggtctttctgacttttaaatccttttatctggataaattcatcattatctcccaattgactaattctttgtgtttattgcatttacacttttttttatatataattttcatttctagagcttttattttttttttccttttttgagatggagtcttgctctgtcacccaggctgaagtgcagtggcatgatctcagttcactgcaacctcctactcctgggttcaagtgactctcctcctgcctcagcctcctctcctgcttcagcctcctgagtggctggaattacaggcatgcgcaccacactcggctaatttttgaatttttagtagagacggggtttcattatgttggtcagcctggtctagaactcctgatatcatgatctacccgcctcagcctaccaaagtgctgggattacacgtctgarccaccacgcctggctgcttttaattttttatatcaatctttactttgttctttttt

SEQ ID NO: 574173 - DNA, 413 bp, Homo sapiens
ccactaatcacacttctgtatattcaataaaatgtgcatttcttcatggatactctttgaatcatctaaatggagactctttatagaartattgaatcattaattcttccatctactgtactcctttccaacatactgtcttactgatttttcactttttcctatttatatccattttgttctactaacccgtctgtcattggccttcttctatagccaacctcaaatttcagttcacattagctgtgaacagcactcaaattgctgctgtattcttaaaatataaatttacttcataaagcaaaagtgaattatatgcatgttacaaaaaatattcctagcagagataagatgggatggtatttgctgggatgtgcagcatcgttttttccaaattaatttctctcagaatt

SEQ ID NO: 574174 - DNA, 400 bp, Homo sapiens
ttctgtatattcaataaaatgtgcatttcttcatggatactctttgaatcatctaaatggagactctttatagaaatattgaatcattaattcttccawctactgtactcctttccaacatactgtcttactgatttttcactttttcctatttatatccattttgttctactaacccgtctgtcattggccttcttctatagccaacctcaaatttcagttcacattagctgtgaacagcactcaaattgctgctgtattcttaaaatataaatttacttcataaagcaaaagtgaattatatgcatgttacaaaaaatattcctagcagagataagatgggatggtatttgctgggatgtgcagcatcgttttttccaaattaatttctctcagaatt

SEQ ID NO: 574175 - DNA, 380 bp, Homo sapiens
agaattcaccctccttcaccactaatcacacttctgtatattcaataaaatgtgcatttcttcatggatactctttgaatcatctaaatggagactctttatagaaatattgaatcattaattcttccatctactgtactcctttccaacatacygtcttactgatttttcactttttcctatttatatccattttgttctactaacccgtctgtcattggccttcttctatagccaacctcaaatttcagttcacattagctgtgaacagcactcaaattgctgctgtattcttaaaatataaatttacttcataaagcaaaagtgaattatatgcatgttacaaaaaatattcctagcagagataagatgggatggta

SEQ ID NO: 574176 - DNA, 380 bp, Homo sapiens
agaattcaccctccttcaccactaatcacacttctgtatattcaataaaatgtgcatttcttcatggatactctttgaatcatctaaatggagactctttatagaaatattgaatcattaattcttccatctactgtactcctttccaacatactgtcttactgatttttcactttttcctatttatatccattttgttctactaacccgtctgtcattggccttcttctatagccaayctcaaatttcagttcacattagctgtgaacagcactcaaattgctgctgtattcttaaaatataaatttacttcataaagcaaaagtgaattatatgcatgttacaaaaaatattcctagcagagataagatgggatggta

SEQ ID NO: 574177 - DNA, 400 bp, Homo sapiens
ttctgtatattcaataaaatgtgcatttcttcatggatactctttgaatcatctaaatggagactctttatagaaatattgaatcattaattcttccatctactgtactcctttccaacatactgtcttactgatttttcactttttcctatttatatccattttgttctactaacccgtctgtcattggccttcttctatagccaacctcaaatttcagttcacaytagctgtgaacagcactcaaattgctgctgtattcttaaaatataaatttacttcataaagcaaaagtgaattatatgcatgttacaaaaaatattcctagcagagataagatgggatggtatttgctgggatgtgcagcatcgttttttccaaattaatttctctcagaatt

SEQ ID NO: 574178 - DNA, 380 bp, Homo sapiens
agaattcaccctccttcaccactaatcacacttctgtatattcaataaaatgtgcatttcttcatggatactctttgaatcatctaaatggagactctttatagaaatattgaatcattaattcttccatctactgtactcctttccaacatactgtcttactgatttttcactttttcctatttatatccattttgttctactaacccgtctgtcattggccttcttctatagccaacctcaaatttcagttcacattagctgtgaacagcactcaaattgytgctgtattcttaaaatataaatttacttcataaagcaaaagtgaattatatgcatgttacaaaaaatattcctagcagagataagatgggatggta

SEQ ID NO: 574179 - DNA, 649 bp, Homo sapiens
gaaatattgaatcattaattcttccatctactgtactcctttccaacatactgtcttactgatttttcactttttcctatttatatccattttgttctactaacccgtctgtcattggccttcttctatagccaacctcaaatttcagttcacattagctgtgaacagcactcaaattgctgctgtattcttaaaatataaatttacttcataaagcaaaagtgaattatatgcatgttacaaaaaatattcctagcagagataagatgggatggtatttgctgggatgtgcagcatcgttttttccaaattaatttctctcagaattctctcctccctactgccaggcagagctcaccactcacatgtcatgaatgacatttttagtcatttttcatcatatctgatcatatgacttgaattaatgtttagatctgctragggcaaacaccaccatggaattaaatttgcaagagggaggaaggaggaagcaggagaaggtgggtagagtcttcagactagggtgcagatcttacacctgtagagggaaagagggaaggaaggctggttggggtagaaagagactgcagcatggttccaagaatgctttggcctaggtcactgcagactccttaaattaaagttactc

SEQ ID NO: 574180 - DNA, 515 bp, Homo sapiens
ctagggtgcagatcttacacctgtagagggaaagagggaaggaaggctgrttggggtagaaagagactgcagcatggttccaagaatgctttggcctaggtcactgcagactccttaaattaaagttactcattggagactctcacaactcactggaaacgtcctcacatacaatccccatgtagctctatgactgttggaaacatgactgctgcacaagtgtagaagtgcttccagagacagagggctaaagccaggctgtcgctgacttatgctgtctgattcaggatatctgcattgcaaatttccttggtcattaaaatccattaccctcacctcctaaccccaccacagcacacacatatttgtccaaacaggttcttcataccagctcttccaagattcccatgatcctctcttttccaaggggaatcttagaaaaggaaggttaatgagaccaactctagcccatgctatagcagttggtctcagaactgcctttgaatgcccagttg

SEQ ID NO: 574181 - DNA, 515 bp, Homo sapiens
ctagggtgcagatcttacacctgtagagggaaagagggaaggaaggctggttggggtagaaagagactgcagcatggttccaagaatgctttggcctaggtcactgcagactccttaaattaaagttactcattggagactctcacaactcactggaaacgtcctcacatacaatccccatgtagctctatgactgttggaaacatgactgctgcacaagtgtagaagtgcttccagagacagagggctaaagccaggctgtcgctgacttatgctgtctgattcaggatatctgcattgcaaatttccttggtcattaaaatccattacccycacctcctaaccccaccacagcacacacatatttgtccaaacaggttcttcataccagctcttccaagattcccatgatcctctcttttccaaggggaatcttagaaaaggaaggttaatgagaccaactctagcccatgctatagcagttggtctcagaactgcctttgaatgcccagttg

SEQ ID NO: 574182 - DNA, 515 bp, Homo sapiens
ctagggtgcagatcttacacctgtagagggaaagagggaaggaaggctggttggggtagaaagagactgcagcatggttccaagaatgctttggcctaggtcactgcagactccttaaattaaagttactcattggagactctcacaactcactggaaacgtcctcacatacaatccccatgtagctctatgactgttggaaacatgactgctgcacaagtgtagaagtgcttccagagacagagggctaaagccaggctgtcgctgacttatgctgtctgattcaggatatctgcattgcaaatttccttggtcattaaaatccattaccctcacctcctaaccccaccacagcacacacatatttgtccaaacaggttcttcataccagctcttccaarattcccatgatcctctcttttccaaggggaatcttagaaaaggaaggttaatgagaccaactctagcccatgctatagcagttggtctcagaactgcctttgaatgcccagttg

SEQ ID NO: 574183 - DNA, 603 bp, Homo sapiens
ctcctaaccccaccacagcacacacatatttgtccaaacaggttcttcataccagctcttccaagattcccatgatcctctcttttccaaggggaatcttagaaaagraaggttaatgagaccaactctagcccatgctatagcagttggtctcagaactgcctttgaatgcccagttgtgtgagggggagagaaagagagagagagtaagggagtggggagtgtgtgtgagtgtgagtgtgtgtgtgtgtgtgtgtgagagagagagagagagagagaaattatctctgcttcttttgtagaaaagtatccctacctcctcctgctaatcagggtgtattcatcctgccccagtggtgacgtatttcttgtcctttggttactggacctaaggaatctaaagcacccaacagataaccttctttagagagcaggacttgcctgccttccagatcccagagctgcagtgatgagaagcacaggaaaacctgagaagattattgggagcatttgtaattagggacattcctgtttctacctcttgttttctgaacctgtagattcttcctatggaagaagaactactatataaagatctgtgat

SEQ ID NO: 574184 - DNA, 603 bp, Homo sapiens
ctcctaaccccaccacagcacacacatatttgtccaaacaggttcttcataccagctcttccaagattcccatgatcctctcttttccaaggggaatcttagaaaaggaaggttaatgagaccaastctagcccatgctatagcagttggtctcagaactgcctttgaatgcccagttgtgtgagggggagagaaagagagagagagtaagggagtggggagtgtgtgtgagtgtgagtgtgtgtgtgtgtgtgtgtgagagagagagagagagagagaaattatctctgcttcttttgtagaaaagtatccctacctcctcctgctaatcagggtgtattcatcctgccccagtggtgacgtatttcttgtcctttggttactggacctaaggaatctaaagcacccaacagataaccttctttagagagcaggacttgcctgccttccagatcccagagctgcagtgatgagaagcacaggaaaacctgagaagattattgggagcatttgtaattagggacattcctgtttctacctcttgttttctgaacctgtagattcttcctatggaagaagaactactatataaagatctgtgat

SEQ ID NO: 574185 - DNA, 524 bp, Homo sapiens
ctcttctgtggtgagtgctttcttgtgagtgttaacgtgcaatacaagattctttacactccgtgcctgctcctgcatgtccactcatatgcctctaacccagcttccttgtctcagatatttcagttcttttctgtctaagcctctgcccagatgattcacccactgactacggcaaagaaatctgtttatattcctgccttaggtcatgcttcttctatgtaaagtagatggccagggccactgctcccagtgctgctaatagggaatattttaatttccttctgtctttcagagtcattcttgcattgggctgcaatgcaactacacctttaaacagagattgcccctttstccctccttcagatggccacagggacacaaatgcaggcacaggtgtgagctgaaggaaggttgctggtgcaaacatggtgggtgacatgaggatctgggttacctgctattcaacttatccacttgctctcatcttgcttggcctttgtctcatacttactatttccacc

SEQ ID NO: 574186 - DNA, 487 bp, Homo sapiens
atttgacctagaatattccattcttacttactcaagagaaatgaaaacatgtgcatacaaatgaacatagcagctttacttgtaataatcaaggaatagaaacatttgtaaatggttcaccaacaggctaaaggataaacatattgtagtatttccatacaatagaataaaatagaaagraccactgattttgcaacataggtgatcctaaaatatattgagagaatgaaacaacagtaggcatattataaaagtttattattacaaaattctagaaactgaatttatagtggtaggttgcagatcaatggctgcttggagccagaggttttggtaaggagtacaagagaacttttgaggtgatagacagcttcaatatcttcattggtgatagccacataactttatatgtttgtacttaatttggatgtattttattgtattgaaagtaaacctcagttaagttgacttttaaaatttattagat

SEQ ID NO: 574187 - DNA, 440 bp, Homo sapiens
tgtagtatttccatacaatagaataaaatagaaagaaccactgattttgcaacataggtgatcytaaaatatattgagagaatgaaacaacagtaggcatattataaaagtttattattacaaaattctagaaactgaatttatagtggtaggttgcagatcaatggctgcttggagccagaggttttggtaaggagtacaagagaacttttgaggtgatagacagcttcaatatcttcattggtgatagccacataactttatatgtttgtacttaatttggatgtattttattgtattgaaagtaaacctcagttaagttgacttttaaaatttattagattctaaaacattaatttgcttccatccattatatgtattcacaaatcctacaatagtatgttctggaagacctgtaatagacacagtaactggcatat

SEQ ID NO: 574188 - DNA, 487 bp, Homo sapiens
atttgacctagaatattccattcttacttactcaagagaaatgaaaacatgtgcatacaaatgaacatagcagctttacttgtaataatcaaggaatagaaacatttgtaaatggttcaccaacaggctaaaggataaacatattgtagtatttccatacaatagaataaaatagaaagaaccactgattttgcaacataggtgatcctaaaatatattgagagaatgaaacaacagtaggyatattataaaagtttattattacaaaattctagaaactgaatttatagtggtaggttgcagatcaatggctgcttggagccagaggttttggtaaggagtacaagagaacttttgaggtgatagacagcttcaatatcttcattggtgatagccacataactttatatgtttgtacttaatttggatgtattttattgtattgaaagtaaacctcagttaagttgacttttaaaatttattagat

SEQ ID NO: 574189 - DNA, 487 bp, Homo sapiens
atttgacctagaatattccattcttacttactcaagagaaatgaaaacatgtgcatacaaatgaacatagcagctttacttgtaataatcaaggaatagaaacatttgtaaatggttcaccaacaggctaaaggataaacatattgtagtatttccatacaatagaataaaatagaaagaaccactgattttgcaacataggtgatcctaaaatatattgagagaatgaaacaacagtaggcatattataaaagtttattattacaaaattctagaaactgaatttatagtggtaggttgcagatcaatggctgcttggagccagaggttttkgtaaggagtacaagagaacttttgaggtgatagacagcttcaatatcttcattggtgatagccacataactttatatgtttgtacttaatttggatgtattttattgtattgaaagtaaacctcagttaagttgacttttaaaatttattagat

SEQ ID NO: 574190 - DNA, 487 bp, Homo sapiens
atttgacctagaatattccattcttacttactcaagagaaatgaaaacatgtgcatacaaatgaacatagcagctttacttgtaataatcaaggaatagaaacatttgtaaatggttcaccaacaggctaaaggataaacatattgtagtatttccatacaatagaataaaatagaaagaaccactgattttgcaacataggtgatcctaaaatatattgagagaatgaaacaacagtaggcatattataaaagtttattattacaaaattctagaaactgaatttatagtggtaggttgcagatcaatggctgcttggagccagaggttttggtaaggagtacaagagaacttttgaggtgatagacagcttcaatatcttcattggtgrtagccacataactttatatgtttgtacttaatttggatgtattttattgtattgaaagtaaacctcagttaagttgacttttaaaatttattagat

SEQ ID NO: 574191 - DNA, 440 bp, Homo sapiens
tgtagtatttccatacaatagaataaaatagaaagaaccactgattttgcaacataggtgatcctaaaatatattgagagaatgaaacaacagtaggcatattataaaagtttattattacaaaattctagaaactgaatttatagtggtaggttgcagatcaatggctgcttggagccagaggttttggtaaggagtacaagagaacttttgaggtgatagacagcttcaatatcttcattggtgatagccacataactttatatgtttgtacttaatttggatgtattttattgtattgaaagtaaacctcagttaagttgacttttaaaatttattagattctaaaacattaatttgcttccatccattatatrtattcacaaatcctacaatagtatgttctggaagacctgtaatagacacagtaactggcatat

SEQ ID NO: 574192 - DNA, 500 bp, Homo sapiens
gtaaaagattttatccccaactagttggtatcattcaaatcaaattttataattttactctgtattaggaagcagttttataatgtccaaagcatctttatgcatattttttctcaaataaatcctacagcaactgtgtgagatactcaaaggtgagaatattatccccattttacaactgagcaagcagacttcaagatttgttaactttttagagctgaagtttagtccactattttatgttatcaacctttgatttgctgtgctatacccamcaatttagaaaagaatttacccaagattgtaacatataatacaattaatttattttttttctctccgcttgaaaacagaaacagtggtgattatggagtatctactgattatttttctgggacaagttgatgtcactaaatttataaactgaactgaactgataacctcagttactttgccaaaattccttcttttaatattacataaactgtagaatgcagaag

SEQ ID NO: 574193 - DNA, 500 bp, Homo sapiens
gtaaaagattttatccccaactagttggtatcattcaaatcaaattttataattttactctgtattaggaagcagttttataatgtccaaagcatctttatgcatattttttctcaaataaatcctacagcaactgtgtgagatactcaaaggtgagaatattatccccattttacaactgagcaagcagacttcaagatttgttaactttttagagctgaagtttagtccactattttatgttatcaacctttgatttgctgtgctatacccaacaatttagaaaagaatttacccaagattgtaacatataatacaattaatttattttttttctctcygcttgaaaacagaaacagtggtgattatggagtatctactgattatttttctgggacaagttgatgtcactaaatttataaactgaactgaactgataacctcagttactttgccaaaattccttcttttaatattacataaactgtagaatgcagaag

SEQ ID NO: 574194 - DNA, 421 bp, Homo sapiens
catctcacagagttgaacctttcttttgattragaattatggaagcactctttttgtagattctgtaagtgggcatttgaagcgctttgcagcctaagttagaaaaggaaatatcctcacataaaatctagacagaagcaatgtgagaaacttccttgggatgtgtgcattcatctcacagggttaactcttacttttgattgagcagttttgaaactctctttttgttgaatgtggaagtggacatttggagcgctttgaggcttatggtggaaaaggaaatatcttcacatagaaactagacagaagcactcttagaaacttctttgtgatgtgtgcactgatctcacagagttaagcctttgttttgattgagcagttttgaatctttttgtagaatctgcaagttaacatttggagc

SEQ ID NO: 574195 - DNA, 435 bp, Homo sapiens
agtattgcaattgtgattttcatacaaaaaaatatttatgtaaggtgatctatgaaatgagatgtggtaacacataggatcttgtgtgcaatattttgttagtagggatctcagaaatgagaaaataccaacttgcatcttctttgtggaacttacaaaaaataaaggtagcgttttgtcttccacagcagctggaaatgaacatagtgactaagcatcattctaacaaagatttgttggttcagagtttaaggaggtagataaagagtagyagtagtccaagccagatgctgacatctattattttctgcccttggtgtggttgatgagctcagtaatagagtataattaggttatctgatttaatgatttaatatatttataaataaatttcattacaaaatataaaatagcttagatgctctgaattacaag

SEQ ID NO: 574196 - DNA, 435 bp, Homo sapiens
agtattgcaattgtgattttcatacaaaaaaatatttatgtaaggtgatctatgaaatgagatgtggtaacacataggatcttgtgtgcaatattttgttagtagggatctcagaaatgagaaaataccaacttgcatcttctttgtggaacttacaaaaaataaaggtagcgttttgtcttccacagcagctggaaatgaacatagtgactaagcatcattctaacaaagatttgttggttcagagtttaaggaggtagataaagagtagcagtagtccaagccagatgctgacatctattattttctgcccttggtgtgrttgatgagctcagtaatagagtataattaggttatctgatttaatgatttaatatatttataaataaatttcattacaaaatataaaatagcttagatgctctgaattacaag

SEQ ID NO: 574197 - DNA, 435 bp, Homo sapiens
agtattgcaattgtgattttcatacaaaaaaatatttatgtaaggtgatctatgaaatgagatgtggtaacacataggatcttgtgtgcaatattttgttagtagggatctcagaaatgagaaaataccaacttgcatcttctttgtggaacttacaaaaaataaaggtagcgttttgtcttccacagcagctggaaatgaacatagtgactaagcatcattctaacaaagatttgttggttcagagtttaaggaggtagataaagagtagcagtagtccaagccagatgctgacatctattattttctgcccttggtgtggytgatgagctcagtaatagagtataattaggttatctgatttaatgatttaatatatttataaataaatttcattacaaaatataaaatagcttagatgctctgaattacaag

SEQ ID NO: 574198 - DNA, 602 bp, Homo sapiens
acacctactaaggggtgacagtgggtgttaagaggcagcaagccagcactgtgtggggagggagaagttggattttttggtggtccataggcatctgacttggccattgggaggatggatggtggagccaggcaggaggataagagaagcaagagactgggagaaaaaacaggaaagccagttttagacatgttgaaattcaagtgtccaagggacacccagagggagccattgggttggcaacaaatttgttatatgagagagccacctggacatgagacagccacctggacacgagacagccacctggtatgagacagccacctggacatgagacagccamctgaacatgagacaaccacctggtatgagacagccaccgggtatgagaaaaccacctggtatgagacaaccacctggacatgaggcagccacctggacatgagatagccacctggacacaagacacctggaaggagacagccacctggacagtagatgagagttttggaaattatttgcctgtatctttaatttcccttttttcattagaatttaaacatggcctctgctcaaagaagaaaaagaaggaggaatgaagg

SEQ ID NO: 574199 - DNA, 569 bp, Homo sapiens
gagtgaaggtgtaaagttttcttgcaatcaaaattaagttaacagtataaaatagcctgttataactaagattttttgtaagtttcctagtaaccagaagcaaaaacctatagtagatatacaaaagataaaaaggaatcaaagcataacactagagaaaaaccacttaatcacagaggaagacagctagagaggaagaaagaaacaaaaggtctaccaaacaaccagaaaacaattaacaaaatgccaatagtaagtccttacttaccagtaactatcttgaatgaacattgattaaattctccaataaaaagacacagtgkgtggggcatgatggctcatgcctgtaatcccagccctttgggaggccgaggtggggggatcatgaggtcaagagatcgagaccatcctgaacaacatggtgaaaccctgtctctactaaaaatacaaaaattagctgggcatggtggcgtgcacctgtaatccaagctacacaggtggctgaggcaggagaatcgcttgaacctgggaggcagaggttgcagggagctgagattgtgccactgcac

SEQ ID NO: 574200 - DNA, 638 bp, Homo sapiens
attgctctccagcctgggtgacagagcaagactctgtcacaaaacagtgaaacatagacagccagctgtggtggctcatgcctgtaatcccagctctttgggaggctgaggcggacagatcacctgaggtaaggagttcaagaccaacctagccaacgtggtgaaactgcatttccactaaaaatacaaaaattagccaggcatggtggcrggcacctgtaatcccagctacttgggaggctgaggcaggagaattgcttgaacctgagaggcagaggttgtagtgagccagtgcactccagcctgggtgacagagtgagactcatctcaaaaagcaaacaaacaaaaaaaagtgaaaaataaaaataaatatttattttaaaaaagaagagagatctcaaataaacaagctaacatttatatctcaaaaaactagaaaaaggagaacagactaacccaaaagttagtagagaaaaggaaataataaagatcacagcagaaatagaagaacaagaaactagaaaaatgataaaaaagagaaacaaaactaagaaataatttttaaaaagataattaaaatggacaaactttatctaaactaagaaaaacagaagactcaaaatcataaatgaaagaga

SEQ ID NO: 574201 - DNA, 639 bp, Homo sapiens
attgctctccagcctgggtgacagagcaagactctgtcacaaaacagtgaaacatagacagccagctgtggtggctcatgcctgtaatcccagctctttgggaggctgaggcggacagatcacctgaggtaaggagttcaagaccaacctagccaacgtggtgaaactgcatttccactaaaaatacaaaaattagccaggcatggtggcgggcacctgtaatcccagctacttgggaggctgaggcaggagaattgcttgaacctgagaggcagaggttgtagtgagccagtgcactccagcctgggtgacagagtgagactcatctcaaaaagcaaacaaacaaaaaaaagtgaaaaataaaaataaatatttattttaaaaaagaagagagatctcaaataaacaagctaacatttatatctcaaaaaactagaaaaaggagaacagactaacccaaaagttagtagagaaaaggaaataataaagatcacagcagaaayagaagaacaagaaactagaaaaatgataaaaaagagaaacaaaactaagaaataatttttaaaaagataattaaaatggacaaactttatctaaactaagaaaaacagaagactcaaaatcataaatgaaagagaa

SEQ ID NO: 574202 - DNA, 493 bp, Homo sapiens
gcatttgctacttgtctctggaccagactgctctgattctcttgctcacaatgaaatggaaatttcctggcattgatagtctgatactggttagcagattccacccactctttttttcctgataaaatgcaacgcccagacaatatctctgtaccacttgtatttctttcagcttytgcttgggaaatttcaagcctttgagcagggctagggccctcagctgctgttcctattagaagcagaaaaataaaatagtgtgcccatggcctagggttaaaatgtatgaatgtgggggccattccattccagcaactgaaggttaaggaaacagaaattgtaacttgataaagaaatgtattcacagccttgctagggtttaatgtcagcagagtttactgaacaagaacaggccttaaactaagacataaacttctccctaagtaggtttgggaggggtattataaccaggatccagaaaggtccctaagaaaag

SEQ ID NO: 574203 - DNA, 582 bp, Homo sapiens
tcacccctaaatcacatacattctggaatatttactgagtctgcatatagagaatactaccttraaaaggtaaaaatcacccatgtaagcataattttactttagctttcttgtgagtaaaatgggccatttggtcgcagtgtaggatagccatacatttccgtgaaatgtttacattggtcaatattgaaaagcttcctatgattaaagtcaaattatacatacataatgggttacaatttatgaaacattcatcactcaacattctggtttgtattatcagtcccatattagagatgtatggagtgccttgattttggcaacaattcaactaaattttgaccaaactttagttaggctcctaatgttcttcctagacacatctctgcatgcccttataaactctagttttagcaggaaccttgctaaggttcttgctaaagaaccttgttaagtcatttagcagaaaccactcaccttcaataactgatcaccttcaagaactgatcagtttcctcatcctccaccatcctccatgtgacatctgatcatcctggccttcctctagcattaatactgtta

SEQ ID NO: 574204 - DNA, 496 bp, Homo sapiens
tgatttccaaaatctagcatctaagaaaaatttcattgttctgcaaaataataggggaaattaagatattyaaattatctaagaaatagaataagagcatttgtgcatgtatttgtgtatgtaaataaataaatgactgggactgagattctgtggaaaggtatgccattaccatgtattcctttgacttatatggttataagtgaaccaaagatagaggtggcagtaaaagcagtcttgtattatgtcttggtaatgttggcaggagtggtcatttattatggaactcaactatctttcctagtttattgtatgcaaaacctggaattgaggtgcttgtctaagggactgtagctttgcatgtgatcgtcaaactcaagctggaggataggaatcaattctaagatggcttgcaatcttcaacatggcttagattctgttgttcttgatctatgtgaaaataaatcaaaattcaaaaataattgtattttcagtg

SEQ ID NO: 574205 - DNA, 546 bp, Homo sapiens
tcaaaagaagacacacatgcagccaacaagcttatgaaaaaaaactcaatgtcactaatcattaaagaaatgcaaatcaaaaccacaatgagataccatctcccaccagtcagastagctatcatgaaaaagtcaaaaaataacaaccactagtaaggttgtggagaaaagggaacacttatacactgttggtggaagtgtaaattagttcaaccattgtggaattctgtatggtgattcctcaaagagctaaaaatagaaataccatttgaacctgcaatcctattactgggtatacatcaagaggagtataaatcattctatcataaagacacatgcatctgaatgttcgttgctgcacaaacacatggaataaacctaaatacccatcaatgacatattgggtaaagaaaatatggtacatatacaccatgaaatactatgcagtcataagaagtaatgtcttttgtgggaacatggatggagctggaggccattttccttagcaaactaatgcagaaacagaaaatcaaatgctacatgtta

SEQ ID NO: 574206 - DNA, 644 bp, Homo sapiens
tgcatggtgcaagctttcagtggatctaccattctgagttctggaggacagtggccctcttctcacagctccactaggtgttgtcccagtagggactctctgtgggggctccaactccacatttcccttctgcactttcctagcagaggttctccctgagggccccacccatgcagcaaacttctgcctgggcatacagatggttccatacatcctctgaaatctagaaggaggttcccccacctcaactcttgacttttgtgcacccgcaggctcaacaccatgtgggagatgccaaggcttgggggctccaccctcgggagcaatgggctgagcttggcctctgttagtcatggctggtgtgactgagatacagggcacmaagtccctagactgcacacaggagagggatcctgagctccacccatgaaaccatttttttctcctaaacctctgggcctgtgatgggaagggctaccacaaagacctttcatatgccctagagacattttccccattgtcttggtgattaacattcagctcctggtttcttatgcaaatttctgcagctggcttgaatttctcctcagaaaatgggattttcttttctatctcattcacaggctgcaaattttccaaacttt

SEQ ID NO: 574207 - DNA, 453 bp, Homo sapiens
tttgccctggttggttgtgaaggtggggaaggaggaaagtattccaaatttgtttctttcttgggtgctctatcttggtctttggaatagtgacctcttcctatatctgctatttctctattctttagaattgtctttactcttctggcctattcctcattacaccaatcctctgttatggttaataattctctatattaaattttcctgttcaatatgccatgtagtttatgtctcttgcytgcacctgaatgatatagaattggttcttggaatgttcttaggatgtagacccacaaatattggattttgtgattggtttggtcatgcccttgggtttgagtgcagtactcagctgtttgctatgggaaatgggtactagtaatccatggtattcagtgacattatatttaatcaatctgtcatctgtggttgattgccaactgaggaaag

SEQ ID NO: 574208 - DNA, 611 bp, Homo sapiens
agggaagttattacgctacacataagtggcataatactatttgaaggtagactgtgattaaataaatgtgtttatgaaaactcctagggcagattgctggcaagatggccaaataggaacagctccagtctgcagctcccagtgagatcaacacagaagatgggtgatttctgcatttccaactgagcctccactggtgatacccaggcaaacagtgtcrggagtggacctccagcaaattccagcagacctgcagcggagaggcctgactgttagaaggaaaactaacaaacagaaaggagtagcatgtccactcaaagactccaaccgaaagtcaccaacatcaaagaccaaaggtagataaatccaaaaagatggggagaaaccagcactaaaaggctgaaaattccaaaaaccacaacacctcttctcctccaaaggatcataactccttgccagcaagggaacaaatctggatggagaatgagtttgaggaattcacagaagtaggcttcagaaggtgggtaataacaaactcctccgagctaaaggagcatgttctaacccaattcaagaaagctaagaaccttgaaaaaagcttagatgaactg

SEQ ID NO: 574209 - DNA, 587 bp, Homo sapiens
agcagctgctctggcaggctttcaaggctgcagcagccctggccccagctgcttcagcagtaatttgaagagtgcaagggggcaggggaagcgagaatttgaaaaagagcacttcattatataacagcaaaggcaggaaaccctgaaataactgggccggtagtgggatccagatttctggagttcatgggcccctctccccattcaatcaattctggagacttttcttactcaatgattgcatggggcacttgtgacagtcaaggggcaaaagagctttcaatcagacagttctttatcagtaaaaaccactttgatccaactccatcctaaagcactgtgcacttgcagcatcttccaaggtgcaaaattatcaactggattgaaaaacaaataaaatggcaaaacgaaccttgtagctgacatcttttaaccaataaggcagatgctgtttctcaaggatgtcccagcattatgtttgtggttatagatctactaagcaagaactatatcctttcaactcacrtttatagcagtgggcatggtgctgggcacaaagcaggcacacatttattctgtggcaaata

SEQ ID NO: 574210 - DNA, 548 bp, Homo sapiens
atctctgcagattgggaactggctcatatatctgagctcaactttaggccatgtcagagcatattagattgacctcattctactgtgaatgtactgtttcatttactcaaccccttctgccaccaccaccwtttttgatgtttggtttggctttctaattggtttgcctcaagaaggaatgaaaactttattatgtataagctccaggagggtgtctaagtgccattaaagttttcaatggtccccaaagctgccatttgagcacacaatttgctcagaggtcagggtggaggacatactcaccagtttgccgggagcacccaaaattcactgatgcttcctgttttccattcttgtcgttagtagatgtttcgggaagacaaataataacaagatttttctgtcaaatagttctttattaattcagaaaccactcggtgctaatcccatcctgaattacttcagcaaacaaatttgggacctcagaaagaataaaacactagcattgaactacagcgcctcctggctgtcacaatatcaatgcataa

SEQ ID NO: 574211 - DNA, 329 bp, Homo sapiens
ttgctaaaatgttggcagtctttctctgggcagtgagtctagggtcaattgttttacttccttttgcatttctgtatttttttagtttttccataatgaacatrtataacttttattttttattttttacattgattgataaaaattttacaagttaccatgtacaacatgatgttttgaaatatatatacattgtggaatggctaaattgagctaatgaacatacgtattacctcacacacatcattttttgtggtgagttatttgcttttttcttaatctttttctgcctatcacaaaatagcagtctgtagatcagtgtgacatat

SEQ ID NO: 574212 - DNA, 616 bp, Homo sapiens
gttttgttagatattgccacatttctcttcatagaggttgtactgttttgtttttaractaacagtatacaagagtgcctttttccccatgaactgttatcaaactttttgatttttatcagatgaataaatggtatcttggtatgtgggttttttaaaaaacaaatttaaaaaataccctttctttttagagcagtgttttaggttcagggcaaaactgagcagaaaataaagagttcccttctacttcctgtcccctaccatgcaccacctccccagctttctggatgttctgcagcacaatggcacatttgttaaaatcaacaaatctacattgatatatcattatcacccaaattccatagtttagcgttcatttttagtgttacacattaaatggattttaacagatgtataatgacatgtatccatcattgtaatatcatgtagaatagtttcactgccctcaaaatcctctatgctctgcctgttcatccctccctccctgtatcccctggcaaccactaattattttactgtctccatcgttgtcttttccagcttgtcatatagttgggatcatgtagtttgtagccttttcagattggctttttta

SEQ ID NO: 574213 - DNA, 540 bp, Homo sapiens
ttctgtagcaattttaagatctacattatctctattttccatatgaatagcaaattgaaggaacaagcagaaaattgtatccttgagaagactgagtcaatatattttaatgcaaagttgtgaggttaaactaatgaggttaaaactagtaagaaaaggttgtaggcatgtagatttacaaagggtgtggtgtatgtgtatgtggtgtgaatatatatattcatatctatactaatgtaaacatatacatatatacaagrgaaaaggaaggcaaagaatattaaagaattatatagtgctgagaactatgtttttagagggtgtcactacatgatttagtagaaagacgtcttatattaattggaagtctcatgtggcaggcactgctgtctacttaattccccccttgtaaaagaacccgattttgttcatggtggcaatatgtgcagctagggactgtacttccagcctcctttgcaactagtgtcccatctgcctaaattctggccaaagaggcagaagcagattttggttgaaacc

SEQ ID NO: 574214 - DNA, 569 bp, Homo sapiens
tagattttcctgcattcctttattttgagcctatgtgtatcattgcatgtgagatagttctctcgaagacagcataccaatgagccttagttttttatccagcttgccactctgggccttttaatttgggcacttagctcatttacatttaaagttagtattaatacgtgtggatttgattttgtcatcatgatgytagatgcttattttgcagacttgtttatgtggttgctatatactgtcacaggcttttgtactgtaatgtgtttttgtagtggctggtaatagtcattcctttccatatttagtgcttccctcaggagctcttgtaaggcaggtctggtggtaacaaatcccctcagtatttgcttttctgaaaaatttctaatttctctttctttcttttttcttttgttctggttttttgtttgtttgtttgttttaacagagtctctctctgtcacccaggctagagtacagtggcatgatctcagctcagtgcaacctccatctcccgggttcaagcaattctcctgctcagcctcctgagtagctgggataacagactc

SEQ ID NO: 574215 - DNA, 576 bp, Homo sapiens
gtgtactgaatattacagatggaatgcaagggaaaacacccacaatgtttgtgggggaagaggtgggtggggagtcttaggaatgcagcaaccatatttctaaatgacttgagaggaatttttacataaattattttctccaaaaatattcaaatcatatttctaattcttatcagcaaggtcatctatctattcctgcctccttaatctcttcattgacctggtgttgaattgatttttattagatcattttcccttatctaattaaagccatatttcaggaggtgggaagtgggtccagctctccctcatctcctgcaccatcctgtgagcatcccccagcagcaagagcttggacaccagaggcggagagaaaagtcaataacagacagcaaggaaagaagccgaggcatcgatcatctcatcagacttaggagttgagacaaagccacagaattcaacatcacattaactctgcttgcactggaagggaggaacattttcaaatagattcaggttgcaaacgtgggctacgttttaaggcaatttaacytaacccaggatttcttaacctta

SEQ ID NO: 574216 - DNA, 563 bp, Homo sapiens
ttcttcctgtttctttatttgtcctctgagagatggacttctccagaagaatagcctcgtgccctggtaatcctcctcctctaggctcatctcatayatgtccattgtgcttacccgataaattggtcacctcaaacatattcccaacagtccccctgagcttcagccctcccctgcatctctgggttccttcacctgttgcatcctttcacctagccattcagttggcaaatcaaattcagtgccaccaagtcaactcatggtcttcacccctcaaatcttcctttctgtgtttcttagttctgtgagtggtacccactatctactatttcccaaagccaattacctaattaaaacacatatcaagggttagtcatctccgggtaagctgtctgaaaatgtgcatgtttgtaaggggcagagaggaagacactcttcctgtcctcaaggagctcacagtctagcagagatggcagacatggcagcccatgcggacagaacaccaggaccagcctggtggactggtacatggccaaggctgaggaggcaaggtggaagggcaa

SEQ ID NO: 574217 - DNA, 563 bp, Homo sapiens
ttcttcctgtttctttatttgtcctctgagagatggacttctccagaagaatagcctcgtgccctggtaatcctcctcctctaggctcatctcatatatgtccattgtgcttacccgataaattggtcacctcaaacatattcccaayagtccccctgagcttcagccctcccctgcatctctgggttccttcacctgttgcatcctttcacctagccattcagttggcaaatcaaattcagtgccaccaagtcaactcatggtcttcacccctcaaatcttcctttctgtgtttcttagttctgtgagtggtacccactatctactatttcccaaagccaattacctaattaaaacacatatcaagggttagtcatctccgggtaagctgtctgaaaatgtgcatgtttgtaaggggcagagaggaagacactcttcctgtcctcaaggagctcacagtctagcagagatggcagacatggcagcccatgcggacagaacaccaggaccagcctggtggactggtacatggccaaggctgaggaggcaaggtggaagggcaa

SEQ ID NO: 574218 - DNA, 563 bp, Homo sapiens
ttcttcctgtttctttatttgtcctctgagagatggacttctccagaagaatagcctcgtgccctggtaatcctcctcctctaggctcatctcatatatgtccattgtgcttacccgataaattggtcacctcaaacatattcccaacrgtccccctgagcttcagccctcccctgcatctctgggttccttcacctgttgcatcctttcacctagccattcagttggcaaatcaaattcagtgccaccaagtcaactcatggtcttcacccctcaaatcttcctttctgtgtttcttagttctgtgagtggtacccactatctactatttcccaaagccaattacctaattaaaacacatatcaagggttagtcatctccgggtaagctgtctgaaaatgtgcatgtttgtaaggggcagagaggaagacactcttcctgtcctcaaggagctcacagtctagcagagatggcagacatggcagcccatgcggacagaacaccaggaccagcctggtggactggtacatggccaaggctgaggaggcaaggtggaagggcaa

SEQ ID NO: 574219 - DNA, 499 bp, Homo sapiens
gcacttaaaattatgtgtatttcctctgcaagtgcccatgtrgatggcaatccactaatccctttgagggcgggcaccatgtctacatttctttagagtgtcccatagaatttggctctgtgctacacacggaataaattcttagacttgtattaattccttgttggcagctacacccacacctagcaggacctgtttcatttaccgatgcagcagagttgctcccacatcttatagtgcactgaggatggggctgggtccctccccacagcctgcacactactaactgctaaatgatcagtgcatggccactgactgtgagatgattgaaagagtcaactgccatttttcttgattttcataacgacatgattttgaagttacagctgaaattacttgtttctgtatccacaagttttgcttttattggagagtgtaccatgtgtggcatctcacctttctctctatactgcttgaccagctctgccgtattccaagt

SEQ ID NO: 574220 - DNA, 499 bp, Homo sapiens
gcacttaaaattatgtgtatttcctctgcaagtgcccatgtggatggcaatccactaatccctttgagggcgggcaccatgtctacatttctttagagtgtcccatagaatttggctctgtgctacacacggaataaattcttagacttgtattaattccttgttggcagctacacccacacctagcaggacctgtttcatttaccgatgcagcagagttgctcccacatcttakagtgcactgaggatggggctgggtccctccccacagcctgcacactactaactgctaaatgatcagtgcatggccactgactgtgagatgattgaaagagtcaactgccatttttcttgattttcataacgacatgattttgaagttacagctgaaattacttgtttctgtatccacaagttttgcttttattggagagtgtaccatgtgtggcatctcacctttctctctatactgcttgaccagctctgccgtattccaagt

SEQ ID NO: 574221 - DNA, 499 bp, Homo sapiens
gcacttaaaattatgtgtatttcctctgcaagtgcccatgtggatggcaatccactaatccctttgagggcgggcaccatgtctacatttctttagagtgtcccatagaatttggctctgtgctacacacggaataaattcttagacttgtattaattccttgttggcagctacacccacacctagcaggacctgtttcatttaccgatgcagcagagttgctcccacatcttatagtgcactgaggatggggctgggtccctccccacagcctgcacactactaactgctaaatgatcagtgcatggccactgactgtragatgattgaaagagtcaactgccatttttcttgattttcataacgacatgattttgaagttacagctgaaattacttgtttctgtatccacaagttttgcttttattggagagtgtaccatgtgtggcatctcacctttctctctatactgcttgaccagctctgccgtattccaagt

SEQ ID NO: 574222 - DNA, 615 bp, Homo sapiens
caaaattaatgtacagaaatcagtagctcttctatacaccgacagcgaccaagctgggaatcaaatcaagaactcacccccttttacaataactacccaaaaataaaatacttaggaatatacctaatcaaggagatgaaaaacctctgtaagaataactataaaacaccgctgaaaaacacatacacaaacaaatggaaacacttcccatgcttatgaataggtagaatcaatattgtgaaaatgaccatactgccataaacaatctacaaattcaatgcaattcccatcaaaataccaccaccatttttcacagaactagaaaacaagatcttagaatttatatagaaccaaagcatagccaaagcaagactaagcaaaaagaacaaaactggaggcatcacattacctgatttcaagttatattataaggccacagttaccaaaacagcatggttgtgatataaaaataggcacatagatcaatgggacagaatagagaacccagaaataaacccaaatacttatagcaaacaaaaacataaagtggggaagaggacaccctattcaacaaatggtggtgggataattggcaamacacatgtagaagaacga

SEQ ID NO: 574223 - DNA, 568 bp, Homo sapiens
catattattattattatggctcttaggactgcatggatggaactgcccagctgaggctccctgaattaagacttgttcctgaaccacaacctactagataggaacattctaagactggacctcaaggtggtgtaaagtgatcattctgcggaccccgagcattatcttgaattttttccttagcattacaaagccaacacactgagctgaggtagatcctaaacccaaacctcttatctccaaattccactctattttggcagccatttgtgtgacgtgaattcatgtccaaacactgaaactattttattaagatacctgaaaattttcccatattaagttaaagtttcaatcagtttgtctcacagacttcctacgttccaaaagaattctaatgaaaaaggccatcatgtgagtgtctgattccatttatatgaaatatgcacaaatgtctgaaataagctaattcatakagacaggaagaaaattataggttgccacgggctgtgaggaggaacaccgagtgacaatttaatgggtacacagtctccttttggggggatgaaaa

SEQ ID NO: 574224 - DNA, 568 bp, Homo sapiens
catattattattattatggctcttaggactgcatggatggaactgcccagctgaggctccctgaattaagacttgttcctgaaccacaacctactagataggaacattctaagactggacctcaaggtggtgtaaagtgatcattctgcggaccccgagcattatcttgaattttttccttagcattacaaagccaacacactgagctgaggtagatcctaaacccaaacctcttatctccaaattccactctattttggcagccatttgtgtgacgtgaattcatgtccaaacactgaaactattttattaagatacctgaaaattttcccatattaagttaaagtttcaatcagtttgtctcacagacttcctacgttccaaaagaattctaatgaaaaaggccatcatgtgagtgtctgattccatttatatgaaatatgcacaaatgtctgaaataagctaattcatatagacaggaagaaaattataggttgccacgggctgtgaggaggaacascgagtgacaatttaatgggtacacagtctccttttggggggatgaaaa

SEQ ID NO: 574225 - DNA, 568 bp, Homo sapiens
catattattattattatggctcttaggactgcatggatggaactgcccagctgaggctccctgaattaagacttgttcctgaaccacaacctactagataggaacattctaagactggacctcaaggtggtgtaaagtgatcattctgcggaccccgagcattatcttgaattttttccttagcattacaaagccaacacactgagctgaggtagatcctaaacccaaacctcttatctccaaattccactctattttggcagccatttgtgtgacgtgaattcatgtccaaacactgaaactattttattaagatacctgaaaattttcccatattaagttaaagtttcaatcagtttgtctcacagacttcctacgttccaaaagaattctaatgaaaaaggccatcatgtgagtgtctgattccatttatatgaaatatgcacaaatgtctgaaataagctaattcatatagacaggaagaaaattataggttgccacgggctgtgaggaggaacaccgagtgacaatttaatgggtacasagtctccttttggggggatgaaaa

SEQ ID NO: 574226 - DNA, 553 bp, Homo sapiens
ttctttgagtgatcaaaattaacattacctctgagagacagttggacccacaggtatgataccatacaaggaacatgacatcaacttttcaatattttaaggatgcaagaccttaatatacaggcatatctcattttattgtgcttcactttattgtaccctgcaaatactgcatattttacaaattgaaggtttgtggcaattgtgtgttgagcaagtctattggtgtaattttttgaacagwttatgctcacttggtgtctctgtctcactttggaaattcttgcaatatttcaaactttttcattattattataccttttatggtgatctgtgatcagtgatttctgatggtactattgtaattgcaaatgtagtggaaatagcaagaaaactagaattataagtggagcctaaagatgtgactgaattgtcgcaatctcatgatcaaatttgaatggatgaggagttgcttcttatatatgagcaaagaaagtggtttcttgagatgaaatctacccctggtgaagacactgtgaacattgttgaaatg

SEQ ID NO: 574227 - DNA, 589 bp, Homo sapiens
gtataatgtggctgggcatccatagcaagctcagccctgggcttggtatgatgggcttcgaaggtgagaaagcacccagtgtggccttgagcacacctgcaatgaccaatctttgcattstgtacccttctctgagcacctgcagtgtccctgttccctgcatccgccaaggttgcttacagcaaaggttattttgcacccataggcatggatgtaagtcatggacttccttctataagggcaagtgtgtgaatgggaaaggtgttttaggaattaagaaacaggctggaaagtaattcttttcgaatgggattttcttgacttctctggatggctctgacaggcaaaggtatctcttgtcaccgtcaattgatttgaaggtactgtgatcacaacatagagtggggcagggaggagggcaacactgacttccactgctgaaagtgcttcttttttttttttttttttttagacagagtcttgctctgtcgcccaggctggagtgcagtggtgtgatcttggtttgctgaaaactccgcctcctgggttcaagagattctcctgcttcagcctcctgagtagctgggat

SEQ ID NO: 574228 - DNA, 506 bp, Homo sapiens
gtggattatttctttctttttctttttttgagacagagtctcactctgtcatccaggctggaatgcagtggcacratctcggctcactgcatcctccacctcctgggttcaaaagattttcgtgactcagcctcccgagtagcagggattattggcatgtgccaccacgcccagctaattttcgtattttttagtagagatagggtttcaccatgctgaccaatctggtcttgaactcctgacttcaagggatcctcccacttcagcctccaaaagtgctgggattataggcgtgagccaccggcacccagccagattatttcctgaagccattcaagacagtcattagaaactacaaaaacaaggaatctgattttttatgtacccacaaaaagacagtagtttgtgattaactcagaaaaagagagcgagagagagaggtatacaaaagatgggaagtggcaggtatctcctacttcttcagaacagacttcgggtgagttaat

SEQ ID NO: 574229 - DNA, 568 bp, Homo sapiens
agtatctgacattagtttggaaattttarcggattgcatgtagattataccaacacattttaaaatgttaatcattttatttaatactaatttaatacaaataagcagttatgatttccttatttggcagccaaatatttggaatgatattggatgctatatgcacctacccctataacaaaagccagttcattatttattcagattattattcagatgggagaaaaaatactaatggaaatctgagaaaatatcagcatcactaagataaaccaaaacctattttaacagaaaaaaatggtgcaatgtttcaagaagaactggaattatatattgtgaatgatcctaagctgatgagccactactgacttaggggataaacattttattacagcagtcaatttggaagttataaaattcctcttttgggagttatttggggggttagaatagggatgcagctagaaaaatcagtgaaatctccagaatgaacagcctggcactttagtatctcagtgggcactcaggaaagctatactatagaaagcaggtccccatttatgatagt

SEQ ID NO: 574230 - DNA, 469 bp, Homo sapiens
tcaaacttttttctatgcaaatctacatatatagaaacacacacatatatatagaagtctaattatayttcacatactgttttgtaatctgtgtgttttacttaatgtactagcaacttatttatatttcaatatcatttatatatataaaatatatatattttttgagatggagtttcgttcttcttgtccaggctagagtgcaatggtgcaatcgcggctcactgcaacctctgcctcccagtttcaagcgattctcctgcctcagcctcccaagtagttgggattacagagcccaccaccatgcccagctaatttttgtatttttagtacagatggggtttcaccatgttgtccaggctgatctcgaactcttgacctcaggtgatccactgcgcccggccttttatatcattttcgaaacggctgaataaatcccattatatgactatattgtaaggcaagtcat

SEQ ID NO: 574231 - DNA, 604 bp, Homo sapiens
cactattgtatacttcccttctttaaatgcattttctatatctcttatctgatttgatcctcatataaaccctattggcaaagaaggatgggaatgatcaccatcaacatccatttgattactccaaggtataagtagagtttaagatcgatcatggtactacaagttaatggggagctaagtgctctgactggtggtccaggtttttccaccagagtttttctaggcttgagaaaaataattgaaccattgccattatgtaacacttctagaaattaaaacttctatagaagccaaaataaggtttcaaaaattgtaagatattataaatattactttagtgaaaaacattttcaacactcgtagactaacactatataatgtgatgtaatcacactactaacaatataattaaaggattgacaacaacatttattcatagactgttgtaagaattgtgatctggtagtaatagcagaaaattaaaaacgtatatcagtcaaggttctctaggagaaaataaccaataatctctstatatatatcctattgattatttttactaaaataaaaataataatcctataaataatggtatttagta

SEQ ID NO: 574232 - DNA, 604 bp, Homo sapiens
cactattgtatacttcccttctttaaatgcattttctatatctcttatctgatttgatcctcatataaaccctattggcaaagaaggatgggaatgatcaccatcaacatccatttgattactccaaggtataagtagagtttaagatcgatcatggtactacaagttaatggggagctaagtgctctgactggtggtccaggtttttccaccagagtttttctaggcttgagaaaaataattgaaccattgccattatgtaacacttctagaaattaaaacttctatagaagccaaaataaggtttcaaaaattgtaagatattataaatattactttagtgaaaaacattttcaacactcgtagactaacactatataatgtgatgtaatcacactactaacaatataattaaaggattgacaacaacatttattcatagactgttgtaagaattgtgatctggtagtaatagcagaaaattaaaaacgtatatcagtcaaggttctctaggagaaaataaccaataatctctctmtatatatcctattgattatttttactaaaataaaaataataatcctataaataatggtatttagta

SEQ ID NO: 574233 - DNA, 468 bp, Homo sapiens
ggttgcaagtggaggttgcagtgagccaagatcatgccactgcattccagcctgggggaaagagcaagcccttgtctcaaaaaaaaaaaaaaaaaggaaattcaagcaaataaataatgtttcaaatacatgccagttcagcaagcagagggaaattcctagtgaagtgattctatgttgtccttcccaatgattgggagagtctgatgtgctaattataaaataatttaatacctaagtcttttgtgggttttggcaacataraaaaaaaggcttacttggtatgaattgctataatggaatatttatcagaagaagctaactttatccactacagaatgctttttgatgtcattaacctacagaaatgattttaggaaagtagtggaaaagtatccacagggtgaggtgacaagaagctttcttttgctcctaaaggctacattgagtaatgtagcaagcaacagt

SEQ ID NO: 574234 - DNA, 454 bp, Homo sapiens
gcacatagtcttctttataaataagaattcatcataactctgttagctcctcaaatcctcctgagtctttcatttcctctctacatcatccactccagctactcatacccagtggtgccagcctgaaccctaycaccacttagaaatggatcacctaggagacctctagcatccagtcctctgctcataatcttctgggtcctccataggttaccagtgagatatccttcgtggaatccttccttattcagcttgggctgcattgttagtcccctgaacagttctatgagccatcataacagttgaatccccttgccttactggttggtttttgttgttgttgtttgttttgttttgtttttcagtgtttttgtttggttggtttttttttgtttgcatttgacgactcaagtccctgatttaaaacaatatagctacaaatataagcaagcca

SEQ ID NO: 574235 - DNA, 563 bp, Homo sapiens
tctcttaaatattttttatagattaacttatttaattttcacacaattctgagagaagtactaatatgactcgtatcttaaaggtaagaaagctatggcacagagaggttaagtggtttgtctggtcatatggctcataagtggtattgttggaaaaaaaaaagagagttgtaaagctgctctgaaaaaattaagtgccatacaaatctaaaatctatgctcatttctatcattggtgtgatagcatacccatttcmacaatttatgtggtgggtaggcacaattcttattcccaaaaaaaaaaaaatagactgccagatctatgctcattattttcttcctaaaaatgaataaaggaatgtatacaaatagaaaaatacataagacatatgcagaaaggaataacttgggaaggaagtaaaaatatagctatgataatagattaaggtagattgttaatttagccttaaaacttaaaattatcacattaattaattataatttttaatttacctagtttttgtttttcaaatagtgctggacattttataaaacctgacaac

SEQ ID NO: 574236 - DNA, 563 bp, Homo sapiens
tctcttaaatattttttatagattaacttatttaattttcacacaattctgagagaagtactaatatgactcgtatcttaaaggtaagaaagctatggcacagagaggttaagtggtttgtctggtcatatggctcataagtggtattgttggaaaaaaaaaagagagttgtaaagctgctctgaaaaaattaagtgccatacaaatctaaaatctatgctcatttctatcattggtgtgatagcatacccatttccacaatttatgtggtgggtaggcacaattcttattmccaaaaaaaaaaaaatagactgccagatctatgctcattattttcttcctaaaaatgaataaaggaatgtatacaaatagaaaaatacataagacatatgcagaaaggaataacttgggaaggaagtaaaaatatagctatgataatagattaaggtagattgttaatttagccttaaaacttaaaattatcacattaattaattataatttttaatttacctagtttttgtttttcaaatagtgctggacattttataaaacctgacaac

SEQ ID NO: 574237 - DNA, 248 bp, Homo sapiens
gtaaacattattaaaaatgtctctgagccgaatacaaatggactgaggcttttctaaactggcaatcaaatttcaaactgtatgaagcaactgggctgtgggtgagtaaagaatgggaatttagtaaatgttctgtaggaattggcttaactctcagaggtctttgaaaaactatcgcttgaactttattattattattatttatcatactttaagttttaggrtacatgtgcacaacatgcaggttt

SEQ ID NO: 574238 - DNA, 531 bp, Homo sapiens
caactaaaacatccctgaaagtcatacacttgatcatttcatactttatttatatcactcaaatggctttcagtcacatttatattaaatgtcaaactccttaccagggtctttcaggtcctcaattattcaatacctactaaaaatctgttcaatgtccagtggctagaatgatccttttaaaatgtatttcttatcatgaaacatcccctttcagtgcactcagatggcatcccatcctacacagatgaaatccaaagttctcaacatggkgttaaatttccctgttatcttgtccgcagtgtgctttatggcatcattttaccattgtctacttcattgaccataatgaattttattaactcttttactgcttttcaaacttcccataaactctctgacattaattccattgcctttgctggaattaatctggagagctcttatattatatttatatttatatatctctattataatatttttgagatgaaaactcactgtgctgcccacgctggagtgcacagccat

SEQ ID NO: 574239 - DNA, 423 bp, Homo sapiens
gtctttcaggtcctcaattattcaatacctactaaaaatctgttcaatgtccagtggctagaatgatccttttaaaatgtatttcttatcatgaaacatcccctttcagtgcactcagatggcatcccatcctacacagatgaaatccaaagttctcaacatggggttaaatttccctgttatcttgtccgcagtgtgctttatggcatcattttaccattgtctacttcattgaccataatgaattttattaactyttttactgcttttcaaacttcccataaactctctgacattaattccattgcctttgctggaattaatctggagagctcttatattatatttatatttatatatctctattataatatttttgagatgaaaactcactgtgctgcccacgctggagtgcacagccat

SEQ ID NO: 574240 - DNA, 423 bp, Homo sapiens
gtctttcaggtcctcaattattcaatacctactaaaaatctgttcaatgtccagtggctagaatgatccttttaaaatgtatttcttatcatgaaacatcccctttcagtgcactcagatggcatcccatcctacacagatgaaatccaaagttctcaacatggggttaaatttccctgttatcttgtccgcagtgtgctttatggcatcattttaccattgtctacttcattgaccataatgaattttattaactcttttactgcttttcaaacttcccataaactctctgacattaattccattgcctttgctggaattaatctggagagctcttatattatatttatatttatatatctytattataatatttttgagatgaaaactcactgtgctgcccacgctggagtgcacagccat

SEQ ID NO: 574241 - DNA, 422 bp, Homo sapiens
gaattctgacattttactgctaaaataaatggtttttgtttgtttgtttttagagcacttaatttaatgacttaatcatttgtcttttttcttctatggcccaaattccatattttatggtagttttctcgttggtttatatacatgaaccaaattttttttttttttttttgagacagggtctcattctgttatccaggctggaatgcagtggtatgatcttggctcactgcagtctcaacctcatgggctgaagtgatcctccacctcagactcctggatagctgggactacagatgtgcgccatcacacctggctaattttttatagagatggagttttgccatattgcccaggttagtcttgaactcctgagctaaagcaatccacccacyttggcttcccaaagtgctgggattata

SEQ ID NO: 574242 - DNA, 479 bp, Homo sapiens
gttaatttatgctgaaatacctgtggtcagaaaatgtaacttttattatttcaaaccattaaattaattgaggtttgtttcatgtcataacatagagccaatgtgctagacaattgttcatgtacatttgagaagaatgtgtattctactgttattgggcagagtattctatagatgcctcttaggtctagttatagtgtttttcaagtcttctatcttctgttagttattttattcattacagaaagtagggcattgaattcctcaactattatttataaactgtctctttctccctttaatgctatgtgttatgcttaaacgcattttgagccataatctttttatcgttatgtctttctttatctgtagtaacactttttgttttaaagtcaattttgtctgaattagtatatccactccagctctcttttggttactgcttagcatatgtttycccattctttctctttaaacta

SEQ ID NO: 574243 - DNA, 583 bp, Homo sapiens
attttcttagtggctatcttgacaggcacaatcaacatrttaaacgtataaataaaatcacatttgaataatacaaatttcattttaatagcatacaagtactcttttccttcacatctctgtccctccagttttatattgttattgtcacagagtacatatttttccagtgagtggacattaccatagacttataatgattgtttaggatattttccttttaaattgtataaaaaaagaggattcacaagccaacatatgataatattggctttatatttacttatataattaactttacctgtgttctttgtttcttcacgtcttttatttattgtctaacatgtttcattttatactgaacaccttcctttagaatttgtttaagagactcctttagcttgtttatctggaatgtcttaatttcccttttattcttgaagaatcatatggccagatattgaattatttgttgacagttttttgctcttttccagtgctgaaacagtccatcccacaggcttctattctcagagattatgataaaatatcagttgttaactttatggagcatactttgtac

SEQ ID NO: 574244 - DNA, 546 bp, Homo sapiens
acaggtgcccaccaccatgctcagctaatttttgtattttcagtagaggggaggtttcaccatattgttsaggctgttctcaaactcctgacctcaagtgatccacctgcctcggcctcccaaagttctgggattacaagtatgagccaccatgcccggtgattttctacatttgtataaatatatataaaataatgtaaaagagagtagcatgcaactttaaactatttttataataaaataatgcttttctactgcaggtggaaattcagatgcaatgattggttggatgaaagattagaaaaacatcctcattctaattagaggatgaaggaagtgttcagctcaattcttggttactttttatgttcattgacttgcctcagggtagaacccaagaaacattcaagatggcgttagcaaagattctgtaatctttaagtgatgtattccattgaaaaccttttattaatttgttttagatgtttcaagaacttttattgaaatctagagatattaatgctagaataaaacttattacccaat

SEQ ID NO: 574245 - DNA, 546 bp, Homo sapiens
acaggtgcccaccaccatgctcagctaatttttgtattttcagtagaggggaggtttcaccatattgttcaggctgttctcaaactcctgacctcaagtgatccacctgcctcggcctcccaaagttctgggattamaagtatgagccaccatgcccggtgattttctacatttgtataaatatatataaaataatgtaaaagagagtagcatgcaactttaaactatttttataataaaataatgcttttctactgcaggtggaaattcagatgcaatgattggttggatgaaagattagaaaaacatcctcattctaattagaggatgaaggaagtgttcagctcaattcttggttactttttatgttcattgacttgcctcagggtagaacccaagaaacattcaagatggcgttagcaaagattctgtaatctttaagtgatgtattccattgaaaaccttttattaatttgttttagatgtttcaagaacttttattgaaatctagagatattaatgctagaataaaacttattacccaat

SEQ ID NO: 574246 - DNA, 611 bp, Homo sapiens
tgtgctgaaccaatcttgaatctgagaaatgaagcccacttggtcatggtgaattaactctttattatgctactgattcacgttgcaagtgaatattttactgaggatttttacatctatgttcatcagggatattggcctgaagtttcctttttggatcatgtctctgccagattttggtatcagggtgacgccggctttgtggaatgatttaagaaggaacacctactctcaatttcttggactagtctcagtaggactggttcttctttgtaaatctggttcartttgtctgtgaatccatctagtgcagggctttttttttttttcttggttgttggtaggctttgtattactgattcagtttcagagtttgttattggtctattcagattttcgcggtcttcctgaattaatcttggaaggtgttgtgttcccaggtacttactcattttctctagattctctatttgcaaagaagtgttaatttcataatagcttattggaatcttctatgtttttctgggattggttgtattatctttgtcagttctaattacacttatttggttattcttttttttgttctctttttaaatctagctagcagt

SEQ ID NO: 574247 - DNA, 570 bp, Homo sapiens
gaagtaaaaagcttatcagagggtagaaaaacaaacaaaaatgtaaaacatcccagacattgagaattaaggaaatgcaagagagattacatcaaggaaataatgcaagaaaagtttcagtattgaaagacatgtgtttccaaataagagagtccaacaagtgccagcacagaggataaagaataattacattaaagtacatcattgtgaaatttcattataacaaaagaggtcctaaaaatttccaaaaagacaaaattcatcacccatttattcgtttattccacaartatttattgaagtcctactatgaacagaacttattcataagatggcttaagattgcagatctgaaggaaatttgacaatgagctttatgggtataaagagatattaggcagcaagacagcaagtgcaaagtccctgaggtgcaagtgttcttggcatgtctgatgtgcagctcagtagccaatatggtcagaataggatgagtgagaagagtgagaaggggtaagttcagacaactaagagagaccaaatccagcagcaccttatgactttgaattttac

SEQ ID NO: 574248 - DNA, 599 bp, Homo sapiens
gtgcctggtcccatcctctcagcagcccacagatgtgctaggatcaggcacagctggacacatcagcagctctgctccaggaagacccccattccctgctgctttacctttctgtagggttttcatgtaggcagccttccaagtctggaaaaatggcaagagcttakgcaccgactgctcagagagttgcacaaccgacagtgttggaaacatcagctgatagtacctggacatcttgtgtgaaatcaagcaacagcccctccctctgagggaaggggaccacccttcccagctgccttatttccaggattgtgaaagccatcaggttcatctagtgagcagttctgcctatattcccaaagtccttctttgagctaattaaacactgacttatcaagcacctagtctggtctgtgtagagatgaagctttttataaaggttagaagtgtgctgagctttggaatccagcagtcatagactcaaaccatagcatcaccattcattagctctgtggctgtgggcaagtcagaaaacttctctgtgtctcagtttccacatctctaaaagagaaataaaaattataccaataattatagga

SEQ ID NO: 574249 - DNA, 599 bp, Homo sapiens
gtgcctggtcccatcctctcagcagcccacagatgtgctaggatcaggcacagctggacacatcagcagctctgctccaggaagacccccattccctgctgctttacctttctgtagggttttcatgtaggcagccttccaagtctggaaaaatggcaagagcttatgcacygactgctcagagagttgcacaaccgacagtgttggaaacatcagctgatagtacctggacatcttgtgtgaaatcaagcaacagcccctccctctgagggaaggggaccacccttcccagctgccttatttccaggattgtgaaagccatcaggttcatctagtgagcagttctgcctatattcccaaagtccttctttgagctaattaaacactgacttatcaagcacctagtctggtctgtgtagagatgaagctttttataaaggttagaagtgtgctgagctttggaatccagcagtcatagactcaaaccatagcatcaccattcattagctctgtggctgtgggcaagtcagaaaacttctctgtgtctcagtttccacatctctaaaagagaaataaaaattataccaataattatagga

SEQ ID NO: 574250 - DNA, 599 bp, Homo sapiens
gtgcctggtcccatcctctcagcagcccacagatgtgctaggatcaggcacagctggacacatcagcagctctgctccaggaagacccccattccctgctgctttacctttctgtagggttttcatgtaggcagccttccaagtctggaaaaatggcaagagcttatgcaccgactgctcagagarttgcacaaccgacagtgttggaaacatcagctgatagtacctggacatcttgtgtgaaatcaagcaacagcccctccctctgagggaaggggaccacccttcccagctgccttatttccaggattgtgaaagccatcaggttcatctagtgagcagttctgcctatattcccaaagtccttctttgagctaattaaacactgacttatcaagcacctagtctggtctgtgtagagatgaagctttttataaaggttagaagtgtgctgagctttggaatccagcagtcatagactcaaaccatagcatcaccattcattagctctgtggctgtgggcaagtcagaaaacttctctgtgtctcagtttccacatctctaaaagagaaataaaaattataccaataattatagga

SEQ ID NO: 574251 - DNA, 531 bp, Homo sapiens
tttgaccaaatggtttgccatttcatagcaaagatcattggctttttagccagcaaaatatgggccctcaattctcaaggaccctttaagcctctcctcagccaaagggatggctacattatttgcaagaccccctcattcaaaaagtgggggaggccaggcatggtggctcacacctgtaatcccagcactttaggaggccraggcaggtggaacacctgaggtcaggagtttgagaccatcctggccaagatggtgaaaccccatctttactgaaaatacaaaaaaattagctgagcatgatggcgggagcctgtaatctcagctactcaggaggccgagacagagaattgcttgaacccaggaggtggagactgcagtgagctgagattgtgccgctgcattccagcctggtgacagagtgagactccacgtcaaaaaaaaaaaaaaaaaaaaaaaaaaaaaattagctgggtgtggtggtgcacacctgtaatcccagccactggggaggtggagacaggagaatta

SEQ ID NO: 574252 - DNA, 506 bp, Homo sapiens
atatatatatatatataaaatgaataataggtatatctttatgatatgttgacttttctcatgttcatgatgattgatctataccaaggactaaataargcttccccagttcaagtaaatatcactgttccccaggcaaggtatgtgggttctgttcacaggccatctgattgtagcaaataatcagtagcaaataagcaggaaagggcctggtggatgggagcatattttcagttgattttctcttaagggacttgggatattttctttggcatacaggtgattctcatatattacaaaaggtatttagacccctcctctgtttctcttcctaagctcgaagcccattctgtaagttccccatggacaagttgtcacgttatttaaataacttatctccaagctttatcctgaagtcaaacatcagagtcagtcacattaagagtgggctctgataaagagacttacaaacctttaaataaatatccaaagatggcctcagagcc

SEQ ID NO: 574253 - DNA, 506 bp, Homo sapiens
atatatatatatatataaaatgaataataggtatatctttatgatatgttgacttttctcatgttcatgatgattgatctataccaaggactaaataaggcttccccagttcaagtaaatatcactgttccccaggcaaggtatgtgggttctgttcacaggccatctgattgtagcaaataatcagtagcaaataagcaggaaagggcctggtggatgggagcatattttcagttgattttctcttaarggacttgggatattttctttggcatacaggtgattctcatatattacaaaaggtatttagacccctcctctgtttctcttcctaagctcgaagcccattctgtaagttccccatggacaagttgtcacgttatttaaataacttatctccaagctttatcctgaagtcaaacatcagagtcagtcacattaagagtgggctctgataaagagacttacaaacctttaaataaatatccaaagatggcctcagagcc

SEQ ID NO: 574254 - DNA, 463 bp, Homo sapiens
tctaaactaatccacgataatakagtgaaataaaataagaggctgtcattcacactgagcaaggaagagtcacttatataactttatcacattaaattgggataatcattgcgaaacaaacacaatcacacacacagataatcatatttcaaaggtgttacacacgtcatttcagtgttcaaagatattaaacgatcactatgataaaatgtcacaactgtgacgcattatattaataattctctgacgtactgagtctttattcctggtaatttcagtggggggggctttgacatcagcatacgtgcagccctcataaatttccagaatcttcagattctccaggaaattaatatattcagctctatacactttttttctttccagcttttcagccttctttgggttttttttagtgctactatttaaaaaaaaaaaaaaacttttaagtaatgaaaactca

SEQ ID NO: 574255 - DNA, 530 bp, Homo sapiens
actaatccacgataatatagtgaaataaaataagaggctgtcattcacactgagcaaggaagagtcacttatakaactttatcacattaaattgggataatcattgcgaaacaaacacaatcacacacacagataatcatatttcaaaggtgttacacacgtcatttcagtgttcaaagatattaaacgatcactatgataaaatgtcacaactgtgacgcattatattaataattctctgacgtactgagtctttattcctggtaatttcagtggggggggctttgacatcagcatacgtgcagccctcataaatttccagaatcttcagattctccaggaaattaatatattcagctctatacactttttttctttccagcttttcagccttctttgggttttttttagtgctactatttaaaaaaaaaaaaaaacttttaagtaatgaaaactcatattcagttactgcaggaagcctaaggccccacagatttcccttgggcatccgacgttgacagtagctccat

SEQ ID NO: 574256 - DNA, 530 bp, Homo sapiens
actaatccacgataatatagtgaaataaaataagaggctgtcattcacactgagcaaggaagagtcacttatataactttatcacattaaattgggataatcattgcgaaacaaacamaatcacacacacagataatcatatttcaaaggtgttacacacgtcatttcagtgttcaaagatattaaacgatcactatgataaaatgtcacaactgtgacgcattatattaataattctctgacgtactgagtctttattcctggtaatttcagtggggggggctttgacatcagcatacgtgcagccctcataaatttccagaatcttcagattctccaggaaattaatatattcagctctatacactttttttctttccagcttttcagccttctttgggttttttttagtgctactatttaaaaaaaaaaaaaaacttttaagtaatgaaaactcatattcagttactgcaggaagcctaaggccccacagatttcccttgggcatccgacgttgacagtagctccat

SEQ ID NO: 574257 - DNA, 530 bp, Homo sapiens
actaatccacgataatatagtgaaataaaataagaggctgtcattcacactgagcaaggaagagtcacttatataactttatcacattaaattgggataatcattgcgaaacaaacacaatcacacacasagataatcatatttcaaaggtgttacacacgtcatttcagtgttcaaagatattaaacgatcactatgataaaatgtcacaactgtgacgcattatattaataattctctgacgtactgagtctttattcctggtaatttcagtggggggggctttgacatcagcatacgtgcagccctcataaatttccagaatcttcagattctccaggaaattaatatattcagctctatacactttttttctttccagcttttcagccttctttgggttttttttagtgctactatttaaaaaaaaaaaaaaacttttaagtaatgaaaactcatattcagttactgcaggaagcctaaggccccacagatttcccttgggcatccgacgttgacagtagctccat

SEQ ID NO: 574258 - DNA, 463 bp, Homo sapiens
tctaaactaatccacgataatatagtgaaataaaataagaggctgtcattcacactgagcaaggaagagtcacttatataactttatcacattaaattgggataatcattgcgaaacaaacacaatcacacacacagataatcatatttcaaaggtrttacacacgtcatttcagtgttcaaagatattaaacgatcactatgataaaatgtcacaactgtgacgcattatattaataattctctgacgtactgagtctttattcctggtaatttcagtggggggggctttgacatcagcatacgtgcagccctcataaatttccagaatcttcagattctccaggaaattaatatattcagctctatacactttttttctttccagcttttcagccttctttgggttttttttagtgctactatttaaaaaaaaaaaaaaacttttaagtaatgaaaactca

SEQ ID NO: 574259 - DNA, 531 bp, Homo sapiens
ctgtcattcacactgagcaaggaagagtcacttatataactttatcacattaaattgggataatcattgcgaaacaaacacaatcacacacacagataatcatatttcaaaggtgttacacacgtcatttcagtgttcaaagatattaaacgatcactatgataaaatgtcacaactgtgacgcattatattaataattctctgacgtactgagtctttattcctggtaatttcagtggggggggctttgacatcagcatacgtgcagccctcataaatttccagaatcttcagattctccaggaaattaatatattcagctctatacactttttttctttccagcttttcagccttctttgggttttttttagtgctactatttaaaaaaaaaaaaaaacttttaagtaatgaaaactcatattcagttactgcargaagcctaaggccccacagatttcccttgggcatccgacgttgacagtagctccatcaatcctgacttgggctcccctttctcacgtgcacttt

SEQ ID NO: 574260 - DNA, 609 bp, Homo sapiens
ttaaataagatctcaaaaacagaagcaataaaagcaaaaatagacaaaagagattacatcaaactaaaaagttttccacagtaaagaaaacaacagagtggagagataacctataagatgggagaaaaatatckacacactatacatcagacaaaagattcatatccagaatacataagaaacataacagcaaaaaaaatctatttaaaaatgggcaaaaaactttaatagacatttctcaacagaaagtatacaaaaggccaacaggtatatgaaaaaatgttcactatcactaatcatcataaaatgccaatcaaaaccaccatcaaataccacctcactctagttagcatggctattaataataaaaagacaaaagaaagcaagtgttggtgtgaatgtgacggaaagggaacccttacatgctgtgggtaggattataaatgagtatatccattatggaaaacagtgtgtaaattcttcaaaacattaaaactagaattacgataagatcaagcaatcccactactagatatatatccaaagaaattaaatcagtatgtcaaagagatatctgcactcccatccttattgccacactatttacaa

SEQ ID NO: 574261 - DNA, 460 bp, Homo sapiens
ttcctttccttaggacccatttttaattgtttcatgggctttactttttgtagattcaactcctcctcattactgagttttcatgggcacaattatgctggtacttggcagcatgcaatcaactagacaatagtttagcaggaaaagagctaaaatgttaggaagactatggctgtatcagcatatttacttcaaggtatagacagattcctaaaaccatcaagtatctttcccacttaaacagcatctgatattttcatgacaataccatgcatatgtacatccttaaaagattaataaatctctatttgaattaacagatacatctgcatgcatacrtacatatgcacaccagataatataatgggatttttttcagacagcatgcttcctactgtgcctcttcaattaatatatatatatatattgtgtgtgtgtgtgtatatatatatacacacat

SEQ ID NO: 574262 - DNA, 505 bp, Homo sapiens
aatggtggtttacctggaatcatgaaccagatattcaatagaaagtcattcatttgcccattgtcaccatatacatgatatgtaatatctgtctgtctgtctgtctgtctatctatctatctatctatctatctatctatctatctatctcatgtgtgtgtgtgtgtgtgtgtgtgtgtatgtgtgtgtgtgtttaaaatcaaggaggatcaaagagaatactcagtggtatcagataatttcattaccatctgtatttttccctacttcatttcattttcattgaagtgtgtgtgtgtgtgtgtgtgtgtgtgtgtgtgtgtgtgtgtatgtgtatggattcggttgtcctcaaggttwtatatgtctcttctctactaagtgactaatggttttttttcttgtcaatcagtcccttgttggtcaagtggctgcaactgttgagaatcgttttactaaaacgttgcctgccggcagaactctatgcggtgcttttacaagagat

SEQ ID NO: 574263 - DNA, 231 bp, Homo sapiens
ccagactggtcttgaactcctgacctcaggtgattcacctgccttggcctcccaaaatgctgggattacaggtgtgagccaccacgcctggccagaaaagaggcttyattgactcagttctgcatggctggtgaggcctcaggaaacttatcatcatggaagaaggcaaagaggaatcaaggcacatcttacattgtggcaggagagaaagagagagtgaaggggaactgt

SEQ ID NO: 574264 - DNA, 594 bp, Homo sapiens
tcattttatgaggccaggatcatcctgataccaaaacctagcaaagatacaacaaaaaaagaaaacttcagaccaatattcttggtgaatatgatgcagaaatccttaacaaaatactagcaaaacaaattcagcagcacatcgaaaagctattsccccatgatcaagtaggcttcatccctgggatgcaaggttggttcaaaatgtgcaaatcaataaacgtgatttaccacatacacaaaattaaaaccaaaaaacaaataattatctcaatagatgaagaaaatgccttcaataaaattcaatattctttcatgttaaaaccctcgattatgcattgaaggaacagacttcaaaataataagactcatctatgacaaacccatagccaacctgcagaatgggcaaaagctagaagcattctccttgaaaagcagaacaagataaaaatgctctctcccatgactcctatttgacatagtactggaaatcctagccagaggaatcaggcaagagaaaaaaaagacatccaaacaggaagagaggaagtcaaactatctctgtttgaagacaatatgattctatacccagaaa

SEQ ID NO: 574265 - DNA, 594 bp, Homo sapiens
tcattttatgaggccaggatcatcctgataccaaaacctagcaaagatacaacaaaaaaagaaaacttcagaccaatattcttggtgaatatgatgcagaaatccttaacaaaatactagcaaaacaaattcagcagcacatcgaaaagctattcccccatgatcaagtaggcttcatccctgggatgcaaggttggttcaaaatgtgcaaatcaataaaygtgatttaccacatacacaaaattaaaaccaaaaaacaaataattatctcaatagatgaagaaaatgccttcaataaaattcaatattctttcatgttaaaaccctcgattatgcattgaaggaacagacttcaaaataataagactcatctatgacaaacccatagccaacctgcagaatgggcaaaagctagaagcattctccttgaaaagcagaacaagataaaaatgctctctcccatgactcctatttgacatagtactggaaatcctagccagaggaatcaggcaagagaaaaaaaagacatccaaacaggaagagaggaagtcaaactatctctgtttgaagacaatatgattctatacccagaaa

SEQ ID NO: 574266 - DNA, 552 bp, Homo sapiens
aggagattttaaaattattttatcccgctgttcttcctaaacagtgaaataatttacatttctataataaaattgtgttttatttcttgttattcccatcatagcagttagctatattggaaatatgataaayaatgattgaattaatgaacttttttgtggtttgtatgctgaatttttagtctttaagaactttaacagattgtaaaataaattcttttttttttcttttttctttttaagacggagttttgctctgtcgcccaggctgcagtgcagtgacacgatctcagctcactgcaaattctgcctgctgggttttagcaattctcctgcctcagccttctgagttgctgagattacaggtgcgagccaccactcacagctaatttttgtatttttaggagagacagggttttgccatgttggccagcctgagtcgaactcctgacctcagtaatccacctgccttggccctcccaaagtgccgggattacaggtgtgagccaccgtgcccagccagattgcaaaataaagtcttaatatcagctt

SEQ ID NO: 574267 - DNA, 552 bp, Homo sapiens
aggagattttaaaattattttatcccgctgttcttcctaaacagtgaaataatttacatttctataataaaattgtgttttatttcttgttattcccatcatagcagttagctatattggaaatatgataaacaatgattgaattaatgaacttttttgtggtttgtatgctgaatttttagtctttaagaactttaacagattgtaaaataaattcttttttttttcttttttctttttaagacggagttttgctctgtcgcccaggctgcagtgcagtgacacgatctcagctcactgcaaattctgcctgctgggttttagcaattctcctgcctcagccttctgagttgctgagattacaggtgcgagccaccactcacagctaatttttgtatttttaggagagacrgggttttgccatgttggccagcctgagtcgaactcctgacctcagtaatccacctgccttggccctcccaaagtgccgggattacaggtgtgagccaccgtgcccagccagattgcaaaataaagtcttaatatcagctt

SEQ ID NO: 574268 - DNA, 590 bp, Homo sapiens
agtcttctaatatgtgctattcagacccatgattctattaaactctctattaataaaacatatatrtagtttgatacagaaaaaaaaaaagaatttatgtgctggtacatttccaaagactgaccaagggaaatatctttgagagataactttgagtagaaatctgaaaagagtgggatagacaaccatgtgcatatgtagagaaagaatatttttttaaaaaggtgagtacaggtgcccagaggtggaaatgtccaaggtgttttgtagaagcagcatggaggccagtgtctctgcaatggagaggacgggaaataaataataggaaataaggtcaaagagggagtagcaggtctttcttccttccttccttccttctttcctttctttctttctttctttttttctttctttctttctttttcagcttagtttggaatgaaataacttcaatttctgctttcagttaatctgcagatgtatttggtaagaaagtagataaaggtaaagcagagttctaactttagaaacgagctgttgaaacacaccagcagacttgccactatcttaggggaaaggccacattaatg

SEQ ID NO: 574269 - DNA, 590 bp, Homo sapiens
agtcttctaatatgtgctattcagacccatgattctattaaactctctattaataaaacatatatgtagtttgatacagaaaaaaaaaaagaatttatgtgctggtacatttccaaagactgaccaagggaaatatctttgagagataactttgagtagaaatctgaaaagagtgggatagacaaccatgtgcatatgtagagaaagaatatttttttaaaaaggtgagtacaggtgcccagaggtggaaatgtccaaggygttttgtagaagcagcatggaggccagtgtctctgcaatggagaggacgggaaataaataataggaaataaggtcaaagagggagtagcaggtctttcttccttccttccttccttctttcctttctttctttctttctttttttctttctttctttctttttcagcttagtttggaatgaaataacttcaatttctgctttcagttaatctgcagatgtatttggtaagaaagtagataaaggtaaagcagagttctaactttagaaacgagctgttgaaacacaccagcagacttgccactatcttaggggaaaggccacattaatg

SEQ ID NO: 574270 - DNA, 590 bp, Homo sapiens
agtcttctaatatgtgctattcagacccatgattctattaaactctctattaataaaacatatatgtagtttgatacagaaaaaaaaaaagaatttatgtgctggtacatttccaaagactgaccaagggaaatatctttgagagataactttgagtagaaatctgaaaagagtgggatagacaaccatgtgcatatgtagagaaagaatatttttttaaaaaggtgagtacaggtgcccagaggtggaaatgtccaaggtgttttgtagaagcagcatggaggccagtgtctctgcaatggagaggacgggaaataaatmataggaaataaggtcaaagagggagtagcaggtctttcttccttccttccttccttctttcctttctttctttctttctttttttctttctttctttctttttcagcttagtttggaatgaaataacttcaatttctgctttcagttaatctgcagatgtatttggtaagaaagtagataaaggtaaagcagagttctaactttagaaacgagctgttgaaacacaccagcagacttgccactatcttaggggaaaggccacattaatg

SEQ ID NO: 574271 - DNA, 586 bp, Homo sapiens
taaataggaaagagaaactttacttaaaaaattaacacgatggaaaaawgtattttttattgattgtacagaacacccacataaacatatagcttagcttgtaagagaatgataaaaacaaattaaaatatttgaagtaaatgactaaaaccaaatgaaaaatagagtgaagctaaaatttaatttatatttgcagtaagcaaaaggtaagaaacaacttaaaaactaagaaaataggataaaaaaggagactacatgccaaattttttaaaaagagatgataaaatctactaaaaacaaaagtttaaaatacaataaaacataaattgagctaagatatacattaaatgatcaataatgtcccaacttgctctgcccttatgcgcagaaacaatctggtatcgacttaagatgacagaaatgtaaaatttctttacattgacttccatgggctgcaatttgttgttgttttgtttgggcccaataatttttcaaaattttaattgtatattttcgaagggtgcaataatttcagtattcaaactgtatcaatagtagtatatgtaacaatgaaaattttaattgt

SEQ ID NO: 574272 - DNA, 569 bp, Homo sapiens
gaaacaaaattaactattgattaaattattgttatttggataaaataaattgtattgtttaccccctaaaacacttgctttagtatttgtatctttatattgtwtatacatataagtaatgatttttggctaaatatattttaaatccacataaaaattgttttcaatgattgacttttctgttgttagaaatattccatgttcatgtaaagccaaaagtatttaagtaggaattatgataaaataaaaataactagcacattttatgaaactttttattcctgtttctacttttggaggtttaaatttcagatatttttagttttctattttgcttttgttgtaagtttgtgtttttcccagacttatatctgaaaattcccccttggacccaaatccaaattctgttaagaactagattaggccctgtctttggtggacttttgttcctcttttgctctttataacttttttctttctgatcttctcttggacttacagtaagcccccattctcaaagctcttgcttacacacagccttatataatggtcatttctaatttggggca

SEQ ID NO: 574273 - DNA, 595 bp, Homo sapiens
tcccattcaacatagtactggaagttctagccagaacaatcaggcaagagaaagaaataaaaaacatcaaaataggaagagaggaattcaaattatctctcttcacagatgtatgattctatacttaggaaaccccgtgttgtctgtccaaaagctaatagatctgataaacaacttcaacaaacttgcaggatataaaatcagtacaaaaatcagtagcatttctatacaccaataatgttcaagcttagagcaaaataaagaacacaatcctattcatattagccacaaaaggaaaaaaaatacctagaaatacagctaaccagggagatgaaagatttttacaayaagaattgcaaaacactgatgaaagaaatcagagataacacaaacaaatggaaaaacattccatgctcatggatagaagaatcaatattgttaatatggtcataatgtccaaagcaacttatagatccaatgctattcctataacactaaccaatgttatttttcacagcattaggaaaaaactactctaaaatatatacagaacctaaaaagagatcaaatactcaaaacaaaccttaggggagag

SEQ ID NO: 574274 - DNA, 323 bp, Homo sapiens
ttaaaacctcccccccaaaaaaattcagtaactgagcctgtcattaatgaattctaccaagcatttaaagaacaattaatgccaatctttctcaaactcttccaaamaattaaagcaaaggaattcttccatactcattttacaagcccagcattaccctgataccaaaggacattataataaaagaaaattacaggccaataactttgatgaaaatagatacaaaaatggtcaacaaaatactaccaaactgaaattatcagcacatttaagtgttcatacaccatgactgagtgggatttattcctgagatgtaaggatag

SEQ ID NO: 574275 - DNA, 588 bp, Homo sapiens
caacctccgcctcctgggttcaagaatttctcctgcctcagcctcctgagtagctgggactacaggcatgtaccaccatgcatggctaattttgtatttttaggagagacagggtttctccatgttggttaggctggtcttgaactcccaacctcaggtgatctgacctcctcagcctcccaaagtgctaggattacaggcatgagccaccgcgcccagctcaagggcaaagccaaggattgtcaagatgggaaagcctcaaatatgaaagagaataactaaaacaaagggaaaaaagaaaactcagaacagaaacattgcaggtagggaaaaatacatcttcaaaaattataattaatatccttacagaaataagagaaacaaaggaatgttactgtagttgaatactcaagaaaacatttagaaaaaatagtagaaataaaacatttaatattatggttggagaaaatattttaggaggtccactagaaagtagaatgagtcaaagtaatgaaaaactagagagaaaaaggtaagaaaattagaggattgtttcaatagtgtawtagtatttctagaaacaaatag

SEQ ID NO: 574276 - DNA, 539 bp, Homo sapiens
agaaatgagttttatagatttggggaaatatgaagccattctaagtataagtagtagaaattctgagatgggtaacaagtacaaaacttcaaatattctgacatataaattttctaccaaactgtataatattggttaaaattagcaagaatgaaagatccctgacatgtttctcggcaactcatatgtgacttgagattaaatggaattactcagctgtggggaatgaagcctgagggaaaacactttctgaagtatagtagcaaatgagatagtataggcaaacatttaactctcctatgttgggaaaagagggactctaaactcaggagactgccaggtgagataacatcattcaaaactgggtcagttttcatctactattttattcaatgggcatgtmatccacaggaaacttgagaaagagtacttgaacttgatgccatctcaatttattttacttgcaactattacctgtgctatgaaagtctaattttactgtttgattccattgtttaaaaatcacacttcatattgtt

SEQ ID NO: 574277 - DNA, 498 bp, Homo sapiens
gccatgttgtccaggctggtctcaaactcctgacctcaggtgatcagccctcctcagcctcccaaagtgctgggatgacaggcatgagccaccatgcatgaccgatactgggcttccgttagtatccagttctttgttccacaccctcgtgcaaattctgtagccttatcttagaaaaattatttttgctttcatccactggctagcttctataaagtctttaggycctagcttgaataccacttgctcagggctgtttattctgaacaacccaacattgtcctgaccctccatacagaagacaccttgtaattattccagtgtttcttttgaaaaaggcattacagccaaagaaaaattgagtatctactcatggtatttccattttgttacacaaatatttttataatatagtcacagttctgcaacttggttcttgcattcacaagcctacagattgtttcatgtcaaattatagtgcagagtttaaacagaaca

SEQ ID NO: 574278 - DNA, 606 bp, Homo sapiens
ctacattttgtatttttctctgtggaaatagataagcaggaaggttttttattggcattattatggaaaataacatcaggtttacatttattttcatattatatttctatattaatcaaacttcattccagacttagtgtgctccaacttttaatatcatacactctatgatcacacacttccaataaatatttgtaaaatacatatgtgaatagttgcacaatatgaaatttattaaatgtacaatgtagacatttgaaaataatamaatgtggaagaaataaacaatatcattagatagattgctagttgagagagattcatcataatgggataattttgaagtcttctctgctgatttctagccagagatgttttactcattgttttgagaaagaacttgtagtggaagcagaagtcacgttagctctgacagttactctcatttatacttttaatacttttttaaatccacagattcttagcaagtattgtttttggtattactcatccatttcattacatttaacttaatggaaactatataatattctacttaattagaaataattaattaaaatacatctaaaaacacaaaaattaccc

SEQ ID NO: 574279 - DNA, 560 bp, Homo sapiens
tcttttttctttgttcccctgaataattattatgaggtagattagtagatactgggttttaattgtaaactaaaccaaaatggtttcagctttcaaaaagttttatagtctagtggctgagtcataacctgctacttagtaccttgccagtgttgtcttctgtaaacagaccagcagcaagctcatgcattgcttttgtgagaaataaattagataatgtctrtaaggcagctagcacaatgtctgccacatgtctgccacaaaataagcctattagaattagcctgttctaaatcttaacttatttttattttattacatatgttgtattattttctatattggggtgagtaaatggagatcttatgtttatttataacagtgtgtgaactggtagttgataataaaagacagagttttgatattttgatcgacagctatactaatagcagtgttattggcacttctgagtgattatttccttcctgtgtgagtcatgatatttgggttggcatttgttgccagtgcgctctgctgtctagtgccagtatctcagtaat

SEQ ID NO: 574280 - DNA, 560 bp, Homo sapiens
tcttttttctttgttcccctgaataattattatgaggtagattagtagatactgggttttaattgtaaactaaaccaaaatggtttcagctttcaaaaagttttatagtctagtggctgagtcataacctgctacttagtaccttgccagtgttgtcttctgtaaacagaccagcagcaagctcatgcattgcttttgtgagaaataaattagataatgtctataaggcagctagcacaatgtctgccacatgtctgccacaaaataagcctattagaattagcctgttctaaatcttaacttatttttattttattacatatgttgtattattttctatattggggtgagtaaatggagatcttatgtttatttataacagtgtgtgaactggtagttgataataaaagacagagttttgatattttgatcsacagctatactaatagcagtgttattggcacttctgagtgattatttccttcctgtgtgagtcatgatatttgggttggcatttgttgccagtgcgctctgctgtctagtgccagtatctcagtaat

SEQ ID NO: 574281 - DNA, 603 bp, Homo sapiens
ctactcaaccaaattctgctgatcatgtttttgtttctttgcatacagtaaatataacaagggaagtgcaataatagaaaaaactgacttgtagaaacaaacatgagaatactgttagccaaacagggtaaagttataacatggtgaaaacttagttttgataattgcaagtcttagttgagcagaagtcccactgagattgatgagacactggccttctagaaatgcagactaaggcttagttgatcctgtcaaagaaaattggattatcacttttgcaataagacctctgatttatctatcatattttaatgggaagaaaatattaagataccttacacatgtctattgccactgaaatatactttctattaacatgattcacttctgccaatatccccatatcatgtaggaaaaaaaagaattctgaccactctagaatgttcctgataactttttcaagtctattcttttattcttctgttgttggttttcaaagtgtatacttagtaagctctacataatctattagaatatagcctagaagagttagaatgatttttcctttttragcagcaattcaaatatagcagtgttaaaaag

SEQ ID NO: 574282 - DNA, 588 bp, Homo sapiens
atgttttttttttttttgagacggagtcttgctctgttgcccaggctggagtgcagtggcgtgatctcggctcactgcaagctccgcctcttgggttcatgccattcttctgcctcaagcagctgggaccaccaagcctggctaattttttatatttttagtagagatgaggtttcaccatgttagtcaggatggtctsgatctcctgacctcgtgatccacccgactcggcctcccaaagtgctgggattacaggtatgagccaccgcgtccagccatcttttgattttttaagaaaaggtgggaatttggatttttagacactagttcaaatttaaaaaataaaagatcactcagtgggactagaaggccaaacaaaagaggttatggcaagcttcggtctgaggcccaccagcttttgaccttgtctgttggtagagccattctttcccccaaaggcacgaattagatgttgttgatgagtactccagattacaactttaaaaagtggtacatccatgggaaacattttgcccttcctcctcccacctccctgtttggaacagaaaaattcatcatctgtccgag

SEQ ID NO: 574283 - DNA, 502 bp, Homo sapiens
atctgtaatgtgtgtgaaataactacagtcgagagagaaaagaaccagaaattatacaataatgttccaagagcatttgtctaggactaaagattactttttcattcttgcaaaaccatttatgaaaatgtgtaatttcttcctttttatttttgagggggcttagtgacccttccaaaattaatagtccaatattatttatattagtttgcctcagtctaactaatattccatccagaattacctcttaccacagcagcttaaaaaaaataatcaagagaggcttcaaaagtgggggatgaagggcatggcaaggccttcataaatccaactagtttgaacaactgaaattaactaaagctccaaggctgcttgtgtgattaaactctaggctactgcagatatgcaaccaatgctaaccacgtgactatgatgtaggctggtgcacagcagtccatgytggatttccctcttctagactgtccagtccatgttggatttt

SEQ ID NO: 574284 - DNA, 397 bp, Homo sapiens
aatcaatttcattttgtaaaaatatataaaatcaatttgtaaaataaataggcaaatgagraaaaacagataaaacatgaggggtttatatgtttattaaaaaaactcatgtacatcagtaagaaaatcattaataatttgtaataaacaaatgggcagaacacatagttaagttacaaatgaggaaattcaactggtatagaaaaaacctcaacctttctagtagttaaatgcatgcaaattaaaataagaattaagaatccactaaattaagcagaacattaaaaaacttggcagatctagtgctgctgaggatagggcaaaattgctagatgggaatataaatcccagccctttggaaaccaattttactacccaaaattttaaaattgccttg

SEQ ID NO: 574285 - DNA, 422 bp, Homo sapiens
cggaattcctccctctttggttctggctgggccctaggatttgagtggccaagagagagattggagaggaagggatggcttagcaaagggctgaatgggcaatattctagaattaatgtccctgggccrgggcattggaaggagggcatggaaaggatgcatctggagagttagaaattttggtggggaggggcaggagttttccaagggaggtggatggaaacttgaaggcctagactcttgataaaatgtgccttcagtcttcccatgaaaagaaaactcagtgaagcttgtgtggagccagccctgaagcagtcacgaaaaactgagagactttgcaccagggagtacccaatacgataccccagtcaaggaacaaaggccatgtttggcttccagtgagccactggacttggtactgg

SEQ ID NO: 574286 - DNA, 254 bp, Homo sapiens
gtgttgggaagaacagggtgctctggcatattttaagatgggtttcctttttccttcccaaagktggaagcaggaagccagttttctcaggtatttgccacaggagcctggtgaagctccaggaggtaaattttacaatattatgctccttcataactggatatccctggcgtttttacctccttgagttctccataatggaaccttcagcaattcaccagttatagttcaagattttctactccagcactggt

SEQ ID NO: 574287 - DNA, 254 bp, Homo sapiens
gtgttgggaagaacagggtgctctggcatattttaagatgggtttcctttttccttcccaaagttggaagcaggaagccagttttctcaggtatttgccacaggagcctggtgaagctccaggaggtaaattttacaatattatgctccytcataactggatatccctggcgtttttacctccttgagttctccataatggaaccttcagcaattcaccagttatagttcaagattttctactccagcactggt

SEQ ID NO: 574288 - DNA, 254 bp, Homo sapiens
gtgttgggaagaacagggtgctctggcatattttaagatgggtttcctttttccttcccaaagttggaagcaggaagccagttttctcaggtatttgccacaggagcctggtgaagctccaggaggtaaattttacaatattatgctccttcatamctggatatccctggcgtttttacctccttgagttctccataatggaaccttcagcaattcaccagttatagttcaagattttctactccagcactggt

SEQ ID NO: 574289 - DNA, 254 bp, Homo sapiens
gtgttgggaagaacagggtgctctggcatattttaagatgggtttcctttttccttcccaaagttggaagcaggaagccagttttctcaggtatttgccacaggagcctggtgaagctccaggaggtaaattttacaatattatgctccttcataactggatatccctggcgtttttacctccttgagttctccataatggaaccttcagcaattcaccagttatwgttcaagattttctactccagcactggt

SEQ ID NO: 574290 - DNA, 442 bp, Homo sapiens
ctggtgaggagcttccccttaagcctgagtttctgagaggggagagggagaagctgggtgaggctcgcatggaccttggggtgtccgtgctgggggaccgttcataagaagagccagacaagaccctactgttcttaggtgcagacawgattaggaaacctgcagctcccaggggcccccactaatgttctaactcgcagaaggaaggagtgtgtgtgcgtgtgtgcgtgtgcgtgtgtgtgtgtgtgtgtgtgtgtttgtgtgtgtgcggtgtgaggtatgggccccttaaggaaatggaaatcaaccaaccaatgggacagacagacagacagacagacagagattcacttgcccaagtgttctgtcctgtcctctgaatccgctttcaagtcgcaagacgctgtgagctccaagtccacgcagagtccgccaaacgctc

SEQ ID NO: 574291 - DNA, 367 bp, Homo sapiens
tgttgtaacaagacctccccctgaccctgaagcatggcagttgaagaagtctttccgtgtaarcgaaaagactttgaagaaaaggtggagatatgcgttgtataaacattctttggctctggaaccacgtagagacttgggagccagttgggtggagcattcgttggatgagggtgctcgggttaggaatatcaaggtgtttctccagataatccaatcatctaattaagattccagttatgctcatctgttttaaaattccgtttgggtaaattcttttagtcagactgagaatggcaaagcctcaaccccaatttccagggagggtggagagcctcaggtggagttgatcaccaatagcctatgg

SEQ ID NO: 574292 - DNA, 367 bp, Homo sapiens
tgttgtaacaagacctccccctgaccctgaagcatggcagttgaagaagtctttccgtgtaagcgaaaagactttgaagaaaaggtggagatatgcgttgtataaacattctttkgctctggaaccacgtagagacttgggagccagttgggtggagcattcgttggatgagggtgctcgggttaggaatatcaaggtgtttctccagataatccaatcatctaattaagattccagttatgctcatctgttttaaaattccgtttgggtaaattcttttagtcagactgagaatggcaaagcctcaaccccaatttccagggagggtggagagcctcaggtggagttgatcaccaatagcctatgg

SEQ ID NO: 574293 - DNA, 367 bp, Homo sapiens
tgttgtaacaagacctccccctgaccctgaagcatggcagttgaagaagtctttccgtgtaagcgaaaagactttgaagaaaaggtggagatatgcgttgtataaacattctttggctctggaaccacgtagagacttgggagccagttgggtggagcattcgttggatgagggtgctcgggttaggaatatcaaggtgtttctccagataatccaatcatstaattaagattccagttatgctcatctgttttaaaattccgtttgggtaaattcttttagtcagactgagaatggcaaagcctcaaccccaatttccagggagggtggagagcctcaggtggagttgatcaccaatagcctatgg

SEQ ID NO: 574294 - DNA, 367 bp, Homo sapiens
tgttgtaacaagacctccccctgaccctgaagcatggcagttgaagaagtctttccgtgtaagcgaaaagactttgaagaaaaggtggagatatgcgttgtataaacattctttggctctggaaccacgtagagacttgggagccagttgggtggagcattcgttggatgagggtgctcgggttaggaatatcaaggtgtttctccagataatccaatcatctaattaagattccagttatgctcatctgttttaaaattccgtttgggtaaattcttttagtcagactgagaatggcaaagcctcaaccccaatttccagggagggtggagagcctcrggtggagttgatcaccaatagcctatgg

SEQ ID NO: 574295 - DNA, 584 bp, Homo sapiens
ggtttctttttgcatttctctaatgactagtgatgttacacatcttctcatatatctcatgtatctgttggctatttgtatatcatctttgcatctttggataaatrttgtttgtccatttttttaatcactttattttgttgttgggttgtagtggggtttttttgtcatgatcattcatttatctcacagttcattctccttacttgggccagggtcatgatcattcattatctctcagttcatcctcattacgttgggcaaacagtcatgctgcagggtatagattatgttattctgttactttcaggtagaattggggtctaggttctaattgtttctaagtttagattctgaatgagaatcagcagaggtagaccaccactgctggggcctggggattgccggggaaaaggcaggaaacaaatacagacctgaccatggagggtttgtgtttcatggctcccatctgggtacccaaggaacctacatgtagctcgtgtgtggagagcctacattgcccactcaaagcaattgaggatggaacagtcttggggctggagctcattttttggaatgataac

SEQ ID NO: 574296 - DNA, 407 bp, Homo sapiens
cagatcttcgcggagcggatcagcggccggagcgtttggcggactctgcgtggacttggagctcacagcgtcttgcgacttgaaagcggattcagaggacaggacagaacacttgggcaagtgaatctctgtctgtctgtctgtctgtctgtcccattggttggttgatttccatttycttaaggggcccatacctcacaccgcacacacacaaacacacacacacacacacacgcacacgcacacacgcacacacactccttccttctgcgagttagaacattagtgggggcccctgggagctgcaggtttcctaatcatgtctgcacctaagaacagtagggtcttgtctggctcttcttatgaacggtcccccagcacggacaccccaaggtccatgcgagcct

SEQ ID NO: 574297 - DNA, 472 bp, Homo sapiens
gagcgtttggcggactctgcgtggacttggagctcacagcgtcttgcgacttgaaagcggattcagaggacaggacagaacacttgggcaagtgaatctctgtctgtctgtctgtctgtctgtcccattggttggttgatttccatttccttaaggggcmcatacctcacaccgcacacacacaaacacacacacacacacacacgcacacgcacacacgcacacacactccttccttctgcgagttagaacattagtgggggcccctgggagctgcaggtttcctaatcatgtctgcacctaagaacagtagggtcttgtctggctcttcttatgaacggtcccccagcacggacaccccaaggtccatgcgagcctcacccagcttctccctctcccctctcagaaactcaggcttaaggggaagctcctcaccagggatccggaactaccattcaccatcccctagggc

SEQ ID NO: 574298 - DNA, 413 bp, Homo sapiens
tcaccgtgatgggcaatcaatgaagccattgggctctgccgtgtcctcctctgaggactcctcagagtccccacgttcatcaataatataccacatgttcttactgccatcacccagcagctcacccccagctctcgggggttctcctgtgtctcccagctactctccaaacaaccccagatttcagctggagtcagmcccccacacccaggaatcacctacaaactcacgagcctcacgctgctccacccctgtgtcttgcatctcttcacccccaggcctcagggaccctcctgtggctcccagttactctccagccatccccaggttcctgcgggagtcagccccatgcacccaggagtcccccagagactcacaggtctcgggagaatatgagcggtcccccagccctg

SEQ ID NO: 574299 - DNA, 593 bp, Homo sapiens
caggtggatcacttgaggtcaggagttcaagaccagcctggccaacatggtgaaaccccgtctctactaaaaatacaaaaattagctggacatggtggctcatgcctgtagtcccagctactcgggaggctgaggcagtagaatcacttgaacctgggaggcagaggttgcagtgagctgagatagtgccactgcattccagcctggatgactgagtgagactccatctcaataaataaataaataaatacatacatacatacataaataagaaagaaatccttagtacacacagactgaatgatcaaataaaattagccacttgaaacaaktgcttctaggactaccagtttggggtataatttggtaacaaaacaaatcaaaaattaatttctctacattttttagatcataattcacttttataaaattaggaactacatatccaacaaaattagttgtggaatttcagagcaaggtgagaatggctgggatgtttctcaaacccatctcctctacattcctaagtaccttcagccttctaggtcattaaactcaggtcattcaaacactggctttgaatttaggaaaat

SEQ ID NO: 574300 - DNA, 576 bp, Homo sapiens
gaattcatgcaaacttaaactactaactagaaagtkgtcaaaaccaaggcagcggctttctccatccacctcacaagaaccaaatcatctatcctcacaacctgctctcccagtcccccttattctgctctttcttttctttccatagcattccaatagctatctcactcatttaaaatgtcagttgtttattgcctcccttctctagaaagcttactatatgaaagcaaaaatcttggttttattcatttatgtatcccaagcagctagaacaataagtggcacatagtaggtgctcgtatgtctgctccattttttctctttctatagatttccaatttctttttaatccctagcttacacatggtcatatatgtcttgattgtggtggataagctttttcatgtgctgctggattcagtttgccagtatcttattaaggatttttgcaactcaactataagtggttagcacagttttttttagttccatagttccaaattgttgagcaagaaacctgctagtactcatctcatctttttgagccaagccaaaagttatgaaagcctagattaa

SEQ ID NO: 574301 - DNA, 565 bp, Homo sapiens
gtaaatgtttaccaccttaaaccacctcatttctctttccctttagactttatagctatactagtgctacccggttcctcctctctccctgttctcagcatttcgctgttgtgtattcagattaaggattatcaactggtgactttcaggctctagtgatggacatggagggagggcattgacagcatttttttgtccctcacaaagttttaaaaggcaacgtatctatacaagtgttatgctttgtcatagaacaaacagcctgtttcacattwaatattattaactgcatgatccctaaagtttgcaacccttggctaatgtggctaacagtctacagtatagcttgagtagggaagcactattcgagacaacaatgagccgtccttgatactcaggatttacagtctccaaaggcagtaaagctgagatccaatttagatctcctaaaaccagacctacccactctactcatggtcaaatacaagctgcttgggctctaaaaaaacgggatcagaaaacaaaacacagtgatattaatctttctacattttactccttttcc

SEQ ID NO: 574302 - DNA, 686 bp, Homo sapiens
gtggtcagaaaagccaaaaacatttgacaaatactgtgtctggagaaactattccttttttactttttattttttgtagagatggggttctcactatgttgactaggcttgtctcaaactcttggcctcaagagattctcccacctcagcctcccaaagtgctgggattacaggtggtaaaccagcatgcctagctatttcttttttaaaatgaaagaaacaaagtggaaaacaaaggggraaaaaagctcattatgaagcatgaagactcagaagaacagcagaagcctgaaagtaatatattatagaaaaccagaagaaaattttaggaataatttggtgttctgaagaaatacttataacatagtaaatgagtgacatttagtgaaaacagtaatggcctgggataaaagtacagaaaatgattccaaaagggtaggaaggattctgtggtggcaaaagcccagcagtgatccttagtcagaagatgcaagtgagattgtttactataattggaagtatagccagtgtggtaatcagaatattttgaccacagggaatttggtgacataagatccctaggaaacagatatgtagcttactaaggtacattcagactcataatatttgggagtcatccaattctcagacctgaggcgatgcacacttctcgtactgctaatact

SEQ ID NO: 574303 - DNA, 621 bp, Homo sapiens
tcctaagggaatcactgggaacatcaaaggagtactagaggatgaaatcacaaaagcaatgtaacttcacgactagttacagaaataaaggctgaagcttattgtgtttcctccatcaatgggtcatatgtgtatgtgcacatgtgtgagcatgtgtttaaataattttagacgtataatttccctttactttttcctttcccttgycactttttataaagtattatggtgtctgtaaccttacaattcagtctataggttgcagaatatcaagatagaatcacaacagaactgaagagaagttgatcataagccagtctgaaattgcatgtggatggagtttacttcccttggtagaacattagggaggagagtatggaggattaagcaggacataaatatgtatttagaaacttgaagaaaagttattttctgttacttgttttatgttttatactacttttttgaaaatataaatatgtcaagcttctaaccagatcctagatttctatcattcccactgttttcatgagcttccccaagactcacaataaataacttttgtgtttaatttaaccataattggttaccattgtttgcaagtaaaaaatttaactacac

SEQ ID NO: 574304 - DNA, 561 bp, Homo sapiens
catgaatttgtaatggatccagcaatagtgagaagctctgagagcagaagcagagaatgagactcactcaagcatgggagccatcaaagcaggagcaacagaaggcctaaaggacaaagatgccggggggggatgtgaatgcccacctggtatgtatttatggaaaagtgtgtgcttttttactttacctaatgggacaagcataaaaataagcatagcccctttacctaaaacaaatccagccaggctttatgaaaattatytagcattcttgtaaaacattaaataccaatctgtaccagggcaatggtatagccactgcataaagtgagttttaacatgattttgtatttgtataggcctttatagttcataaagcactttcatagcatttactgaattcttacaactgtaaggtagtataacctaaaggaaggctgatttgataggcccattcacataatagccagatacagcatttacctcaacatattcccaaagtggtacctttcatggcaacaaaccagcctgcagctatcagttgccaccagccaggctaat

SEQ ID NO: 574305 - DNA, 601 bp, Homo sapiens
aagtatcataatgatacatccttgtaaacatattggaaaaaaattcactaatcaacccaagtttattcaagagtgatatcctttctaaggaccacatattgtaaatgatgaatagaaccagaagactcatataagaatgaggataaccattccccaggcaaaatttaaaaaaataaaaaaataaaaaaaagttgtttctaaggctttcaggctggtatttttagtgttcatagttcatattatctctttggagagaatactatgatccttagagagtggtatggattctgtaaaatatgttcaaagccatggtctctgataaaaatgattgaaataactgtctttctcaatgcttttgttttgctataacctgaacttggtcraggtcgtgggtttaagacctttgcaagacaattagattgtttttcttctctgttaaaggttaccataaaaaaaaaatctgttttcaatacatgctcttggtctgaaaggtgataagggaaaggaatgtgtatagatcagtgcaaatatttcactgatccttgaaaatcaatctaaagggcatatcctacaataatagcagtatactgtaagagaccag

SEQ ID NO: 574306 - DNA, 409 bp, Homo sapiens
tttgtttgtctgaatagtgattattatgtattttataagcattaatgaaaacatgaaattcattattcatgctcaatgtttagaagaggcttcaaggtaaggaaaggaaagacatragacagtaatgcaaaaggaactaatagaaagaaagaataagaaactaagaatgtatttctctgagattttgggataagaatgatggtgtgaaaggatggaggaatggaggaaaccaagggatattaatgagattagttagaaaaactgttttccacttgggatataacataaccacttctgaatactaagtttagggtaagcttttattaattttgattctttcaatttaaaaatcataagctctttgagaacacaaaaacattttttttatttcatacatttctcagttaaa

SEQ ID NO: 574307 - DNA, 586 bp, Homo sapiens
aaaaaaacagcggagaacttttcaaacctagaaaaagatgtgaatattgagggacaagaaggtcaaagaacaccaagcatattcaatccaaataagactatctcaaggcatatactaatcaaaccctcaaaagaaaagaaaggattgtaagagcagcaaaagaaagcaaataacatataaaggagctctgatatgtctggaagaagactgttcaatggaaatctttgaacagaggcwgtgggatgacattttaaacgtgctgaaggaaaaaagtttcaacctagaatattgtatccagaaaaattacccttcaaatctgaaggagaaataaaaattttctcaaaaacaaaagctaagggatttgggcaacatcagacctatcttacaagaaatgctaaaggaagttcttcaatctgaaagaaaaagacattaacaagcaagcagaaagtatctgaaggtatacaactcactggtaaaagtaagtacatttaaaaaatctcagaataatactataatttcagtgtatcatacactcatcttttttttcaactttaagttcagaggtatatgtgcaggatgtgcaggt

SEQ ID NO: 574308 - DNA, 539 bp, Homo sapiens
tcacttgcattgactgtttgtcatattctttgtgacttgtggatgtgtttaatttttactaagtcaagtatctatttgatgatatctgctttctgtggcacactgcgaaaggtgttttccaccctgagatctattaaatatttttcttctagaaattttatttttttatatgtaaataataaattatttaagaaagcattttctgttgtcatgtatgcatctaattctagttttttcaatctttagccagttattttttaaaccatttgctgataatatcccctttcctcacagatttgaaatgttccctatattagatactaaattcctatgggcattagagtaacttttaggatcttaattctgtttctttgctttttcatgcattcttgtactagtgcgagaataattgttgaggctttaaagtacatcttaacatctggttctacaagttctactaccttccgtttacacatrtgttcttgtctattcttgattacccttccagatgaagagtaattttgaattaatgtttcaag

SEQ ID NO: 574309 - DNA, 539 bp, Homo sapiens
tcacttgcattgactgtttgtcatattctttgtgacttgtggatgtgtttaatttttactaagtcaagtatctatttgatgatatctgctttctgtggcacactgcgaaaggtgttttccaccctgagatctattaaatatttttcttctagaaattttatttttttatatgtaaataataaattatttaagaaagcattttctgttgtcatgtatgcatctaattctagttttttcaatctttagccagttattttttaaaccatttgctgataatatcccctttcctcacagatttgaaatgttccctatattagatactaaattcctatgggcattagagtaacttttaggatcttaattctgtttctttgctttttcatgcattcttgtactagtgcgagaataattgttgaggctttaaagtacatmttaacatctggttctacaagttctactaccttccgtttacacatgtgttcttgtctattcttgattacccttccagatgaagagtaattttgaattaatgtttcaag

SEQ ID NO: 574310 - DNA, 637 bp, Homo sapiens
cctggctcaaatgatcctcctgctttaggcctcccaaagagaacagtgattacaggtgtaagctgccatgtccaaccctactagtaaggttttgactatttctctttcttgaattgttgacttatagctattgcttgtttttattatttgtaggttatttttttctctatttagttcacttggtgtcacatagaagttaaaatgtttcttctctcatgtgtcacttgcattgactgtttgtcatattctttgtgacttgtggatgtgtttaatttttactaagtcaagtatctatttgatgatatctgctttctgtggcacactgcgaaaggtgttttccaycctgagatctattaaatatttttcttctagaaattttatttttttatatgtaaataataaattatttaagaaagcattttctgttgtcatgtatgcatctaattctagttttttcaatctttagccagttattttttaaaccatttgctgataatatcccctttcctcacagatttgaaatgttccctatattagatactaaattcctatgggcattagagtaacttttaggatcttaattctgtttctttgctttttcatgcattcttgtactagtgcgagaataattgttgag

SEQ ID NO: 574311 - DNA, 637 bp, Homo sapiens
cctggctcaaatgatcctcctgctttaggcctcccaaagagaacagtgattacaggtgtaagctgccatgtccaaccctactagtaaggttttgactatttctctttcttgaattgttgacttatagctattgcttgtttttattatttgtaggttatttttttctctatttagttcacttggtgtcacatagaagttaaaatgtttcttctctcatgtgtcacttgcattgactgtttgtcatattctttgtgacttgtggatgtgtttaatttttactaagtcaagtatctatttgatgatatctgctttctgtggcacacygcgaaaggtgttttccaccctgagatctattaaatatttttcttctagaaattttatttttttatatgtaaataataaattatttaagaaagcattttctgttgtcatgtatgcatctaattctagttttttcaatctttagccagttattttttaaaccatttgctgataatatcccctttcctcacagatttgaaatgttccctatattagatactaaattcctatgggcattagagtaacttttaggatcttaattctgtttctttgctttttcatgcattcttgtactagtgcgagaataattgttgag

SEQ ID NO: 574312 - DNA, 637 bp, Homo sapiens
cctggctcaaatgatcctcctgctttaggcctcccaaagagaacagtgattacaggtgtaagctgccatgtccaaccctactagtaaggttttgactatttctctttcttgaattgttgacttatagctattgcttgtttttattattygtaggttatttttttctctatttagttcacttggtgtcacatagaagttaaaatgtttcttctctcatgtgtcacttgcattgactgtttgtcatattctttgtgacttgtggatgtgtttaatttttactaagtcaagtatctatttgatgatatctgctttctgtggcacactgcgaaaggtgttttccaccctgagatctattaaatatttttcttctagaaattttatttttttatatgtaaataataaattatttaagaaagcattttctgttgtcatgtatgcatctaattctagttttttcaatctttagccagttattttttaaaccatttgctgataatatcccctttcctcacagatttgaaatgttccctatattagatactaaattcctatgggcattagagtaacttttaggatcttaattctgtttctttgctttttcatgcattcttgtactagtgcgagaataattgttgag

SEQ ID NO: 574313 - DNA, 608 bp, Homo sapiens
gctaagccattattgagcatcttaccaagtgattaagaaaaaccgatgaagctcagcctcagactgctaaaggctataaattgggaaaaattacacttatccaacatttgccttactttatccctatggatttaggaagctattagtgagttgtgtatgcagggaatcaacaaactacattatatattactctcctgatgagttaccactctagcaatatcaaagcaacttaaaaataatgagcaaaatgaaaataagatcagtaaacaactagcagaatttttttatgtctctggtctaagagaggatttatcaactgtagtttagcactaattgctacaaaatgctaaacagaatttttcaatcttgcttggctattttctttctactcacagcattcactgtggtcaaaagctttttgcagtaggctgtgaaccttgatttatagctatttgaataggacagaagcttgagaaaattgtctgtagtgatatcatttaattagctcattactatgcttgatataaggtggtagaatatggttctttatagtaaagtctcaagtaarcaaatacaagtttagctatttactaatatttttccagttg

SEQ ID NO: 574314 - DNA, 608 bp, Homo sapiens
gctaagccattattgagcatcttaccaagtgattaagaaaaaccgatgaagctcagcctcagactgctaaaggctataaattgggaaaaattacacttatccaacatttgccttactttatccctatggatttaggaagctattagtgagttgtgtatgcagggaatcaacaaactacattatatattactctcctgatgagttaccactctagcaatatcaaagcaacttaaaaataatgagcaaaatgaaaataagatcagtaaacaactagcagaatttttttatgtctctggtctaagagaggatttatcaactgtagtttagcactaattgctacaaaatgctaaacagaatttttcaatcttgcttggctattttctttcyactcacagcattcactgtggtcaaaagctttttgcagtaggctgtgaaccttgatttatagctatttgaataggacagaagcttgagaaaattgtctgtagtgatatcatttaattagctcattactatgcttgatataaggtggtagaatatggttctttatagtaaagtctcaagtaagcaaatacaagtttagctatttactaatatttttccagttg

SEQ ID NO: 574315 - DNA, 564 bp, Homo sapiens
tttctatcattctggaggttgtcttttcactctgttgattgttttctttgctatgcagaagcttttcctttaaagaagagatatggaatgtctgtaatagctaccactttcagagtgtgagtttagaacttagggaacagaacacccataactgtacttcttagaagagtatacagtttaatttaaaatatcattagaatgcagaagagtttgtatttggccctttctacttgagtgactaagatcactaaacattgtacaggttactcatcaatgccaaatttgtgagaatcagagcgggaatgagtatcttgtaaataaatagaagagtatttacaatgtttgctaattaaaacaattgatattatttaagtaaaaaggaggctaagccattattgagcatcttaccaagtgattaagaaaaaycgatgaagctcagcctcagactgctaaaggctataaattgggaaaaattacacttatccaacatttgccttactttatccctatggatttaggaagctattagtgagttgtgtatgcagggaatcaacaaactacatt

SEQ ID NO: 574316 - DNA, 611 bp, Homo sapiens
cattccatatctcttctttaaaggaaaagcttctgcatagcaaagaaaacaatcaacagagtgaaaagacaacctccagaatgayagaaaatatttgcaaactatccatccaacagggaactaatgtctagaatatacagggaactcaaacatctcaacagcaaaaggaaaaacacagttattttaaaatgggtaaatgatctgaatagacatttctcaaaaagaagacatacacctggccaacaggcataagaaaaaaatgctcaacatctcaacatcactaatcatcagagaaatgtaaatcaaaaccataatgaggtatctcaccccagttaggaaggttattatctaaaagataaaaaaataacaaatgctggcaaggatgtagagaaaaagaaactcatacacagttgagtggaacataagctagcacaatcacaatggagaaaagtgcagagattcctcaaaaaactacagatagaactaccgtgtgatccagcaatcttgctacggagcatgtatccaaaggaaaggaaaacagtatatccaagagatatctgcacgctttatgtttactgcagcactattcacagtagccaaaatatgaaatc

SEQ ID NO: 574317 - DNA, 611 bp, Homo sapiens
cattccatatctcttctttaaaggaaaagcttctgcatagcaaagaaaacaatcaacagagtgaaaagacaacctccagaatgatagaaaatatttgcaaactatccatccaacagggaactaatgtctagaatatacagggaactcaaacatctcaacagcaaaaggaaaaacacagttattttaaaatgggtaaatgatctgaatagacatttctcraaaagaagacatacacctggccaacaggcataagaaaaaaatgctcaacatctcaacatcactaatcatcagagaaatgtaaatcaaaaccataatgaggtatctcaccccagttaggaaggttattatctaaaagataaaaaaataacaaatgctggcaaggatgtagagaaaaagaaactcatacacagttgagtggaacataagctagcacaatcacaatggagaaaagtgcagagattcctcaaaaaactacagatagaactaccgtgtgatccagcaatcttgctacggagcatgtatccaaaggaaaggaaaacagtatatccaagagatatctgcacgctttatgtttactgcagcactattcacagtagccaaaatatgaaatc

SEQ ID NO: 574318 - DNA, 611 bp, Homo sapiens
atgttctggtatatatatatatcaaatgcatggtgatcagatcagggtaatttgcatatccttcatctcaaacatttatcattttattgtgttgtgaacattcaaaatcctacttctagctatttgaaactgtatattattgttaactatagtcatcctacagtggtatagaacactagtgcttattcctcctatatagccctaattttgtatcttttaattttaatttcgaatctccttattcctgcttccccctaccattccaagcttctagtatcctctgttttactttttacttctatgagatcaactatttttagcttctgcatatggatgagaatatatgatgtttaactttctgttcctgtcttatttcacttaacgtatgtyctccagttccatccattcatcctgttgacaggatttcatttttttatggctgaataatattgcattgtgtatatacatcatattttctttattcattcatcttttattggacatctaggttgatttcatattttggctactgtgaatagtgctgcagtaaacataagcgtgcagatatctcttggatatactgttttcctttcctttggatacatgctccg

SEQ ID NO: 574319 - DNA, 454 bp, Homo sapiens
ctcttggccttgaattgcaatattagggcttgtatgccaaggcttctagagtcgaatggtatcttaaaataccawttagtctatcctactgccatgaagaaaataaataagggaatataatcttattttataaatgcagaaattgagacctaaagaagttaactgacatatgcattgtcaaatagactacgagtcctggaactcgcaggatagttgtgttagtctattggtgttattctgaaggaatgcctgagactgagtaatttataaagacaagaggtttatttgtctcatggttctacaggctgtacaggcatggcaccagcacctactcagtttgtggtgagacctcaggaagcttacaatcatggcagaaggtgaagagggagccagcgtatcacatggctagagagagagcaacagacagatggaggaagtgccaggttcttttaaa

SEQ ID NO: 574320 - DNA, 608 bp, Homo sapiens
caggaacagaaaaccaaacaccacatgttctaacttataagtggaagctaaataatgagaagacatggacatatagggggtgacaacagacacgggggcctaccagagagtggagggtagagggtggragaagggagaggatcaggaaaaataactaatggctactaagcttactacctgggtgatgaaataatttgtataacaaacctccatgacacaagtttacctatataaaaaacctgcacgtgtacacctgaacttaaatgtcaaaaaaaaaagaaaatgtactctgaattgaatgcatattttataaaacttggatttacattaaaattttattattaaaaataatttatatttttgccaattttaatatcaacagaataaattttctggcaagctgattatgtggtttgattgtggacttacccttcaaagatatagtgaatgatatatatatatgtgtgtgtgtgtgtacaaataactgtataaattctatttgccaaaaatagctctggtttattttaagaatacatgttttgtgagttctaacatgaattttctgtgtttggacaaaataggagagatcttgtagattacctaaaatc

SEQ ID NO: 574321 - DNA, 534 bp, Homo sapiens
agagaacactagatatggctgactagaaataagaaggtactttacccagccattatcttagccctcatcttatctctgtgagtggttctggttagaaggtggctaaagacatgagggtggaacaagtttagaaaaacgtgctctggaacatagtatggygattcctcaaagacctaaaaacagaactaccatttgactcagcaatcccattactgggtatataccaaaaggaatataaattgttctatcataaagacacatacacatatattcccattgcagcactattcacaataacaaagacatggaattcatctaaatgcccatctatagtagaccgaataaaggaaatgtggtacatatataccatggaataatatgcagccataaaaaagaacaagatcatgttttttacaggaacatgaatggagctggaggccattatccttagcaaactaaagcaggaacagaaaaccaaacaccacatgttctaacttataagtggaagctaaataatgagaagacatggacata

SEQ ID NO: 574322 - DNA, 613 bp, Homo sapiens
ttatactgcttgacaaaaaaaatgctctccagtttatattgctttgctttgtgaagagccttgtagaattacgttttttaactgcatgatggtgtgctgcaagatttcaatgttaatggcctaggttttcttttaaatagaatgcattaaaaagatccctcttaatgcatgtgaatctaagcaggtggctctgtagtcctagtaacacatcagttgttgaccttcacttactcatctgaacatgtactgcattaaagtgcattttatatcatttaatttaaayacaattgaaaatgacttaaattctcctctacttacttggcagaggagaacaatataaatagtgctgtcctgaccatgattctttctgactcctcctccattgcaatgtaaattctcctagaacaagggccatgttgtctggttcattccagtatgtccagatcctgtaacagtgtcaccatattgagtatatttccaatatatttttaaatgggaatcaatgtctgtttattatatcaccattaaagtttcattaagtataaaatgtggtgatttttcacacctacactaggactagatggaacatccgattaaacttaggatattttag

SEQ ID NO: 574323 - DNA, 537 bp, Homo sapiens
tatgaactattctcattaaaatattggcattcaagttggacaagaaaccaatactactgaaagtaatttattgcatttttcttaaaacatgcagtagcattgatgaaacattgagtacttatagcatttttaatatgaatacaaaaggcataagttgtttaaggatcatagttttgagttttaggatgttagtgttaataactgggcatattaattgtaaaaaccctcatgtggtggcagtagctctggaacatagaaagaaataagaatatgggaaggatgtaatgtacttcctgttctattgggcagtaggctgggccccctgattcttttttctttttttttctctttgcctcagactcttgtcataagacattccattctcatcgatctcaatcaccaatcccttcttgggtaccacgacagcacctctgttttcctcgggraaacaaccaaatattgagatcttgaaaaatctcagatgaaaatgttcaacaaaaatctccttgttaataacaaaggttcaatgctgtggca

SEQ ID NO: 574324 - DNA, 591 bp, Homo sapiens
ttgaatgccaatattttaatgagaatagttcatattatgatattatcatatctcaccacaatcttcttttaattggacagtagccttctgtgattcatgttgcctttgaaatataggttcttagtattctgcattgggattatctaactcttttaaaccattctgtagaacactgcatagtcaaaccaaatgagagcgttggctaacaatacagtatagtcaaaaaccaaatcaaaatgttactgtacccagccatcattcataaaatgtaataagcatttcacagtctcatattctcatcacaaagaaggtaatgaaaaagaaatgtcacataattaatcatttctcccgacaaaaagtttaataggaaaaagagaatgttgtattaccaatgtaaatcagctattatggccttaatgctatatttccatggtaatcccacactgctgtgtccaagtagtctgaatcttccttcttttcaggcacctggctrgtttttctttcttttttaaaattaatagactttacttttttagagcagttttaggttcacaaaaaaattgggtagaatgtagaaagagttactataca

SEQ ID NO: 574325 - DNA, 536 bp, Homo sapiens
ttccatcatcatcattggcttatgctggacaaatcccaggttatgattaactaccttccttctaagtttgaatacagaaccaagtttattaattatataagaagcttctaaacttaagctgtaatgaatttgttaggacctcttcggcttgtgacctactatgctataacaaaatgacttttagtcttaggtttcagtgagcaaatggcctttttgtgtttttgaaatgtaattaagttgcttttaaaaaaatcaataccatggatgatttgttgttagaatgaaggaatgtgcagcagatatagttttaggcttagatgtcaagctccagtggtattctccattcttttgttgattatatgagtgattaagtaattcacttgtggcactaaaagaagtcagaggaaaaataataagctgaactctgactccagaaaatcaccccacttacatctttggcttctgaaatgtagcagacctaggaaaaaataatccygtgaggaaggaacagtgaccttccaatataactagtaaac

SEQ ID NO: 574326 - DNA, 536 bp, Homo sapiens
ttccatcatcatcattggcttatgctggacaaatcccaggttatgattaactaccttccttctaagtttgaatacagaaccaagtttattaattatataagaagcttctaaacttaagctgtaatgaatttgttaggacctcttcggcttgtgacctactatgctataacaaaatgactttyagtcttaggtttcagtgagcaaatggcctttttgtgtttttgaaatgtaattaagttgcttttaaaaaaatcaataccatggatgatttgttgttagaatgaaggaatgtgcagcagatatagttttaggcttagatgtcaagctccagtggtattctccattcttttgttgattatatgagtgattaagtaattcacttgtggcactaaaagaagtcagaggaaaaataataagctgaactctgactccagaaaatcaccccacttacatctttggcttctgaaatgtagcagacctaggaaaaaataatcctgtgaggaaggaacagtgaccttccaatataactagtaaac

SEQ ID NO: 574327 - DNA, 571 bp, Homo sapiens
tttctgctgataaatcactgatagcatcataggaatttccttgtatatgaagaatttcttttctcttgctgctttcaaaatttttcctttttctttttataactttattgtgatgcaccccagtgtaatcttctttggattgatcctgttggggaaattctgagcatcatggatctagatatttatattcttccccaatttgggaagtttccagccattatttctttaaataagctttctgtccttttctctctctcttttccttttgagatttgcataatgtgaattatctttcttgatggtgtctcatgtatcttgtaggcttccttcatgcttttccattcttttttctcctatgatcagatttttttttttttgaaacaaagtctcactctgttgctcaggctggagtgcagtggcatggtgcaatcgtggctcattgcaacytctgcctcccaggttcaaacaattcttgtgcctcagcctcccaagtagttgagattacaggtgtgtgtcaccatgctaggctattttctttgtatttttagtagagatggggtttcaccatgtt

SEQ ID NO: 574328 - DNA, 623 bp, Homo sapiens
catagtttgagaagattgattccaatttcggaagaagctctactgtgggcaaaatgttatcaaacgtttttatcaaaaatgttatcaaacattgcatgctacagagaaatattttatgaaaggaagactcaattgatgtcattgttttattttaagaaattgccacagtcactccaaccttcggcaaccaccttcctgatcaatcagcacccatcaatattgaggcaagacctttcaccagaaaaagaaaccatgacttatggaagtctatggtaattgttagaatttttagcaataaagtaatttaaaattaaagtatgtrccttttttagacataatgccattgtacacagtatagtataaacataacttttgtatgcactgggaaaccaaaatttgtatgactcactttattgtgatagtagttttattgtatcagtctgtgatctgaacctgtaatatctccaagctatgcctgtattctgaatttgactacttacttacctttaccaatgagttttatactttcatatattttcatgctcctgattaatttcctttttttcaacctgaggaaatccctgtggcaattcttgtaaggcaggtcaagtggtgatctgctt

SEQ ID NO: 574329 - DNA, 581 bp, Homo sapiens
aacccaagtaaaaatctgtcaaggaatcagaaaattaaaaaagtattataatttctctgcacaaatttaagtttaacaattaacaacaaagtattactggtaaaaggaatcactgacatcaaattgaaagcaagacagaaaatattgacacactgggctgaaggttaaagtctatatttccaggaaccagaaccaggagcaagtaggaaggaagcattcatgatccrgtcagtaagtgttgtttgtaactggtaccttataataagggtatattcatgaatatgttcctatctactgctaatagtcattcttacagataaaataaatattaatatgtttatatatatactatattgcaaacaaatcctatgagtgaagtttaaagaaataatcagaaatggaagcataataaatccttaacttgacagttttgacaagtgattctctgtagtgctggtaaccttgctaagacacccaaattttatactgttcaaacactactcagtaacattgactggcattttccagtgtttgaatgttcattcttggctattctctttgtaaaatactcctaaattaac

SEQ ID NO: 574330 - DNA, 569 bp, Homo sapiens
gacttttctcagttcttagattaatctcactaaaggcctacatctagcatgttgctgttcttcacaaaacctacagcagatttagcaggcctgtattatgtgaaagtctgaatatgcatataggagacaatatgtaagttgagaagcactagtatttccaagcaggaattccttcctggcatattttaggcaattttatgtattgccaaatcccaaacccaagtaaaaatctgtcaaggaatcagaaaattaaaaaagtattataatttctctgcacaaatttaagtttaacaattaacaacaaagtattactggtaaaaggaatcactgacatcaaattgaaagcaagacagaaaatattgacacactgggctgaaggttaaagtctatatttccaggaaccagaaccaggagcaagtaggaaggaagcattcatgatccagtcagtaagtgttgtttgtaactggtaccttataataagggtatattcatgaatatgtycctatctactgctaatagtcattcttacagataaaataaatattaatatgtttatatatatactatat

SEQ ID NO: 574331 - DNA, 591 bp, Homo sapiens
aagacaaataagtgcaggcccacaaacagaaaagttatccaagagtatttgtaccaagtcattagtggaaccaaacttcctttggaatctagtcaatgaagactctgtgggtaaagattgagattttcctacaaagcataataaggattctaacataagcaaaatcttggctcagatcaccacagggcctaaaagacatgaaacaaaataaaaagagaatccatacacaaggataaatatccttttccactttagtattttcctcatatcgttagtgagaaaagctagcaygctttacaccagacctctcaatatcatttagcatttgctggatataatgccccttaagtttgactatagagcaaactgcacttagttctcttcccacacagtagatcccgttattctacatccattgctttgtggccttcaggttgcctaaactaaagacctcatccaggttttcttcaagatgaatatctggagtagtcaaaccatgtccaactattttgatcaatgtcgttgcagtgattgcaatctggatgttctatacattacagctattcaacatctttcccacaggaacctctt

SEQ ID NO: 574332 - DNA, 591 bp, Homo sapiens
aagacaaataagtgcaggcccacaaacagaaaagttatccaagagtatttgtaccaagtcattagtggaaccaaacttcctttggaatctagtcaatgaagactctgtgggtaaagattgagattttcctacaaagcataataaggattctaacataagcaaaatcttggctcagatcaccacagggcctaaaagacatgaaacaaaataaaaagagaatccatacacaaggataaatatccttttccactttagtattttcctcatatcgttagtgagaaaagctagcatgctttacaccagacctctcaatatcatttagcatttgctggatataatgccccttamgtttgactatagagcaaactgcacttagttctcttcccacacagtagatcccgttattctacatccattgctttgtggccttcaggttgcctaaactaaagacctcatccaggttttcttcaagatgaatatctggagtagtcaaaccatgtccaactattttgatcaatgtcgttgcagtgattgcaatctggatgttctatacattacagctattcaacatctttcccacaggaacctctt

SEQ ID NO: 574333 - DNA, 586 bp, Homo sapiens
aacatctttcccacaggaacctcttgctccatatactaaaattagctgaccgttattttcatatatgaaccaaagaggtgtttgtctacaacgtacacagttaccaagatgccttcaggtagtctgggtttcactacaatagctgtgaagcacctattataaactaagtactcttatacatgaaaagtacacaattcctaccccatagaaaatagagtatagacaggggcagtataagtaaacaaaacaatgacaggacaatgcaaagagagcatcagcagcaaaaagctctgtgccatctgggtaagagatgatacagaagggggaatggttaacttgttctagaggcatcaggaaatgtttcaagcaagagagaaaatccaggatgatgttctcctacaagaaacctaaaaaaatcaaggaaagtatatttctttatatttaaacatgcttttctaaccctgagtttttcatttaatgaggaatatattataaagaagagtggtaaatgttactgagttgtccttaaccttcaamaaagttttaactatgtgctgtagataaaaactataatacttaaggatct

SEQ ID NO: 574334 - DNA, 597 bp, Homo sapiens
tacaacgattctgcctgcagwctgttcactttacttcttcttttttccctcctctatagtgtttctctcccttttcaacatttccctctggcttcattttagcatgttctcttgagttctcaccttttcccctctttccgttctcattttttcttttatagtttgttgctctctcgtgctctgctgggattcttcccagtcactctttggcttcatgtacatgcaatacggcaaactaaatctgacaaaagcctgtctattgttcatcacagcaccttttcaacacataccaagtggtgggagagctagggaatggagcttccttgcatgttagtatgaattattcggaatgttatcattgaaggctagtgattccacattttccattttagcacttgtttctgacacctacgtcaggcaaattttgtaagcttcagatacaatcctttgatcttctgtaatgaaggcagccataaataaagaagaaaaagtttggttcatatgtaagatttagagggtaataaaatattgatatacttatatatgtcctacatatacaaggagttgtccttgtgaaaactgtatataaaaggtaaa

SEQ ID NO: 574335 - DNA, 630 bp, Homo sapiens
aaaaacctttgaatagctaaagcaatcctgagaaaaaaaaaatctagaggtatcacattatctgacttcaaattatactacaaagctataatgaccaaaacagtatggtactggcataaaaacagacacataggccaatgaaacagaatgaagaacccagatacaaatctatgcaaacttatcttcaaaaaagtgccaagaacatacaatagggaaaggacagtcttcaataggtggtgctgggaaaatttgatatccactggacccatttctcaccatatacaaaattaaaatcaaaatgaattaaagacatatctaagactttaacctatgaaactactagaagaaartattgaggaaacaattcaggacattgttcttggcaaagatttcttgagtaggacctcaaatgcacaggcaatcgaggcaaaaatgggcaaatggaatcatatcaagctaaaagtcttctgcacagcaaaggaaataatcaataaagtcaagagataacccacagaatgggagaaagtatttgcaaactacccatctgatgaagaattaatatccagaatatataagatgaacaactcaaaagaaaaaaaacaaataatccaatttaaaaattggtgatag

SEQ ID NO: 574336 - DNA, 585 bp, Homo sapiens
atttgttataatatgtaagagatctatgccacacacatgcaagtaaacagaatactaacaggatwattatccaactgcatgtaagtcattttaactgcaatttccaagtcaacaaacaacaaaaataggcttttagtggtttaatatgttatcagactactctcaggacttgtccctatcctaatatgccagaagcatgaatgcagttatatatccaaaacacaataatacgtcaaatactaggtgatctcccatattgtacccaacatgtaatataggatggagtatcttcaacttgtaacttcaaataagaatctgcatcaaagtcttggaaattttgtagaatagccaggtatgatgatccaagttgagcccattgttctcctctaaatatttcccttatcaaaagtgcaagagaagttttagatgaacatgactgtcatattaattcaccccaataatagttatcctatattcaatgcactatgctaggcactatgagaaattaaaaataaaatacaatctttaaaatctagagtgggctttcagagtggaatcaatcagaaaacaaatgataaaaaattc

SEQ ID NO: 574337 - DNA, 499 bp, Homo sapiens
aataccacttgttgtcacttataagtgggagctaaatgatgagaacatatgaacacatggagagaaacaacacacattggggtctattaaagagtggagggtaggaggagggagaggatcaggaaaaataactaatggatactaggcataataccttgatgagctttacaaattttatgaatgtagaaggtggggcaagatggccgaatagaaggctcaccgatcataccccaatcacaaggacaccaacaaaaactacacagaaaaaacaccttcataaaaaccaaaagtaaagtaagctctcatagtaactggttttaacttcatatcactgaaagaggcactgaagagattttttttaaagtcctgaatcrctgatgccacccctccacagtgtggtgcggagagcatctctaggcactgggggaggaagaacacagcaattgtggggcatgaactcagtgctgctctgctagagcagaaaggaaaaccagaccaa

SEQ ID NO: 574338 - DNA, 514 bp, Homo sapiens
agatctccatcaggctaacagcagacctctcggctgaaacactataagaagagattgagggcctatattcaacattcttaaagaaaaaaaaatgggctgggcacggtggttcatgcctataatcccagcactttggtaggccgaggtgggtggatcacaaggtcaggagtttaagaccagcctggccaacatggtgaaacccaagtctctactaaaaaaaaaaaaaaattagccagacgtggtggtgcatgcctgtaatcccagctactcacgaggctgaggmaggagaattggagaattgcttgaacctgggaggtggaggttgcagtgagctgagattgggccactgcacttcagcctgggtgacagagtgagactccatctcggaaaagaaaaaagaaaataacaaaaaatcttcaaccaataatttcatatacagccaaactaagcttcctaagttaaggagaaatatgatcctttaaagataagcaaatgttgagggacttcattacca

SEQ ID NO: 574339 - DNA, 608 bp, Homo sapiens
ataatggtaaagggttcagttcaacaagaaaatctaactatcctaaatatgtatgaacccaacacaggagcacccagattcataaagcaagttcttagagacctacaaagagacataggctctcacacaataatagtgggagacttcaacactccactgacaatattagacagatcattgaggcagaaaattaacaaagatattcaggacctaaactaagcattggaccaratggatctgacagacctttacagaagtcctcacccaaaaccagcagaatatatattcttctcatcaccacatactctaataatttgacataaaacaatcctcaacaaatgtaaaacaaccaaaatcataccaaacatcctctcagaccacagtgcaataaaaatagaagtctacacaacgaaagtagcttaaaaccatacaattacatggaaattgactacatacctctaaatgaaattaaggtagaaatcaatgaattctttgaaataatgagaaaaaagatacaaactatcagaatctctgggacacagctaaggcagtgttaagagggacattcatagcgctaaatgcccacatcgaaaaggtagaaagatctc

SEQ ID NO: 574340 - DNA, 587 bp, Homo sapiens
aaaaatcacatgatcatatttatagatgcagagaaaacgtttgagaaatgcaacgcccattcatgatgaaacctctcagcaaactaggaatagaggggaattttcttaagaatatctacracaagaatacagccaacatcatacttaatggtgagaaaatcaaagttttcacactaatatcaagaacaaggcaggattgtctcctcttttcacctccttttcaacattgtactggaagtactagctaattcagtaaggcaataaaaggaaataaaaggtgtacagaagggagaggcagaaataaaacagtctttgtttacagatggcatgataatctacgtagaaaatcaaaaaaaaaaaaaactcctggaacaaataagcaatcatagcaaggttgcaggatacagggttaatggttaacatataaaagcaaatgtgaagaatgctgcaataaacatgggaatgtaaacatctcttctacatagcaattttatttttctttggatagatacacagtagtgggattgcaagatcatatggtaattttattttttttagttttttgaagactctccacactattttcc

SEQ ID NO: 574341 - DNA, 587 bp, Homo sapiens
aaaaatcacatgatcatatttatagatgcagagaaaacgtttgagaaatgcaacgcccattcatgatgaaacctctcagcaaactaggaatagaggggaattttcttaagaatatctacgacaagaatacagccaacatcatacttaatggtgagaaaatcaaagttttcacactaatatcaagaacaaggcaggattgtctcctcttttcacctccttttcaacattgtactggaagtactagctaattcagtaaggcaataaaaggaaataaaaggtgtacagaagggagaggcagaaataaaacagtctttgtttacagawggcatgataatctacgtagaaaatcaaaaaaaaaaaaaactcctggaacaaataagcaatcatagcaaggttgcaggatacagggttaatggttaacatataaaagcaaatgtgaagaatgctgcaataaacatgggaatgtaaacatctcttctacatagcaattttatttttctttggatagatacacagtagtgggattgcaagatcatatggtaattttattttttttagttttttgaagactctccacactattttcc

SEQ ID NO: 574342 - DNA, 548 bp, Homo sapiens
tacagacatattaacaagtcctttccaagttgatctatagattcaatgcaacccaaataaaaatctcagcaagttattttgaggatatcagcaaactgatagtacagtttctgtgtaaaagcaagactcagaatagccaacacaatattgaaggaaaaggacaaagttggaggactgccactacccaactttaagacttactataaagtcacagtaatcaggacagtgtggtagtggtaaatgagtagacaaagagatcaagaagacagaatagagagctcagaaatagacataaatacaatcaatagatatttgacaaaggcataaaggcaatataatggagaaacacagacatttcaacaaatgatgttacaactggtcatccayatgcaaaaaaaaaaaaaatgaatctagacacagactttccacccttgataaaaattacctcaaagtgaatcacagacctaagtgtaaaattcaaaactataaaaagcctagactataacagcagacaacctagatgacctggggtatggcactgacttatt

SEQ ID NO: 574343 - DNA, 409 bp, Homo sapiens
tgatcaaatttaggttcagttttagggcaggagtactttacaggtggttccatcaaaggcatgtgaaaattstgtgtgtctctctttttgtgacataagggccctggggatcattgattagatctattatttcattatggtgacattataattctataattcctgcttcctctatgagttagaaaaactctgataaggagaagctttccctcattaattatgttacctcaggtacagctcatacaggaaaaacataatgtgattttttaacgtagtgtattagtccgttctcacgctgctgtgaagaaatacccaagactgggtaatttataatgaaaatacgtttaattgactcatagttctgcatggctggggaggtctcaggaaacttacaatcatggtggaaggg

SEQ ID NO: 574344 - DNA, 409 bp, Homo sapiens
tgatcaaatttaggttcagttttagggcaggagtactttacaggtggttccatcaaaggcatgtgaaaattgtgtgtgtctctctttttgtgacataagggccctggggatcattgattagatctattatttcattatggtgacattataattctataattcctgcttcctctatgagttagaaaaactctgataaggagaagctttccctcattaattatgttacctcaggtayagctcatacaggaaaaacataatgtgattttttaacgtagtgtattagtccgttctcacgctgctgtgaagaaatacccaagactgggtaatttataatgaaaatacgtttaattgactcatagttctgcatggctggggaggtctcaggaaacttacaatcatggtggaaggg

SEQ ID NO: 574345 - DNA, 391 bp, Homo sapiens
ggtttttgttttgactctggtgttaactaagttacaatttgttgaattggtctagatcagcattttccccaatgatatccctcaaaacactaactctgcgggatgctctttaaagggtttcttgctgaaataaatttcagatatatggccaataattttggagtatcactaggcctagtagcataaaaggctatcagaattttacatgaaataaaygaatttaacttggtataactgtgaggtttccttaatctatcctgccacaaaatcattaccagtactatgctgtgcctctagagttccgaggaatacttggaaaatgctgggttagctaatatctaggtctctagttctaactctgaaagtttgactgcaatgacaaaatgtgtca

SEQ ID NO: 574346 - DNA, 566 bp, Homo sapiens
aaattgaatacactctcgtaattgcctataaataaggaaaaactcaaactcttcattctttcagggaactattaccaatactcacctgtgtttttataattaagtcacttttattttgtcctctgtatttgtaaggagctatcatttmctggaaggaatattcagaccagaaattgagaggttggttttaatttctcttctgttacctgatcttttagcgttgggataaaaaattgtgacttatattctaaaagatggtaaattaattaaaataattttttagttgtctgattttaaacagtcatgatatccaggcaactgactgataaaaatgtttctttttaagctagtcacactggtatcaagtagttacaaatttaatttccctttccttcaatatttgtacctatggaacaaatttaactatatattcccatttgtttactggaaatgctaagaaaaatagatatctgtaaacacataatactcagaaaattgaaatatgctttgtatttcctagaaaattcggacttagtcatcagaaaacacatagcacacagaccaca

SEQ ID NO: 574347 - DNA, 566 bp, Homo sapiens
aaattgaatacactctcgtaattgcctataaataaggaaaaactcaaactcttcattctttcagggaactattaccaatactcacctgtgtttttataattaagtcacttttattttgtcctctgtatttgtaaggagctatcatttactggaaggaatattcagaccagaaattgagaggttggttttaatttctcttctgttacctgatcttttagcgttgggataaaaaattgtgacttatattctaaaagatggtaaattaattaaaataattttttagttgtctgattttaaacagtcatgatatccaggcaactgactgataaaaatgtttctttttaagctagtcacactggtatcaagtagttayaaatttaatttccctttccttcaatatttgtacctatggaacaaatttaactatatattcccatttgtttactggaaatgctaagaaaaatagatatctgtaaacacataatactcagaaaattgaaatatgctttgtatttcctagaaaattcggacttagtcatcagaaaacacatagcacacagaccaca

SEQ ID NO: 574348 - DNA, 554 bp, Homo sapiens
gattacaggcgtgagccactgcttgcagcctgccttttcagtttctagtgtgttattggtcagcaggcttctttcttgtctcacagtgtcctccaaagagttgttttccagaaggatgtgtcattcatctgggacaagtagcaggatcaagacataatacatgagtttgggtggtgtctttggagttagcaggaatgttaacaggaaaagaatcaaggtagttggaatttctcttargtataaagtttacatagagatctcttccaacattgttttagttagctctttgagttccacttaaaatgtcatctcctctgtaaagtgaacttaaacttccaggcagagttaataggtctttgctcaaacctgtattactgctcttttcatatttccttgtaatgatctgtttctatatttttgtgctcactggattttgtccttagctaactggcatctttattggcaagtacagtgcctagctcataataaataaataaagcttcattgaatgaaaaaagaagatttgggctgcaaaatcatttcatctgacaact

SEQ ID NO: 574349 - DNA, 546 bp, Homo sapiens
tttaggttgaaaaatggacattgtaacaattctggattgttagttttcaggattgttggtgttttattttagaagaaaattaacttggtaggggtgtgtgtgtgtagtaataattttaaaggcacagaaaattctcatgttctctcagccttccaattttcaatgaagtatcaagtaagcacatgtaatttaatcagggatgtgagtttttatcttagtttttctattattctctcttgcaagttaccacctttagacttttataagcaacaaagccacaagcttctcatttttccttatgaaagaagagagaaaaagcaaatggattcctatcaatgaagatgcatattaaaaaaatattttccagagattctactsatttattttagttatatctcctgggcaaccctatttgcaagggatattgggaaatgtaaattctctgcttccctgggtaaaatttagtttctgttaggaagaaagaagaaagaataaatactgtgatagtctgtgccatgagagatggttgtcataaaggtcaaagct

SEQ ID NO: 574350 - DNA, 546 bp, Homo sapiens
tttaggttgaaaaatggacattgtaacaattctggattgttagttttcaggattgttggtgttttattttagaagaaaattaacttggtaggggtgtgtgtgtgtagtaataattttaaaggcacagaaaattctcatgttctctcagccttccaattttcaatgaagtatcaagtaagcacatgtaatttaatcagggatgtgagtttttatcttagtttttctattattctctcttgcaagttaccacctttagacttttataagcaacaaagccacaagcttctcatttttccttatgaaagargagagaaaaagcaaatggattcctatcaatgaagatgcatattaaaaaaatattttccagagattctactcatttattttagttatatctcctgggcaaccctatttgcaagggatattgggaaatgtaaattctctgcttccctgggtaaaatttagtttctgttaggaagaaagaagaaagaataaatactgtgatagtctgtgccatgagagatggttgtcataaaggtcaaagct

SEQ ID NO: 574351 - DNA, 546 bp, Homo sapiens
tttaggttgaaaaatggacattgtaacaattctggattgttagttttcaggattgttggtgttttattttagaagaaaattaacttggtaggggtgtgtgtgtgtagtaataattttaaaggcacagaaaattctcatgttctctcagccttccaattttcaatgaagtatcaagtaagcacatgtaatttaatcagggatgtgagtttttatcttagtttttctattattctctcttgcaagttaccacctttagacttttataagcaacaaagccacargcttctcatttttccttatgaaagaagagagaaaaagcaaatggattcctatcaatgaagatgcatattaaaaaaatattttccagagattctactcatttattttagttatatctcctgggcaaccctatttgcaagggatattgggaaatgtaaattctctgcttccctgggtaaaatttagtttctgttaggaagaaagaagaaagaataaatactgtgatagtctgtgccatgagagatggttgtcataaaggtcaaagct

SEQ ID NO: 574352 - DNA, 511 bp, Homo sapiens
tagtgatacctccttgtagttttcatttgtgttgccctaatgaccaatgatgttgagaatcttatgcttgttgactttttgtttatcttgttttgcccatttttaatcagtttgttcatcttatgtttgagttttcagagtttttatttcattctggatacaagcttttttattatatatagtttgcaatattttcttccaatctgtgacttgtcctttcatttccaaaagagtgtctttggagagcatatatttttaattttgattaagtcaaatataccttttgtcttttatgttttgtagtctttgtgtcttatctaagaaatttttgcctaacataagatcataaaaatttcttaccttttcttctagaagttttatagtttagctcttatatttagatctagcatccattttgtattttttgtgtgtgtattactrtcttcagtaagggttaaggtttttttcccatagatatatccaattattccagtatgaatattccaatatt

SEQ ID NO: 574353 - DNA, 573 bp, Homo sapiens
ggactacaggcatgtgctaccatacccagctaatttttttttcttagacagagtttctctctgtcaccaggctggagtgcagtggtgcaatcttgtctcactgcaacctccaactccctggttcaagtgattctcctgcctcagtctcctgagtagctgggattacaggatgaaatagaaaaagaaaagaagataattattataatttattaaaaattgctgtctacagttaagactgaaatgggtacagagtaacccattgaagttaagaaacaatattaactgcctccctgtgaaacattaaccatatctaccctctgcatattttttaaggtctgtaaattcctgtttttcctgctgaacagctgcaaggtcacaaggcagagaagcatactctgcaaaacatgtttttcttaagatgtatgacatgtcacaagacgattaactgctttttttctcacttccgtaaacccacttcctgcttcatgtttttcccrcctcaagatgcataaaaggcccttgccttctttgttcggggctcagactttctggatggaagtccgctgagccatt

SEQ ID NO: 574354 - DNA, 595 bp, Homo sapiens
ctggcgaggagttgtgattctctgaaggagaagaagccttctggtttttggaattttcagcctttttgcactgttttttcttcatcttcatggctttatctaccttcggtctttgatgttgatgtcagatggagtttttgtgtggacgtcctttttgttaatgttgattttattcctttctttttgttagttttccttctaacaatcagggccctctgctgcaggtttgctggagtttgctggaggtccaatccagaccctgttagcctgggtatcaccagcagaggctgcaaaacagcaaagattgcggccagtttctttctctggaagcttcgtcccagaggggcacccaccagaagccagctggagtgctcctgtatgaagtgtttgttgacccctgctgggacgtgtctcccaggcaggaggcacargggtcaggaacccacttgaggaggcagtatgtttcttagtagagcatgagcgttgtgctgtgctctcttcagagctggcaggtaggagcatttacgtctgctgaagctgtgcccacagccgccccttcccccaggtgctctgtcccagggagatgggagtttta

SEQ ID NO: 574355 - DNA, 595 bp, Homo sapiens
ctggcgaggagttgtgattctctgaaggagaagaagccttctggtttttggaattttcagcctttttgcactgttttttcttcatcttcatggctttatctaccttcggtctttgatgttgatgtcagatggagtttttgtgtggacgtcctttttgttaatgttgattttattcctttctttttgttagttttccttctaacaatcagggccctctgctgcaggtttgctggagtttgctggaggtccaatccagaccctgttagcctgggtatcaccarcagaggctgcaaaacagcaaagattgcggccagtttctttctctggaagcttcgtcccagaggggcacccaccagaagccagctggagtgctcctgtatgaagtgtttgttgacccctgctgggacgtgtctcccaggcaggaggcacaggggtcaggaacccacttgaggaggcagtatgtttcttagtagagcatgagcgttgtgctgtgctctcttcagagctggcaggtaggagcatttacgtctgctgaagctgtgcccacagccgccccttcccccaggtgctctgtcccagggagatgggagtttta

SEQ ID NO: 574356 - DNA, 560 bp, Homo sapiens
gtaacaacctttgctgcaggcctccgtcttgttttacatacttgagtgtgacctgtaaccatgtcacagtactttttttagcctttgccattttacaatggcgcacgggttcaatcctggcttggggaatgaatactttcaaattaatagctatgtgacttttaccatttgctaattctcttccccctccatgaacaactgctaacttcctttcttaaatctttctttctctaagttgcctttaaaacttctggwttttttttttttttttttttttttttttttttttttttgagatggagtctcattctgttgcccaggctggagtgtagtggtgcgatcttggctcactgcaagctctgcctcccaggttcacaccattctcctgcctcagcttcctgagtagctgggactacaggcacccaccaccatgcctggctaattttttttttgcatttttagtagagaacgggatttcacaatgttagccaagacctcatgatctgcctgcttcagcctcccaaggtgctggaattacaggcgtgagccaccacacccag

SEQ ID NO: 574357 - DNA, 560 bp, Homo sapiens
gtaacaacctttgctgcaggcctccgtcttgttttacatacttgagtgtgacctgtaaccatgtcacagtactttttttagcctttgccattttacaatggcgcacgggttcaatcctggcttggggaatgaatactttcaaattaatagctatgtgacttttaccatttgctaattctcttccccctccatgaacaactgctaacttcctttcttaaatctttctytctctaagttgcctttaaaacttctggattttttttttttttttttttttttttttttttttttttgagatggagtctcattctgttgcccaggctggagtgtagtggtgcgatcttggctcactgcaagctctgcctcccaggttcacaccattctcctgcctcagcttcctgagtagctgggactacaggcacccaccaccatgcctggctaattttttttttgcatttttagtagagaacgggatttcacaatgttagccaagacctcatgatctgcctgcttcagcctcccaaggtgctggaattacaggcgtgagccaccacacccag

SEQ ID NO: 574358 - DNA, 529 bp, Homo sapiens
ttggagaaaagaggagaagggggacaccctttctatctttttctacaccctgggtcaccctgaaaggaggaaggaggctaagtgatgccttctcctcctctcttttctagataagtaacaacctgtcttcaagcctgcccatggcttgatgcaagaaaacttgcttcaagttttctttaggcaagcttcaacttcactcacacatagaggccttccaggatttaccccaagtatttaaactctcttggaatgatgttatattactcttttattattattattattattatactttaygttctagggtacatgtgcacaacatgcaagtttgttacatatgtatacatgtgccatgttggtgtgctgcacccattaactcatcatttacattaggtatatctcctaatgctatccctcctccctcccccaaccccacgacaggccccagtgtgtgatgttccccacgctgtgtccaagtgttctcattgttcaattcccaccaatgagtgagaacatgcagtgtttggtt

SEQ ID NO: 574359 - DNA, 458 bp, Homo sapiens
cattcccgtttcctttcatgaaggacctagccatcatgtgaggttggaaggaggtcctagggcaactgagggcatctggctaaggctataccttggtgttacctgcagttccctgaactaactccagcccctgacagcccctcagggtgttgccatgaggactttcagaccttttaattgcatttacttccttcttttcatggctactatgtctcctatcccttatttatatgcaatgttgtaggtattttcrcagcctggggagatactcctgttaagaaaagtcagcaagtgccttagtcactaggaatgtaattcaaagaattgttgcttctgcgattttctagagatggggtaacttcaggatttcagctttaactttcatctaacaagggcctttttgtttctcaataatagacattcatggcactgtataggggaatatttcacccaaagaa

SEQ ID NO: 574360 - DNA, 458 bp, Homo sapiens
cattcccgtttcctttcatgaaggacctagccatcatgtgaggttggaaggaggtcctagggcaactgagggcatctggctaaggctataccttggtgttrcctgcagttccctgaactaactccagcccctgacagcccctcagggtgttgccatgaggactttcagaccttttaattgcatttacttccttcttttcatggctactatgtctcctatcccttatttatatgcaatgttgtaggtattttcgcagcctggggagatactcctgttaagaaaagtcagcaagtgccttagtcactaggaatgtaattcaaagaattgttgcttctgcgattttctagagatggggtaacttcaggatttcagctttaactttcatctaacaagggcctttttgtttctcaataatagacattcatggcactgtataggggaatatttcacccaaagaa

SEQ ID NO: 574361 - DNA, 494 bp, Homo sapiens
agcattttcttctgtaaatatatcrcattttccttatatattcacccattaatgaaatactgatacaacttttacatgatgaaatgggatctagttttttgtttgtttgctttgcacacaaatatccaatttttctagcactatttattgaagagattattcttttcccaatatatattcttggtgcaattgctgaaaatgagttgactgtaaatggatggatttatttctgggttttatattctcgtccattggtcttttatgctaatatcatgctatttcggttcctatagcctggtaatattatttgaaatcaggtaatgtgaatgcttccagctttgttcttttggcttggtattgatttggctaatagtagtctttcgtgttttcatataaattttaaaattgttttttctatttctgtgaagagtgtctttggtattttaatagaaattgcattgaatctgtagattatgttgggtagtatggtcatt

SEQ ID NO: 574362 - DNA, 521 bp, Homo sapiens
agctttttagctgtaatttaggaggtaagtgtgtccagggctgatcttacaaattaatcctgatttgatgttgtttacagatagctttttcttaaaaatgacaaagatatttcctgtgcaagatgtgttaatatgtaattatcatggaatatgtaaccatcaaatcaggtattgctctgttttcccaagtaagtaaactaatacctttgaattgatcctacattctggcacacacacacacacaaaagtaaacatttaacatatagtagatgtgttttagttcatgattttgcggtgctatgaaagcmaaaggaatttgagacatattcaggtaacctgattaaaaaatgataaattgatcaattacatattaaaagctattaagtccccaagaaatatcagctattaaaatataagctaatacttcagaggtcaccacagaagctaaaagcaatgcctttgctagtttatttggtaaacaagcagctcttgctatccaacccatggaggtgctattaagt

SEQ ID NO: 574363 - DNA, 618 bp, Homo sapiens
acttttgtttgtttgtttttgttgtgtatgtgaaatactcattcctagactacaatgctatgttgtgtttattgcccaagtaaggtgcttatttcaggatcatggcatctccagtagttttaaatgtacagctgtcatcagtctgggtggtcatgtcaggatttaccatgccttcttttcattattctgtttatccagaggagaaggactgaggtgttctatctctttccggcacaaatcatcacttcacatatcccttctagacagcagctgtatgatagcatgtaagtacctgctaatgtctcaaatcaaagcaaaaataattcttagtgaaaacacaaaactctgttattatakttgggaaaattccatgtaaacaaggctcctatttgacccagccaaaactaagtgaataaatacccaaactcaaattgtcgtttgagagccaatcagcttttcttttttttttaggatacttttttctacttgttctgaagtgtgaaccggaaagagcagaaagtgttagccagagaaaagacatccctctgtgaggccagtaaattctttaaagttgtatgatctccattaccatgataacaaattactcaaggctctttg

SEQ ID NO: 574364 - DNA, 614 bp, Homo sapiens
atttttacaaagtttctttctaatccatgctgaaacaatggcacattctttttggatcattttcttagtaagttattttacattaaattcatgaaattaacttatttgacatagtatttcagtaatttttaactgtattattttgtatattttaattaatatataaatataaattacattttttttacatacagcatgttgttttgttatatatatatattgyggaatggctaaattgagctaaatttttattgcaacaaagttctaaatattatcctatattttggaccacagatacaaaaatacataaagttcttacatactgacaaaatttgagatttaaaaagtaatgcacttgagttgaagtatttttattgccaactttgaattctatttttagttgtattataatacagatttttttctagtttaagtaattaaaaaaaaataaaaatttccagttaacataaccttaaaataaagcaaacttcctctgagctgtaaagggtaaaattatcagtataaggattatactaaaccaagtacttgtaaaacattttggccactatatcatctgaaggcaaatctttatcaatttgtgcatataagtgttc

SEQ ID NO: 574365 - DNA, 508 bp, Homo sapiens
gattagtagtcttttaaattttatttttaaatagtttgtattaaaaattcttaagttaaaaaaattggtaaactagtcctaagcaattgaacttgaaatcacatgggagagagtaaggatgccgcttatgtgactgaatatgcatcaaccagatgttagaatgcagagagagatacaaagcatrttagatagatcatatagcacccaagcaggtcagatgccatatcccctaatgttccatggttatattcactcagtctttaagttctatggctaggacaagatcttttttttttttaagttattttttagatgcttgactccaaaacatagggaacttcactgtaattatgttatcagggatttttatggcctctttacaacttccttttccattacagacattgtgatattctgagccataagtactgcatggcaatgatgctttcagtattgcccaaaccagctggaaaatcttgtcttgctctaaaacccactcaaagcagcc

SEQ ID NO: 574366 - DNA, 585 bp, Homo sapiens
taaaaaagtataaagtgtaactattgtataatagtttctttttcaatactttattaattatttcaaactgtataattgtgacccaatggatatgcattaaaatcaaggtcaaagaagaaatggaagtattagccgcaaaagcaacaaaatgattgtggcaagcacataatgtttccctttttcaaaatattcttctcttaatctaaaagacatatttatgctatatccaatcttacaaatcacatatcccttctttggtgaagattttcacaaatctccccttctagagtaaatatgcctccacttgcytagtaactctcttattctcttatcatgatgcacttgccactattttagattattgatcagatgggtcattgattattaattcttacagatttctacaaaaacttaagctgcataggaataagcactttaaatttttcatcactgctttcctagaaatattccctcagacatggtagtcctttaagaaatatttattgaataaataaaaactgcaaaaagaaaggttgcaaaatttcacttaatgcttgaatagctatcttacaatgatgataaaaa

SEQ ID NO: 574367 - DNA, 309 bp, Homo sapiens
attccctcagacatggtagtcctttaagaaatatttattgaataaataaaaactgcaaaaagaaaggttgcaaaatttcacttaatgcttgaatagctatcttacaatgatgataaaaacaaacatgaatctccagaaagtaaaatattatttaaacaatttaaggaagaaagtctgttggaggtaggatataattctgacataaaaattagaaaatctaaggtttttcaacgtgctttctaaatatgaaagaaaatttaaggatcaaaattattttctactctscagaatctttagtttcataattaa

SEQ ID NO: 574368 - DNA, 518 bp, Homo sapiens
taatcttgtaggggacttggagaacttttgtgtctagctaaaggattgtaaacgcgcaaatcagcactctgtgtctagctaaaggtttgtaaacacaccaatcagcactctgtcaaaacggaccagataagggaataaaagcaggccacctgagccagcagaggcaacccactcggatccccttccatgctgtggaagctttgttctttcgctctttgcaataaatcttgctgctgctcactctttgggtcggcgcagcctttatgagctgtaacactcaccttgaaggtctgtagcttcactcctgaagccagcgagcccacgaacccacygggagggatgaacaactccggacgcgccacctttatgaactgtaacactcaccgcgaaggtctgcagcttcactcctgaggccagcgagaccacgaacccaccggaaggaaggaacagctccagacgcgccgcctttatgagctgtaacactcaccgtgaaggtctgtagcttcactcctgaagtc

SEQ ID NO: 574369 - DNA, 554 bp, Homo sapiens
aataaaaatttctatgtttggaaatttgtttttattaacattcttatcaagagatagctttttctaaattacctaattcattctagtaaataattttctttgtttctatcatatttagtatcagtatcataaaaatgatatatcactttttatgttcattaatgttgtctcaaatttaccttttatagcacactatattttatttttattyttatttatttatttttttgagatggagtctcacactgtctcctgggctggagtgcaatggcatgatctcagctcactgcaacctctgcctcccgggttcaagcaattcttctgccttagcctcccaagtagttgggattacgggcacccactaccacgcccggctaatcttttgtatttttagtagagacagggtttcattatgttggccagacttgtctggaactcctgaccttgtgatccgcccgcctcagcctcccaaagtgcaggattacaggtgtgggccactgcgcccggcccacactatgttttagaatgggagaggcacaataaatacctattga

SEQ ID NO: 574370 - DNA, 554 bp, Homo sapiens
aataaaaatttctatgtttggaaatttgtttttattaacattcttatcaagagatagctttttctaaattacctaattcattctagtaaataattttctttgtttctatcatatttagtatcagtatcataaaaatgatatatcactttttatgttcattaatgttgtctcaaatttaccttttatagcacactatattttatttttattcttatttatttatttttttgagatggagtctcacactgtctcctgggcyggagtgcaatggcatgatctcagctcactgcaacctctgcctcccgggttcaagcaattcttctgccttagcctcccaagtagttgggattacgggcacccactaccacgcccggctaatcttttgtatttttagtagagacagggtttcattatgttggccagacttgtctggaactcctgaccttgtgatccgcccgcctcagcctcccaaagtgcaggattacaggtgtgggccactgcgcccggcccacactatgttttagaatgggagaggcacaataaatacctattga

SEQ ID NO: 574371 - DNA, 549 bp, Homo sapiens
tcagtgctatcttaatcctaktttttttttttttaactcatttttttctttctcttcaaacaatttatgaatttaatattttcttgagctgtgatatactgcaccattttatatacactttcaaaacaaaaatcctgttatttcaaactcttcctttttgtctcttctcctcaagcctatcaaccaataagtcctatccactcacaccttcagaaaacaactttctaagacccaatttgcatgtcagcagagttctaggtattaggatacagtgataagcagtgtgaaaattccatatattctgtatatattccatattggatgataggccataaaataaataaataagaaattgagtgataagtcccctgatggagaacaaggagagagggagtcaataacaggaaaccttggatttacactcattattctgttcctgtgactcttctaatatattctcattgtacttagaaaaaaatccaaatttaataacattttagcccacaagatgccatcatcttgcccatacaaactcttcaaagtcatctc

SEQ ID NO: 574372 - DNA, 340 bp, Homo sapiens
tttaatggttaattcttagttatttcattttatttgtggctattgtaaagggagtactttcattatttctttttcagattgttcacagtttttatatagaaatgctactgattttcrtatgttgattttgtatcttgcaacttgactgaatttatcagtttgaatagtttttttggtgttgtctttagttttctccaaatgtaagatcatattatctgcaaagaaacataatttgcattcttcatttccaatgtggatgccccttatttttttttcttgtctgattgctctagctaagactttccttactatgctgaacaacagtagtgaaaatgggcat

SEQ ID NO: 574373 - DNA, 602 bp, Homo sapiens
aggttatttaaaagaagtttctagttatactttttgttggtaaattattttactgcttgctacaaaatttgtgggttgtgaaataggaaaaattttttctttttttaaattaacacttgattgtttgggtaactcccaggaaataactgtaatgttagcgtgttgttctatgtgctttatcttctattagtctgcaaagtttgtatactataaacaagcaagtacaaggagttaatgctccaaatatttctttttctagcatagttaatattgaatgatccrtcagttttttgcctaaattttattcttataacaaagtatcatacaaattagttttattgggtcacatttatatgattgctttcaagatttaagagttaaatgactttagcttgtaaattttaaaaaactcccaaaatatatatttgcattttactagaactctggactagataattataagcatcaaaaggatttctatattttgaatttggtacatttctgtttttaattattaaaatccaaggatattttagcttcacagttttttttaagactatttacagccactgtctcttttttgctaaaaacaattctacaga

SEQ ID NO: 574374 - DNA, 602 bp, Homo sapiens
aggttatttaaaagaagtttctagttatactttttgttggtaaattattttactgcttgctacaaaatttgtgggttgtgaaataggaaaaattttttctttttttaaattaacacttgattgtttgggtaactcccaggaaataactgtaatgttagcgtgttgttctatgtgctttatcttctattagtctgcaaagtttgtatactataaacaagcaagtacaaggagttaatgctccaaatatttctttttctagcatagttaatattgaatgatccgtcagttttttgcctaaattttattcttataacaaagtatcatacraattagttttattgggtcacatttatatgattgctttcaagatttaagagttaaatgactttagcttgtaaattttaaaaaactcccaaaatatatatttgcattttactagaactctggactagataattataagcatcaaaaggatttctatattttgaatttggtacatttctgtttttaattattaaaatccaaggatattttagcttcacagttttttttaagactatttacagccactgtctcttttttgctaaaaacaattctacaga

SEQ ID NO: 574375 - DNA, 585 bp, Homo sapiens
tgctgtcataaaaggattgtttctttatagagcacaagcagagtagatttagcataattctaaaggctccaggatatttggaatggtaaatgagcactggcatcaacttaaaatcaacagctgcatcagtccctaacaagagcatcagcctgtgctttgaagctttggagccaggcattgacttctcctctctagctatgaaagtctcacagggcatcttcttccaatagaaggctgtttcatctacactgaaaatctattgtttcctgtagccacttttaacaattatcttagccagatttctggataacttgctgcagcttctacatcagcacctcctgcctcctcttgcacttttatattatggagacagcttctttccttaaacctcatgaaccgacctctgctagctttcaaatattcttctgcaacttcctcacctccttcagcctttatggaattgatgggagttacagtcttattctggattagactttgtcttaaggaaatgctgtggctggtttgttcttatatgcagacaactaaaactttcaccgtatmaacaataaggctttttcactttct

SEQ ID NO: 574376 - DNA, 590 bp, Homo sapiens
gaagctgaggcatccaatagtaaagtcaatctcctaaaaccaaattaatagaagccatgaattccttcaatttcaccatgtgttttagagcattgtttactgcttgtaatgtcctactgcctggagcactcgatgataattgtagatttttttttctagctttgaataatattaaattttgtctttgaaaataatttactataattgaacattttatctttctttggcartctgtgagttacgcattagaaaactgtattattgatcataattataagaatcataaccatcatatgatcatgttttgaaagaagattatgataaaatattgctggattggctaattatacacatggaaacaaacataacattattattatcattattattattatcattatttttgagctgaggtctctgttacccaggctggagtgcagtggtgcagttatggctcactgcagcctggaactcctgggctcaagtgatctttctgtatcagcttcccaaatagctgggactacactacacaccaccttgtctgactaatttttaaatttttttagtagagacaggttcttgctatgttg

SEQ ID NO: 574377 - DNA, 590 bp, Homo sapiens
gaagctgaggcatccaatagtaaagtcaatctcctaaaaccaaattaatagaagccatgaattccttcaatttcaccatgtgttttagagcattgtttactgcttgtaatgtcctactgcctggagcactcgatgataattgtagatttttttttctagctttgaataatattaaattttgtctttgaaaataatttactataattgaacattttatctttctttggcagtctgtgagttacgcattagaaaactgtattattgatcataattataagaatcataaccatcatatgrtcatgttttgaaagaagattatgataaaatattgctggattggctaattatacacatggaaacaaacataacattattattatcattattattattatcattatttttgagctgaggtctctgttacccaggctggagtgcagtggtgcagttatggctcactgcagcctggaactcctgggctcaagtgatctttctgtatcagcttcccaaatagctgggactacactacacaccaccttgtctgactaatttttaaatttttttagtagagacaggttcttgctatgttg

SEQ ID NO: 574378 - DNA, 591 bp, Homo sapiens
gtcatttatcagcccaggcatgccttcccttcccccatcattttcacataacattcagcattcacctctctcctctcctgtgtcagatgccatgtttcctccagcaatgtcttcctctttcttagtttatatatgtattttggtggcatattctccagtggccatttgaaagaggaagcagagaaggtcaattttttaagctcttgcattatcagattttatataaatatacatatacacgcagacacacacaaatatatttttctaccttacccttatattagttagataaataccatggtacagagttatatttttttctcagatctttctagatctcgttcatatgtctttcagctttcaagggtaacctggagaagttgaatgcaattaatattttaattaaaatttmttgtcttttgaatgcaatcagtctctttctctttatctctcttgtaaagttttgggatctttattctcagtattccaaaatctttaagatgtactttggtgtgaatcttccttcattaattgcagtaaacattttgtgagtcttttcagtctgaaaatgtatggtcttcagttttaggg

SEQ ID NO: 574379 - DNA, 572 bp, Homo sapiens
atattgtagcttcttagtaggtaactttccaaatcttgactgccagaaatactataatcttcttcagcttcccaattgcatttcctggaaacaagtgagataacagatttatatcatctaatgcctggtatatactatgccctccataaacaagagcagccaggccccatttgtgaatcaatgctcatctcagatcctgagacactcctgatgagagcaagaagtatgctggaagcctcaccctctctacccccatccagtggcccttggaactaagtctcatgtctcagaccccaagtccagtgtctgagctatgattgatgggatgccacatgccctctgagctaccttaatgccaacctggctcaggaccccatgtaccaggaatgagcatctgtggagccctaaacaacagcctttttccttccacttatatrtgggtcccagccaagggtaagaacttctttgtttttattttgaccttcatagtttctgcttaatgtccctgattagacaccaagtcaagcttagggtattgccgtgaatgcctggctcttacaaggtttctgttc

SEQ ID NO: 574380 - DNA, 467 bp, Homo sapiens
tgtgcatttctttcctcccctcacctgatctttaattgtattccagaagagggtttcataatgaaggacgacctgctttcatccaagatcattataattcttgcaattccaaagtctgtttctcccctcttctctgtagaactgaaactataaaagtcttaaaagcatggaacttaggacttgaagggacctcattatcatctaaccttctcatttgacagacaagcactgacttgcccataattataaagctggttaatggaagaataagtaataaaataagtttcttactcacagttttgtgttccttttgtttctgtgtgtctctgtatgtatatcttctctcgtycaagcctccaggatagtgacccctcccttaaatcccctaacatattcttcttgtgtaaatggttccaagcagcagtttgaaaataatgttactacaccatagagccttgagattaatg

SEQ ID NO: 574381 - DNA, 485 bp, Homo sapiens
gggtgagttcagaacattttagcatgggaatggtttagggagcttgtaattaactggttttcctggcagtctacaggactcttgatcactactatctttgatcaacataaattactgaatttcccatggktgaaaaaaatactgccagataatgaaagcttgtttcagttgcatgccccagtcctccagtgaggctgatgcatttggttatcccatcagtttccattgcagttcatctaaatgttatttttagcatagtttgcattttagatggccatttttttttcctcttggtatcaacatggatttttaaaataagaatcctttggcatattaatatgccctaataaatcaagtatgttttaaaaccacacacagaaatattccatttgccattaaatgtgttgatacagttgatcttttatcatatttttctatctttttctgtaatatttgtctatttttctgttgatcttttataattt

SEQ ID NO: 574382 - DNA, 634 bp, Homo sapiens
gcattacatgttggagtcatctgtgtgtggcagtaggtagagacggataagagttcgcttatataagaaatgtgtagcacaaataccccaaatgcaaattcaagtgaaagatttagtctcaccactatattctcattaaatgggtcgttatagtaaatgagtaaaatgagtcattacagtaaatgactactagaggtcatgccttatgcaaataaggcctaaaggcatgggtacaacacatactatgctgtgttacccactatctgtgtactcattatgaaatatatccaatatcgtaatgtggcagtcgtcctaaccaatttaaatgagcctaggtttagaaaggagatacccacaagaaagtaggatcataatatatgcaggagctgaaaagtgtggctgagaaaagagggtgtgagacatgtaagccaaaaagtatgtgggacaaatctcaattagttgaggagttgattttaccatggttaaggatattcccatgacacagccttaggaggtcctgagaacatgtgcccaagatggttgggttacagcttgattttcaatgttttgaggagataggagttacaagcagatatgtaatgtctgacacrtacatgtcaatacatgtaaggag

SEQ ID NO: 574383 - DNA, 507 bp, Homo sapiens
tgggtgacagagtgagaccctgtctcaaaaaaaaaaaaaaaaaaaaaaargttactagaagttttggtccaggatactatcttagtaccttgggatccatttccatccattgctcctataaaatgtgcgatgataccactcgagaaatgaggaaatggtgttggcaataggaccatcggcacactgacagcactcagctgttaatgtccctttgtcagagctggatggtggcagatttcaacgcctggtgagttgaggctctgaatcaaagtgaaccgctaggacttgtgatccacaatcagggatgacagcatctaggggaaatccgcagcggacagaaggaggtctcacgctcagcagaaggatatataattgtaccttgtaatttttccaactttaattggacaattctccttttaaaaagataagaatgtttaaaggaatccaaactaagcctttcttgtgtcttcatattttcctttttcagaccaaaacaaacctaaacct

SEQ ID NO: 574384 - DNA, 512 bp, Homo sapiens
atcacatgttctcacttacaagtgggagctaaataatgtgtacacatggacatagagtgtggaataattgacattggcaactcagaagggtgagagggtgggaggaaggagaagaatgagaaattggtggtgggtgcaatgtatattattcaggtgatggataccctaaaagctcagaattcatgattgtggaatatatccgtgtagcaaaactgcacttgtaacacttaaatttatacaaataaaaatttaaattattttgttctaagaaactaatattgtggcacctgttacagtagcaatagaaaactagtacactataaaatatacattatacacatgtacatatacatatcatgttatgtttatacaygtctgagtatatatgtaatatatactataccagctatataatatatgccagctatacaatacacactctataatacacattatatatttataacatgtatgtatagtgtacatacaaaacacctatatattatattaca

SEQ ID NO: 574385 - DNA, 464 bp, Homo sapiens
gtatctacagaaaatacaaaaattagctgggtgtggcggcacgtgcctgtagtcccagctacttgggaggctcaggcaggagaattgcttgaacctgggaggcggaggttgcagtgagccaagaccatgccattgcactccagcctgggcaacagagtgagactccrtctcaaaataaataaataaataaataaataaataaataacaagtttatcttcatggctatgagacaagaggagactagaaatcatcccactgtccaccccaagatgaatacatatttgctttcttcctctactctgtttacattatcttaggtgaaatgcagatttagagagcacaagatgaacacataattgactgttcctctaccccctcctcttcacacgcaacatgtggattcagtgaatgctgaccaaagcctcaaaagaatgtaatcacttgcctcatttgtctaccccta

SEQ ID NO: 574386 - DNA, 464 bp, Homo sapiens
gtatctacagaaaatacaaaaattagctgggtgtggcggcacgtgcctgtagtcccagctacttgggaggctcaggcaggagaattgcttgaacctgggaggcggaggttgcagtgagccaagaccatgccattgcactccagcctgggcaacagagtgagactccayctcaaaataaataaataaataaataaataaataaataacaagtttatcttcatggctatgagacaagaggagactagaaatcatcccactgtccaccccaagatgaatacatatttgctttcttcctctactctgtttacattatcttaggtgaaatgcagatttagagagcacaagatgaacacataattgactgttcctctaccccctcctcttcacacgcaacatgtggattcagtgaatgctgaccaaagcctcaaaagaatgtaatcacttgcctcatttgtctaccccta

SEQ ID NO: 574387 - DNA, 607 bp, Homo sapiens
ccctccctccttccttccctccctcccttccttttttccttttttgctatatttcttccttcacatatttaatacattacatggaacactgttaaagtctttccaaaaccataagggtggtaaacagcttaaagattatytagcccaaaaccgtgttttcctatgaggcgtatgagggtcaattgacttgactgtggaaacactgccactttgtggctgaaactgagaatgtatttttttcacttaaacattcctttcacctcatctgtccagctgttctgtgtcggcactggtacagctgcgtgaaaaaaaaaaaaatgctggctagacttgcaaacatcaaatgaccctcaacactgcataatagtcctattacacttcactgatattgagactttcctaatctctaaaatgactagtgcatacctgttcatttttgtcaaatttccactccagctaccctattctatgaccaccaccgtttcaactgacaaactccacttacattcattatggaaatagaaatgatcatttatgtactctttcaagaacgtacacaaaattctccctattactgccggtgaattttcttttttgtagggtcaac

SEQ ID NO: 574388 - DNA, 602 bp, Homo sapiens
aaaaaatctttaaagtatttaaagaatttaaaattacaaacaatttagttacaagccgtggatttaggtgtaatttctcaaacttattctgatgtaaacaaggatttatttcacattgaaataataacaaatacctgttgcgtaggaattagtwattcaatttagcaaaggaatatttgtctgcaaaatacttttgtattaatttcctatttctaatggttaatatgggctcattctcttcttgaatagatattatttacattacttttatctcataatgtattaacacttttagacacttctgcaatggagtttgaaacacctatgaaggcttattttatgaatttttcagctattgttttaatgctatatgaaattttaacagaattgtttgacaatgactgaaattttaaatagtaactctatgaataattatttgtgagactcaggtgaaacttaaaaagtactctttagataccaacttttcttctccagtgtctaaacgataaagttgaaattcctctgcctggagatgaaactgtcatcaacttaatacaacatagccttcaactattgaagctttctccctagagtaatacaca

SEQ ID NO: 574389 - DNA, 602 bp, Homo sapiens
aaaaaatctttaaagtatttaaagaatttaaaattacaaacaatttagttacaagccgtggatttaggtgtaatttctcaaacttattctgatgtaaacaaggatttatttcacattgaaataataacaaatacctgttgcgtaggaattagttattcaatttagcaaaggaatatttgtctgcaaaatacttttgtattaatttcctatttctaatggttaatatgggctcattctcttcttgaatakatattatttacattacttttatctcataatgtattaacacttttagacacttctgcaatggagtttgaaacacctatgaaggcttattttatgaatttttcagctattgttttaatgctatatgaaattttaacagaattgtttgacaatgactgaaattttaaatagtaactctatgaataattatttgtgagactcaggtgaaacttaaaaagtactctttagataccaacttttcttctccagtgtctaaacgataaagttgaaattcctctgcctggagatgaaactgtcatcaacttaatacaacatagccttcaactattgaagctttctccctagagtaatacaca

SEQ ID NO: 574390 - DNA, 584 bp, Homo sapiens
ccctagagtaatacacacactactttccatgcttcccgacctccattctgttacctctttccatttgatgtcatttaagactatttgatgtcatttaagactaattgctcttcctcaagtagtcttttwttctccaggtcaaaatcccattcatcttataagatagacccagtttctagacttctcacctcctttatcaagtatgtcaatactcttccaaaaggaataaatttcttatttaaacacaacttttcatcattattgtgcccactttttaaaattgtaaaaaactatcaacctcatttcagaaatagaaacaaaaaaatactctaaaagagtattaacattctcctcagtttgattcaacttcaaacagacttcttcctgaatataggatcatcacttgtgttttcttagagcattaactctagaaaatattcaactgtaaattctttatctgcctgctttgaaatgtaaatctttctgtagctcaggctggagtgcagtggctccatctcagctcactgcaacccccgcctcccaggttcaaaggattcttgtgcctcagcttcccaagtagctgg

SEQ ID NO: 574391 - DNA, 588 bp, Homo sapiens
tggcaagaaactattaaaatatgaacatggcaataaatactacttagataccaaacaatatttaagatatatttaataataatttctgaataaatatcagcaaacagacttcatcctttggggttttggcttatgccttaaaggaatttgtggccaaggaaggtcaaggaaatttacctaytcaagaacaatttctgacacaattgccaactggaaaaaatatataaatacacaaaatatttactgtgtgaaagcaaattaatatgtttcccctgtgaataaatcatgccaacaaaatgctgcagtccatagaccaggtgaccaatgacattgcaaagaaagaattaaaattactctgtagcaattcttcatttcttagagtctgaagatgtgaatcctttactgaagaatatggtttggatacaattaacgggaataaaatcttttccagcatgggcacggcagataatgaaatagtattgtacttaatattatggactagtgatagattttatatgcaacaatatagatgtccatggatatctaactatcaagttgaagaaaatttaggaaagtgaaagtcttgtt

SEQ ID NO: 574392 - DNA, 588 bp, Homo sapiens
tggcaagaaactattaaaatatgaacatggcaataaatactacttagataccaaacaatatttaagatatatttaataataatttctgaataaatatcagcaaacagacttcatcctttggggttttggcttatgccttaaaggaatttgtggccaaggaaggtcaaggaaatttacctattcaagaacaatttctgacacaattgccaactggaaaaaatatataaatacacaaaatatttactgtgtgaaagcaaatkaatatgtttcccctgtgaataaatcatgccaacaaaatgctgcagtccatagaccaggtgaccaatgacattgcaaagaaagaattaaaattactctgtagcaattcttcatttcttagagtctgaagatgtgaatcctttactgaagaatatggtttggatacaattaacgggaataaaatcttttccagcatgggcacggcagataatgaaatagtattgtacttaatattatggactagtgatagattttatatgcaacaatatagatgtccatggatatctaactatcaagttgaagaaaatttaggaaagtgaaagtcttgtt

SEQ ID NO: 574393 - DNA, 588 bp, Homo sapiens
tggcaagaaactattaaaatatgaacatggcaataaatactacttagataccaaacaatatttaagatatatttaataataatttctgaataaatatcagcaaacagacttcatcctttggggttttggcttatgccttaaaggaatttgtggccaaggaaggtcaaggaaatttacctattcaagaacaatttctgacacaattgccaactggaaaaaatatataaatacacaaaatatttactgtgtgaaagcaaattaatatgtttcccctgtgaataaatcatgccaacaaaatgctgcagtccatagaccaggtgaccaatgacattgcaaagaaagaattaaaattactctgtagcaattcttcatttcttagagtctgaagatgtgaatcctttactgaagaatatggtttggatacaattaacgggaataaaatcttttccagcatgggcackgcagataatgaaatagtattgtacttaatattatggactagtgatagattttatatgcaacaatatagatgtccatggatatctaactatcaagttgaagaaaatttaggaaagtgaaagtcttgtt

SEQ ID NO: 574394 - DNA, 557 bp, Homo sapiens
gttctcatcatttacctcccacttgtaagtgagaacatccagcatttggttttctgttcctatgttagtttgctaagattatattaacgtaaaccttctagtggacagtattgaaatagttaagtaaaagaggaatcttgtagtgaagaattacatttgaattactttcttaaatatagatacatgtctttggaaagagaatttgctgagataatttgccagtggcaattactggagaattaaactgatggattgggtgaccatataatttatcattsaaattgagaaagctggggaagcaaaagcaaagctacgttattaaaatatatactttttgaaagatgtatgtgttgactaacaagtttgtttcatatttttagacctataaaatagttatattcaaaaactactttcaaaaagtgaataaaatatcttctaaaaataaaatcatatacacacgttcatttaagcacatttgtttctgttaattacctgaatatttaaaaatagcataaaaagaataattgttcgtacttcatatgtctctcatatcatgc

SEQ ID NO: 574395 - DNA, 557 bp, Homo sapiens
gttctcatcatttacctcccacttgtaagtgagaacatccagcatttggttttctgttcctatgttagtttgctaagattatattaacgtaaaccttctagtggacagtattgaaatagttaagtaaaagaggaatcttgtagtgaagaattacatttgaattactttcttaaatatagatacatgtctttggaaagagaatttgctgagataatttgccagtggcaattactggagaattaaactgatggattgggtgaccatataatttatcattcaaattgagaaagctggggaagcaaaagcaaagctacgttattaaaatatatactttttgaaagatgtatktgttgactaacaagtttgtttcatatttttagacctataaaatagttatattcaaaaactactttcaaaaagtgaataaaatatcttctaaaaataaaatcatatacacacgttcatttaagcacatttgtttctgttaattacctgaatatttaaaaatagcataaaaagaataattgttcgtacttcatatgtctctcatatcatgc

SEQ ID NO: 574396 - DNA, 557 bp, Homo sapiens
gttctcatcatttacctcccacttgtaagtgagaacatccagcatttggttttctgttcctatgttagtttgctaagattatattaacgtaaaccttctagtggacagtattgaaatagttaagtaaaagaggaatcttgtagtgaagaattacatttgaattactttcttaaatatagatacatgtctttggaaagagaatttgctgagataatttgccagtggcaattactggagaattaaactgatggattgggtgaccatataatttatcattcaaattgagaaagctggggaagcaaaagcaaagctacgttattaaaatatatactttttgaaagatgtatgtgttgactaacaagtttgtttcatatttttagacctataaaatagttatattcaaaaactactttcaaaaagtgaataaaatatcttctaaaaataaaatcatatacacacgttcatttaagcacatttgtttctgttaattacctgaatatttaaaaatagcataaaaagaataattgttygtacttcatatgtctctcatatcatgc

SEQ ID NO: 574397 - DNA, 418 bp, Homo sapiens
cagaatggagctagttggaagactgccatcatagggatgccttagtgaattaataaggttttaatttctggctttcaactttgtagatgtaaaagttgatttatcaatatgtgagaaaggatgaatctttctgaaggttatgtcatcacactcactaagcacacagagaataatgtctagaatctgagtgccatgttatcaaattatactgagactcttgcagtcacatgggctgatatgtaagcatygtcatgcctagtacagactctccctgcagatgaaattatatgggatgctaaattataatcagaacaatgtttggtgagccaaaactacaacaagggaagctaattggatgaatttataaaaatatgcctcagccaaaatagcttaattcagtctcccttatcataaggat

SEQ ID NO: 574398 - DNA, 324 bp, Homo sapiens
cttaattcccacaagagctggttgttaacaagagcctggcacaaacccctctctctcgccacgtgatctctgcacatgccagcttcccttccccttctgccatgagtggaaacagcctaaagccctcaccagaagcaaatggtggcaccatgcttcttgcacactttcagaactgtgaaccaaataaacctctcttctttaaaattaytcagcctctggtattcctttataacaacacacacacacacacacacacacacacacacacacacacgcaaaagcagactaaaacaggaactaattagaaatggtgatgcacggagg

SEQ ID NO: 574399 - DNA, 545 bp, Homo sapiens
cttccccttcctagtgtaatagagtaagttacaaatggcttcaggaaggggagagaggaagaagagtggatgagatacgtaagagtgcctgagggctrattttatgaaagctttgggaagttttaagaaaaagaaaagctatttttcaaggtacatgtgtgtatgcgtgcgtgtgtgtgtgtgtgtgtgtgtgaaagacagaagaaagagggagacctaggaagactatgagacactaagagaaaaattaaggtaaaaaagacacacacttagaaaaacacacatagggaggagggaggaggttaagacattttactatgtgctgtgaatggaaactacaaaccatttttcatatatgcaatatatatacatatatacacacatatacataggtatttaaagatttaaattacattttctctttttttagagatgcggtttcactatgtcactctgcccaggctgcagtacagtggttgttcacagtcatgatcatagcacattatagccttgaactcctgggctcaagcaatcctcctgtatta

SEQ ID NO: 574400 - DNA, 392 bp, Homo sapiens
gaaatttataaaataccgagattatggtgtataaacaatctttagattctttaagaatttctgccagtttgtaatatatgcttcattcaaagtagctaagggctgtacctggctaatagtaggcacctaatatttgttgaaaaggaatactgagtagctgggacctcctgagtagctgggaccacacacatttaacctgtatttataaaattactgtttagagaaaaacatttgatggaatcatgcttttactttctgcttatgactcaattgtttgtactgacactaacatccaaatccttagcatggcctacaaggccctgagcaatgtggcacctgctgaagcctgctgcctcatttaataactytttgtctccttcccagatccagcc

SEQ ID NO: 574401 - DNA, 300 bp, Homo sapiens
tctttagaaaactttgacaatagcatttgctgtcttgtccaaattgttactaagaatcaagagagatatctsacatgaaatgacattggaaaacattaaacacgattgaaataatgctagccaatatggttattattagaaaccaattacattttcaacttaaaaatagtaatacttattgcagactcaaatgtgcttattctaaaacaagtaaatgtttgcctatggtctgagattctaatccacagagttcattctaatccacattcaacactatcatgtaccagtaggcctcataac

SEQ ID NO: 574402 - DNA, 300 bp, Homo sapiens
tctttagaaaactttgacaatagcatttgctgtcttgtccaaattgttactaagaatcaagagagatatctcacatgaaatgacattggaaaacattaaacacgattgaaataatgctagccaatatggttattattagaaaccaattacattttcaacttaaaaatagtaatacttattgcagactcaaatgtgcttattctaaaacaagtaaatgtttgcctatggtctgagattctaatccacrgagttcattctaatccacattcaacactatcatgtaccagtaggcctcataac

SEQ ID NO: 574403 - DNA, 605 bp, Homo sapiens
attgttccaggtttgggtttgcctatgaaagaaactcatgagagctggaagtgaggagtgaagaggaggtcttcacataaagcaggcttaaggattagacatagcaggtttgacagatgtgatggcttgcagaattctttatgagctcccactgtccatctggataagatttacagacctttcagaaattcctataagcttgggttctgtgcccacactctagactgtcaggctaagatctctgatataaaacagacytcttctgattttgtctagctgcttttctaatatctattcaccaagctcttccaataatagcataaggccctaattaatgttaaacttttatcattataatacataggatgtcttctgttttcctgatcaaattctgactattaaaatataaagaattgtccagaaatatataaaaaaagaatcacacattgatcttctttaaatgaaaatgtaacaattgtatggactaggatgattacagttgttcagttctgactgttatttgaagaaaaaagcaataagaagcctcagcaacttaacagaaggagctgccatttactaggagaaaagattgtggatgagagtgt

SEQ ID NO: 574404 - DNA, 415 bp, Homo sapiens
cgtctgtctccaaatactggaatgttaagttctgtaatgtcagatatttctgtttggttcactggtgtattcttaaagcatgttacatactaggtatactcaatgaatatttgttgaataaatatcacattgggcttattccagaaattcaagcttgtttcaatagttagagcaatctacaaatgtaattcattacattaactaattaaaggagctaaatcacatcaccaccacaataatgcagaaaaacacatttgatacagctcaatattcatgcmtgcctaacaaacatctcatgatactaggaaaaaaggaagggatatattattttcatgtataaaacactaaccattgtagcatggcaatatactcaaaattcaatgaaattcctatcgaaatcttagcattcctctta

SEQ ID NO: 574405 - DNA, 538 bp, Homo sapiens
taaaacatgttattgagcttaaagttgcaaaaataaactcatgtaccataattcatgagtagaaaaatagactagtggaataacataaaaataaaaacaatgcttacataaaatgttgtaactgatttggatgtcattagaaatcagtaagtaaatagatggacaatgtaatgaaagatgctaggcaaataatgtggtagggagaataatrgccctcaaagatgcccatgcctaaccctggaacctgtgaatatgttacactgaatgcaataaaggcttatcagatgtgattaaggatgcaaaccgagatggagagatcttcctgggttatccagatgggcccagtctaatcacatgagttcttaaaaatggagaacctttcttagctgagtccagagagagatgtgacaatgaaagaatggtcagagaaatgtgacatcgccagctttaaaaagagagaggagaggcaatgagaaaaggaatgctgatgttctctagaagatagaaaaggccaggatatggattctaccctagccgc

SEQ ID NO: 574406 - DNA, 543 bp, Homo sapiens
atgtaagtatcagcaaaacatattgtttagtgaaaaagaagctgaagaagaatatatacaatatggttacatttatatgaagtccaaaaacttgcaaaataaagaaatgtatttagaaatagattcacatgtgagaaaactagaagaaaattaatgaaaggataaaagggatagcagtaattctgagtagttgaggggatttcaattggaaaaaaatagtatcatattctttaagtcaggtagtgggtattagcattagttttaccatcgttctttattcttatagctacaytatatattttctatgtatttaatgtattttttgcataattaaatattatgcaataaaaatgagaaaacaaaaaagtagaaaatgataaataacatacaataaagaaatggagaaaaaattataatctagttgagtaatggtatattacatagctattttcttaagtagatgtatgtacatgatgtatgcacgattgtacatacatgttcttaattatatataaatatatatgtacatatttttaatataaa

SEQ ID NO: 574407 - DNA, 543 bp, Homo sapiens
atgtaagtatcagcaaaacatattgtttagtgaaaaagaagctgaagaagaatatatacaatatggttacatttatatgaagtccaaaaacttgcaaaataaagaaatgtatttagaaatagattcacatgtgagaaaactagaagaaaattaatgaaaggataaaagggatagcagtaattctgagtagttgaggggatttcaattggaaaaaaatagtatcatattctttaagtcaggtagtgggtattagcattagttttaccatcgttctttattcttatagctacattatatattttcwatgtatttaatgtattttttgcataattaaatattatgcaataaaaatgagaaaacaaaaaagtagaaaatgataaataacatacaataaagaaatggagaaaaaattataatctagttgagtaatggtatattacatagctattttcttaagtagatgtatgtacatgatgtatgcacgattgtacatacatgttcttaattatatataaatatatatgtacatatttttaatataaa

SEQ ID NO: 574408 - DNA, 606 bp, Homo sapiens
tccgtggaactcctctgacatattaaacattgcagtccattataagctgcaagaggacagggatttttgcctgttttattccctactgtatcaccaggggctacagcaatctctgacaaacagtgggcatgtaatgagtatttgttaagtgaagtaataaattcaatcaaatcacatcacctgtttaaagcacttcattggcttcacattgcacttagaataaagagaaattctttttatacaatataagttcctgcagaatgcagacactttctacttctccagcctcttttcractcctctcctactagcttctgtatttaagccacattagacctttcttcagttttttatatagactttgttgcatcacacctcagagattctgtacatgttcttcctcctgcctagaaaggatcgtccctccactttcgccaactaatccctgctcaacttttcgtctcagcaggaggcccattctctttggcaatcctctggcctccagcccatttattatatgctcacatgtcaacatgtacttcgtacagcatgtaacacaattgcacttttatattttaacaaattatatttcccatattgaattgt

SEQ ID NO: 574409 - DNA, 606 bp, Homo sapiens
tccgtggaactcctctgacatattaaacattgcagtccattataagctgcaagaggacagggatttttgcctgttttattccctactgtatcaccaggggctacagcaatctctgacaaacagtgggcatgtaatgagtatttgttaagtgaagtaataaattcaatcaaatcacatcacctgtttaaagcacttcattggcttcacattgcacttagaataaagagaaattctttttatacaatataagttcctgcagaatgcagacactttctacttctccagcctcttttcaactcctctcctactagcttctgtatttaagccacattagacctttcttcagttttttatatagactttgtygcatcacacctcagagattctgtacatgttcttcctcctgcctagaaaggatcgtccctccactttcgccaactaatccctgctcaacttttcgtctcagcaggaggcccattctctttggcaatcctctggcctccagcccatttattatatgctcacatgtcaacatgtacttcgtacagcatgtaacacaattgcacttttatattttaacaaattatatttcccatattgaattgt

SEQ ID NO: 574410 - DNA, 606 bp, Homo sapiens
tccgtggaactcctctgacatattaaacattgcagtccattataagctgcaagaggacagggatttttgcctgttttattccctactgtatcaccaggggctacagcaatctctgacaaacagtgggcatgtaatgagtatttgttaagtgaagtaataaattcaatcaaatcacatcacctgtttaaagcacttcattggcttcacattgcacttagaataaagagaaattctttttatacaatataagttcctgcagaatgcagacactttctacttctccagcctcttttcaactcctctcctactagcttctgtatttaagccacattagacctttcttcagttttttatatagactttgttgcatcacacctcagagattctgtacatgttcttcctcctgcctagaaaggatcgtccctccactttcgccaactaatccctgctcaacttttcrtctcagcaggaggcccattctctttggcaatcctctggcctccagcccatttattatatgctcacatgtcaacatgtacttcgtacagcatgtaacacaattgcacttttatattttaacaaattatatttcccatattgaattgt

SEQ ID NO: 574411 - DNA, 514 bp, Homo sapiens
ttgaggccagcttgggcaacatagcaagacttctctctctacaaaaatgaaaaaaatgcctgacatggtggtacttgcctgtattcccaggtatgggggcagctgagtcaggagcatctgttgaacccagttggtcaaggttgcagtgagctatgattataccactgcactccatcctgggtgacagagtgggaccctgtctcaaaatacaaatacaaatgaaatctcaagtcagaccagtcccttctaggctatgtaggccttgtaaccacatagctgcatgatcgggtttgtgtggctgtggatgaggagacccctgtccaattgttggctatgtaatcagtttatttttcgatatagtartcaaatatatttcatcatacttgatggtctcagatatgtatggattttggaattccccttggaacaggttgtaacatcttattggctccataattccataatttttttaatctgatgagtttttaataagatcagaattgatattagacta

SEQ ID NO: 574412 - DNA, 517 bp, Homo sapiens
atgaccacctgtgcccagccccctattattattattttaaataatagctttattaaaatattcacataccattcactttatttattgaaatctgcaattcagtaggttttagaatattcacagagctgtgcatcgatcaccacagtcacttttagaacstttcattaccctatagagaaatccatacccctcagccactacctcctactctccccacctacctttgcccccagccttaggcaaccattgattaatttttttgtcactatagatttgcctaatctggacaaatagaattgtacaatatgtgatcttttgtggcttttttcccctcttagcacagtgttttcaaagttcctttatgtcatagtgtgtatcaatatttcattccttctatggcagtattccatggtagagacacactgcattttgtttatctgttcatcagttggtggatatttgggttgtttccatgtattccatgtattggtcattatgaataatgctgctatgaaga

SEQ ID NO: 574413 - DNA, 517 bp, Homo sapiens
atgaccacctgtgcccagccccctattattattattttaaataatagctttattaaaatattcacataccattcactttatttattgaaatctgcaattcagtaggttttagaatattcacagagctgtgcatcgatcaccacagtcacttttagaacgtttcattaccctatagagaaatccatacccctyagccactacctcctactctccccacctacctttgcccccagccttaggcaaccattgattaatttttttgtcactatagatttgcctaatctggacaaatagaattgtacaatatgtgatcttttgtggcttttttcccctcttagcacagtgttttcaaagttcctttatgtcatagtgtgtatcaatatttcattccttctatggcagtattccatggtagagacacactgcattttgtttatctgttcatcagttggtggatatttgggttgtttccatgtattccatgtattggtcattatgaataatgctgctatgaaga

SEQ ID NO: 574414 - DNA, 595 bp, Homo sapiens
tacctcctactctccccacctacctttgcccccagccttaggcaaccattgattaatttttttgtcactatagatttgcctaatctggacaaatagaattgtacaatatgtgatcttttgtggcttttttyccctcttagcacagtgttttcaaagttcctttatgtcatagtgtgtatcaatatttcattccttctatggcagtattccatggtagagacacactgcattttgtttatctgttcatcagttggtggatatttgggttgtttccatgtattccatgtattggtcattatgaataatgctgctatgaagattgttgtacaagtttttgtgtggacatatatttttatttttctgggatatatgcctaggagtgaaattgttgcattataggatgactgtacatttagccttttgagaaactgccagactgttttctaacgtggctacaccagttgggtgcaatggctcacacctgtaatcccagctactcaggaggctcagctaggaggatggcttgagcccatgaattcaagaccagcctgggcaagatagtgaaaccctgtgttgattttttaaaaatccaatt

SEQ ID NO: 574415 - DNA, 595 bp, Homo sapiens
tacctcctactctccccacctacctttgcccccagccttaggcaaccattgattaatttttttgtcactatagatttgcctaatctggacaaatagaattgtacaatatgtgatcttttgtggcttttttcccctcttagcacagtgttttcaaagttcctttatgtcatagtgtgtatcaatatttcattccttctatggcagtattccatggtagagacacactgcattttgtttatctgttcatcagttggtggatatttgggttgtttccatgtattccatgtattggtcattatgaataatgctgctatgaagattgttgtacaagtttttgtgtggacatatatttttatttttctgggatatatgcctaggagtgaaattgttgcattataggatgactgtacatttagccttttgagaaactgccagactgttttctaacgtggctayaccagttgggtgcaatggctcacacctgtaatcccagctactcaggaggctcagctaggaggatggcttgagcccatgaattcaagaccagcctgggcaagatagtgaaaccctgtgttgattttttaaaaatccaatt

SEQ ID NO: 574416 - DNA, 595 bp, Homo sapiens
tacctcctactctccccacctacctttgcccccagccttaggcaaccattgattaatttttttgtcactatagatttgcctaatctggacaaatagaattgtacaatatgtgatcttttgtggcttttttcccctcttagcacagtgttttcaaagttcctttatgtcatagtgtgtatcaatatttcattccttctatggcagtattccatggtagagacacactgcattttgtttatctgttcatcagttggtggatatttgggttgtttccatgtattccatgtattggtcattatgaataatgctgctatgaagattgttgtacaagtttttgtgtggacatatatttttatttttctgggatatatgcctaggagtgaaattgttgcattataggatgactgtacatttagccttttgagaaactgccagactgttttctaacgtggctacaccagttgggtgcaatggctcacacctgtaatcccagctactcaggaggctcagctaggaggatggcttgagcccrtgaattcaagaccagcctgggcaagatagtgaaaccctgtgttgattttttaaaaatccaatt

SEQ ID NO: 574417 - DNA, 549 bp, Homo sapiens
ggtatgaagaaaaataagcatccatataccccaaacccagttcgagaaataaaatattaacagtacaattgaagccttccagaatatatttctttatggcttcttgaaaagataattatcctaaatttggcagttatcctttttgctacttagwtacttttttttacatgtgctaaaaatttgatgtaaataaatttaaataaatactttttaaataaatacttttttaaatgttggagctgtgactgttgttagaagtcttttaatcttatcacctatgactgggcatgtttctctgtgttagtgtcctcacctgtgaagttggggggaggcctctatggtctctgctgtctttctatgtgtaattaaaacatttttttcagagcttcttgtgttccatatgagacaaaatgaaacacacacaagacacaggccaagaaaggctaagtaacttgcctaagactatataataagtcacagggcagggaataaaactcagctttcctgacttccattaaagagtgtctcttactgcactcacatagactg

SEQ ID NO: 574418 - DNA, 549 bp, Homo sapiens
ggtatgaagaaaaataagcatccatataccccaaacccagttcgagaaataaaatattaacagtacaattgaagccttccagaatatatttctttatggcttcttgaaaagataattatcctaaatttggcagttatcctttttgctacttagatacttttttttacatgtkctaaaaatttgatgtaaataaatttaaataaatactttttaaataaatacttttttaaatgttggagctgtgactgttgttagaagtcttttaatcttatcacctatgactgggcatgtttctctgtgttagtgtcctcacctgtgaagttggggggaggcctctatggtctctgctgtctttctatgtgtaattaaaacatttttttcagagcttcttgtgttccatatgagacaaaatgaaacacacacaagacacaggccaagaaaggctaagtaacttgcctaagactatataataagtcacagggcagggaataaaactcagctttcctgacttccattaaagagtgtctcttactgcactcacatagactg

SEQ ID NO: 574419 - DNA, 549 bp, Homo sapiens
ggtatgaagaaaaataagcatccatataccccaaacccagttcgagaaataaaatattaacagtacaattgaagccttccagaatatatttctttatggcttcttgaaaagataattatcctaaatttggcagttatcctttttgctacttagatacttttttttacatgtgctaaaaatttgatgtaaataaatttaaataaatactttttaaataaatacttttttaaatgttggagctgtgactgttgttagaagtcttttaatcttatcacctatgactgggcatgtttctctgtgttagtgtcctcacctgtgaagttggggggaggcctctatggtctctgctgtctttctatgtgtaattaaaacatttttttcagagcttcttgtgttccatatgaracaaaatgaaacacacacaagacacaggccaagaaaggctaagtaacttgcctaagactatataataagtcacagggcagggaataaaactcagctttcctgacttccattaaagagtgtctcttactgcactcacatagactg

SEQ ID NO: 574420 - DNA, 609 bp, Homo sapiens
aaattaatatttcaaattaaagcaaaatcacaaatttatactttatattatgaatgagattcacaaaaggagcatgataatatattctgttgtcatcgcatacaaaataataacatatagagtatgaatcaataatttttcaaatacaaagctattacaattaggaatacaaagaaatcataattaggaatactttttccatattaaccccccatagtggtaacacttgcaaaaagatggggggkggtttttttttttttttttttttttcccgacagtcttgctcttgttgcccaggctggagtgcaatggcgtgattttggctcactgtaaactccacctcctgggttcaagcgattctcctgcctcagcctccctagtagctggtattacaggtgcttgccaccacacccagctaatttttgtatttttagtagagatgggggtttcaccatgttggccagcctggtcccgaactcctgaccttaggtgatccaccagcatcggcctcccaaagtgctgggattacaggtgtgagccactgcgtccagccagtggtgggtctcatatctcaatgtggacttttactaactcctgatgcctcagttt

SEQ ID NO: 574421 - DNA, 595 bp, Homo sapiens
ataacatatttgaaattaatatttcaaattaaagcaaaatcacaaatttatactttatattatgaatgagattcacaaaaggagcatgataatatattctgttgtcatcgcatacaaaataataacatatagagtatgaatcaataatttttcaaatacaaagctattacaattaggaatacaaagaaatcataattaggaatactttttccatattaaccccccatagtggtaacacttgcaaaaagatgggggggggtttttttttttttttttttttttcccgacagtcttgctcttgttgcccaggctggagtgcaatggcgtgattttggctcactgtaaactccacctcctgggttcaagcgattctcctgcctcagcctccctagtagctggtattacaggtgcytgccaccacacccagctaatttttgtatttttagtagagatgggggtttcaccatgttggccagcctggtcccgaactcctgaccttaggtgatccaccagcatcggcctcccaaagtgctgggattacaggtgtgagccactgcgtccagccagtggtgggtctcatatctcaatgtggact

SEQ ID NO: 574422 - DNA, 602 bp, Homo sapiens
ctcaggaccaaaacacctcccattaggccccmcctccaacaatggggatcacatttcaacatgagtttggagtggtcaaatatccaaaccctagcagttcccttaaccctggaaagagacccttcattaaactctttctgcttaatcctttgagagtgcaacaatttcctgctaggaccctgacagatagagggaccatacagatcactaaaatgctgaggaatttttcaaatgaactgcacccaacagacctccctgattctgaatatatcaaacttttattttttattttattttattttattttttgagacggaatctcgctctgtcgcccaggctagagtgcagtggtgctgcgatctcggctccctgcaacctccacctcctgggttcaagcgattatcctgccttacctcccgagtagctgggactacaggcatccaccagcatgcccggctaattttttatttttagtagagacggggtttcaccatgttgaccaggctggtcttcaactcctgacttcatgatccgcccaccttggcttccctaagtgcttggattacaggcgtgagccactgcacccagccaaactttaaaaa

SEQ ID NO: 574423 - DNA, 602 bp, Homo sapiens
ctcaggaccaaaacacctcccattaggccccccctccaacaatggggatcacatttcaacatgagtttggagtggtcaaatatccaaaccctagcagttcccttaaccctggaaagagacccttcattaaactctttctgcttaatcctttgagagtgcaacaatttcctgctaggaccctgacagatagagggaccatacagatcactaaaatgctgaggaatttttcaaatgaactgcacccaacagacctccctgattctgaatatatcaaacttttattttttattttattttattttattttttgagacggaatctcgctctgtcgcccaggctagagtgcagtggtgctgcgatctcggctccctgcaacctccacctcctgggttcaagcgattatcctgccttacctcccgagtagctgggactacaggcatccaccagcatgcccggctaattttttatttttagtagagacggggtttcaccatgttgaccrggctggtcttcaactcctgacttcatgatccgcccaccttggcttccctaagtgcttggattacaggcgtgagccactgcacccagccaaactttaaaaa

SEQ ID NO: 574424 - DNA, 591 bp, Homo sapiens
ttaatacaaaaacctgtacatgaatgtttatagtagctttattcataacagcaaaaactggaaactattaatatatgtctttcattgagcaaatagttaaactatggtacatacatacatacctcagtcagtgtggccccctggaactcatgcctgcttgctttaaatccaccaattaaattccctgctggaaacttgtttggatagctctctggacccaataagggtgctggcccacaggtccctttctctccctgacctctgcgtatatggccaccaggagtgtcatgagccctcaacctgtaagtaataaaatctttatttccatctttgtctctcctaatcattgaaagtgtgctctctgtcttaaaaatcctaaattgaaacaaacttacatctattaaaacgagtaaaataggccagrctcacgtctgtaatctcagcactttgggaggctgaggcgggaggatgacttgagcccaggagtttgagaccagcttctccaacatagtaaaaccccatctctgcaaaaagaaaaaagagaaatcagccaggcatggtggcagatgcctacagtcctgctactggtgg

SEQ ID NO: 574425 - DNA, 591 bp, Homo sapiens
ttaatacaaaaacctgtacatgaatgtttatagtagctttattcataacagcaaaaactggaaactattaatatatgtctttcattgagcaaatagttaaactatggtacatacatacatacctcagtcagtgtggccccctggaactcatgcctgcttgctttaaatccaccaattaaattccctgctggaaacttgtttggatagctctctggacccaataagggtgctggcccacaggtccctttctctccctgacctctgcgtatatggccaccaggagtgtcatgagccctcaacctgtaagtaataaaatctttatttccatctttgtctctcctaatcattgaaagtgtgctctctgtcttaaaaatcctaaattgaaacaaacttacatctattaaaacgagtaaaataggccagacwcacgtctgtaatctcagcactttgggaggctgaggcgggaggatgacttgagcccaggagtttgagaccagcttctccaacatagtaaaaccccatctctgcaaaaagaaaaaagagaaatcagccaggcatggtggcagatgcctacagtcctgctactggtgg

SEQ ID NO: 574426 - DNA, 213 bp, Homo sapiens
accattaggcaaaccattgtcaggttatgggagtttgagaaggaaagtagagaaaggaaaagaaagcttatttaaagaatggctgaaaactgcctaaatcatgggaaagatttagacatctaaatccatgaagcttaaagattcctaaagaggttsaaaccaaatagatactcaccaagtcacaatataatcaaatagtcaaaagttaaagaa

SEQ ID NO: 574427 - DNA, 567 bp, Homo sapiens
gatttttttgtagtgacattttgtttctagtctcatttccttttgtttatattctatgtatatttcrtttttggttactatgagaattacatataacatcctagagttataacattttaatttgaatttattcaacttaagttcaatcacataccaaaattctactgctatatatatagctctactctttttatgttattgatgtaacaaattatatctttattcattgtataccagctaacagatttacaattacattttatgcatttcccttttaaattatgtagaaaataaaaagcagagttacaaaccaaaattacaataggactgtttttatatttgtttatgtatttacctttaccagagagctttgtatattcatacagcttgcttatttacttttatagttattgcctagagttcatttatttcaacctgaaggacttaacacttcttgaatggcaaattcagggataaatggatttttttcagttttaaaaaaaaatccggaaatgtcttaatttcttcctcatttttgaaggataagttttccagctatagatttct

SEQ ID NO: 574428 - DNA, 567 bp, Homo sapiens
gatttttttgtagtgacattttgtttctagtctcatttccttttgtttatattctatgtatatttcgtttttggttactatgagaattacatataacatcctagagttataacattttaatttgaatttattcaacttaagttcaatcacataccaaaattctactgctatatatatagctctactctttttatgttattgatgtaacaaattatatctttattcattgtataccagctaacagatttacaattacattttatgcatttsccttttaaattatgtagaaaataaaaagcagagttacaaaccaaaattacaataggactgtttttatatttgtttatgtatttacctttaccagagagctttgtatattcatacagcttgcttatttacttttatagttattgcctagagttcatttatttcaacctgaaggacttaacacttcttgaatggcaaattcagggataaatggatttttttcagttttaaaaaaaaatccggaaatgtcttaatttcttcctcatttttgaaggataagttttccagctatagatttct

SEQ ID NO: 574429 - DNA, 540 bp, Homo sapiens
ccttgtggagctccacaggccccagaggggtatggattctgcatttgaaagtgctgaagctgagagactgggtcttggtggaccccaagaggtctgtttctcctctactyattgttcctttttttcccagcagctggcattgctgtttaaatgggttgttctttgctgttttaagttgtttcctagtggtgtgtcaggatttgggttttctgaatactttccaagctggtgacttgagtggtggttagggaggaactgttttagggctgttctggagctattgaggtcaggtgtctagatactcccagcttgtctgttgaggagaatgctgtcctcattgtgctgcctttggtggtgctgtgtgtggctctttagatgtgagtggaggtgagctgggggagttaatgagatcttttttaggtgcttttgataaagtagcctgcactacaggattcactgtgacttttttccttaacctatgcatttctctctgctagcttttgctgtctttctcatgccttttattttcccagctcctct

SEQ ID NO: 574430 - DNA, 540 bp, Homo sapiens
ccttgtggagctccacaggccccagaggggtatggattctgcatttgaaagtgctgaagctgagagactgggtcttggtggaccccaagaggtctgtttctcctctacttattgttcctttttttcccagcagctggcattgctgtttaaatgggttgttctttgctgttttaagttgtttcmtagtggtgtgtcaggatttgggttttctgaatactttccaagctggtgacttgagtggtggttagggaggaactgttttagggctgttctggagctattgaggtcaggtgtctagatactcccagcttgtctgttgaggagaatgctgtcctcattgtgctgcctttggtggtgctgtgtgtggctctttagatgtgagtggaggtgagctgggggagttaatgagatcttttttaggtgcttttgataaagtagcctgcactacaggattcactgtgacttttttccttaacctatgcatttctctctgctagcttttgctgtctttctcatgccttttattttcccagctcctct

SEQ ID NO: 574431 - DNA, 540 bp, Homo sapiens
ccttgtggagctccacaggccccagaggggtatggattctgcatttgaaagtgctgaagctgagagactgggtcttggtggaccccaagaggtctgtttctcctctacttattgttcctttttttcccagcagctggcattgctgtttaaatgggttgttctttgctgttttaagttgtttcctagtggtgtgtcaggatttgggttttctkaatactttccaagctggtgacttgagtggtggttagggaggaactgttttagggctgttctggagctattgaggtcaggtgtctagatactcccagcttgtctgttgaggagaatgctgtcctcattgtgctgcctttggtggtgctgtgtgtggctctttagatgtgagtggaggtgagctgggggagttaatgagatcttttttaggtgcttttgataaagtagcctgcactacaggattcactgtgacttttttccttaacctatgcatttctctctgctagcttttgctgtctttctcatgccttttattttcccagctcctct

SEQ ID NO: 574432 - DNA, 540 bp, Homo sapiens
ccttgtggagctccacaggccccagaggggtatggattctgcatttgaaagtgctgaagctgagagactgggtcttggtggaccccaagaggtctgtttctcctctacttattgttcctttttttcccagcagctggcattgctgtttaaatgggttgttctttgctgttttaagttgtttcctagtggtgtgtcaggatttgggttttctgaatactttccaagctggtgacttgagtggtggttagggaggaactgttttagggctgttctggagctattgaggtcaggtgtctagatactcccagcttgtctgttgaggagaatgctgtyctcattgtgctgcctttggtggtgctgtgtgtggctctttagatgtgagtggaggtgagctgggggagttaatgagatcttttttaggtgcttttgataaagtagcctgcactacaggattcactgtgacttttttccttaacctatgcatttctctctgctagcttttgctgtctttctcatgccttttattttcccagctcctct

SEQ ID NO: 574433 - DNA, 592 bp, Homo sapiens
aagcttttgcttcagtcaccctgaattttgccagccctatgcatgctataccttggattgccaacttgccctcactgaagccagtttctctggttagaatagttgccccaacccatgcctaatactctagtaaacaaggttctacctgggcttaggttaacttttgctcctttgggccctgtgttctaccagcattccatttatctgaaactctccctcaccttaagaacttatctgttctttaatgatttactgctgcttcctgggttcgaaagaacccagttcaggagtttctgttttagtttgagatcttataggcctgtctcatcargttggtgtcagcccagctaggattaggcagaattgggtgggggctgtagtgcatctttggcacagcatgtacctgtctgactaattctctgtcttttctttcctgttgcaattcatgggtcttagcatcttctgaatggtgtttagtaggtcatcctgttgatttcctgctagggagtagcatactctggctctgtaccattggccaagggacttaaggataggtgaagggctgcagttttgttaaatggaacaatatgaa

SEQ ID NO: 574434 - DNA, 436 bp, Homo sapiens
aggaggcatatttctcccctggtaacccaaagatttaggtcattttcccagagactccatttccactgtgagggttcttggaaaactaagcagaggatgaggaaaagtctgtgaacaagcttgctggtctytccctgtcctacaaaagagcatacctcttctgtaaccacaaggcccttttgattagtcaaggctggacagactgagagagagagagagagagagagagagagagtgtgtgtgtgtgtgtgtgtgtgtgtgtcttgagacagggtctcactctgtcacccaggctggagtgcagtggtgagatcagagctcactgcagcttccacttcctgggctcaagggatcctcctatttcagcctccagagtagctgggactatacgaatgttttaccgcacccagtccattttctaattttttgtagagat

SEQ ID NO: 574435 - DNA, 466 bp, Homo sapiens
gtcttagggagtgattcattctagcagaactccctggattttaaggcagatgttccatttattaattgacaaaggaggcatatttctcccctggtaacccaaagatttaggtcattttcccagagactccatttccactgtgagggttcttggaaaactaagcagaggatgaggaaaagtctgtgaacaagcttgctggtctttccctgtcctacaaaagagcatacctcttctgtaaccasaaggcccttttgattagtcaaggctggacagactgagagagagagagagagagagagagagagagtgtgtgtgtgtgtgtgtgtgtgtgtgtcttgagacagggtctcactctgtcacccaggctggagtgcagtggtgagatcagagctcactgcagcttccacttcctgggctcaagggatcctcctatttcagcctccagagtagctgggactatacgaat

SEQ ID NO: 574436 - DNA, 466 bp, Homo sapiens
gtcttagggagtgattcattctagcagaactccctggattttaaggcagatgttccatttattaattgacaaaggaggcatatttctcccctggtaacccaaagatttaggtcattttcccagagactccatttccactgtgagggttcttggaaaactaagcagaggatgaggaaaagtctgtgaacaagcttgctggtctttccctgtcctacaaaagagcatacctcttctgtaaccacaaggcccttttgattagtcaaggctggacagactgagagagagagagagagagagagagagagagtgtgtgtgtgtgtgtgtktgtgtgtgtcttgagacagggtctcactctgtcacccaggctggagtgcagtggtgagatcagagctcactgcagcttccacttcctgggctcaagggatcctcctatttcagcctccagagtagctgggactatacgaat

SEQ ID NO: 574437 - DNA, 539 bp, Homo sapiens
gccttgcttcccctttgtcttccgccatgattgtagatttcctgaggcctcccaagctgtactgaactgtgagccaattaaacttctttcctttataaattacccagtcttgggcagttctttatagcagtatgaaaacagacaaatacacctactatgtaaaacttaaaataaaaaaaaccaaaacattatctcactaacataggagctaatattttggtgtactttgtttagtrttttatattaaaaatatgtacatatatatttatatataattaagaacatgtatgtacaatcgtgcatacatcatgtacatacatctacttaagaaaatagctatgtaatataccattactcaactagattataattttttctccatttctttattgtatgttatttatcattttctacttttttgttttctcatttttattgcataatatttaattatgcaaaaaatacattaaatacatagaaaatatataatgtagctataagaataaagaacgatggtaaaactaatgctaatacccact

SEQ ID NO: 574438 - DNA, 539 bp, Homo sapiens
gccttgcttcccctttgtcttccgccatgattgtagatttcctgaggcctcccaagctgtactgaactgtgagccaattaaacttctttcctttataaattacccagtcttgggcagttctttatagcagtatgaaaacagacaaatacacctactatgtaaaacttaaaataaaaaaaaccaaaacattatctcactaacataggagctaatattttggtgtactttgtttagtgttttatattaaaaatatgtacatatatatttatatataattaagaacatgtatgtacaatcrtgcatacatcatgtacatacatctacttaagaaaatagctatgtaatataccattactcaactagattataattttttctccatttctttattgtatgttatttatcattttctacttttttgttttctcatttttattgcataatatttaattatgcaaaaaatacattaaatacatagaaaatatataatgtagctataagaataaagaacgatggtaaaactaatgctaatacccact

SEQ ID NO: 574439 - DNA, 628 bp, Homo sapiens
gaattactgctatcccttttatcctttcattaattttcttctagttttctcacatgtgaatctatttctaaatacatttctttattttgcaagtttttggacttcatataaatgtaaccatattgtatatattcttcttcagcttctttttcactaaacaatatgttttgctgatacttacattcatatgtacagtaatagttgatttattttaatggctatatattattccattgttagaatacaccaggatttatttttacttatttttttttgctggaaaattgggtcttttttattttttgatataacaaacaatgttgtaatcattttgtatttacttcctagtccactcctgtaagtttctcttgagtacatactagcaatgaakatgctgagtcactgcatatacatactcacaactttattctataaagtaatattctataaagtagctgtatcagtttatactttaaccagtaatggacaagattttctgttacttcccatctttgttaattattacttttagactctaacttttatcaggctcatggatgtaaaaagcatctcagggtggttttaatttgaatttatctgctcatctatgaagatgagcttcttttca

SEQ ID NO: 574440 - DNA, 539 bp, Homo sapiens
atatgtacagtaatagttgatttattttaatggctatatattattccattgttagaatacaccaggatttatttttacttatttttttttgctggaaaattgggtcttttttattttttgatataacaaacaatgttgtaatcattttgtatttacttcctagtccactcctgtaagtttctcttgagtacatactagcaatgaagatgctgagtcactgcatatacatactcacaactttattctataaagtaatattctataaagtagctgtatcagtttatactttaaccagtaatggacaagattttctgttacttcccatctttgttaattattacttttagactctaacttttatcaggctcatggatgtaaaaagcatctcagggtggttttaatttgmatttatctgctcatctatgaagatgagcttcttttcatataattatgagtcatttttgttttgccttcttttgtttatgcattttgcttgttctatgtcttatttttcctgttgatttttgagagttcatata

SEQ ID NO: 574441 - DNA, 417 bp, Homo sapiens
actaagaggaatgctaagatttygataggaatttcattgaattttgagtatattgccatgctacaatggttagtgttttatacatgaaaataatatatcccttccttttttcctagtatcatgagatgtttgttaggcatgcatgaatattgagctgtatcaaatgtgtttttctgcattattgtggtggtgatgtgatttagctcctttaattagttaatgtaatgaattacatttgtagattgctctaactattgaaacaagcttgaatttctggaataagcccaatgtgatatttattcaacaaatattcattgagtatacctagtatgtaacatgctttaagaatacaccagtgaaccaaacagaaatatctgacattacagaacttaacattccagtatttggagacagacg

SEQ ID NO: 574442 - DNA, 613 bp, Homo sapiens
ctgtgtcatgctaatgcaagaggtgggttcccatggtcttggrcagttctgcccctctggctttgcagggtacagcctccctcctgtctgctttcacagtctggcattgagtgtctatggcttttccaggcacatggtgcaagctatcagtggatctaccattctggggtctggaggacagtgaccctattttcacagctccaccaggtggtgccttaggagggactctgtgtgggggctctaaccccacatttctcttctgcactgccctagcagaagttctccatgagagcctaacccctgcagcaaacttctgtctagacatccaggcatttccatacaccctctgacatctaggtggaggttcccaaatttcaattattgatttatgtgcactggtaggctcaacacttcatggaagctgccaaggcttgaggcttgcaccttctgaagccacagactaatctttatgttggcccctttcagctagggctgcagtggctgggatgcagggtaccaagaccctagactgcacacagcatggagatcatggtcctggcccatgaaaccactgtttcctcataggctccaggcctgtgatgggaggggctgc

SEQ ID NO: 574443 - DNA, 613 bp, Homo sapiens
ctgtgtcatgctaatgcaagaggtgggttcccatggtcttggacagttctgcccctctggctttgcagggtacagcctccctcctgtctgctttcacagtctggcattgagtgtctatggcttttccaggcacatggtgcaagctatcagtggatctaccattctggggtctggaggacagtgaccctattttcacagctccaccaggtggtgccttaggagggactctgtgtgggggctctaaccccacatttctcttctgcactgccctagcagaagttctccatgagagcctaacccctgcagcaaacttctgtctagacatccaggcatttccatacaccctctgacatctagrtggaggttcccaaatttcaattattgatttatgtgcactggtaggctcaacacttcatggaagctgccaaggcttgaggcttgcaccttctgaagccacagactaatctttatgttggcccctttcagctagggctgcagtggctgggatgcagggtaccaagaccctagactgcacacagcatggagatcatggtcctggcccatgaaaccactgtttcctcataggctccaggcctgtgatgggaggggctgc

SEQ ID NO: 574444 - DNA, 559 bp, Homo sapiens
ttgcttgtgtttcttgcttgatatcaccaagcaactgagggaagtagataagaaataagtggtttgagagagatagcctgggatttaaagtttcacattaatcaatggcataggagatcatctatcagcatgtttttccctctctgtcctacttccacttacctcccttctttctttctaccataactgtcccacaggcagtctagcaaaagattgattgttgaaaaaaagaaaaaacaataaagtaaaataataaagtccaaataaaccaaaatagacttatctttccccaacaacagatttctgggttcataattcctcctcattctactatgagtcgcattgagggatgctcacagcagggggatgctggcaaccacccagctctctccatagcatgtttaccaacactaagttgtacttactttaagccctaatttgcctgaataaccattgtgaarataaaaaaaactaatgtaaaacaaagatggttgtttttaaaaaaatgatgttgaaatgtttaacattagataaatgtaagtatgtcatttaaaattgc

SEQ ID NO: 574445 - DNA, 446 bp, Homo sapiens
tccctgtaaactcatttattagcacccacttatgcatgaagacatttgatgtttggctgtctgtacctgccttgattcattttagataatggcctccagttccattcatgttgcttcagaaagaaatggtttaattgttttttatgactgaatagcaactcattstgtatatgtactgcatttttaatgcaatcatccactgatgaatgtttagactcattcatatctttgctattgtgctacaataaacatataagtgcaggtgtatttttgatatattactttattttcctttgggtaaatatccagtagtacactagattgaagtgtagttatatttttagttccttgagaaggctgtattaaatacataccaccaacagtgtataagagttcccttttctccacatccttgacaatattattttgtctttttattgatagtt

SEQ ID NO: 574446 - DNA, 446 bp, Homo sapiens
tccctgtaaactcatttattagcacccacttatgcatgaagacatttgatgtttggctgtctgtacctgccttgattcattttagataatggcctccagttccattcatgttgcttcagaaagaaatggtttaattgttttttatgactgaatagcaactcattgtgtatatgtacygcatttttaatgcaatcatccactgatgaatgtttagactcattcatatctttgctattgtgctacaataaacatataagtgcaggtgtatttttgatatattactttattttcctttgggtaaatatccagtagtacactagattgaagtgtagttatatttttagttccttgagaaggctgtattaaatacataccaccaacagtgtataagagttcccttttctccacatccttgacaatattattttgtctttttattgatagtt

SEQ ID NO: 574447 - DNA, 393 bp, Homo sapiens
ataaataataattaaaaaattctccttctgggagcatattacaaaaatatttctattttatttttatatatcatataaatcctatattatattgctatttttataaaatcctaggacagtgctgaaaagaatgtgacaagaaattgtttayaaaacaatatatctgagaattgtttttcacaagatacattatttgaatttttaaaggatcaagttgtttaaatatttgtttgtgccctgaatttagttttcgagttccccttaaggaaagatgcttggaaataatttaatcaaaatagagtagtgctttttatagttgccttttgatcatatgtggtcattcagtagacataatatgtatataaaatatcaccttcttattttaacaataaa

SEQ ID NO: 574448 - DNA, 623 bp, Homo sapiens
gacacaaattacatctttttatgttatgtgtcccttaacaacttactatagctattattttaataattttgtctttgagccttcataataaaaatattagtgatttaccaaccaccattataggattagacaaatctgattttgactatatacttttaccagtgaggtttctaccttcatatgttttcatgtttctaattatagtcattttctttaaacttgaagaayttcctttaggatttcttataaggtggatatagtgatggcctccctcagctttagtttgtcttggaaagcctttctctctttttcatttgacaactttgtcaggtagtcttatttggaaattgttttccttttagctctttggatatattaatccaatgtctcccggtctgtgaggtttctgctgagaatctactgaaagccttcttgaaatgtcctaatatgtcatatgcttctttcgtcttgtggctttcagattcctttcctttaatttttttatagttaattttaatatatcttgatgtagtcttgtttagattgaatcatactggagacctttgcccttcctgtataactatattaatggagggatcttactggagacattttacctgctt

SEQ ID NO: 574449 - DNA, 638 bp, Homo sapiens
tagattataatttactaattttataatattaatcagaacctaatggaaagaaaaatttggaaaattaatagcactttcaccagattaattagctagttagtatatatttgcactgaaaaataaaatttccatatatatgaaacttaaataaaagattaaattgtagtatgtcaatgatatagctttctttcacctgtttcttttgcaatttatattttatttaaaattagtatagaccttatatattaacatatattttatatatgtaaataatatataatatagaagtaaatacaagtgtgtttttatatatatatatcacacttgtgtgatatgtacacacatatgcacacacaaatatatatgtaactatagaaggtgatagataacgttaaatcacttacctgtagtaataacttaactataaatatgtatatgaaaacatcatatyatctacctcaaaaatttatacaactaaaacatagtttactagaatttcatggagtacatcaacacattttttttcaacttttattttaagttctggggtatatgtgcaggatgtgcaagtttgttatataggtaaatgtgtgcaacagtggtttgctgcacagaaaaacccatcccctaggtattaa

SEQ ID NO: 574450 - DNA, 638 bp, Homo sapiens
tagattataatttactaattttataatattaatcagaacctaatggaaagaaaaatttggaaaattaatagcactttcaccagattaattagctagttagtatatatttgcactgaaaaataaaatttccatatatatgaaacttaaataaaagattaaattgtagtatgtcaatgatatagctttctttcacctgtttcttttgcaatttatattttatttaaaattagtatagaccttatatattaacatatattttatatatgtaaataatatataatatagaagtaaatacaagtgtgtttttatatatatatatcacacttgtgtgatatgtacacacatatgcacacacaaatatatatgtaactatagaaggtgatagataacgttaaatcacttacctgtagtaataacttaactataaatatgtatatgaaaacatcatattatctacctcaaaaatttatacaactaaaacatagtttactagaatttcatggagtacatcaacacaytttttttcaacttttattttaagttctggggtatatgtgcaggatgtgcaagtttgttatataggtaaatgtgtgcaacagtggtttgctgcacagaaaaacccatcccctaggtattaa

SEQ ID NO: 574451 - DNA, 638 bp, Homo sapiens
tagattataatttactaattttataatattaatcagaacctaatggaaagaaaaatttggaaaattaatagcactttcaccagattaattagctagttagtatatatttgcactgaaaaataaaatttccatatatatgaaacttaaataaaagattaaattgtagtatgtcaatgatatagctttctttcacctgtttcttttgcaatttatattttatttaaaattagtatagaccttatatattaacatatattttatatatgtaaataatatataatatagaagtaaatacaagtgtgtttttatatatatatatcacacttgtgtgatatgtacacacatatgcacacacaaatatatatgtaactatagaaggtgatagataacgttaaatcacttacctgtagtaataacttaactataaatatgtatatgaaaacatcatattatctacctcaaaaatttatacaactaaaacatagtttactagaatttcatggagtacatcaacacattttttttcaacttttattttaagttctggggtataygtgcaggatgtgcaagtttgttatataggtaaatgtgtgcaacagtggtttgctgcacagaaaaacccatcccctaggtattaa

SEQ ID NO: 574452 - DNA, 638 bp, Homo sapiens
tagattataatttactaattttataatattaatcagaacctaatggaaagaaaaatttggaaaattaatagcactttcaccagattaattagctagttagtatatatttgcactgaaaaataaaatttccatatatatgaaacttaaataaaagattaaattgtagtatgtcaatgatatagctttctttcacctgtttcttttgcaatttatattttatttaaaattagtatagaccttatatattaacatatattttatatatgtaaataatatataatatagaagtaaatacaagtgtgtttttatatatatatatcacacttgtgtgatatgtacacacatatgcacacacaaatatatatgtaactatagaaggtgatagataacgttaaatcacttacctgtagtaataacttaactataaatatgtatatgaaaacatcatattatctacctcaaaaatttatacaactaaaacatagtttactagaatttcatggagtacatcaacacattttttttcaacttttattttaagttctggggtatatgtgcaggatgtgcargtttgttatataggtaaatgtgtgcaacagtggtttgctgcacagaaaaacccatcccctaggtattaa

SEQ ID NO: 574453 - DNA, 475 bp, Homo sapiens
accctaccttaaatatgtccaaatctcttactatactcatgtatatttatacacacatacacacatacacacacacacatatatatacacagacaaccttttttttttttttttttttttttttaaaaatggagtcttgctctgtcgcccaggctggagtgcaggggcgcatttcggctcactgcaagctccacctcccgggttcacaccattttcctgcctcagcctcccaagtagctgggacaacaggcgcccaccaccaggcctgggtaattaattgtaatgaagggttgaatatctcatataccgttacaaaataggctttgtgctaggtagctttgcccaactataggctaatgtttgaccaaataccttggcacccttacccagcaggtkgatgattaaaattaatcattacacatgttatatatttggcaagtactgggtaaaataaaatatactgtgaaaatttatt

SEQ ID NO: 574454 - DNA, 606 bp, Homo sapiens
tttttttagaattttataaaaatggaataatatagcatatattctctattstctttttttatttcttggaaatttataatgtcttgtttttgttgttttaattttattctcattacactgaatttcttctagaagtattagtctaagttttagtactgtcatctttgcttgaaaatttgaatagaaaattcactggggacaaaaagttatttcttagataacttacagatttaacgtaaaggtagagctataattaaaaaaaagagagtataatatagtacttgctgtagagacaataccaatctttacattgatgtaatgagagtttgtattgaaggaaaattttaattataaaatgaattcttacagatttctgcttttcagaaagcttgaggtaagatatacatataaatacatattagaaaacccctagagaatatctattgacatttctgcagttaagtttcattgattccacaatttgctactttctatatattgcaatgataaaaaaaagcctcaggagatttctgaaatgctgatcaacacaacacttaagactttacagttttaaattcttcagtgtgtgccttttataaacaaaag

SEQ ID NO: 574455 - DNA, 519 bp, Homo sapiens
gtcccttcttcattgcaatacagtctcaattatggcataaattgactatatgtaacagtcagtttgttaactcttttattgctatatgtcaagaacttgagtcaatcccatgttctttatgttacttgagacaaaaaggctattatatattgatataaatcttaattcatcaaaagattaccaattataaacataattacaccaaacaaaagaggctcaagatatatggaagcaaacatttatgamattaaagaaaaaatagacactttaaaattgtagttggaaacttcaatatccacgttaaaatgatagttggagacttcaataccccattttcaataatagatggaacaacatcttgaatctattgttcaaaatgtctattttgatagatattctgattcatatatatggtttgtatatttttattcatatatgtattttatgcatgtattcatgtgtatatatattcatgtattaatacatatacattatattcatatatttttttattcatga

SEQ ID NO: 574456 - DNA, 644 bp, Homo sapiens
tggcgtatgtctatatatatataaaataagyagaaagtggattatctgtaaaaaaatatatgatctgagcttgtatatttgagttgaaggtagaggattaaagcaggtggtaggcaagcagatatttgaatcccaaatccgtgttttattcggttattgaggccttcaggcttttaaagtctcctaattccggtttggaaatatttatcttctgtaacagcttaattttagttttcaaatttattagcttaatattgcacgaattattatcttataattttcaagatatattttgtaattaatattcttttattcacttgaaattcaaactttttaaaagaaatattagaatataaatgtctcaaagcatttaagagtcaataaaatgtatttatcttattagtattttgaaaaaaattctttcttttattttattaaatctatattttattttctatgtatcttatttctcattatgtttaataagtcatttatatatgtattgcattttaatttcctagtatctttaaatgtttaaagacacattcaaataaataaaaaaattgtttaaatttatttaaactaaataaatatttaaactaaataattactaaataaatactaatatttatttagtataatta

SEQ ID NO: 574457 - DNA, 644 bp, Homo sapiens
tggcgtatgtctatatatatataaaataagtagaaagtggattatctgtaaaaaaatatatgatctgagcttgtatatttgagttgaaggtagaggattaaagcaggtggtaggcaagcagatatttgaatcccaaatccgtgttttattcggttattgaggycttcaggcttttaaagtctcctaattccggtttggaaatatttatcttctgtaacagcttaattttagttttcaaatttattagcttaatattgcacgaattattatcttataattttcaagatatattttgtaattaatattcttttattcacttgaaattcaaactttttaaaagaaatattagaatataaatgtctcaaagcatttaagagtcaataaaatgtatttatcttattagtattttgaaaaaaattctttcttttattttattaaatctatattttattttctatgtatcttatttctcattatgtttaataagtcatttatatatgtattgcattttaatttcctagtatctttaaatgtttaaagacacattcaaataaataaaaaaattgtttaaatttatttaaactaaataaatatttaaactaaataattactaaataaatactaatatttatttagtataatta

SEQ ID NO: 574458 - DNA, 644 bp, Homo sapiens
tggcgtatgtctatatatatataaaataagtagaaagtggattatctgtaaaaaaatatatgatctgagcttgtatatttgagttgaaggtagaggattaaagcaggtggtaggcaagcagatatttgaatcccaaatccgtgttttattcggttattgaggccttcaggcttttaaagtctcctaattccggtttggaaatatttatcttctgtaacagcttaattttagttttcaaatttattagcttaatattgcacgaattattatcttataattttcaagatatattttgtaattaatattcttttattcacttgaaattcaaactttttaaaagaaatattagaatataaatgtctcaaagcatttaagagtcaataaaatgtatttatcttattagtattttgaaaaaaattctttcttttattttattaaatctatattttattttctatgtatcttatttctcattatgtttaataagtcatttatatatgyattgcattttaatttcctagtatctttaaatgtttaaagacacattcaaataaataaaaaaattgtttaaatttatttaaactaaataaatatttaaactaaataattactaaataaatactaatatttatttagtataatta

SEQ ID NO: 574459 - DNA, 535 bp, Homo sapiens
tactaaaagcaatattgtgagtcggttcatggaaatctgtagtgttaggattaggctgaagaagtaagcggaaaaagaaatgcaaggaaccaccttaattaagccttttaccaccctttctccaggagctgaggtggcamcatttttttgaacaactaccactgatatgggagccaataggatttctgtccagtacaagcatatggcccatgagtggattcagcagtgcacataggttattggggaggggctgcttccctgacctacctctgaaccaaaagatgaggccagtgtagctggtggagaaaggttacaggaagggtggcaggaaagtcagggcttcagttaccaaaggtggatggctaaggggagtggactcaagatggctggactccgagtgaatgcacaaaatggtgtcaggcagaaaagacacatgaaaaaatgctcatcaacactggccatcagagaaatgcaaatcaaaaccacaatgataccatctcacaccagttagaatggcgatcattaaaaagtcagg

SEQ ID NO: 574460 - DNA, 441 bp, Homo sapiens
tgtgtcttggggctgatcttctaatggagtatcttagtgyggttctttgtatttcttgaatttgaatgttggcctgtctttctaggttggggaagttttccaacttggttccactctccttgtctctttcaagtactccaaacagttgcaggttcagtctctttacttagtctcatatttcttgaagattttgttccatatttcttgaaggttgtgttggttccttttcattctttttttctctagtcttgtctgcctaccttatttcagcaagatagtcttcaatctctgaaattatttcttctgcttgatttacttggctatggatacttgtgtatgcttcacaaagttcttgtgctgtgtttttcagctccaggtcatttatgttcctctttaaactgtttattctagttagcagctcctgtaacatttgatcatggt

SEQ ID NO: 574461 - DNA, 547 bp, Homo sapiens
agataacgcatcaagctcagagagtcagtggatctgaaaacacatgccaaaatgctctgatgacctttcaattgttccattttgataatgctaccttacattgctgtgtaatagctgtcatcattacaagaagtcagtatcatttggtgcctgttttaggttagctgggttatatatgtgacttcagtgtagaagaactgacatctgagaggaacaaagccatgttttcaggtcatcatgagatcttatcccaggatgctgataatatcaagatgaaaatagtcaggtgggaagaaraactatatatcttcatgctatttccactaattgaaagttcctagaaattatatttgctacactaggtttcagttgtgtcacaatttactaatttacttaaatatttcaatacttattccatataaaatgctaccatgtattaagaaactataaagaaatgacatatgcacaggcctctttatatcaatttgattttcattataataaatttgacctgcagatggatatccatgtagaaatatcaaagcaa

SEQ ID NO: 574462 - DNA, 562 bp, Homo sapiens
aatattaaattcagtgaggacctgctttgtcacaataaaaataaagatgagagttgtcagggctccagtatgacaaaatatcctgaaggcaaccattccagctgcagactaacactgcaactagttagtgatgttctcctctttaccrcgaggaagcaacactgacagcaaacagacagagaagacccatggatctagcaagaccaaacagtaacagtttgtaagcgtattgacacttaaaatatggtccctggacaagcagcatctgtattacccagaagcttattagaaatgcagaaccttgagccacactctagacttaccacattagaatgtacattttaggccaggtgtggtggctcatgcctgtaatcccagcactttgggaggttgaggcgggtggatcatgaggtcaagagattgagaccatcctggccaacatggtgaaaccctgtttctactaaaaatacaaaaattagctgggtgtggtggcgcatgcctgtaatcccagctacttgcgaggctgagacaggagaatcgcttgaacctgggaagcaggttg

SEQ ID NO: 574463 - DNA, 419 bp, Homo sapiens
gaatggaatggaatggaatggaaaggaatggaatggaatggaatggaatggaatggaatggaatggaatgcaatgsaatggaatcaacccgagtgcaatcgaatggaatcaaatggaatggaatgcaatggaatggattcaacttgaatggaatggaaagaatggaatcaacacgagtggaatggcatggattggaatggaatggaatggaatcaacccgagtacaggggaatggaatggaatggaatgaaatggaatggaatcatccataatgtaatggaaaggaatggaatggaatggaatggaatggaatggaatggaatggaatggaatggaatcaactcgattgcaattgaatggaatggaatggaattaacccgaatagaatggaatggaatggaatggaatggaacggaacg

SEQ ID NO: 574464 - DNA, 419 bp, Homo sapiens
gaatggaatggaatggaatggaaaggaatggaatggaatggaatggaatggaatggaatggaatggaatgcaatggmatggaatcaacccgagtgcaatcgaatggaatcaaatggaatggaatgcaatggaatggattcaacttgaatggaatggaaagaatggaatcaacacgagtggaatggcatggattggaatggaatggaatggaatcaacccgagtacaggggaatggaatggaatggaatgaaatggaatggaatcatccataatgtaatggaaaggaatggaatggaatggaatggaatggaatggaatggaatggaatggaatggaatcaactcgattgcaattgaatggaatggaatggaattaacccgaatagaatggaatggaatggaatggaatggaacggaacg

SEQ ID NO: 574465 - DNA, 419 bp, Homo sapiens
gaatggaatggaatggaatggaaaggaatggaatggaatggaatggaatggaatggaatggaatggaatgcaatggaatggaatcaacccgagtgcaatcgaatggaatcraatggaatggaatgcaatggaatggattcaacttgaatggaatggaaagaatggaatcaacacgagtggaatggcatggattggaatggaatggaatggaatcaacccgagtacaggggaatggaatggaatggaatgaaatggaatggaatcatccataatgtaatggaaaggaatggaatggaatggaatggaatggaatggaatggaatggaatggaatggaatcaactcgattgcaattgaatggaatggaatggaattaacccgaatagaatggaatggaatggaatggaatggaacggaacg

SEQ ID NO: 574466 - DNA, 419 bp, Homo sapiens
gaatggaatggaatggaatggaaaggaatggaatggaatggaatggaatggaatggaatggaatggaatgcaatggaatggaatcaacccgagtgcaatcgaatggaatcaaatggaatggaatgcaatggaatggattcaacttgaatggaatggaaagaatggaatcaacacgagtggaatggcatggattggaatggaatggaatggaatcaacccgagtacaggggaatggaatggaatggaatgaaatggaatggaatcatccataatgtaatgkaaaggaatggaatggaatggaatggaatggaatggaatggaatggaatggaatggaatcaactcgattgcaattgaatggaatggaatggaattaacccgaatagaatggaatggaatggaatggaatggaacggaacg

SEQ ID NO: 574467 - DNA, 356 bp, Homo sapiens
ggaattgaatggaatggaatggaatcaactcgattgtaatggaatggaatggaatggaatggaatggaatggaatggaatggaatggaattaacccgaatacaatggaatggaatggaatggaacggaatggagtggaatggaatggaatcaacccgagtgyaggggaatggaatggaatggaatgcaatggaatggaatcatccggaatggaatggaatggaatggaatgcaaagcaatggaatcaactcgattgcaatggaatggaatggaatggaaaggaatacattggaatcaacccgagtggaatggaatggaaagactggaatggagtggaatggaatggaatggaatgg

SEQ ID NO: 574468 - DNA, 356 bp, Homo sapiens
ggaattgaatggaatggaatggaatcaactcgattgtaatggaatggaatggaatggaatggaatggaatggaatggaatggaatggaattaacccgaatacaatggaatggaatggaatggaacggaatggagtggaatggaatggaatcaacccgagtgcaggggaatggaatggaatggaatgcaatggaatggaatcawccggaatggaatggaatggaatggaatgcaaagcaatggaatcaactcgattgcaatggaatggaatggaatggaaaggaatacattggaatcaacccgagtggaatggaatggaaagactggaatggagtggaatggaatggaatggaatgg

SEQ ID NO: 574469 - DNA, 501 bp, Homo sapiens
tttaaaatctagcagaaaattggcaacattctcagtggtttccattaaatagaaattatcacctatcttaatcttgacaacaatgactttaagattcctctgtttgactactaaacttcagataggttcctcttgactgcagatcctgaccttttcttttttcttagagcatttactttagaaaacttgtaattgtaaatttattctctgcccctttgagatrtaactcttcttaaagctctggccagttttttctacctccgtaatatttttctgaaggacctgggagccatctctttgaaatgtaatcatcagggaagatagctgctctctctcagtctgtttggatggtagagcctaaattcactgagcaccttcccccaagatgtaaaactatctcctgtcctgaaggtaggagaaagttgcttttccctgccacagaaccaattagtcaacccagcaaggagtgaacactcaataaatatgaaatattctattgtt

SEQ ID NO: 574470 - DNA, 563 bp, Homo sapiens
  misc_feature 1, 2, 3, 4, 5: n = A,T,C or G
nnnnntctttaaataaaatttgcttatttgaaatgttaatgctctttagaaaaatgactgtctagtaccaaaggaaaactacttgaaagagctgtaatcatatagstaaagtgataagatagccttgattttaaaagctgattcattaatatcaaaatactttaataagtgtcacagttattaatatgttacatttgtttagtttccacgtaatctttatctctacctagatttagtgagtttgcctctttcagaatactacctccttttgttaaggcatattctttcgaaaatatagattctaaataaataggggcttatacaaaaaagaaaataaaaagccatatatactgcaaagttcctaactggcttgactcctgacattgcatttttatttctatttgtgtgaagatgttgttatactgtattatggctgattttctttttaatatatttagccaagtgatgcactttatgataattaaactcttttgtgccaagtttaattggtggatttttttagtaagtagagttaggagaaagaattatgtagtgcctttact

SEQ ID NO: 574471 - DNA, 626 bp, Homo sapiens
tggtgattccggggtgcctggacggactccagctgaaatgtgggcgtggttggagagtagctgggacagacgggagagtccctgagggatggtgaagacatgagagagactggggagtaacgcagtgaaattggtgagtttggtggtgatttctgggtgcctgcaacggactcccgctgaagtgtgggcgtgcttggagagtagctgggacagacaggcgagtccctgagggttggagataaagacgtgctggagactggggagtaactcagtgaaagtggtgggcttkgtggtgatcccagggttcctggaactgacccgcgctgaaatgtgggcgtggttggagagtagctgggacagactggagggtccgtaagggctgggggtgaagacgtgagagagactggcgaggatctcactgaggtctgtgagtttgtaggtgtttctggggtgtggggtacagactcccgctgaaatctgggcgtagttggagcgtagctgggacagacaggagagtcatgggtggctgggggtgagctgctggatgatggcagtaagaacatatggtacattattgatgaatgaggtgactgtgaagaatctccagaggaggacacgggagaaca

SEQ ID NO: 574472 - DNA, 626 bp, Homo sapiens
tggtgattccggggtgcctggacggactccagctgaaatgtgggcgtggttggagagtagctgggacagacgggagagtccctgagggatggtgaagacatgagagagactggggagtaacgcagtgaaattggtgagtttggtggtgatttctgggtgcctgcaacggactcccgctgaagtgtgggcgtgcttggagagtagctgggacagacaggcgagtccctgagggttggagataaagacgtgctggagactggggagtaactcagtgaaagtggtgggcttggtggtgatcccagggttcctggaactgacccgcgctgaaatgtgggcgtggttggagagtagctgggacagactggagggtccgtaagggctgggggtgaagacgtgagagagactggcgaggatctcactgaggtctgtgagtttgtaggtgtttctggggtgtggggtacagactcccgctgaaatctgggcgtagttggagmgtagctgggacagacaggagagtcatgggtggctgggggtgagctgctggatgatggcagtaagaacatatggtacattattgatgaatgaggtgactgtgaagaatctccagaggaggacacgggagaaca

SEQ ID NO: 574473 - DNA, 582 bp, Homo sapiens
tttgagacaaggtctcactctgttgcccaagctggtatacagtggcacagtcttgactcatggcatcctctacctcccaatcctctaatctcagcctcctggataatttttgtatttttttgtasagatgggatttctccatattgcccaggctggtctcaaactcccaagttgaagtgatctacctgcctcagcctcccaaagtgctgggattacagatgtgagccactgcacctggccaaatttttggtaatttaagatcagtagactaaaaaaaaatctccagagcttaaatgaataaactgatgggtttataaaactgttaatcaagattaaacaaaacaactacatgaaattaagtggttcacgaagatgatgtttttatgacttttatttgaaacattattggctgtgaaatattttgttttccagatttaagaaaactttatctcgtaagctacctacagtttacaaaaattcactaaagtataattttttgaacaaagatggaagcattcattttgtctccctacttgattcctccaaaatttggaaaacatttgtgagtattcttttattttt

SEQ ID NO: 574474 - DNA, 586 bp, Homo sapiens
tagtacaaagtatgattagtaactatcagtgtgaactttggagtccacactaatctcctaaatttcagtcatccattcaacaatactcatggcttcacccacatgctcacttctgtgtcccttaaatcagtggctgacacataggaagaacccaatgaataataatgctaaattgatatgccaagccctgtgctacaggtaaagcactgaacaaagctgacattgccccaatccttaaaaagtttatagtccggaaataattgtttattyttatatgcatgcgcccacacacgcgtgtgcacacacagacacactcccaagcacatctataatcagtgtattaaaacaaatatcttggcagagtgtggtgggccattcctgtaattccagcatttttggaggccaaggtgggtgatctcttgaacccaggagtttgagaccagcttgggcaacatggtgagaccccatctacaaaaaacacaaaatttggccaggcatggtggtgtgcctgtagtcacagacactcagggagctgaggaaggaggattgcttgagggtgggaggcccagactacggtgagtaccac

SEQ ID NO: 574475 - DNA, 515 bp, Homo sapiens
gagtttatcaggggtttccgcttttgctttttcctcttttttctcttgccaccaccaaggcgccaccataagaagtgccttttgccctctgccatgattatgagccctccccagccatgtggaactgtaagtccaagtaaacctctttttgtttccagtttcgagtacgtctttatcagcagcatgaaaatgaactaaaacaaggttcaattaagcaagaagatttaactatctgaaatatatacacatctgacattggaacagccagagtcataaacaagtacttctagacctacagaaagacttagacggccacacaataatagtggcatctatagagtactccacccatcaaycacagaatatacattcttctcatctgtacatggaatatgctctaagatcaaccacatgcttgactataaaacaagtctcaataaattaaaacaaataaaaatcataccaaccatactcttgaaacacaggggaataatagaaataatagaaatcaatac

SEQ ID NO: 574476 - DNA, 579 bp, Homo sapiens
tttgagaaaacagcctggtattttcagcaagatgtgagaaaatcttgcctctctgaaacaaaggcagagtcccataaggaagaactggttagcagaaaagatagtaggatgagatgaaaatatgcaaattagtgaagtaaaagatggctaagaaacggaaaacactgcaatagcacaattaaaataattgcccaaaatagaaaaaataggaggaaaagtcagaaattctgcttcctgaatggcagactatgaaattcagactaaccttctgttgaaaaaaatattttaaaaaatgggcaaaatgtttaaaaccaaaagtatttgcacatttatttgaatgaattttagggccaataaggagataaagaattaaacagccaacattaaataatataacaaaatcttgagagatagttttggcctttagagccatttttctttctaaaatcctcccagtttgtcaaaaggcagattaggggtagggaagctgaaatgagatttcaacagcctcatgggtttgtagagkaaacaaacaaacaaacaaaaaatgtgatttcagtacttgttaatgatgtgtag

SEQ ID NO: 574477 - DNA, 630 bp, Homo sapiens
tgtggtttcatcatgttgcccaggctggtctcgtactcctgagctcaggcaatccgcccacctcaacctcccaaagtgctaagattacaggcgtgagccaccacacctggccaaaaattagttacatttctatacactaacagtgaactatctgaatataaaatcaagaaaataaccccatttaaaacagcaccaagaataacaaaacacttatgaataaatttgaccaaggaggttaaagatttgcataataaaaactgtaaaacattgatgaaagaagacacaataaaatgaaaaggcattcagtgttcatggattggaagacttaatattgtcaataactccatcctacccaaattaatctacagattcaatgcaattcctatcaatatcacatagaactttccacagaaatagaaaaaaaaatactgaaattcatatggaatgaccatcagtggraaatctcattgtcattaaggtgataaatggtgaagactttggacataataatcacaataggaatggaaaggagggagctaagataaaacatacttaagaaagttgactaggaaccaacccaaatgtccatcaatgatagaatggattaagaaaatgtggcacatatacacc

SEQ ID NO: 574478 - DNA, 630 bp, Homo sapiens
tgtggtttcatcatgttgcccaggctggtctcgtactcctgagctcaggcaatccgcccacctcaacctcccaaagtgctaagattacaggcgtgagccaccacacctggccaaaaattagttacatttctatacactaacagtgaactatctgaatataaaatcaagaaaataaccccatttaaaacagcaccaagaataacaaaacacttatgaataaatttgaccaaggaggttaaagatttgcataataaaaactgtaaaacattgatgaaagaagacacaataaaatgaaaaggcattcagtgttcatggattggaagacttaatattgtcaataactccatcctacccaaattaatctacagattcaatgcaattcctatcaatatcacatagaactttccacagaaatagaaaaaaaaatactgaaattcatatggaatgaccatcagtgggaaatctcattgtcattaaggtgataaatggtgaagacyttggacataataatcacaataggaatggaaaggagggagctaagataaaacatacttaagaaagttgactaggaaccaacccaaatgtccatcaatgatagaatggattaagaaaatgtggcacatatacacc

SEQ ID NO: 574479 - DNA, 600 bp, Homo sapiens
ctgctcacttctcaaaggccccacctcctaataccctaataccttgggggctatgataccaaaatacaaatcttgaggggatgcaaacattcagaccatagcacttttaaaaatgattttacactcagactagcaaagatacttcatcttcaatctacttccaatmccctggtgatgactatcagagggctctgctgaaatatgttcttaggaggcattcaccagccggtgcctcacgactttgatttctaccttatttttctctatgactccctagagcacctctaaacatccctagagtgaaagcactttgaaatctactggcctagggcaattgttacaagcacatcacaaagagaacttacttaatgaaaggtctaaaaaatatatatcatttaacaaagcaattaaagacatcatccaagactgtgccacctgggctcctgtggcctacaccagtaaacgtaataacattattacaattacacacccgccatcaggccccagatgtgggttaataaagaaatgctaatgcaaaaaaaataaagacaacagctcaaaaatgtagagggtgagactaaaaacgatagactaacatat

SEQ ID NO: 574480 - DNA, 558 bp, Homo sapiens
ttcactgcaacatccacttyttgggttcaagtgattctcctgcctcagccttccaagtagcggggattataggtggcgcccaccgcacacagctaatttttgtgtttttagtaaagatggggttttgtcatattggccacgctggtcaccaactccagacctcaagtaatctgcctgcctcggcctcccagagtgctgggattacaggcgtgagccaccatgcccagctggaagttcttctttttaatctctgagtaggatttgccagggctgtaataagagtaaaaaaaaaaaaaaaaaaaaaaaaaaaagaaaagaaaatcgaaatacttggaagtactcccatgacatgacaaaaatttcacatattttcttcccatgacatttcaacatgtgttttctcaggagagatatgtgaatccgtgaattttgcctctggattgactcccttgtggattgggtaagtgtgaaactgaaaattcacagcactggtctcataaaatattttagttttctccatttatacattaactcactaattcatccattccttgactg

SEQ ID NO: 574481 - DNA, 558 bp, Homo sapiens
ttcactgcaacatccactttttgggttcaagtgattctcctgcctcagccttccaagtagcggggattataggtggcgcccaccgcacacagctaatttttgtgtttttagtaragatggggttttgtcatattggccacgctggtcaccaactccagacctcaagtaatctgcctgcctcggcctcccagagtgctgggattacaggcgtgagccaccatgcccagctggaagttcttctttttaatctctgagtaggatttgccagggctgtaataagagtaaaaaaaaaaaaaaaaaaaaaaaaaaaagaaaagaaaatcgaaatacttggaagtactcccatgacatgacaaaaatttcacatattttcttcccatgacatttcaacatgtgttttctcaggagagatatgtgaatccgtgaattttgcctctggattgactcccttgtggattgggtaagtgtgaaactgaaaattcacagcactggtctcataaaatattttagttttctccatttatacattaactcactaattcatccattccttgactg

SEQ ID NO: 574482 - DNA, 310 bp, Homo sapiens
ttgaaattctttgaagtgctaaaaaaaaaaatcacgcatcaaaaataaaaatagtttaagccaggtgcggtggctcatgcctgtaatcccagcactttaggaggccgaggtgagtggatcacttgaggccaggaatctgagaccagactggacaacacggtytctattaaaaatacaaaaattagctgggcatggtggcaggcatctgtaatcccagctactctggaggctgaagcagaaaaattgcttgaaccccggaggcggaggttgcagtgagccaagatagtgcctgggagactccagcctggga

SEQ ID NO: 574483 - DNA, 310 bp, Homo sapiens
ttgaaattctttgaagtgctaaaaaaaaaaatcacgcatcaaaaataaaaatagtttaagccaggtgcggtggctcatgcctgtaatcccagcactttaggaggccgaggtgagtggatcacttgaggccaggaatctgagaccagactggacaacacggtttctattaaaaatacaaaaattagctgggcatggtggcaggcatctgtaatcccagctactctggaggctgaagcagaaraattgcttgaaccccggaggcggaggttgcagtgagccaagatagtgcctgggagactccagcctggga

SEQ ID NO: 574484 - DNA, 608 bp, Homo sapiens
tgagatagcatctcacgccagtcagaatggcaattattaaaaagtcaagaaacacttttgttgggaacataaattagttcaaccattgtggaagacagtgtggagattcctcaaagatttagaactggaaataccatttgacccagcaatytcattactggctatatacccaaaggaatataaatcattctgttataaagatacatgcacgcgtatgttaactgcagcactattcacaatagcaaagacatcaaatgtccatcaaatgtcctatcaaatgtccatcaatgatagactggataaataaaatgtggtacatgtacaatggaatactacacagccataaaaaaggaacgagatcatgttctttgcagggacatggataaagctggaagtccttaccctaagtaaactaatgcaggaatagaaaaccaaacactgcatgttctcacttataagtgggagctgaaaaatggacacaggatacatggacacagggacgggaataacacttactgtggcctgttggggggagtgtgtcaggggagaccattaatgtatgctgggcttaatacctagctgacaggttgatgggtgcaacaaaccac

SEQ ID NO: 574485 - DNA, 515 bp, Homo sapiens
tgcacacttatacatgtatatacatatgagtttaattttaagcaaactccaagtttcttttttaaaagcagatttattgaaaatgtctaaaaattattttataactacgtaatattccataatatgaacatactatattttgtcccccatgatgaatttcaatttattttgcatatctaaaaaatacrctttttgatatacttgtccttaagcacatagaataggttcttaaaattgaaaattgttaagtcaaagagtatatttagtttaaacaggtaaggccagatttttttccccaaattctgtaaaaattcatattcccaatagcaatatataaaactatttatttccataaatccacttcagcaagggacttaattttttttttaacttttgccaatttgatgaatgaaaaataatattcaattgccataattttcattttcctgattgctagtgaggtagaccatctgttcatatttattgaccaattgtatttcctttactacaaaatg

SEQ ID NO: 574486 - DNA, 415 bp, Homo sapiens
gttataggattgtggttcccatttccttctggctgtcagctgggggccactctaggcttctagaggctgcatgcatttctcatcacacactcacctccaccttcaagccagcaacagctcatcagatcctccctgtatttcttttctttcttttatttatttatttattacttttttaaagagatagggtcttgttgcccaggctggagtgctgtggcatgatcatagtttactgtagccttgaactcctgggctcaagtgatcctcctaccttagcctcccaagtagctagaactacagatgtgaaccaccatgccccactaattttatrattttttgtagagatggagtctagccatgttgcccaggctggtctcaagctcctggcctcagccgtccttttgctttggtctcc

SEQ ID NO: 574487 - DNA, 539 bp, Homo sapiens
ctgaagtcaggagtttgagactagcctggccaacatggtgaaccctcatctctactaaaaatataaaaattagccaggcctggtggygggtgtctgtaatcccagctactcaggaggctgaggcaggagaatcgcttgaacccgggaggaggttgcggtcagccgagatcgcgccactacattccagcccaggcgacagagtgagactctgtctcaaaaaaaataaaaataaaaagaccagctgacttgggaatcttacccctaggcacaggactctggtgaactgctcccagatatgacgggaagaatcaaaggctgactattaaaaagtaaggtacagaaacacagagagggatgaaggtagttttaaacaattacgcggataccaactactgccaaacacatgcacacacgtgtgcatgcactggataattgggaagcaatggggttccaaagttttaaagtttaagaaggtgcaagatctggcaaaaactgggtaaaggaaattcaagaaagacgtgacttaaatcccagacata

SEQ ID NO: 574488 - DNA, 539 bp, Homo sapiens
ctgaagtcaggagtttgagactagcctggccaacatggtgaaccctcatctctactaaaaatataaaaattagccaggcctggtggcgggtgtctgtaatcccagctactcaggaggctgaggcaggagaatcgcttgaacccgggaggaggttgcggtcagccgagatcgcgccactacattccagcccaggcgacagagtgagactctgtctcaaaaaaaataaaaataaaaagaccagctgacttgggaatcttacccctaggcacaggactctggtgaactgctcccagatatgacgggaagaatcaaaggctgactattaaaaagtaaggtacagaaacrcagagagggatgaaggtagttttaaacaattacgcggataccaactactgccaaacacatgcacacacgtgtgcatgcactggataattgggaagcaatggggttccaaagttttaaagtttaagaaggtgcaagatctggcaaaaactgggtaaaggaaattcaagaaagacgtgacttaaatcccagacata

SEQ ID NO: 574489 - DNA, 586 bp, Homo sapiens
atattattccattgtttgaatatatcacaaaaataaaatttttctattctactattgatttacatgtgggttgcttactacatgaggcagttacgatcagtgcttctatgcacagttttgttcatgtgttttaggagaaatgtacaaatttcttgtggctgtatacctagtaatggaattacaaagtgataaattatgtatgtgttcagctttcacagatacagccaaacagttttccaaagtggcttaaccaatttacaatcttcactgcactggataagagttccaattatgccacatccattttcattaacacacttttcctttaaaaaatttatggttttggctagggtttgtggtggtattttctttagctttaattgacatgcccctgatgataaatggtattgagtacttttcataggtctactgaccaattggatatctttattcataaagtggatgtccagaacttctgctgttacttctatttggccattgttttcttattagtttttatggatcttatgtattttgagtatgagtgttttgttatrtgaacaaattgcaaatatcttctccactc

SEQ ID NO: 574490 - DNA, 616 bp, Homo sapiens
accaaaatactgagcattgcacattgtactgagcattgtaaagaaatagaatatttaaatgcctatgaactacaatgtatcaaacgcacctacttactattgtaatgaataaaatatgtaacaattccttattagctagatgacagtgaaaaaagttaatcattctgtgtttcagtttcctcatctgtaaaatgaagatgtaattaacaataccttcttcatcacagtgttatgactattaaatagtataattaaggaaagcttttggaagagcactttggacacaaacaacattgaaaaagattagacattacaattttcatgattactattattagaattcttttttttttwaagacagagtctccctctgtcacccagtctggagtgcggtggcatgatatcggctcactgctacctccgcctcccaggttcaagcaattctcctgcctcagcctcctcagtagctgggactacaggcacccaccaccagccccggctaatttttgtatttttagtagagatgggctttcaccatattggccaggctggtctcaaactcctgaccttgtgatccgcccacctcagcctcccagtgctgggactacaggcgtga

SEQ ID NO: 574491 - DNA, 616 bp, Homo sapiens
accaaaatactgagcattgcacattgtactgagcattgtaaagaaatagaatatttaaatgcctatgaactacaatgtatcaaacgcacctacttactattgtaatgaataaaatatgtaacaattccttattagctagatgacagtgaaaaaagttaatcattctgtgtttcagtttcctcatctgtaaaatgaagatgtaattaacaataccttcttcatcacagtgttatgactattaaatagtataattaaggaaagcttttggaagagcactttggacacaaacaacattgaaaaagattagacattacaattttcatgattactattattagaattcttttttttttaaagacagagtctccctctgtcacccagtctggagtgcggtggcatgatatcggctcactgctacctccgcctcccaggttcaagcaattctcctgcctcagcctcctcagtagctgggactacaggcacccaccaccagccccggctaatttttgtatttttagtagagatgggstttcaccatattggccaggctggtctcaaactcctgaccttgtgatccgcccacctcagcctcccagtgctgggactacaggcgtga

SEQ ID NO: 574492 - DNA, 532 bp, Homo sapiens
ggcttcatttctgggttctctattctgtttcattgatctttttgtctaattttataccactatcatgctgtttttggttactatagattcagagtctaatttgaagtyaggtaatgcaacgtctccagcttcaatccttttgcttaaaattgctttggttatttggactctttttttggttctgcatgaattttagaatctttttttatagttctgtgaaaaataatgttggcattttcatggggatagcattgaatctgtagattgctttgggtagtatggtcattttagtaatattaattattccaatccatgaactgggacttttttttttcatttgtttgtagcatccctaatttctttcatcagtgttctgtagttttccttgtagagatcttttacctccttggttaaatatagtccaaggtatttcattattctttaatattatagctattgcaagtaggatgtcttcttgatttcactctcagctatattgctaattggtgtatagacacacccctgatatttg

SEQ ID NO: 574493 - DNA, 532 bp, Homo sapiens
ggcttcatttctgggttctctattctgtttcattgatctttttgtctaattttataccactatcatgctgtttttggttactatagattcagagtctaatttgaagtcaggtaatgcaacgtctccagcttcaatccttttgcttaraattgctttggttatttggactctttttttggttctgcatgaattttagaatctttttttatagttctgtgaaaaataatgttggcattttcatggggatagcattgaatctgtagattgctttgggtagtatggtcattttagtaatattaattattccaatccatgaactgggacttttttttttcatttgtttgtagcatccctaatttctttcatcagtgttctgtagttttccttgtagagatcttttacctccttggttaaatatagtccaaggtatttcattattctttaatattatagctattgcaagtaggatgtcttcttgatttcactctcagctatattgctaattggtgtatagacacacccctgatatttg

SEQ ID NO: 574494 - DNA, 619 bp, Homo sapiens
tttgctcagcctatctatactgtatatgctacccacctgttagtcacttagtggctgaggataatcagattgaaaaatcatagaatatatagagtttggtactgttcgtggtttcaggtatccctgtgggctcttggaacatattccctatggataggggagactactgtacaacagtggatggcattacctcatgggaaatagtaatttgctatgttttgaatgtgtccccaaaatgtgttggaaatttaatttccagtgcagcartgttgagaagcggaaactttaagaggtgattaggtcatgagggccctgctctcatgaatggattaatgtcattctccaaggggtgggtttattataaaagtgagattgaccctctctcacactccctctcatacatgtgataccttctaccatgttatgtcacagcaagaaagacctcactagatgtcagaccttcaatcttggacttccaatcctcaataatcatgagtcaaatcaatttctattcattgtaaattacccagtgtcttgtattccattatagcagcactaaatggattaagacataacccattagtttcattcattagttagggaaaagaaatcaaaattt

SEQ ID NO: 574495 - DNA, 621 bp, Homo sapiens
taagtctaggaataattaaatattacggttgctaataattgtgcatgtacatttaatatggagtttgtttctttaaaaaatctagcaataaagacacatgataaatgacatgttagatctgatgaattatgatagaaattaaaatgcaataaatatatattaaacatatgtagatagagttctttactatagaccttctcagcaccgttattataaagctcattataaagttccaaaaggtttgtagggtatacttgatttttaaattttgaccatgaggcccatttatttacataaaatcttggcagaaccctgatttcattgaatttatttttataaatctgtttagataaataacagagttgttatggattcttataaaagacagagatgccagacatagggtaagttaccttcctaaatttctaagctttttggtctgaccacaaatagaataaggatgatctcatccaaaccttcctttcattggtacttttgtcagagactgactttagaactggataaaaaagagattgattccatttgagttattaaatttggcttaaacrgtggaaacccatcaggagcttttccgaacgaatggtactttaaatgaggtgc

SEQ ID NO: 574496 - DNA, 621 bp, Homo sapiens
taagtctaggaataattaaatattacggttgctaataattgtgcatgtacatttaatatggagtttgtttctttaaaaaatctagcaataaagacacatgataaatgacatgttagatctgatgaattatgatagaaattaaaatgcaataaatatatattaaacatatgtagatagagttctttactatagaccttctcagcaccgttattataaagctcattataaagttccaaaaggtttgtagggtatacttgatttttaaattttgaccatgaggcccatttatttacataaaatcttggcagaaccctgatttcattgaatttatttttataaatctgtttagataaataacagagttgttatggattcttataaaagacagagatgccagacatagggtaagttaccttcctaaatttctaagctttttggtctgaccacaaatagaataaggatgatctcatccaaaccttcctttcattggtacttttgtcagagactgactttagaactggataaaaaagagattgattccatttgagttattaaatttggcttaaacggtggaaacccatcaggagcttttccraacgaatggtactttaaatgaggtgc

SEQ ID NO: 574497 - DNA, 624 bp, Homo sapiens
tgcacacatcacaaagcagtttctcagaaatcttccttctagtttttttctgaagattttttttttctccataggcctcaatgcattcccaaatatcccctcacagattctaccaaaacagtgtttccaaactgctgaatgaaaagaatgatttaactcagcgagatgaatacacagataacaaagcagtttcttcaataccttccttctactttttatcctggtctatttatttttttgccaatggcttcaatgaggtcccaattgtccattctgggacaaaaacagtgtctccaaactaataattccaaagaaaggtttaactctrtgagataaatgcacacaccacaaagcagattctcagaaagcttctttctagtttttatctgaagatgtttcatttttccccatagacctcaatgagctcccaaacatcccatcacagactctactgaaacaatgtttccaaactacagaattaaaagaaagttttaactctgtgagataaatgaacacatgacaaaatggtttctcggatagcttccttctacttttatcctgggatattttctttttcacatggggccacagtgagctcccaagtacctctttgctgattctacc

SEQ ID NO: 574498 - DNA, 553 bp, Homo sapiens
aatggaaaatgcccagctaaaaactagaaagaagccctatgtgaagctgctttgtgatgtgtggatttatctcacaaagttaagcctttcttttgattaagcaggttggaaacactctttttgtagcataagtgaagtgacattttaaagcccattgaatcctacaaggaaaaaccgaatatccygagataaaaaatagaaagaagctatctgtgaaacagctttgtgatgtgtggattcattaacagagttaaaccttccttttgatttagcaggttggaaacactctctttgtagaatatgtgaagaaacatttgggagccaattgaggcctatagtgaaaaaccgaatatctgcagataaacactagaaagaagctatatgtgaaactccttggtgatgtgtggattcatctcacagagtttaacctttcctttggttcactaggttgaaaacactctttttgtagaatttgtgaaggaacatttgggagcccattcatgcttatggaaaaaaaaaaccaaatatccccagataaaaactagaaggaagc

SEQ ID NO: 574499 - DNA, 540 bp, Homo sapiens
ctttgtgatgtgtgcatttatcttgttgtgggaagtcaggaaccctgaatggagggaccagctggagccatgcagaagaaagtaaattgtgaagatttcatggacacttattcagttcccaaataaaactttcataatttcttatgctygtcttactttaatctcttaatcctgttatcttcataagctgaggatgtacatcacctcaggatcactatgataattgtgtaatctgtacaaattgactgtaaaatatgtgtgttggaagaatatgaaatcagtgcaccttgaaaaagaacacaataacagcgaattttagggaacacggaaagaaaaccataaggtttgactacctgcatggtcaggcaaaaagagccatatttttcttcttgcagagagcctataaaaggatgtgcaagtagggaagataatgataaattcttttcctagcaaggaatattgatattaatgctctgggaaaagaattccatttctgggggaggtctataaatggccactctgggaatgtctgttctatgc

SEQ ID NO: 574500 - DNA, 540 bp, Homo sapiens
ctttgtgatgtgtgcatttatcttgttgtgggaagtcaggaaccctgaatggagggaccagctggagccatgcagaagaaagtaaattgtgaagatttcatggacacttattcagttcccaaataaaactttcataatttcttatgctcgtcttactttaatctcttaatcctgttatcttcataagctgaggatgtacatcacctcaggatcactatgataattgtgtaatctgtacaaattgactgtaaaatatgtgtgttggaagaatatgaaatcagtgcaccttgaaaaagaacasaataacagcgaattttagggaacacggaaagaaaaccataaggtttgactacctgcatggtcaggcaaaaagagccatatttttcttcttgcagagagcctataaaaggatgtgcaagtagggaagataatgataaattcttttcctagcaaggaatattgatattaatgctctgggaaaagaattccatttctgggggaggtctataaatggccactctgggaatgtctgttctatgc

SEQ ID NO: 574501 - DNA, 540 bp, Homo sapiens
ctttgtgatgtgtgcatttatcttgttgtgggaagtcaggaaccctgaatggagggaccagctggagccatgcagaagaaagtaaattgtgaagatttcatggacacttattcagttcccaaataaaactttcataatttcttatgctcgtcttactttaatctcttaatcctgttatcttcataagctgaggatgtacatcacctcaggatcactatgataattgtgtaatctgtacaaattgactgtaaaatatgtgtgttggaagaatatgaaatcagtgcaccttgaaaaagaacacaataacagcgaattttagggaacamggaaagaaaaccataaggtttgactacctgcatggtcaggcaaaaagagccatatttttcttcttgcagagagcctataaaaggatgtgcaagtagggaagataatgataaattcttttcctagcaaggaatattgatattaatgctctgggaaaagaattccatttctgggggaggtctataaatggccactctgggaatgtctgttctatgc

SEQ ID NO: 574502 - DNA, 354 bp, Homo sapiens
ataaaatgaggtgacaaataaaayggaaggagaatgtccagcagataatataccacgagagccgccagggcagtagaagcccacctacccaaaggacctcagaaaggcactgcattcagagtcagcatatgtgttgcttgggggaggacagaggcaggaattaaaagttgagtagaagacagaaggggcaattgaaggtcagtatattggacagttgaacaaaatgtgttgtggcttttcctgccccacccctccacaacccacacccgctccagcccacagaaaacaggcagccaatatctagcaaaaggtaatacatgaggtggatatttctaacaaaatcaaatggaattc

SEQ ID NO: 574503 - DNA, 586 bp, Homo sapiens
aacgcaattgcaacaaaaacaaaatagacaagtgggaccaaatcaaatgaagagcttctgcagagcaaaagaaactatcaacagagtaaacagacacacctataggataagagaaaatatttgcaagctatgcacccracaagagtctaatatccggaatctatcaggaacttaaacaaatcaacaagcaaaaaatcaaacagccccattaaaaaatgggcaaaggacatggacaattctaaaaagaagacatatgcatgactatcaatacgaaaaaatgcttaacattactaatcattagagaaatgcaaatcaaaaccacagtgagatactatctcacacaagtcagaatagctattattaaaatgtccgaaaataatagatgcaggcaaggctgtagagaaaagggaatgcttatatatggtttgcggtaatacaaattagttcagccactgtggaaagcagtttagagattttgcaaagagtttgacagttttaggtatctcatataactggagtcatgcaatatttatccttctgtgactggcttatttcatgtcacataatgtcctctgggttcatatgt

SEQ ID NO: 574504 - DNA, 609 bp, Homo sapiens
tgtctttaaactctaagtacatcattctatgtaatcttaaggaatggttgcgtagaaaatgtgagaaaatatttttcagatagaaacttgatagggctaaatagaataagaacttagtgtattgtttataaacatgcacattaatgtaaaatrttgtcattgttggaggaatatttatggtaactcaattagagaaattaccattcgcttataatctttctctttaaattgaaatattggagtgtaatttaaactttggaaactttaaattctagctgttgctgtcattacatacagaacagctttcccccaaaatattttcaattggaacatttttaaatttcatcatatagtaatatgctaggcttttccctatgcccatttcattctctcagtgaaagattgtgtgctttaggagtaaaaatagctctttcaggtctcattactactaataacaattttttaaaataatgttaaacacaatgctacatctcaatgtaatgttacttagtgcaagggcaacgccttgcaaacctcagaagagcctagaaaatagcagaatctaaaattttaagttattaagaaaatactagattataatgaatgaga

SEQ ID NO: 574505 - DNA, 609 bp, Homo sapiens
tgtctttaaactctaagtacatcattctatgtaatcttaaggaatggttgcgtagaaaatgtgagaaaatatttttcagatagaaacttgatagggctaaatagaataagaacttagtgtattgtttataaacatgcacattaatgtaaaatattgtcattgttggaggaatatttatggtaactcaattagagaaattaccattygcttataatctttctctttaaattgaaatattggagtgtaatttaaactttggaaactttaaattctagctgttgctgtcattacatacagaacagctttcccccaaaatattttcaattggaacatttttaaatttcatcatatagtaatatgctaggcttttccctatgcccatttcattctctcagtgaaagattgtgtgctttaggagtaaaaatagctctttcaggtctcattactactaataacaattttttaaaataatgttaaacacaatgctacatctcaatgtaatgttacttagtgcaagggcaacgccttgcaaacctcagaagagcctagaaaatagcagaatctaaaattttaagttattaagaaaatactagattataatgaatgaga

SEQ ID NO: 574506 - DNA, 609 bp, Homo sapiens
tgtctttaaactctaagtacatcattctatgtaatcttaaggaatggttgcgtagaaaatgtgagaaaatatttttcagatagaaacttgatagggctaaatagaataagaacttagtgtattgtttataaacatgcacattaatgtaaaatattgtcattgttggaggaatatttatggtaactcaattagagaaattaccattcgcttataatctttctctttaaattgaaatattggagtgtaatttaaactttggaaactttaaattctagctgttgctgtcattacatacagaacagctttcccccaaaatattttcaattggaacatttttaaatttcatcatatagtaatatgctaggcttttccctatgcccatttcattctctcagtgaaagattgtgtgctttaggartaaaaatagctctttcaggtctcattactactaataacaattttttaaaataatgttaaacacaatgctacatctcaatgtaatgttacttagtgcaagggcaacgccttgcaaacctcagaagagcctagaaaatagcagaatctaaaattttaagttattaagaaaatactagattataatgaatgaga

SEQ ID NO: 574507 - DNA, 410 bp, Homo sapiens
gctaaaaagcttctgcacagcaaagggaacaatcaacaaaatgaagagacaacccacagaatgggagaaaagatttgcaaactacccttctgacaagggattaataaccaggatatataaggaagctaaacaacttgataggaaaaaataatctaatttraaaatgggcaaacaatctgaacaaatatttcttaaaagaagacatacaaagaccataaggtacatgaaaaaatgcttaacatcagtaatcgtcagagaactgcaaatcaaaactatagtgagatactgtttcatcccatttaaaatgggttattctatttccgaaaaaaaaaatcattggaattttgatagaaattgcactaaacctgtagattactttgggtagtattgacatcttgccaatactaatt

SEQ ID NO: 574508 - DNA, 410 bp, Homo sapiens
gctaaaaagcttctgcacagcaaagggaacaatcaacaaaatgaagagacaacccacagaatgggagaaaagatttgcaaactacccttctgacaagggattaataaccaggatatataaggaagctaaacaacttgataggaaaaaataatctaatttgaaaatgggcaaacaatctgaacaaatatttcttaaaagaagacatacaaagaccataaggtacatgaaaaaatgcttaacatcagtartcgtcagagaactgcaaatcaaaactatagtgagatactgtttcatcccatttaaaatgggttattctatttccgaaaaaaaaaatcattggaattttgatagaaattgcactaaacctgtagattactttgggtagtattgacatcttgccaatactaatt

SEQ ID NO: 574509 - DNA, 592 bp, Homo sapiens
aatgataaaaggatcaattcagaaagataatataacaattctaattttatatgcacccaacaccaaacactcagttatataaagcaaatattattagattcaaagggagagataggcttcattacaataataattagggacttcaacaccaaaactctcagcactgaataggttggttatatagacagaaaatcaataaagaaacattgaatttaaactgcatgttagaccaatyggatataatagatatttacagaacatattatttaacaaatgtagaatacacattcttcttatcagcacatggaacattctccaggatagaatatatgttaggccacaaaacaagtcttaacagattttaaaaaaccaaaatctaataccacaatggaataaaactagaaattaataccaagaggaactttgggaactatacaaacatacaaaaattaaacaacatgctcctgaatgaccactggatcaatgaagaaattaagaaaaaagccaaaaatgtattgaaataaatgaaaatagaaacacaacataccaaagcctaggacacacagcaaaagcagtgctgagaggggggttt

SEQ ID NO: 574510 - DNA, 482 bp, Homo sapiens
cccttatacatatatgcaaaaactagatttttatgaacatttcttctctagatatactttttaaagaaagtgatacatatactttaaggccagaataaatagaaaaatactgcctcaccgctgcactccaacttgggtgacagagcgagactccgtctcaaataaagaaaaatactatctcaatgtcttcagtgagaaacaaaaacctttatggtcttaacattttattcataaggagatgtttatarttgtttgatctgctgactcaaggttcatatttgaaactaatttatgataatttctcagatttctatagacctttgagaactaaggctgacgatgcaaagactacctataagcagaagggccgaaaaaaactaatcctctcctacattttctggaccaactctgaagtagacattaaaagaggcctttgggccaggtgcggtggctcacacttgtaatcccagcactttgggagg

SEQ ID NO: 574511 - DNA, 424 bp, Homo sapiens
tgacaatttgactataatgtacctcaaagagagcatgtttgggttgaatttattgggacaactttgagcttccaggatctgagtgacaatatctctccccagccttgaatagtttctcagctatatctcaattaaataggtttgctgtgactttttccaactctttytctggaaactctataatacaggtatttgtttgcttaatagtgtctcatagtactataggcattcttcattcttttttattctttttttccctcttgctggataatttcaaattatgtatctttaaactcggagattatttattctgtctgatcaaagtcttctgctgaagttctctgttgtatgttttatttcattcattaaattatttagctgaagaatttctgttttgttctttttttaataataccctgaattc

SEQ ID NO: 574512 - DNA, 522 bp, Homo sapiens
aaaataaattgtgtgtgagggaatatataccacatctgtrtttgggtatgtgtgcatcaaatgcactttgactctgtgttcttgaggcaagtgatacgggtttggctgtgtccccacccacatctcacctctaattgcaatatcccacacatgtcaagggcagggccaagtaaagataattgaatcatggtggtggtttcccccgtaatgttctcgtgacagtgagtgagttctcacaaaatctaatggtttcataactctctggtatttcacctgctggcgctcattctcagacatgactttgctcctcattcaccttccaccatgattgtgaggcctccccagccgtgtagaactgtgaatcaattaaatatttttcctttataaattacccagtctcaggtgtgttttcattagcagcgtgagaacagactaacacagcaagtatttaacagagttaaagaataggcattaaacatgaatgacaggaatgcataagcaatgacttggaatttcatgtct

SEQ ID NO: 574513 - DNA, 522 bp, Homo sapiens
aaaataaattgtgtgtgagggaatatataccacatctgtgtttggktatgtgtgcatcaaatgcactttgactctgtgttcttgaggcaagtgatacgggtttggctgtgtccccacccacatctcacctctaattgcaatatcccacacatgtcaagggcagggccaagtaaagataattgaatcatggtggtggtttcccccgtaatgttctcgtgacagtgagtgagttctcacaaaatctaatggtttcataactctctggtatttcacctgctggcgctcattctcagacatgactttgctcctcattcaccttccaccatgattgtgaggcctccccagccgtgtagaactgtgaatcaattaaatatttttcctttataaattacccagtctcaggtgtgttttcattagcagcgtgagaacagactaacacagcaagtatttaacagagttaaagaataggcattaaacatgaatgacaggaatgcataagcaatgacttggaatttcatgtct

SEQ ID NO: 574514 - DNA, 522 bp, Homo sapiens
aaaataaattgtgtgtgagggaatatataccacatctgtgtttgggtatgtgtgcatcaaatgcactttgactctgtgttcttgaggcaagtgatacgggtttggctgtgtccccacccacatctcacctctaattgcaatatcccacacatgtcaagggcagggccaagtaaagataattgaatcatggtggtggtttcccccgtaatgttctcgtgacagtgagtgagttctcacaaaatctaatggtttcataactctctggyatttcacctgctggcgctcattctcagacatgactttgctcctcattcaccttccaccatgattgtgaggcctccccagccgtgtagaactgtgaatcaattaaatatttttcctttataaattacccagtctcaggtgtgttttcattagcagcgtgagaacagactaacacagcaagtatttaacagagttaaagaataggcattaaacatgaatgacaggaatgcataagcaatgacttggaatttcatgtct

SEQ ID NO: 574515 - DNA, 522 bp, Homo sapiens
aaaataaattgtgtgtgagggaatatataccacatctgtgtttgggtatgtgtgcatcaaatgcactttgactctgtgttcttgaggcaagtgatacgggtttggctgtgtccccacccacatctcacctctaattgcaatatcccacacatgtcaagggcagggccaagtaaagataattgaatcatggtggtggtttcccccgtaatgttctcgtgacagtgagtgagttctcacaaaatctaatggtttcataactctctggtatttcacctgctggcgctcattctcagacatgactttgctcctcattcaccttccaccatgattgtgaggcctccccagccgtgtagaactgtgaatcaattaaatatttttcctttataaattacccagtctcaggtrtgttttcattagcagcgtgagaacagactaacacagcaagtatttaacagagttaaagaataggcattaaacatgaatgacaggaatgcataagcaatgacttggaatttcatgtct

SEQ ID NO: 574516 - DNA, 484 bp, Homo sapiens
gagtgtaatcattagatggggtactcatttcatattttaaataagtattatatttactaagagtttaatttcacaattwtatatctatatttcttaaataagtcatccccaaagtatataagcttcatgctccactaactggatctatactgggtacctggtattcacattttaaaaaataatttgattgaaaaatgtttaatacttaactactctagtaaatagaatttaattatatataattactttttaatactttaaaactttccataccatttggttaccgttgtgaatatcattatcatagtaacatactgaaaatttttaaaaaggtgaaaacactttggtgatctgtgataaattcacagtcaagaacttgaaaacacacatacacatacacacacaaaataacaattaatttaattaagcttttcatatactagtacaaaataaaattgtgaaattgttttaattctaacattat

SEQ ID NO: 574517 - DNA, 637 bp, Homo sapiens
gccaagaagagtaggaggagatgaaaaagaaaggaaataaaggtttttttaattaaataaattaaagaaaaagaaagacaaaagcaagaaggagaactaatgattttcagaattcctccctccagtcttggaaaggatgagcaggaaagactccagtcatatattataggaaatacttagaagagatctctgatgtcctctaagaattaatgctcctgtgatggtaagtagctgatccatcacagtagcaggtgtactggggataaaccaatttgtctagtgaataytgatacattctgacaacaatgaacttatgcggttgtaacataatctcagttgtgacaagttctcctcccatcccttctgggtagttaaaataattacataatagaagtgctaaaggaaaaaactgcttctctactcacaacacttctgacaccaaatgtgtgggttttctgcaccaagaaattctccggttgtctgtggacacaagatggtgtcctataatgtaattcaattctgacattaaaaccaacttagcacagacgccatacatcaagagctcagtcccttaagattgctccccaccttaagatgtcagccacaaatagttgatccacaggttacccacacttct

SEQ ID NO: 574518 - DNA, 637 bp, Homo sapiens
gccaagaagagtaggaggagatgaaaaagaaaggaaataaaggtttttttaattaaataaattaaagaaaaagaaagacaaaagcaagaaggagaactaatgattttcagaattcctccctccagtcttggaaaggatgagcaggaaagactccagtcatatattataggaaatacttagaagagatctctgatgtcctctaagaattaatgctcctgtgatggtaagtagctgatccatcacagtagcaggtgtactggggataaaccaatttgtctagtgaatattgatacattctgacaacaatgaactyatgcggttgtaacataatctcagttgtgacaagttctcctcccatcccttctgggtagttaaaataattacataatagaagtgctaaaggaaaaaactgcttctctactcacaacacttctgacaccaaatgtgtgggttttctgcaccaagaaattctccggttgtctgtggacacaagatggtgtcctataatgtaattcaattctgacattaaaaccaacttagcacagacgccatacatcaagagctcagtcccttaagattgctccccaccttaagatgtcagccacaaatagttgatccacaggttacccacacttct

SEQ ID NO: 574519 - DNA, 637 bp, Homo sapiens
gccaagaagagtaggaggagatgaaaaagaaaggaaataaaggtttttttaattaaataaattaaagaaaaagaaagacaaaagcaagaaggagaactaatgattttcagaattcctccctccagtcttggaaaggatgagcaggaaagactccagtcatatattataggaaatacttagaagagatctctgatgtcctctaagaattaatgctcctgtgatggtaagtagctgatccatcacagtagcaggtgtactggggataaaccaatttgtctagtgaatattgatacattctgacaacaatgaacttatgyggttgtaacataatctcagttgtgacaagttctcctcccatcccttctgggtagttaaaataattacataatagaagtgctaaaggaaaaaactgcttctctactcacaacacttctgacaccaaatgtgtgggttttctgcaccaagaaattctccggttgtctgtggacacaagatggtgtcctataatgtaattcaattctgacattaaaaccaacttagcacagacgccatacatcaagagctcagtcccttaagattgctccccaccttaagatgtcagccacaaatagttgatccacaggttacccacacttct

SEQ ID NO: 574520 - DNA, 637 bp, Homo sapiens
gccaagaagagtaggaggagatgaaaaagaaaggaaataaaggtttttttaattaaataaattaaagaaaaagaaagacaaaagcaagaaggagaactaatgattttcagaattcctccctccagtcttggaaaggatgagcaggaaagactccagtcatatattataggaaatacttagaagagatctctgatgtcctctaagaattaatgctcctgtgatggtaagtagctgatccatcacagtagcaggtgtactggggataaaccaatttgtctagtgaatattgatacattctgacaacaatgaacttatgcggttgtaacataatctcarttgtgacaagttctcctcccatcccttctgggtagttaaaataattacataatagaagtgctaaaggaaaaaactgcttctctactcacaacacttctgacaccaaatgtgtgggttttctgcaccaagaaattctccggttgtctgtggacacaagatggtgtcctataatgtaattcaattctgacattaaaaccaacttagcacagacgccatacatcaagagctcagtcccttaagattgctccccaccttaagatgtcagccacaaatagttgatccacaggttacccacacttct

SEQ ID NO: 574521 - DNA, 514 bp, Homo sapiens
tatgctgtcacagaaagtctggggcaggtgggggatggcttagtamacattagttctttctgaatcaacaggaatattgaacgtgatatctgaatactcaggttagaatgttatttcacttctgtcagtctcccattagcagcgactgattgcaataagctctagattttcagaagtactatatggaaaatgccataaatcagaaattaagacgaagtgcaatttgacaaaagtacattacaattagcattaactttattgattggtctataacagagaactgtttaccaatgcaatctagatgcatctgctcttctataactgcttatttaggtggaagtttatgagttttctatgcaaagtgtcttgccttaaatctctttttctttcatgctagtaaatagaagtaagaagctttctcccttataaatacagaccagaaagaggtcgatagaatgccagttctatgtttttcaagattaatagatgttaataaaatgaagtgataaaattg

SEQ ID NO: 574522 - DNA, 302 bp, Homo sapiens
cttaggttgattccatgtctttgctattatgaataatgctgcaataaacatttaagtacaagtatgctttgatatactaatttcctttggataaatatctggtagtagagttgctggattgtatttttagttttttgggaaatctccatactgttttycatagtggctatactaatttacattcctgtcaatgtgtataaaagttctctttctctgtttccttaccagcatctgtaattttttgtctttttaaaaatagccattttaactggggtaaaacaataactcactgtggttatgat

SEQ ID NO: 574523 - DNA, 490 bp, Homo sapiens
ttgaaactagcctgagcaacatagcaaaaccctgtctctgaaaaaaaaaattaaaagttagttgagtttggtggtatatgtctgtagtcccagctactcaggaagctgaagcaggaggatttcttgagcccaggagttcaaggctgcagtgagmtatgatcacgccagtgccactctagcttgggcaacagagtgagaacccatctcaaacaaacaaaaaaaaagtttgtgtaaaaaaaaaacaccaataaaaagaaattggggccatttacattaactgactcatccaaattctctactcaaaacctgacttttttcactgacatttttgctgccccttaatttttaaaatgtatacattttctttttcctcatgagtatataggtggggtaggagcaacacaaacttggtgcagcctgcacaaagacataattgctatcataacaaattgcagaacgttgggatgctccctttgacaatactgacagt

SEQ ID NO: 574524 - DNA, 490 bp, Homo sapiens
ttgaaactagcctgagcaacatagcaaaaccctgtctctgaaaaaaaaaattaaaagttagttgagtttggtggtatatgtctgtagtcccagctactcaggaagctgaagcaggaggatttcttgagcccaggagttcaaggctgcagtgagatatgatcacgccagtgccactctagcttgggcaacagagtgagaacccatctcaaacaaacaaaaaaaaagtttgtgtaaaaaaaaaacaccaakaaaaagaaattggggccatttacattaactgactcatccaaattctctactcaaaacctgacttttttcactgacatttttgctgccccttaatttttaaaatgtatacattttctttttcctcatgagtatataggtggggtaggagcaacacaaacttggtgcagcctgcacaaagacataattgctatcataacaaattgcagaacgttgggatgctccctttgacaatactgacagt

SEQ ID NO: 574525 - DNA, 490 bp, Homo sapiens
ttgaaactagcctgagcaacatagcaaaaccctgtctctgaaaaaaaaaattaaaagttagttgagtttggtggtatatgtctgtagtcccagctactcaggaagctgaagcaggaggatttcttgagcccaggagttcaaggctgcagtgagatatgatcacgccagtgccactctagcttgggcaacagagtgagaacccatctcaaacaaacaaaaaaaaagtttgtgtaaaaaaaaaacaccaataaaaagaaattggggccatttacattaactgactcatccaaattctctactcaaaacctgacttttttcactgacatttttgctgccccttaatttttaaaatgtatacattttctttttcctcatgagtatataggtgggktaggagcaacacaaacttggtgcagcctgcacaaagacataattgctatcataacaaattgcagaacgttgggatgctccctttgacaatactgacagt

SEQ ID NO: 574526 - DNA, 593 bp, Homo sapiens
ggcctcaaacttcagcaagagaaatttaagtcatgtataataaggactgtaaggcatgttaaatattgctactctatacgagcacasaaaatggcttgtgtgtctattctggtaaaagtcaataataattgttagtataatatatttatggaaatacactccttgtaaaagcataaaatgaatgtggcaataattttgattttgttcttctaattgaagattagggaaaattgtcattttcaggaggtagagctcttcctccttacttgtggggcctcattttataatttaattatttaggctgtattcaaaatggatttagtattcacagtgataggaagagtgaacaaaatgttcttagtgagtaaatttaattcctagtaaaacaagtggaatcaccatctcaactttttgccgatgaacaaaatccaaaattgcatactttcttagatataattgtttcctatttgataataatattttattatattttttgagatggggtctcactctgtggcccaggctggactgcagtggtgcgatcttggctcacagcaaactctgcttctcgggttcaagcaattctcatgcct

SEQ ID NO: 574527 - DNA, 592 bp, Homo sapiens
gaattctgtatattcatctatttctactgtgaaactgtggaggacattttttgttttcctttgtggagaatccactttcctctctctgagtaatggggccctgattttcctgagggaaatatactttctatttttttcccttgtgatttgtgtgaagttggacacatattcagctttcggattgtgaacttgcctcaggttggcttttcaaataattacaatgatgctcaatttcagatttttgctggaactgtaagaaaagaggttctctgtcctgttggcactgttaaactagtaagatataatcctggagttgttgacgactgccttatttctataaaaataattcataataaagtgaacacagagaaaagcasaactgagaatatggagaaagaattatgacactgtgagattctgattccttggcttgttcagttatgtaagctaaattccttttcttctttattaactgaagattgtttaattggtttgataataattgcaactaaaaaaaagcctatttaatagtactgaaaatgaatatccatgaaatttaggaaattaatattgactagcaaacaatgttaag

SEQ ID NO: 574528 - DNA, 416 bp, Homo sapiens
acccttacaaaagtttttgcatgctttacctccttcaatcctgttacccattccataccttacagatgaggagaatgaggctccgagagatgtaataattgcaattattacaaggagatgtagtaacttgcccaagtcatakagccagccaaaggggcacagctggctttgaactctgttttatctcaccacaaatcgggtcctctaagtcactgttactatatttctatgactggactaaagttatttgatcatttgtgtaaacagctgtgttttgaccttacaaattcattttactgtgtgtgtgtctatatagtcatatgcaatttatttattcatcccttcaacaaatacttatcggacacttaccttataccaaaaccatgccaagcacaggagacttaaaaatgaaaaat

SEQ ID NO: 574529 - DNA, 416 bp, Homo sapiens
acccttacaaaagtttttgcatgctttacctccttcaatcctgttacccattccataccttacagatgaggagaatgaggctccgagagatgtaataattgcaattattacaaggagatgtagtaacttgcccaagtcatatagccagccaaaggggcacagctggctttgaactctgttttatctcaccacaaatcggktcctctaagtcactgttactatatttctatgactggactaaagttatttgatcatttgtgtaaacagctgtgttttgaccttacaaattcattttactgtgtgtgtgtctatatagtcatatgcaatttatttattcatcccttcaacaaatacttatcggacacttaccttataccaaaaccatgccaagcacaggagacttaaaaatgaaaaat

SEQ ID NO: 574530 - DNA, 568 bp, Homo sapiens
caccatgtaggccaggctggtcttgaactcctaacctcaggtgaaccacccgcctcagcctcccaaactgctgggattgcaggtggagccaccacaccctgccaaatatagcttttttttaaggactagaatatatcttttatgtctgtaaacaaagttcaaataacagtgaaggatagattgaagaaactgtggtatatcaacacaatagaaatctatgtacctatcatagaaaaggttaatatatctayatattactatagaataatctcaggaatatgtagttaaatcagaaaggaaggtgaaaaagtatgtagagtgtattagtccattttcacactgctgataagtacatacccgagattgggaagaaaaagaggtttaatggacttaacagttccacatgactgaggaggccccacaatcatggcagaaggcaaggtagagcaagtcacatctacatggatggcagcaggcaaagagagagcttgcgcagggaaactcctgcttttaaaaccatcaaatcttgtaagacttattcactatcatgagaacagcctgggaaata

SEQ ID NO: 574531 - DNA, 632 bp, Homo sapiens
ccactttaccctacaggagatgtgttaaaaacaaaactacaggccaggcatggtggctcacacctgtaagccctgcactttgggaggccgaggcaggcggatcacttgaggccaggagttcgagaccagcctgaccaacatggagaaaccccgtctctactaaaaatacaaaaattagctgggcttggtggcacatrcctgtaattccagctacttgggaagctgaggcaggagaatcacttgaacccaggaggcggaggctgcggtgagccgagatcatgccattgcactgcagcctgggcaacaagagcgaacctccgtcttaagaaaaaacaaacaaacaaacaaaaactacacaaggcatacctagaaagcctaaataaaatcaggagtcttataatgtaatatgaaaatgcacaggtttcaatagaaaatgtacttatagcaagaaccaggaagatttcacacagaaaacagacagtgcagagatgcaacactgaaatgacagagatgtaataattacgcaacaaaaattttagagtagccatgtaaaaaatgtttcaatgggcaattatgaacatgcttgaaacattgcaaagaaatagagtctcaacaatgaattacaagatata

SEQ ID NO: 574532 - DNA, 632 bp, Homo sapiens
ccactttaccctacaggagatgtgttaaaaacaaaactacaggccaggcatggtggctcacacctgtaagccctgcactttgggaggccgaggcaggcggatcacttgaggccaggagttcgagaccagcctgaccaacatggagaaaccccgtctctactaaaaatacaaaaattagctgggcttggtggcacatgcctgtaattccagctacttgggaagctgaggcaggagaatcacttgaacccaggaggcggaggctgcggtgagccgagatcatgccattgcactgcagcctgggcaacaagagcgaacctccgtcttaagaaaaaacaaacaaacaaacaaaaactacacaaggcatacctagaaagcctaaataaaatcargagtcttataatgtaatatgaaaatgcacaggtttcaatagaaaatgtacttatagcaagaaccaggaagatttcacacagaaaacagacagtgcagagatgcaacactgaaatgacagagatgtaataattacgcaacaaaaattttagagtagccatgtaaaaaatgtttcaatgggcaattatgaacatgcttgaaacattgcaaagaaatagagtctcaacaatgaattacaagatata

SEQ ID NO: 574533 - DNA, 632 bp, Homo sapiens
ccactttaccctacaggagatgtgttaaaaacaaaactacaggccaggcatggtggctcacacctgtaagccctgcactttgggaggccgaggcaggcggatcacttgaggccaggagttcgagaccagcctgaccaacatggagaaaccccgtctctactaaaaatacaaaaattagctgggcttggtggcacatgcctgtaattccagctacttgggaagctgaggcaggagaatcacttgaacccaggaggcggaggctgcggtgagccgagatcatgccattgcactgcagcctgggcaacaagagcgaacctccgtcttaagaaaaaacaaacaaacaaacaaaaactacacaaggcatacctagaaagcctaaataaaatcaggagtcttataatgtaatatgaaaatgcacaggtttcaatagaaaatgtacttatagcaagaaccaggaagatttcacacagaaaacagacagtgcagagatgcaacactgaaatgacagagatgtaataattacgcaacaaaaattttagagtagccatgtaaaaaatstttcaatgggcaattatgaacatgcttgaaacattgcaaagaaatagagtctcaacaatgaattacaagatata

SEQ ID NO: 574534 - DNA, 561 bp, Homo sapiens
cttagaacataccaaagacaatccaaacaacagcattgcaaagtgggtctgttttatttcattttaaaagccaaagagactcagcaccacgaagctaacctgtttccttaactgggaaatttcacttaatctctgtgacacagaagaaaataatatttagaaagtatctcaatggaagcaatgaagatccccaatatagatcatataggaaaaagcttacccacatgaccaagtttgtagtttattctgaaacttaccctatatctgcatttatactttataagcaaagtctggttgacaggatagataatgcactaaccaatagaaaacaaaaacagtatttgcttttgtattgaagattcaagattaaaaaaataaacattttaaatatgtcttttttcacctttattataattcaagagtacttcatgttcaattgtaaatatcgatttgggacataatttttggaccractcttgtttctgaaatttaaaaaagaagtttgcttcattttgtctagggttttgttttgttttattttcctcaataagaaagaagaaa

SEQ ID NO: 574535 - DNA, 541 bp, Homo sapiens
ggaaacattttaaaattgataattataaaatcaatcaattagaaattatttgttaaatatctattatatttgtaagacaggctagggattttgggatagcaagtatataaaagaaaatttaaaaaactaaaaattgttactattttcaccaaatgtaatgtcactatgattttaaaaacacacaaacatttaaagaataaaatatataagaataaataatattaacagaataaaatctagaaaaagataccgaaaaggctttcagactactgtatatatttttataggtgagatgtttcatactctcaaggataagtagtgagcatcatttattccaagagtaagtaaatgacttaatttgataaatttattagaattcattttatttcttgctcaaattaaacaaaatattatatgcatattaattaactaataaatcctttcattaaatttccaaaaccattcctgtttgaataaaatcttagtagcagattaaaaacaaaaaatatttartggtgaaacactgaaagcagtcccatta

SEQ ID NO: 574536 - DNA, 558 bp, Homo sapiens
gccatattatccagcaatctcacttctggctataaatgtaaaagaactgatatcaagatctcaaagaaatatcttcactcccacatccattgccacattattcacaatagcccagatatggaaaaaatccaaatgtcaattgacttataaagaaaatatggtattcacatacaatggatattataatctttacaaaaatgtaaccctataatttgtgacaacataaatgaaccttgagtatattatgctaaatgaagtaagccaatcatggaggaacaaatgctgcatgatttcacttttctttttcttttttcttttttttttttttttttgagacagggtctctttctgttgcccagkctggagtataatggcgaacgatctcagctcactgcaacctccacctcctaggttcaactgattttcctgccttggcttcccaagtagctggaattaaaagtgcccaccaacacgcccagctaatttttgtattttagtagagatgggatttcgccatgttggccaggctggtcttaaactcctgacctcaagtaatcc

SEQ ID NO: 574537 - DNA, 538 bp, Homo sapiens
cttttgacttcttttacaatctggactcttytatgatacaggtagtgaaaccaaagtaaatggtggaaggattggtacaggattctctttagagaaatgagaaagcaaagaattcagaaagaaattatgatgtatttctgccttttccgcctctcctgcctctccttccacctctttcacctcttctgcctctgctactcctgagacagcaagatcagcacctcttcttcctcgccctcagccaacatgtgacaatgataaggatgaaggtctttatcatgatccacttccacttaataaatagtaaacatattttctcttataatttttaataactttttcctagatactttattctaaaaatatagtatataatacatataacatataaatatgtgttaatagaccgtttatgctattagtatggcttctggtcaacaataagctattagcagttaagttttcagagagtcaaaagttacacacacattttcaactgcaggaagactcactcccctatcccccacagggtcaacta

SEQ ID NO: 574538 - DNA, 551 bp, Homo sapiens
aaatctgctagtgtaatttttgttgttgtgcaaaaacatctgtcaaagtatctgtaatcacccagaatatgttttttgaaagaaaagaagaatatgaacaaggaataacaacataaccatgcccaaggataacaatacattattgctaagctggaaatatgaatagaaatgaaaataatcaatggtttccagtaatcagagaattcattagagaaagacaaacagtaagccaaaaacatctttgtattggatactttttgcagtggatatttattttgtaccactttaaatcctagtggcctcacctcttattctatccattgctctggcaactagcttacrtacgcttagacaattttggagccagtgcatgcccacttcctgcctaggggtccctttgatgttctgactgatgggtacctctgggaatgatgtcagcaatcacttatgaacaagctggaattgctagacagttaatgctccatggggccgtgcttgaccaatggggaacaggaatcatgtaataaaactttctccccttttttcattga

SEQ ID NO: 574539 - DNA, 597 bp, Homo sapiens
agatacaatctcacacccgtcagaatggctattattaaaaagtcaaaaaaataacagatgctggcaaggttgtagagaaaaaggaatgcttatacactgttggtgggaatgtaaattagttcaacaattgtagaagacaatgtggcgattcctcaaagacctaaagacagaaatgccatttgacccagcaatcccattactgggtatatacccaaaagggtataaattattctattataaagacacatgcccaggtatgttccttgcagcactattcactatagcaaatacatgaactcagcctatattgcccatcaatgggtagactggataaagaaaatgcagtacatatacatcatggaatactacatggccataaaaaagaacaagatcacatcctttgcaggcacatggatggaactggggsccattatttttagcaaactaatgcagacacagaaacccaaattgtgcatattctcacttataagtgggagctaaatgatgagaagacatgcacacatacacacaggggcatattggagggtagagaatgagaggggcaagaggatcagggaaaataactagcggatacta

SEQ ID NO: 574540 - DNA, 597 bp, Homo sapiens
agatacaatctcacacccgtcagaatggctattattaaaaagtcaaaaaaataacagatgctggcaaggttgtagagaaaaaggaatgcttatacactgttggtgggaatgtaaattagttcaacaattgtagaagacaatgtggcgattcctcaaagacctaaagacagaaatgccatttgacccagcaatcccattactgggtatatacccaaaagggtataaattattctattataaagacacatgcccaggtatgttccttgcagcactattcactatagcaaatacatgaactcagcctatattgcccatcaatgggtagactggataaagaaaatgcagtacatatacatcatggaatactacatggccataaaaaagaacaagatcacatcctttgcaggcacatggatggaactggggcccattatttttagcaaactaatgcagamacagaaacccaaattgtgcatattctcacttataagtgggagctaaatgatgagaagacatgcacacatacacacaggggcatattggagggtagagaatgagaggggcaagaggatcagggaaaataactagcggatacta

SEQ ID NO: 574541 - DNA, 597 bp, Homo sapiens
agatacaatctcacacccgtcagaatggctattattaaaaagtcaaaaaaataacagatgctggcaaggttgtagagaaaaaggaatgcttatacactgttggtgggaatgtaaattagttcaacaattgtagaagacaatgtggcgattcctcaaagacctaaagacagaaatgccatttgacccagcaatcccattactgggtatatacccaaaagggtataaattattctattataaagacacatgcccaggtatgttccttgcagcactattcactatagcaaatacatgaactcagcctatattgcccatcaatgggtagactggataaagaaaatgcagtacatatacatcatggaatactacatggccataaaaaagaacaagatcacatcctttgcaggcacatggatggaactggggcccattatttttagcaaactaatgcagacacagaaamccaaattgtgcatattctcacttataagtgggagctaaatgatgagaagacatgcacacatacacacaggggcatattggagggtagagaatgagaggggcaagaggatcagggaaaataactagcggatacta

SEQ ID NO: 574542 - DNA, 571 bp, Homo sapiens
taccttatggaatagtttaagccctttctggaatacctcctcattcttctcagtttactagcttagaagagggtaaaatatgaagacaggtctttttgttgatcctagtaaatctgatatccctcagctactgctcwcaactaaataagaagttccattaactgtagataaagatgtcaatgcccagtattaattcaaccattatcaaaatgctgtccagaatacaaagcaaagtaattgaggatgcttatgagccattagtcatgaagcaagcttgacgtatcaaataaagaaaaaagaaaatcaatactgatattttcatctgtaggtttctggaaacaaatgtgaatggcaaagagagaaaaccacagtggatatcatcatacactttggacaagtgtttcaaattttgttctttcatgttaatgaaattgataacacttactagttatatttgaaaatggatttcagaaaatgcattacaactattgtttcatgtagccttattgaaatacaaacttactttaatttttttattttaaaaacattttaaatgtaaaattattgtata

SEQ ID NO: 574543 - DNA, 563 bp, Homo sapiens
attcttcaactggattgcccgaaagcagattakatgtttagttgtagctttcaaatttgcatatatggatttcatacttgcttgtgtctttttctgtctccttcaacttttatttctatatatttatatgtaaccaaaacattttaattaaaaaaacttaatatttatacatatgaaatgttagtttcaccgctatctaaatccaccaaatccataattctcagagtttagttgttttgttcttttttaattattgttttgggagagtggtatagaaatgattccgctttcattaagagtcaaactggctgtttttcttttttcttctgaaagagatttacatgtttgttatcttaccggttataaataataactatgtaacactgaaacaaaataagcacaaaaacttcatgggtatgatttttttttaaagcaaggtatggactattcgttgattcatccattttaccttctttttcaagaagcatttgtgagacaatcacgtttcttttttattattattatactttaagttcagggatacgtgtgcagaatgtgcaggt

SEQ ID NO: 574544 - DNA, 602 bp, Homo sapiens
actacactcttgttctaaccttatgtaattctcatgaagggagcttaaataatcatccttcatattgattttagcaagtacaatgagaaaacacccattttctatttgctacataggtctgccctctgtgggtaagagagcaaacttctcagagagtctcttattgaaaggttagattttgctggaccaacatgtgtacagtttcatgatccctttacttgcaaattttaaagaggctyctttcttttttttttttcttttgatctttagtcccaagtgaatgagcagatttctggtctaattctaacattatgccattgcagagaggaaagattattgcaataagaagaaagtatgctacttactggccttaagtacgttcaagtaaaactgattccttcaagaataataatctaataaatttgcagttctaaaacttttgcaagtagttactaacttgaaagtctgacaaaaatataaagacataagagaaacattttaagacctgatagaagtgagagataaccctgccatgcttaatattttgaacacatagaagtttatattctgtattttccatgtttacatttcttttgaagaaa

SEQ ID NO: 574545 - DNA, 530 bp, Homo sapiens
gttttgagttctgagatgagaaagtacagggagagcagctaacggcaaacattttttgatatattaaattcaaagtatctaccacactgcaagtacagcatgtcaagtagatagttagatatawtaatctggagttttaaggcgcgatatatgcgcaaagatacacttttggcaactgccaacatacacatagactgcatttccaattgtgagtctggattatatattcaaaagagtaatgatagagtcagcagagatccatggaatgaactgaaatactcaaagcttttaaagaataagctaacacggaggtccgagatagagttgtgaaagagttggagaaaaccacagtcaagtggaaaaagcttgccgcttgaaatccactataataactgtactttacacgcacttctaacctcaatagggacagggatttttgaccccacagtgattcagaagcagcaatgtgtaaaggaatagtcatctaagtatttcaagtaagattatgactgagacaagtctttagacaa

SEQ ID NO: 574546 - DNA, 530 bp, Homo sapiens
gttttgagttctgagatgagaaagtacagggagagcagctaacggcaaacattttttgatatattaaattcaaagtatctaccacactgcaagtacagcatgtcaagtagatagttagatatattaatctggagttttaaggcgcgatatatgcgcaaagatacacttttggcaactgccaacatacacatagactgcatttccaattgtgagtctggattatatattcaaaagagtaatgatagagtcagcagagatccatggaatgaactgaaatactcaaagcttttaaagaataagctaacacggaggtccgagatagagttgtgaaagagttggagaaaaccasagtcaagtggaaaaagcttgccgcttgaaatccactataataactgtactttacacgcacttctaacctcaatagggacagggatttttgaccccacagtgattcagaagcagcaatgtgtaaaggaatagtcatctaagtatttcaagtaagattatgactgagacaagtctttagacaa

SEQ ID NO: 574547 - DNA, 530 bp, Homo sapiens
gttttgagttctgagatgagaaagtacagggagagcagctaacggcaaacattttttgatatattaaattcaaagtatctaccacactgcaagtacagcatgtcaagtagatagttagatatattaatctggagttttaaggcgcgatatatgcgcaaagatacacttttggcaactgccaacatacacatagactgcatttccaattgtgagtctggattatatattcaaaagagtaatgatagagtcagcagagatccatggaatgaactgaaatactcaaagcttttaaagaataagctaacacggaggtccgagatagagttgtgaaagagttggagaaaaccacagtcaagtggaaaaagcttgccgcttgaaatccactataataactgtactttacacgcamttctaacctcaatagggacagggatttttgaccccacagtgattcagaagcagcaatgtgtaaaggaatagtcatctaagtatttcaagtaagattatgactgagacaagtctttagacaa

SEQ ID NO: 574548 - DNA, 530 bp, Homo sapiens
gttttgagttctgagatgagaaagtacagggagagcagctaacggcaaacattttttgatatattaaattcaaagtatctaccacactgcaagtacagcatgtcaagtagatagttagatatattaatctggagttttaaggcgcgatatatgcgcaaagatacacttttggcaactgccaacatacacatagactgcatttccaattgtgagtctggattatatattcaaaagagtaatgatagagtcagcagagatccatggaatgaactgaaatactcaaagcttttaaagaataagctaacacggaggtccgagatagagttgtgaaagagttggagaaaaccacagtcaagtggaaaaagcttgccgcttgaaatccactataataactgtactttacacgcacttctaacctcaatagggacagggatttttgaccccacagtgattcagaagcagcaatgtrtaaaggaatagtcatctaagtatttcaagtaagattatgactgagacaagtctttagacaa

SEQ ID NO: 574549 - DNA, 553 bp, Homo sapiens
tgtgttttgttgttgtttgtgtttttttgtktgtgtgtttattttttttagacagagcattgctcttgtcacccaggctggaatgcagtggtgtgatctcggctcactgcaacctccgcttcctgggttccagctattttcctgcctcagcctcctgagtagctgggattacaggcacccaccactatgcctggctaatttttgtagttttagtagaaactacatgttggccaggctagtctcaaactcctgacctcaggtgatctgcctgcttggcctcccaaagtgctgggattacaggtgtgacatttgtccatttttttatctgctgaaatgtttgagttccttggatacttaggatattaaaccccttaaatgagtcatttgcaaatacattctcccatttggtaggttgttttgcactatgttggtggtttcctatgctgtacagaaacttttcagtttgatatactctcatttgtttatttttgcttcagttgcctgtgcttttgagatcttattcataaaatcttttcccaggccaatgttctga

SEQ ID NO: 574550 - DNA, 592 bp, Homo sapiens
gatctctgccctcaagagggttccatctaattaggaggggacagacagactcacaaatggccaaaacagaaagtgaagcccatcacagtcaccagtaaagtgcagagcaagtgagaagagggagggaccttccttcaggggacgggatatctcccattccgtggagctggtggcactggaggcagaccttgaaagatgacactgcagggacgggccggatgcccacccatcccattttctcttcccgggcctgtgttgcaatgaggttagagtcacgtggctgggccatgcgatagagccagtcagaagtggtggaagtgaaatatgccacttccggccaggcgcggtggctcacacctgtaatcccagcactttgggaggctgaggcaggtggatcacctgatgtcgggagttcgaaacagcctgatcaacatggagaaaccgcatctctactaaaaatacgaaattagcmggccgtggtggcacatgcctgtaatcccagctactcgggaggctgaggcaggagaattgcttgaacctgggaggcggaggttgcagtgagctgagattgcgccattgcactccagcctgg

SEQ ID NO: 574551 - DNA, 480 bp, Homo sapiens
tgttgtgattcttttaatgttccaacaaacaataaaagacatgcacacataaagcttaactaattgatatctttcaggagtattaaagagaggcacagaagaatgcttctgcatrggacatgaaaacatacttggtaatcagcgatcatgtggtagcagccacactgtttaagatcatggatcagaaatgtctttaagatgtcaaacaaatgaaaaacaaaaacaaacatttcatggtcatggacaggaaaatcaatattgttaaaatggccatacaccccaaagcaatttatacattcagtgctattcctaccaatggcatttctcacggaattaggaaacacaattttaaaattcatatggtaccaaacaagagcctgaataaccaaagcaatcctaagcaaaaagaagaaagctgaaagtatcacactacccaacttcaaactatactacaagactacagtaaccaaaacagcatgg

SEQ ID NO: 574552 - DNA, 480 bp, Homo sapiens
atgtgagaaaatttttgcaaactatgcatctgacaaaggtctaatatccagcttctataaagaactgaaactaatttacaagaaaaaaccaacaaccccatttaaaagtgggcaaaagacatgaacagacacttttcagaagatgacatacatgcggccaacaatcacatgtaaaaaagctcaacatctcaacattagagaaatgcaaatcaaaaccacaatgagatactatctcacaccagtcagaattgmtactaaaaaaaatccaggggcagttccaagatggctgaataggaacagctccagtctacagctcccagtgtgagcgacacagaagatgggtgatttctgcatttccaactgaggtaccgggttcatctcactggggcttgtcagacagtgggtgcaggacagtgggtgcagtgcatcgagcatgagccgaagcagggtgaggcattgcctcacctgggaagcccaaag

SEQ ID NO: 574553 - DNA, 480 bp, Homo sapiens
atgtgagaaaatttttgcaaactatgcatctgacaaaggtctaatatccagcttctataaagaactgaaactaatttacaagaaaaaaccaacaaccccatttaaaagtgggcaaaagacatgaacagacacttttcagaagatgacatacatgcggccaacaatcacatgtaaaaaagctcaacatctcaacattagagaaatgcaaatcaaaaccacaatgagatactatctcacaccagtcagaattgctactaaaaaaaatccaggggcagttccaagatggctgaataggaacagctccagtctacagctcccagtgtgagcgacacagaagatgggtgatttctgcatttccaactgaggtaccgggttcatctcactggggcttgtcagacagtgggtgcaggacagtgggtgcagtgcrtcgagcatgagccgaagcagggtgaggcattgcctcacctgggaagcccaaag

SEQ ID NO: 574554 - DNA, 480 bp, Homo sapiens
atgtgagaaaatttttgcaaactatgcatctgacaaaggtctaatatccagcttctataaagaactgaaactaatttacaagaaaaaaccaacaaccccatttaaaagtgggcaaaagacatgaacagacacttttcagaagatgacatacatgcggccaacaatcacatgtaaaaaagctcaacatctcaacattagagaaatgcaaatcaaaaccacaatgagatactatctcacaccagtcagaattgctactaaaaaaaatccaggggcagttccaagatggctgaataggaacagctccagtctacagctcccagtgtgagcgacacagaagatgggtgatttctgcatttccaactgaggtaccgggttcatctcactggggcttgtcagacagtgggtgcaggacagtgggtgcagtgcatcgagcatgagccraagcagggtgaggcattgcctcacctgggaagcccaaag

SEQ ID NO: 574555 - DNA, 571 bp, Homo sapiens
tctatatggagggagacagaaagagagatgtcctaaccctccccactcctgctgccaatacctcagaatgacatttggaaaaaggcttgctacaaatataattaattaagttgaggttatactgtaagtacagtgggcccctaagcccatatgactggtatctttataaagccaatatgactggtatctttataaagaagccacgtgaaaacacaggcagacagagagaaccatgaaatgacaaaggcagattgctttgcagttatgcagctgcaagccaggaacaccaaagatttccagcaaaacagcacaagctgggaagaggcaaggaaaaattcctctatagtttttagagggaatatggcctgccaacaccttsattttcgatttttagccttcagaactgtgagacgataactttgttgtttaaaccatcctcttgtggcactttgttatagtagccctaggaaactagcatgtcctgtgtcttggaagtgaatgaaaagaacaccctttctgttcaatggacttaaataggctggaggacaaatgagggagacttttctcccaa

SEQ ID NO: 574556 - DNA, 525 bp, Homo sapiens
aaaattagaaaagtataagtatgctcatttgcccctattctctagaacatagtcattgtgaaacttttggatcttcatccatgaaatgggtgaaaatgtcacatttggtgtcatttcaatttttatgttttatgartgatattatagatacatgagatacataaacgtatctatttgatgcatttgggttttatccaaataaaatatatataaatttattccactgaaacataaatggagatatggcttcatttattgcttcatggatgttcggacatcaattatatgtcccatttcccggtagactaaatttccatataacttaaatttttatagtattatgtaacaaagccttaccattttcagaattggcatatcaatttttttcttattcttgcatttcaaactctttctgaatcttactttttccacatgaactatagaattacctcactaatcttatctcaccccaaaaaattcatgctagtattttagaataaattttattgatacataatttacata

SEQ ID NO: 574557 - DNA, 525 bp, Homo sapiens
aaaattagaaaagtataagtatgctcatttgcccctattctctagaacatagtcattgtgaaacttttggatcttcatccatgaaatgggtgaaaatgtcacatttggtgtcatttcaatttttatgttttatgagtgatattatagatacatgagatacataaacgtatctatttgatgcatttgggttttatccaaataaaatatatataaatttattccactgaaacataaatggagatatggcttcatttattgcttcatggatgttcggacatcaattatatgtcccatttcccggtagactaaatttccatataacttaaatttttatagtattatgtaacaaagccttaccattttcagaattggcatatcaatttttttcttattcttgcatttcaaactctttctgaatcttactttttccacatgaactatagaattacctcactaatcttatctcaccccaaaaaattcatgctrgtattttagaataaattttattgatacataatttacata

SEQ ID NO: 574558 - DNA, 626 bp, Homo sapiens
tattataagcaactggcctatatatactcttcaataataattcatgaatgataaactgtgaataactgtttcagattaaaagacactaaaaagatagcaacaatttaatgtgccacatgattctaggtggaattctagaccagaaattgctttggctataaagtacattattaggataattggtgaaatttgaataagatctgtaggttagataagtatcattaaatcaatgttaactytctgattttggtcattgtactcgactatgtaagataatgtgtttgttttaaggaaatacttaagtatttggggtaaagggacctcacgcctgtaacttgatctcaaataattcagaaataaatacatatatagatagatacatactcacacagtaacggatatggaatggcaaagctaatgggtaaagagacaaagagacaacagctaacgggtacagcatacatagatatagatatagatatagatatagatatagatatagatatagatatagatacacatatagatacacatatagatatatagatatagaatgagaaagaatattcataattggggaactgtgaatacacatgggagaagaaatatttatactatattcttgc

SEQ ID NO: 574559 - DNA, 626 bp, Homo sapiens
tattataagcaactggcctatatatactcttcaataataattcatgaatgataaactgtgaataactgtttcagattaaaagacactaaaaagatagcaacaatttaatgtgccacatgattctaggtggaattctagaccagaaattgctttggctataaagtacattattaggataattggtgaaatttgaataagatctgtaggttagataagtatcattaaatcaatgttaactctctgattttggtcattgtactcgaytatgtaagataatgtgtttgttttaaggaaatacttaagtatttggggtaaagggacctcacgcctgtaacttgatctcaaataattcagaaataaatacatatatagatagatacatactcacacagtaacggatatggaatggcaaagctaatgggtaaagagacaaagagacaacagctaacgggtacagcatacatagatatagatatagatatagatatagatatagatatagatatagatatagatacacatatagatacacatatagatatatagatatagaatgagaaagaatattcataattggggaactgtgaatacacatgggagaagaaatatttatactatattcttgc

SEQ ID NO: 574560 - DNA, 626 bp, Homo sapiens
tattataagcaactggcctatatatactcttcaataataattcatgaatgataaactgtgaataactgtttcagattaaaagacactaaaaagatagcaacaatttaatgtgccacatgattctaggtggaattctagaccagaaattgctttggctataaagtacattattaggataattggtgaaatttgaataagatctgtaggttagataagtatcattaaatcaatgttaactctctgattttggtcattgtactcgactatgtaagataatgtgtttgttttaaggaaatacttaagtatttggggtaaagggacctcacgcctgtaacttgatctcaaataattcagaaataaatacatatatagatagatacatactcacacagtaacggatatggaatggcaaagctaatgggtaaagagacaaagagacaacagctaacgggtacagcatacatagatatagatatagatatagatatagatatagatatagatatagatatagatacasatatagatacacatatagatatatagatatagaatgagaaagaatattcataattggggaactgtgaatacacatgggagaagaaatatttatactatattcttgc

SEQ ID NO: 574561 - DNA, 626 bp, Homo sapiens
tattataagcaactggcctatatatactcttcaataataattcatgaatgataaactgtgaataactgtttcagattaaaagacactaaaaagatagcaacaatttaatgtgccacatgattctaggtggaattctagaccagaaattgctttggctataaagtacattattaggataattggtgaaatttgaataagatctgtaggttagataagtatcattaaatcaatgttaactctctgattttggtcattgtactcgactatgtaagataatgtgtttgttttaaggaaatacttaagtatttggggtaaagggacctcacgcctgtaacttgatctcaaataattcagaaataaatacatatatagatagatacatactcacacagtaacggatatggaatggcaaagctaatgggtaaagagacaaagagacaacagctaacgggtacagcatacatagatatagatatagatatagatatagatatagatatagatatagatatagatacacatatagatacasatatagatatatagatatagaatgagaaagaatattcataattggggaactgtgaatacacatgggagaagaaatatttatactatattcttgc

SEQ ID NO: 574562 - DNA, 584 bp, Homo sapiens
aacagttctgctgtgtttttaaaaaagtatcatttttttcttacagattttataagcattgcttccttgctctccagatctgaattgccatggagaagactgagaactttaagtgacttgatactttccttggttgcctaaagtattgatccttacctttgaagtctagyaaacctaaccaatacatgtctcaaggtttatcattgtaggccaatgtctccagggtatgtctgtcacttcatatataaatatgcatatatatatgtgtgtgtgtgtgtttatatataattatttttctgttttattttaaggatatattttatcaccatgttaaaacaaacttcaaaaacaaaatagaaatgtccactacatgtatgttgtatcttctttattcatcttccattgccatcattttttttctaatccattttaatgctctgtccttgtacattttacttaaatcacttttcttaatcctctcctcgcggtcacttattatgtttttagccaagcattgtctttatttatgtgtctcttccaataggaaacctcatttttgtgagggttttagttttattcctttc

SEQ ID NO: 574563 - DNA, 584 bp, Homo sapiens
aacagttctgctgtgtttttaaaaaagtatcatttttttcttacagattttataagcattgcttccttgctctccagatctgaattgccatggagaagactgagaactttaagtgacttgatactttccttggttgcctaaagtattgatccttacctttgaagtctagcaaacctaaccaatacatgtctcaaggtttatcattgtaggccaatgtctccagggtatgtctgtcacttcatatataaatatgcatatatatatgtgtgtgtgtgtgtttatatataattatttttctgttttattttaaggatatattttatcaccatgttaaaacaaacttcaaaaacaaaatagaaatgtccactacatgtatgttgtatcttctttattcatcttccattgccatcattttttttctaatccattttaatgctctgtccttgtacattttacttaaatcacttttcttaatcctctcctcrcggtcacttattatgtttttagccaagcattgtctttatttatgtgtctcttccaataggaaacctcatttttgtgagggttttagttttattcctttc

SEQ ID NO: 574564 - DNA, 555 bp, Homo sapiens
ctcagggacagaattctgatctccttaggcctgatcccctaggtggaggcgtacccacagtctctgcagactagcagacttagcctctcttcccagtagttctgaggaatccagcccagatgagtgggtttctccccagcgaaacataccctctccaccaagggacaaagtgcttcattaaatgggtcctgctccccatgccacccaactgggtgagaccctccaacaggggttgtcagacacccaatacaggaacaatcctactagcatcaggttggtgcccctcgaggtcagagatcccagaagaagcaggcacccatctttgctgctctcyagcctccttgagtgacatctccaggcacaggaacaaatcagatgaataagtcctgaagtgaagccccagcaaactgcggcagccctgaagaagagagacctgactactgaaagaaaaacaagcagaaagtgacaagaacagcatcaacaacaacaacaaaaaggcccccacaaacactccatccaaggatcagcagcctcaaagacaaactcacaaagatg

SEQ ID NO: 574565 - DNA, 525 bp, Homo sapiens
gggttaaagaagagccatcattatgcctagyataggcacacaatgtgtgtggtgtgtgaaccacccactcattcaactcaaaggtgtcttcaggagctcttgatttagttttcataaactagattatttatatttgatggtagattgctgctgggcatgtgccaaagtaattaacaacacatattttattattaaaacttggattgcataatcatttggtgaacctatgatcaaatacccatcaatgcctcttaaatagttgaccatataatttattaacaaaattaggatgcaagggtaaagcaggactgtgccagaaagcagaatgtataaccactttataatactttacaactctaagcaagccaaggttaatttttttttttgagatggagtttcactcttgttgcccaggctggagtgcaatggcacgatctcggctcactgcaacctccacctcccgggttcaagtgattctcctgcctcagcctcccgagtagctaggcttacaggcaccccccacca

SEQ ID NO: 574566 - DNA, 407 bp, Homo sapiens
ttccccctttacaatttttaacactcttttcttttcaatcctttgaacgtgtagctaacggacagttggtgctcaggaaagcaaatattagcatgagtggttccaaaaaccccttcctttagcaattaacagagagtttacattgctaaaaatatttcaataacacacattttctcaacaagttacttagcacaaataaaccacaaaagtttttaaatatatgaacagcagcacttttgttgcatgtgttttttttaaggtcttggtctgtttagcatttaaaggaaaactcagttgggtgcgggtggagargtactgctcctctgctactttgtattattttgctagtgacctcagctcttgcctgagtttgtactactggtgaagaaaaagtgtttctagtcctc

SEQ ID NO: 574567 - DNA, 457 bp, Homo sapiens
gacacagtatctttagatctttcccttcccagctctctyttcacaatacgtggaccaatatcctcaagttcagtcctgagaaagagctgctgaaagagctcttgcttgcttgaccaccatatggcaccaacagctttctccctaccctcattcaaggttgagtgtcagcccctctttcccttccctatactccagcagatggctggccttttccttacttctataatttcttccactagcagcccttctgattcctggaaatatccatctcctttgctcattcaggctccctcttcaccatggtatgtactgagcagatttgctcttggatttcactttgaccttcgctctaccctgtgtccttggagtgctccacggaaataagagtaacgagttggcagaagatgttaacagacaacccatttcctgcactctcaaacacatccagcctgcacag

SEQ ID NO: 574568 - DNA, 602 bp, Homo sapiens
agcccaggggtcgcagactgccttaaatgattatagcctatgttttcttaactaggctaattaacattagtgaagattaatttgttttgagatcagaccagcagctaagccaaatgaatgaggaaacagctgatttggcaccagcatgttcatgaagaatgaacagtctatggattcagaagctaaattatatatgtactgaatattagtttgggcacttaatagcaacatgactttggcaaattactccaactgagtgtctgtattattcactgtaaaacaaggtaaataatgcattgctggatattttgtttaacttttattttaggtttgggggtacatgagaaggttcgttatataggtaacatcatatcacgggggtttgttgtataaattgtttcattacccaggtattaagcctagtacccaacagtcatctttctactcttcttgctcctcccaccctctaccctcaagtacaccctggtgtctgttgttcccttctttgtgtttatgagttctcgtcattgaattcccttctataagtgagaatgtggtatttggttttctcttcctgtgttwgtttgccaaagataatagta

SEQ ID NO: 574569 - DNA, 603 bp, Homo sapiens
ttatttaatcattcggtgtatactggtgcattaacataatttttgacttattttccaattgatactcaacacatatgtgctgcagttgaggtagaaatcacccatatacttttttaatttttaatttttaacatttctggtcacagagtaggtatacatatttatggagtacatgagatattttgttacaggcatacaatgcataacaatcacatcaagataaatggggtatccatccacatcaagcatttatcctttctttgtgttacaaacaactcagctatagtcttttagttatttttaaatgtscaacaaattattgttaattgtacttgccccattgtcctatcaaatgctagatcttatttattctagctaacaatatttttgaacctattaattatcgtgccccctcccccaccacaatacccttctaagcctatggtaactattattctatcctctgtctccatgagttcaattgttttaacttttacttcccacaaataagtgagaacacgcaaagtttgtatttcagtgcccggcttatttcacttaacataataacctctagttctatccatgttgttgaaaatgatagca

SEQ ID NO: 574570 - DNA, 564 bp, Homo sapiens
cacacccctaaaaataaaaagtgaaccattaaaagtccatcctggaaaggagttgtttgcctttagtcctacaagagatttaaatgtatttcaaagcaaaagaaataaagcagtggcttatttacaagaggataaacagatcactggaagagaagatgtgagcacaaaatcaacctcattctacatgataattgaatatgcagtaaaaagcggcctaaccaaaatgaggaagagaaagattcttcagtaaattgtcatagaatactaactaatgaacagcttttccatttagatttataactcacaccataaaataaaataaattacatatcaactttagataatcagtatcaaatctttaaaattaaatcatttgccaggactctaataaatttagaaatattataaataaatgacaaaaataaatccaaccatctaaaatatacattaccatacaaataaaatccacagagaaataaaaacamtgagaagatgatattcccagtaaaaactgcaaaaagagctatgtttattattgtacaatgcaatgtgattaacaagaaa

SEQ ID NO: 574571 - DNA, 565 bp, Homo sapiens
tagattgcaaatattaaaatacaaggattttgttcacatgtactttccaatttaattcaacctcaaactgcaataagcttacttggaaaaataatagccaattaaaaattttaaatatctagcctgtgatcagaggacaaaaatatattcatttcattaagttcaaaagtgtaattagacatatatctgtgcatggtgtcagaattctgcaggcagttagttatgcaagaccaaatagaaattaaagcctgtgaaataggtgttatgaagttttttcaattgcaacaaaaatacagtcatgcasaataaagatggcaaagccctcaggagaaaatggaacaaatgatagagtataaacacatacctttgtcagaagaaatgggcctaaggttgtattttagtaaatcttagttaaacatatcaagaggatttatgctaaggtttgcaagtaatagagttcttgtaaagcatagggcgtgtgtctcaagatgtcctatataaagtgatttacatgacaagtaagaaagagaaggtttccaaggtttgttttatttaaatgacttgc

SEQ ID NO: 574572 - DNA, 572 bp, Homo sapiens
tgtcctgcacgacctggggttgtctgagcctgaggtgagcttaggtttacaggaggtctgaccgtggcaggaccctctgagcccccactgtgcctgggatgctctccttgcagcacttccccatcctccctggcatggctctccccaccccacctgtctcaaaaagtcccccctccatcctgcaaggccagccctccagcagcctccagatcacctgccttcaaagacccatccccccgcaccaccacttgtgggatgtgcctatctcatgcagtcagcctgggygggctgaaaggaaaggcctcccgtaagaggagccggcttgtgccctgcctcacccactccctgctgtggggagacagtcaggggtcccccaggctgtcaccttggacactgggctccagacaaggaaggagaaaaatcctcctccagacccctgagccagctccctctggtggtctccaggcccggcctctcggggcccagccagctggtcctgaggccagcagagacataggcacatcctcgctttctcccttcctttaaaaagaatttttttttaatttaaaaag

SEQ ID NO: 574573 - DNA, 572 bp, Homo sapiens
tgtcctgcacgacctggggttgtctgagcctgaggtgagcttaggtttacaggaggtctgaccgtggcaggaccctctgagcccccactgtgcctgggatgctctccttgcagcacttccccatcctccctggcatggctctccccaccccacctgtctcaaaaagtcccccctccatcctgcaaggccagccctccagcagcctccagatcacctgccttcaaagacccatccccccgcaccaccacttgtgggatgtgcctatctcatgcagtcagcctgggcgggctgaaaggaaaggcctcccgtaagaggagccggcttgtgccctgcctcacccactccctgctgtggggagacagtcaggggtcccccaggctgtcaccttggacactgggctccagacaaggaaggagaaaaatcctcctccagacccctgagccagctccctctggtggtctccaggcccggcctctcgggkcccagccagctggtcctgaggccagcagagacataggcacatcctcgctttctcccttcctttaaaaagaatttttttttaatttaaaaag

SEQ ID NO: 574574 - DNA, 634 bp, Homo sapiens
acatcattagccattaagaaaatgcacattaaaaccacagtgaggcaaaatggctaaaacaaaacataatatcaacattgaatgctggcaaggatgtggagaaactacattgctcatatactgctggcagaaatgtaaaattgtataactactctggaaaagtttggcagtttttttcttttggaaaaaaaaccccacaaaactaagcacgcaactaccaaacaacctagcatttgtactcctgggcatttatctcagagaaatgaaaacttatgttcatatgaagacctacatatgaatgttagcagctttattaataatagtcccaaactggcaacaacctaaatgtctatcaatgggtgaatggttaaacaaaatgttaaatccatatcatggaatactattcagcaataaaaagaaacagactattgatacagacaatgacttgtattaatctccagagaatgatgctaagtgaaaaaagccaatacctaaagaagtggagagcatattttggttgctatggtttgaatatgtgcccctccaaaactcatgttgaagcttaatccccaatgtggcagyattgagaggtggagccttaaagagatgactgggtcatgagggctctgctctc

SEQ ID NO: 574575 - DNA, 411 bp, Homo sapiens
ggggtggaggtggtttggggtggggtggtctggggtggaggttgtctggggtggaggtggtctggggtgaggtggtctggggtgtgatggtctgaggttggaggtggtctcaagtgaaggtggtctggtgttgaaggtggtatggggtggggtggtctcgggtggaggtggtctgggagtggaggtggtctgggctggaagtggtytgtttgcctgcattccagctgaaaacaacttcagacaacttcaaggccgggatgagatgagacagaacgaggccctttcataatttcatctaaacacggacaaatcaagatcccggtgccagccatgaaatgccaaacctccccttctctctgctaacaggagctgggccttgcctggggtcagacttttgccagctggtcatgc

SEQ ID NO: 574576 - DNA, 537 bp, Homo sapiens
gctctctagtgtttgtaataaactgcatggcaaaatgaaggaaaggtgggggtaggcggcaagcgagatggatttcttccggtacacccgggagaarcaattaattttactacaaatttggagagggtgaatgttcatggcataccattttgtttctgagagaagactcaagcaagtcattaccttcattcttcttggtaccactgagtttttgcccccacattggaaaagtaacctctcctacttgcctgccatggggaaattcatttttgctgagtgaaggtttatgggctgaaaaaaagagccttgggaaataattcagtaaaatacaggactctgagaggtgaagcaggcagcagcctaggttacaaacataatctctaagcagagccagtaaaataaaacaaaaccactgtttcagacgctgtatttctggctaaggtttcactctgcaataactttcaaagttactcgttttagtcaacattataagggtaagtcaacatttgtcctggcagcaagcccaaatctgttatt

SEQ ID NO: 574577 - DNA, 489 bp, Homo sapiens
acacacacttaatgcatgcgaggcttaaaacatagatgacaggttgataggtgcagcaaccccccatggcacatgtacacctatgtaacaaacstgcatgttgtgcacatgtatcctagaacttgaagtaaattttttttaaaagagtcatatagatcagaaaggaaaaaataaatctgctttaattcacagatgatatgattatctacatagaaaatactaagagtatacaagaaaaagcgtctagatctataacgagtttagcgagtgtattagtctgtttttacactgctgtaaagaacttccctgagactggataatttataaaggaaagaggcttaattgactcgcagttccacatggtttgggaggtctcaggaaacttacaatcatggtggaaggtgaaaaggaagcaaggaccttcttcagatggcagcaggagagagaagagaaagagaagggggaagagccccttataaaaccaagaga

SEQ ID NO: 574578 - DNA, 489 bp, Homo sapiens
acacacacttaatgcatgcgaggcttaaaacatagatgacaggttgataggtgcagcaaccccccatggcacatgtacacctatgtaacaaacgtgcatgttstgcacatgtatcctagaacttgaagtaaattttttttaaaagagtcatatagatcagaaaggaaaaaataaatctgctttaattcacagatgatatgattatctacatagaaaatactaagagtatacaagaaaaagcgtctagatctataacgagtttagcgagtgtattagtctgtttttacactgctgtaaagaacttccctgagactggataatttataaaggaaagaggcttaattgactcgcagttccacatggtttgggaggtctcaggaaacttacaatcatggtggaaggtgaaaaggaagcaaggaccttcttcagatggcagcaggagagagaagagaaagagaagggggaagagccccttataaaaccaagaga

SEQ ID NO: 574579 - DNA, 489 bp, Homo sapiens
acacacacttaatgcatgcgaggcttaaaacatagatgacaggttgataggtgcagcaaccccccatggcacatgtacacctatgtaacaaacgtgcatgttgtgcacatgtatcctagaacttgaagtaaattttttttaaaagagtcatatagatcagaaaggaaaaaataaatctgctttaattcacagatgatatgattatctacatagaaaatactaaragtatacaagaaaaagcgtctagatctataacgagtttagcgagtgtattagtctgtttttacactgctgtaaagaacttccctgagactggataatttataaaggaaagaggcttaattgactcgcagttccacatggtttgggaggtctcaggaaacttacaatcatggtggaaggtgaaaaggaagcaaggaccttcttcagatggcagcaggagagagaagagaaagagaagggggaagagccccttataaaaccaagaga

SEQ ID NO: 574580 - DNA, 439 bp, Homo sapiens
aaaatgaaatatataaaaaataaaaattaaaaaaagtgagttcttaacacatacasagaaaaaggtaactatgtcaagggaggaatatgttaagttgcctgattttggtaatcatttaacaatgtatacttatgtcaaatcaacaaattgtatcccttaagtatatacaatttctatttgtaaattataccccaataaggtgagaagaaaaaataaatataaacatgaaattgggaatatcatttataactataagggatacaaagtttggaggtggggataagcgggagaaaatgtttttgattttagatattgctacttttttaaaaggctgaatggtatcctatggtataaacaagccataatttaaatattgcccaattgttgaatatttttcttatctccattttttccatcataataaatactttaataaatg

SEQ ID NO: 574581 - DNA, 574 bp, Homo sapiens
atatagtttgctttgtcatgcatattcccattgcagtgccctcctccctaagatgtgtctttttcctttagagagcctttctctgtttgttatttaggtttacaatgagaaggcgtgtaaagtatttttactgtcttcctaggaaaaaatcactgacttacagtatttatatttatttatttacattcctggggatgaggarttaaagatttcatacattttcttattgagaagatccaagttttcatgtgagcaaaactgaatatgtaaattgatatttaaattatgctgcagataatatggtcaaatgtttacttgtatttaatttgttacacatgaatattgcatatgtaagataatatactaagaaattatcacatttaatgaaatgctttaatcaaattcctgattgaatttttgatatcaatatctttttcattgtttaatccatctttagggtgaacagggctttataggccaaagttatcacttctgtctaaattgtctgagttacagaactttttgaatttattatgttgtcacaggaagtttcttattgctgtttaaaggagtg

SEQ ID NO: 574582 - DNA, 574 bp, Homo sapiens
atatagtttgctttgtcatgcatattcccattgcagtgccctcctccctaagatgtgtctttttcctttagagagcctttctctgtttgttatttaggtttacaatgagaaggcgtgtaaagtatttttactgtcttcctaggaaaaaatcactgacttacagtatttatatttatttatttacattcctggggatgaggagttaaagatttcayacattttcttattgagaagatccaagttttcatgtgagcaaaactgaatatgtaaattgatatttaaattatgctgcagataatatggtcaaatgtttacttgtatttaatttgttacacatgaatattgcatatgtaagataatatactaagaaattatcacatttaatgaaatgctttaatcaaattcctgattgaatttttgatatcaatatctttttcattgtttaatccatctttagggtgaacagggctttataggccaaagttatcacttctgtctaaattgtctgagttacagaactttttgaatttattatgttgtcacaggaagtttcttattgctgtttaaaggagtg

SEQ ID NO: 574583 - DNA, 574 bp, Homo sapiens
atatagtttgctttgtcatgcatattcccattgcagtgccctcctccctaagatgtgtctttttcctttagagagcctttctctgtttgttatttaggtttacaatgagaaggcgtgtaaagtatttttactgtcttcctaggaaaaaatcactgacttacagtatttatatttatttatttacattcctggggatgaggagttaaagatttcatamattttcttattgagaagatccaagttttcatgtgagcaaaactgaatatgtaaattgatatttaaattatgctgcagataatatggtcaaatgtttacttgtatttaatttgttacacatgaatattgcatatgtaagataatatactaagaaattatcacatttaatgaaatgctttaatcaaattcctgattgaatttttgatatcaatatctttttcattgtttaatccatctttagggtgaacagggctttataggccaaagttatcacttctgtctaaattgtctgagttacagaactttttgaatttattatgttgtcacaggaagtttcttattgctgtttaaaggagtg

SEQ ID NO: 574584 - DNA, 600 bp, Homo sapiens
cctctaatcccctaagaattatgaacagtatcacaggggagtgtatacttcctactatattkggagtaatatcatcctgtcgtcttctaaatattatgaacaatattacaggggatgtaacactccctgcgatatgtggagtaatatcatcctctccttccctaaatattgtgaacaatatcacaggaggttgtacacaatctgcgatattgtttgtagtatccagtgggaaagaggatgctattactccccatatcacaggggtgtacacccccactgtgatatattcaataacatccagaagtaatattactgacaaaattgcagggggtgtaaaccccacctgtgataacgttcctaatatccctgggaagagaggatgatattattcccaatattgcagggagtgtacacccaccctatgatattgttattaatacccaggaggggagacaatggtattactcacagtatcaaagaggttgtacagcccccctgtgatagtttctaatatccagggggtgtataccacccttgtgatattgtttctaatatgtagggggaaggacaatgatattactgtcagtatcacagggggtg

SEQ ID NO: 574585 - DNA, 600 bp, Homo sapiens
cctctaatcccctaagaattatgaacagtatcacaggggagtgtatacttcctactatatttggagtaatatcatcctgtcgtcttctaaatattatgaacaatattacaggggatgtaacactccctgcsatatgtggagtaatatcatcctctccttccctaaatattgtgaacaatatcacaggaggttgtacacaatctgcgatattgtttgtagtatccagtgggaaagaggatgctattactccccatatcacaggggtgtacacccccactgtgatatattcaataacatccagaagtaatattactgacaaaattgcagggggtgtaaaccccacctgtgataacgttcctaatatccctgggaagagaggatgatattattcccaatattgcagggagtgtacacccaccctatgatattgttattaatacccaggaggggagacaatggtattactcacagtatcaaagaggttgtacagcccccctgtgatagtttctaatatccagggggtgtataccacccttgtgatattgtttctaatatgtagggggaaggacaatgatattactgtcagtatcacagggggtg

SEQ ID NO: 574586 - DNA, 600 bp, Homo sapiens
cctctaatcccctaagaattatgaacagtatcacaggggagtgtatacttcctactatatttggagtaatatcatcctgtcgtcttctaaatattatgaacaatattacaggggatgtaacactccctgcgatatgtggagtaatatcatcctctccttccctaaatattgtgaacaatatcacaggaggttgtacacaatctgcgatattgtttgtagtatccagtgggaaagaggatgctattaytccccatatcacaggggtgtacacccccactgtgatatattcaataacatccagaagtaatattactgacaaaattgcagggggtgtaaaccccacctgtgataacgttcctaatatccctgggaagagaggatgatattattcccaatattgcagggagtgtacacccaccctatgatattgttattaatacccaggaggggagacaatggtattactcacagtatcaaagaggttgtacagcccccctgtgatagtttctaatatccagggggtgtataccacccttgtgatattgtttctaatatgtagggggaaggacaatgatattactgtcagtatcacagggggtg

SEQ ID NO: 574587 - DNA, 553 bp, Homo sapiens
gacaggcctaaatccaaccttagcaatgattagttacaatgtaastggacaaatactctacttaagacagagactgccagacctgagaggaaggcaagacccaacaatatggcatccacagagacacaatttaaacacaaagacacaaagtatgagaaaaatatgctatgcagacactaaacataaaaatatgctatccagacactaatcataaaaagcttcaacagagatgttaacactagatgaaagaggcttcagaacaaaatatatcaccagaaataaacagggtaatttaataaaaataaaagaatcagagaggatgatgttacaattataaattgtgcctcaaagtgcacacaaactacacacacacacacagagcctcaaagtatgtgaatcaaaaacaacagaacaaaagcaggaaattgacaatccaaaattatagctagtgaattaatactgctctctcagtaactgatggaacaaccagatgaaaatataggaaaatacggatctaaatgacaaaatcctgacccaaatggtacttggcagt

SEQ ID NO: 574588 - DNA, 553 bp, Homo sapiens
gacaggcctaaatccaaccttagcaatgattagttacaatgtaactggacaaatactctacttaagacagagactgccagacctgagaggaaggcaagacccaacaatatggcatccacagagacacaatttaaacacaaagacacaaagtatgagaaaaatatgctatgcagacactaaacataaaaatatgctatccagacactaatcataaaaagcttcaacagagatgttaacactagatgaaagaggcttcagaacaaaatatatcaccagaaataaacagggtaatttaataaaaataaaagaatcagagaggatgatgttacaattataaattgtgcctcaaagtgcacacaaactacacacacacacacagagcctcaaagtatgtgaatcaaaaacaacagaacaaaagcaggaaattgacaatccaaaattatagctrgtgaattaatactgctctctcagtaactgatggaacaaccagatgaaaatataggaaaatacggatctaaatgacaaaatcctgacccaaatggtacttggcagt

SEQ ID NO: 574589 - DNA, 553 bp, Homo sapiens
gacaggcctaaatccaaccttagcaatgattagttacaatgtaactggacaaatactctacttaagacagagactgccagacctgagaggaaggcaagacccaacaatatggcatccacagagacacaatttaaacacaaagacacaaagtatgagaaaaatatgctatgcagacactaaacataaaaatatgctatccagacactaatcataaaaagcttcaacagagatgttaacactagatgaaagaggcttcagaacaaaatatatcaccagaaataaacagggtaatttaataaaaataaaagaatcagagaggatgatgttacaattataaattgtgcctcaaagtgcacacaaactacacacacacacacagagcctcaaagtatgtgaatcaaaaacaacagaacaaaagcaggaaattgacaatccaaaattatagctagtgaattaatactgctctctcagtaactgayggaacaaccagatgaaaatataggaaaatacggatctaaatgacaaaatcctgacccaaatggtacttggcagt

SEQ ID NO: 574590 - DNA, 529 bp, Homo sapiens
caagtaataatgagttgttttacttcagaatagataactggaacagaatatggcagctggaaatgagctgctctggtaatcagaagctacaatatgtgacacgactgtgaggctgacctgtaactgggcctcaaggrgaccattcatgcaaccaggaagggcatcaagactcttggtcagggcctgaaggacggtgagaaaatgtcattggaaactggagaaaaggcctgagagttacgtgctgagggactgtgggaaaactacggccacaacatggaaactgaaaggacactgcaccatctcagggatctgcctaaggagacatctgggaagaacatggaaagtgctaccagcctcccctaactgtcactgaataaatatgacaggagagggacatgatctaaagaagaaggttcagttttcaaacagaatttagagaaaatataaagaaataatttcttatctcaaaaggccaaagtaaaaaaaaagaaaagaaaagaaaaggaaaaaaaatgaaaaagaagccatt

SEQ ID NO: 574591 - DNA, 519 bp, Homo sapiens
aatgtttaaactataaacatatattatatatgttagcatattgtatacattgcatattaacataagctagaatcattgacataaatttatataaacaaaaggtgtaaaatatgacaatgttcttcttgatttttgtctttgcatatttctttattggcatttgtcaaatgtgacccactaactcctgaatgctttctctctccccattgattcataaggatgtcaccacagtgttggccagatgcacaggtcacaggggactgaatctcatcaccccacaaacataccattcaggttttgccaagaatgacactgtaaatgtaacaaagcttccgtgcttgttagtgaacaccaactcagctcctctcctgtattcagaaatcaggacgagatgaaaacaacaagcaggccaggcacggtggctcacgcctgtaatcccagcactttgggaggacgaagcatgtggatcacctgaggtcgggagtttgagaccacsctgatcaaaacagagaaacccca

SEQ ID NO: 574592 - DNA, 574 bp, Homo sapiens
ttactccccacaccccattatactgttcttaatatccagatttggagaggatgatattactcccaaaatctcaggaggtgtagaccccttctgtgatactgtttcttatatccaggggaagactagatgatagtactcccaacagtgcagggtgttacacgccaccccccatgatattgtctctaatatcaagttggggagagggtgatattgctccaaatagtgtaaagggtgcacaccagcactgtgatattattcctagtatccagagaaggagagaatggtattatttttaatatcacagagggtgcacaccccccttgtgatactgctcctaacatccaaggggtagaggatgaaattactcccaatatcacagtgggtatacaccccccgtggtattgttcctaatatccagggggtataggatgatagtactataaatatcgcaaggggtgtacaccccttctgatattgttactaatatccgtggggggagtcgatgatattacttccaatatcacagggcatgtacaccccmcttgtgatattgttcctaatatcctgggaggag

SEQ ID NO: 574593 - DNA, 513 bp, Homo sapiens
attgggtgcacattgtcataaacacgggaataatagacactggaaaataagaacggggagggacagagtgggccagggttgaaaaactacttcttgggtcctatgctcactacctgtgtgatgagttcwattgtgctgcaaacctcggcacccctaaatatgcctttgaaagaaacctacagaggtaccacgttaatttagaatacaaactagaaaaaaaagagaaaagtttactataaatagagaacagaaatttctttttaagataaaatttattgaagtaaaaaatgggttaaactttcataaagggcagagttttctaagaatttcaaagcaatccattcattgcaaaagatggctttaattacttaattttttttttttgagacagggtctcactctgtcaccaggctggagtgcagtggtgcagtcttggctcactgcaacctccacctcctggcttcaagcaattctcctgccttagtatcccaagtagctgggactacaggtgcg

SEQ ID NO: 574594 - DNA, 513 bp, Homo sapiens
attgggtgcacattgtcataaacacgggaataatagacactggaaaataagaacggggagggacagagtgggccagggttgaaaaactacttcttgggtcctatgctcactacctgtgtgatgagttcaattgtgctgcaaacctcggcacccctaaatatgcctttgaaagaaacctacagaggtaccacgttaatttagaatacaaactagaaaaaaaagagaaaagtttactataartagagaacagaaatttctttttaagataaaatttattgaagtaaaaaatgggttaaactttcataaagggcagagttttctaagaatttcaaagcaatccattcattgcaaaagatggctttaattacttaattttttttttttgagacagggtctcactctgtcaccaggctggagtgcagtggtgcagtcttggctcactgcaacctccacctcctggcttcaagcaattctcctgccttagtatcccaagtagctgggactacaggtgcg

SEQ ID NO: 574595 - DNA, 457 bp, Homo sapiens
catctctttttcactggctctacactttcttaagttttgccatcctcatggaactgtcagccagcacactgaaacgattctcagaaaacaaaagcatcatcaagttctcagggtttcggtagagattgaaggccaacagacctaagactcattcagaaatacttagctgagcaataacccttcataagcagtcacttgacaggtgacattttaaatctcctgtcaattactatgtcattggcttacacttgttctcaggaaaagttccaaatttttcaccatgaaatraaaacacccatatcaaagtaattctcgtcaagttactcagccttgtctctcgccacttactgcactctgtcctttgctctagcaccaaactggatggagtggaactctgcagggctcttcctcacctctggctctttgccttcccctcttccctctatctgggaagctt

SEQ ID NO: 574596 - DNA, 395 bp, Homo sapiens
aaaatagcgagatgctgactctacagaaaaaataaaagttagctgaccatggtgttgcatgcctgtaattaacagcttcttgggaggttgaggtgggaggatcccttgagtgcaggaggtcaaggttgcagtgagctgtgatcatgccactgcacttcagcctgagtgacaggcagagacattggcgcaaaaaaatttcaaaaatacattaaaatgtcttgtatagacatttatccatttacatttacttatttttgacagtttatctaragtatttgtgagaactgaggtattagacaaagctagtcatcatttctaggttattttcttgttaaccatgttatagcctgtgaatatcaggtgttcacataagtgaggatttcaaagttatatac

SEQ ID NO: 574597 - DNA, 408 bp, Homo sapiens
ccaagtaaccttgaattggtaacaccacagacagtaagtcttatctcaacaccagtagacaaatcagcagattcaaagtaggcagggaaaraaaaagataggcaaaagaactgagactttttcattttagggtttttaaaaatagtaactatttgagttttgaattttctttcatgtaatttggccgtcaggtttaaagtgtgcactagagaccaggtgcagtggctcattcatgtaatcccaacactatgggaggctgaggcaggtggatcacttgaggccaggagtttgagaccagcctggccaacgtgacaaaaccccatctctactgaaaatacaaaaattaactgggtgtggtggtgtgcacctgtagtcctagctattcaggaggctgaggcaggataatcg

SEQ ID NO: 574598 - DNA, 436 bp, Homo sapiens
acctgtagttctaactatttgggaggctgaggtgggagggttgcttgagcctgggaggttgaggctgcaatgagctgtgatcatgccattccactcctgccagsgcaacagagtaagaccgtgtgtcaaaaaagatcattttttataaataatttataatttcgaattttggtaacaaacacataccttaaaatttaccatcataaccagttgtaagtatacagttttgtagagttaagaatatttacattgttgtgcagcagatttctagattttttttttatcttggaaaactctatacccattcaacaactattaatttccccttccttccacctcctggcaagtactattctactttgtgtttctaaaaatttggcttatatacctagggttatataatatttgttttttaagtaggttccatgttatgtgc

SEQ ID NO: 574599 - DNA, 436 bp, Homo sapiens
acctgtagttctaactatttgggaggctgaggtgggagggttgcttgagcctgggaggttgaggctgcaatgagctgtgatcatgccattccactcctgccagcgcaacagagtaagacygtgtgtcaaaaaagatcattttttataaataatttataatttcgaattttggtaacaaacacataccttaaaatttaccatcataaccagttgtaagtatacagttttgtagagttaagaatatttacattgttgtgcagcagatttctagattttttttttatcttggaaaactctatacccattcaacaactattaatttccccttccttccacctcctggcaagtactattctactttgtgtttctaaaaatttggcttatatacctagggttatataatatttgttttttaagtaggttccatgttatgtgc

SEQ ID NO: 574600 - DNA, 436 bp, Homo sapiens
acctgtagttctaactatttgggaggctgaggtgggagggttgcttgagcctgggaggttgaggctgcaatgagctgtgatcatgccattccactcctgccagcgcaacagagtaagaccgtgtgtcaaaaaagatcattttttataaataatttataatttcgaattttggtaacaaacacataccttaaaatttaccatcataaccagttgtaagtatacagttttgtagagttaagaatatttacattgttgtgyagcagatttctagattttttttttatcttggaaaactctatacccattcaacaactattaatttccccttccttccacctcctggcaagtactattctactttgtgtttctaaaaatttggcttatatacctagggttatataatatttgttttttaagtaggttccatgttatgtgc

SEQ ID NO: 574601 - DNA, 436 bp, Homo sapiens
acctgtagttctaactatttgggaggctgaggtgggagggttgcttgagcctgggaggttgaggctgcaatgagctgtgatcatgccattccactcctgccagcgcaacagagtaagaccgtgtgtcaaaaaagatcattttttataaataatttataatttcgaattttggtaacaaacacataccttaaaatttaccatcataaccagttgtaagtatacagttttgtagagttaagaatatttacattgttgtgcagcagatttctagattttttttttatcttrgaaaactctatacccattcaacaactattaatttccccttccttccacctcctggcaagtactattctactttgtgtttctaaaaatttggcttatatacctagggttatataatatttgttttttaagtaggttccatgttatgtgc

SEQ ID NO: 574602 - DNA, 334 bp, Homo sapiens
  misc_feature 1, 2, 3, 4, 5, 6, 7, 8, 9, 10, 11, 12, 13, 14, 15, 16, 17,18, 19, 20, 21, 22, 23, 24, 25, 26, 27, 28, 29, 30, 31: n = A,T,C or G
nnnnnnnnnnnnnnnnnnnnnnnnnnnnnnnaattctaaattatgaaatyattctcatatgtaagatactgctatatgacaattcaagatttctttcttcctaagttttttattaaaataagggttactaagtgttaatatcttggtagatatatgtgattaagactactagatacaagagaaacaattctgtatgcaaaatgtatacgggtttttctttcagagaaattaaattcgcttagagatttttaaggattattttaaattgaaggaataaaaaagatagataaaactaaatgtgtataaaaagttggggaagatggaaaaaattata

SEQ ID NO: 574603 - DNA, 334 bp, Homo sapiens
  misc_feature 1, 2, 3, 4, 5, 6, 7, 8, 9, 10, 11, 12, 13, 14, 15, 16, 17,18, 19, 20, 21, 22, 23, 24, 25, 26, 27, 28, 29, 30, 31: n = A,T,C or G
nnnnnnnnnnnnnnnnnnnnnnnnnnnnnnnaattctaaattatgaaatcattctcatatgtaagatactgctatatgacaattcaagatttcttkcttcctaagttttttattaaaataagggttactaagtgttaatatcttggtagatatatgtgattaagactactagatacaagagaaacaattctgtatgcaaaatgtatacgggtttttctttcagagaaattaaattcgcttagagatttttaaggattattttaaattgaaggaataaaaaagatagataaaactaaatgtgtataaaaagttggggaagatggaaaaaattata

SEQ ID NO: 574604 - DNA, 334 bp, Homo sapiens
  misc_feature 1, 2, 3, 4, 5, 6, 7, 8, 9, 10, 11, 12, 13, 14, 15, 16, 17,18, 19, 20, 21, 22, 23, 24, 25, 26, 27, 28, 29, 30, 31: n = A,T,C or G
nnnnnnnnnnnnnnnnnnnnnnnnnnnnnnnaattctaaattatgaaatcattctcatatgtaagatactgctatatgacaattcaagatttctttcttcctaagttttttattaaaataagggttactaagtgttaatatcttggtagatatatgtgattaagactactagatacaagagaaacaattctgtatgcaaaatgtatacsggtttttctttcagagaaattaaattcgcttagagatttttaaggattattttaaattgaaggaataaaaaagatagataaaactaaatgtgtataaaaagttggggaagatggaaaaaattata

SEQ ID NO: 574605 - DNA, 408 bp, Homo sapiens
aaggctaaagtcaagttgccagcaggactgcatcccttctggaggttctggagagaatatgttcccttgcctttcccagttgctaaagccactgctattctttggctcatggctcctaactgcatcttcaaagccagaagcaaagcatattcraatctccctctgtgacctgtgcttccatcatcaaatctccttcaattcggactctcttacctccctctttcacttataaagacctcttgtgtttgctggacacagaggccgtggctcacaaccataatcccaacagtttaggaggtcaaagcaggagaaacgcttgaggccaaaacttcaagaccagcctgggaaacacggcgagaccccctcaattaaacaacaaaaagaaataagaaaaaattagctgggcat

SEQ ID NO: 574606 - DNA, 408 bp, Homo sapiens
aaggctaaagtcaagttgccagcaggactgcatcccttctggaggttctggagagaatatgttcccttgcctttcccagttgctaaagccactgctattctttggctcatggctcctaactgcatcttcaaagccagaagcaaagcatattcgaatctccctctgtgacctgtgcttccatcatcaaatctccttcaattcggactctcttacctccctctttcacttataaagacctcttgtgtttgctggacacagaggccgtggctcacaaccataatcccaacagtttaggaggtcaaagcaggagaaacgcttgaggccaaaacttcaagaccagcctgggaaacacrgcgagaccccctcaattaaacaacaaaaagaaataagaaaaaattagctgggcat

SEQ ID NO: 574607 - DNA, 406 bp, Homo sapiens
atcagtaatcaataaatcgtcttcaagtcaataaatttccactcctttaggaaaccctgatcttctggtcacaccaaggtttaattaactggtttgattgtttttctgttttcttggattttttttccttcttcctrggggtttctagtaattctagtttgatgtctcactttctccattttttatttcttagttttcttctgtgattattttcactgcagctgcagggcctaatcctgggttagcagagaactagcacttactctgccctaattggaatccaggagagataggaggttccctagtgtgaaaatgtgtttgctcctctctgcttctggtagtctctctgtaggagttctttacgtattctgaatgttcacttcttatgagatacatgatgagcaac

SEQ ID NO: 574608 - DNA, 214 bp, Homo sapiens
gtattctcattactctgtttcactttttgtagttgtcccacagtcttgaatatcatcttctgttcttttcagtgtttcttttctttagttttygaagtttctgatgataaatcctcaagctcagagatttttactgagctgagtccagtctactaataagccatcagaggtattcttcagttatttaccacgtttttcatcactacattatgtt

SEQ ID NO: 574609 - DNA, 342 bp, Homo sapiens
ttttctttagtttttgaagtttctgatgataaatcctcaagctcagagatttttactgagctgagtccagtctactaataagccatcagaggtattcttcagttatttaccacgtttttcatcactacattatgttgaaagttcttacgatgtttgtctttctgatwacattacccatctacacttgaatactgtctacttcattcattaggcccttagcatattctccagaggtttaaaaaaaattccaaagtcatatctttgtctgcttctgaagcttgctcttttgacacaaattatatttttttctttttttggattttagtatgccttgcaattttt

SEQ ID NO: 574610 - DNA, 565 bp, Homo sapiens
tatccatagcactcaaaggcagaatgccaaggatctgcagacctacagggccttctaaaaatatgtcaggcctgaaaaaatcatcagctccaaaacacgaaaagaaaactgcaaagtgaaaattaataaatatttaattaaattttaattaaatgcctacaaatgcataacctatgtcaacttcattaattgttaaaatttgaattcataaaaaatgtcatgatgcatgagaacaattttaggttatattttctcactttgcaagaatccataagttatgattaatgcagtacaatcagagccaaatgtaattttattataagtcacttctagcaaaataatttcaaaagcaatattataccaatcctttaaaactgtttactgcaaaaagtcatttggtgtgttgtttgggtgttatatctgagaaaggggrggcaaagtgtctgactgaagtcagagggaatcttcaggggcaatggagatatgacccagagagactttgtttaatgtcttcattccccatgaagtcttcagggagaagtctaatatcttgtggagttaaaac

SEQ ID NO: 574611 - DNA, 583 bp, Homo sapiens
tgaagttgtgaagtgaaatataaaagggaaagtggttttagagcctgtgacatttcacactattccatcagcaataaagatatataaatcaaccttctggaatgccatttgggaatttcaaaatactaatacctatactatgaaataattatgaaataagatatgtaaagtcaacaatgaaactaacacaggaatatatttctttttgttactgaccccttttccattattaatgaaaaaattttaatttgaagggatgatatatatgttgcacaaacaggaattctggttgtttgtaaattggaatcctgtattgttcttatacctgataaaatagctggtgaatttatttcatcctaagttttaggcatacttaagtaatcacatcaaaattattwctatttttacaatccactttcttctcctatttataaattattggacttttatattgttgctttgaagcacacttactttgttgatcatcccaattatacattaaaggaatggttcagttgatgcaatctttgtgtgataggcagaaaacagccaaatagaaaatctcaaaaagagaaacactaat

SEQ ID NO: 574612 - DNA, 578 bp, Homo sapiens
tgccttatctactctcatgatatttcacacagcattgtctctgaccagggaactgacttcacaggcaaagaagtgtggcagtgggctcatgcttatggcatttagtggtcttaccatgttccctattatcctgaagcggctggcttgatagaagagtggaatggctttttgaagtcacaattacaatgccggctaaggcaaagttctccagaaggctgtgtatgctctgaatcacatccaatatatggtactgtatctcccatagccagtatttatgagtccaaggataaaggggtagaagtggcagtggcaccactcgccataacccctagtgacctgccagaaagtttgtgtttcctgttcccatgatattatgtttttctggcctagaggtcttagttccagagggaggaatgttgcaccaggagacacaacaaygattccattgaactggaagttgagacaactgctacctggccactttgggctccacctgcctctaagtcaagagactaagaaaggagttacagtgctggtttgggtgactgacctggactaccaagatgaaatcagactac

SEQ ID NO: 574613 - DNA, 501 bp, Homo sapiens
tggttctgtccctcaggagaactgtgagtaatatattatttatatttaaggttgcagttttgagtgaggcccagagcaagtgaaggctacacagcaggcctagactgcattacaattttttctggcatatggatcttaggatgcagcagacccaatggtcctgaatggaaccgtgacagatgcctcctcagatctctggcaagtcccaacaggagaataccagcacattcctcttgaaattcagattaaatgcatgcccctttctgccatttgaaaagctgctcctggtgtataactgagtcytggtaaattctaaatgcctaaatatgggagactaagtgattttgggtcccaagctgaccaaacatgggaaaaaagacaaaacacatactgagggataaaaggaggcaactgattattttatgtttattcttctaatttagtattttactcttttctacctgttctgttccttgagatgctgaaagtatcccctgggct

SEQ ID NO: 574614 - DNA, 584 bp, Homo sapiens
tcccctgtttctattccttggaatcttcatcattctcttctgttgctcttagccatccttatacctctataaatagttcctttattcgattctcaaccattactacttttggtatgcagacagttcccctatcgcctagaataaatgacagagcagaaagaagaccatatcaggtcacatatgtactttttagtaagagataaataaaatctatctcttttaaagacactgtcactttggggttttctattataagcagtcaaacattatcctcaatgctataacacctcactttgataattccacctttcatttgtttggaaagtgcttttcgtcatgtcttttttgttggcattgtcctagcacccattatgtcccttagacacctctgcatcctctgaatgtcaatagacttggtgcctttacccctcattttgagttagaatctctaactgtaccattatcttccrtccatgtaccatcctctgttcctcatctaaaatttagcaaacatgtcctgaactcagtagttatcaatatatgctattgataagaatggtactttccccatttatttaggaaga

SEQ ID NO: 574615 - DNA, 623 bp, Homo sapiens
actgcccctcccaaagaagcttaggcctttgtctcatatgaaagtagaatccacagacgtgtgcagtattttaaaagtcatcaatcacttcctgcattccctcttcatggataagctcttcctggtttattatcctggtcccaattttgctcatgagcacttgatagaaaccacggggaaaagcttgagagagaatggaaacattttttgtgtctggagccccttaatattctggacttatatatctgccttgtgttttgtttgttatatggttttctgatgttgtcttacaatttacatggtaggtggaatgtctttcttcttttttctgccattggtgaaacaatttatgaatttatatcttcttrtaggtttttattccttcttggaattcaggtcacttggtttccttgtgaatttaaggctctgatggattcaaaaaggttataattttgtagaatatttggattcttattattagcatgggagcaacacattttgtagcattttttttctgtctgaaatagtaggtttaggatacatggatgaggataaagataataagctcatcgatgtttatagtttcatttttaatatcctggaagctatatcagaatgtaaga

SEQ ID NO: 574616 - DNA, 610 bp, Homo sapiens
ggctctgatggattcaaaaaggttataattttgtagaatatttggattcttattattagcatgggagcaacacattttgtagcattttttttctgtctgaaatagyaggtttaggatacatggatgaggataaagataataagctcatcgatgtttatagtttcatttttaatatcctggaagctatatcagaatgtaagaaataatccgctatttttttcctgtaaaaatgtgtattatttattgagaaaaggattaatataaaagtatagatgtgagtaccgggaaagggaaactacggtactcaaaagctttctctaagggaattctcctttagggcttttctaaattctcttcttaataaactggagatatataaaacttaagctacaaaatcagatttgtggatttttagcctcaaattcagtatgaaaggatagttttcagctattttattttataagcatttgaagtccccagtgaaattaagacagaaatggtgtcagtgtaacatcctgaaacacagttgttaactgtaaatttacagttataattcttgattgctgattttccaagtcactaaaaaacccattgatcaagcaaaactaat

SEQ ID NO: 574617 - DNA, 614 bp, Homo sapiens
tttaatatttttagaagtctatttgtctagctgatacggtgcacataggactgtcataaatgtttctgaggtcttaataaaaggtcttaaaactataccctcaagctgaacattactaccttgaggcctcattttgttgcaaacaccttgtatttagtcttcaccctgggttttttccttattttaaaagcttttgtcttgttgagcctttgagaatgagaaacagtttagtttttgacccaatatatccaagttttgttctatttctctctaaatttgtctagaaatggaacaattcattttttagactgtctctctttatctgtatctgatcacacaaggctttcaaaaactgttacttgtatggttctggaaatctccttaaacaaatccatcaattcattatgtatattttatgttttctacttaatcccasgtaatagagttgtcaaatattttgatactatataaaatgggtatctttactctataataaatttttctcaatgtccttcaagtccactgtaatctttttgaggtccctccagtttgtgcctatctttaggctgaaagtcatagccacatgtttgaagactgtgctgtcatgtgtctta

SEQ ID NO: 574618 - DNA, 549 bp, Homo sapiens
gaacaagacagaaagagactgaacttccttttgcaacaaccccactttcctgataacaaaaccaatctctggataaaacattcattcactcataaggacagggcccttatggtctattcacctcatactggttctacctcttaataccatcacaatgacaattaaatttcactgtgagctttggagggcacattaaaaacaaagcagtagcattccacttctggcactaatatttgttataattatgtattgctatgggggaaaatcccagattagtgatttaaaataacaatttactgtgattcctcacagttttgcagattgactggtcttggctggtttattgtcactttggatttctcatgaagttacamtaaattggaaactggggctggagtggtctgaaggctccaatgcactagatatgtaagatggctcattaatattcctgtcagtttatgctattgcctaggagctcatccttgttgtttaccagatcagtgacacatggtctctctacgtggctttgacttctcacaacatgaaagc

SEQ ID NO: 574619 - DNA, 529 bp, Homo sapiens
cactgcattctgttgtgtaaacaactcactaaggctaaccctcaagcaaatgagaagcagaatrtacatacagagaaagaaagtaatgatggtaatcattctatctaccacagaaggtgcatgcaaattcagtggagaaataatgcccagagtgagtgtactagagaagtaggactatttaagaaagttctgtatctgtgcaccatagtacgttaaaagctacatcaccccagtcttttgctaacttctttatcttcataaatttctgtctcatgtttagtaatcatgctaacaaggaaaaaattatgtcagtttgtcaattactaaatcattttagtttttattgttttataaaaactaccactgatataggagacttatttcatgacaacataaacacacacacacacacacacacacacacacacacaccccagagaagcatagattaatactatgacagatctgtctcccttaataagtgcttgttatggtttgtaagtgtctcgcaaaaatgcatatgttggaa

SEQ ID NO: 574620 - DNA, 605 bp, Homo sapiens
aagtaggactatttaagaaagttctgtatctgtgcaccatagtacgttaaaagctacatcaccccagtcttttgctaacttctttatcttcataaatttctgtctcatgtttagtaatcatgctaacaaggaaaaaattatgtcagtttgtcaattactaaatcattttagtttttattgttttataaaaactaccactgatataggagmcttatttcatgacaacataaacacacacacacacacacacacacacacacacacaccccagagaagcatagattaatactatgacagatctgtctcccttaataagtgcttgttatggtttgtaagtgtctcgcaaaaatgcatatgttggaaacttaatcctcaaagctatggtgtcaggagatagggcttaatgagaggtgagcgagccataagagcagagtgaataggttaattctgttgtcaaggaagtgggtttgccataatggaggaattcagcttccttttattctctctttctctctctctctcttgccctctttttgcctaattgccatgggatgatgcaacaaaaaggccctttccagatgtgagcaccttgatcttggagtttg

SEQ ID NO: 574621 - DNA, 613 bp, Homo sapiens
gaaagttctgtatctgtgcaccatagtacgttaaaagctacatcaccccagtcttttgctaacttctttatcttcataaatttctgtctcatgtttagtaatcatgctaacaaggaaaaaattatgtcagtttgtcaattactaaatcattttagtttttattgttttataaaaactaccactgatataggagacttatttcatgacaacayaaacacacacacacacacacacacacacacacacacaccccagagaagcatagattaatactatgacagatctgtctcccttaataagtgcttgttatggtttgtaagtgtctcgcaaaaatgcatatgttggaaacttaatcctcaaagctatggtgtcaggagatagggcttaatgagaggtgagcgagccataagagcagagtgaataggttaattctgttgtcaaggaagtgggtttgccataatggaggaattcagcttccttttattctctctttctctctctctctcttgccctctttttgcctaattgccatgggatgatgcaacaaaaaggccctttccagatgtgagcaccttgatcttggagtttgcggccacaagaaccatgaatcaat

SEQ ID NO: 574622 - DNA, 605 bp, Homo sapiens
aagtaggactatttaagaaagttctgtatctgtgcaccatagtacgttaaaagctacatcaccccagtcttttgctaacttctttatcttcataaatttctgtctcatgtttagtaatcatgctaacaaggaaaaaattatgtcagtttgtcaattactaaatcattttagtttttattgttttataaaaactaccactgatataggagacttatttcatgacaacatamacacacacacacacacacacacacacacacacacaccccagagaagcatagattaatactatgacagatctgtctcccttaataagtgcttgttatggtttgtaagtgtctcgcaaaaatgcatatgttggaaacttaatcctcaaagctatggtgtcaggagatagggcttaatgagaggtgagcgagccataagagcagagtgaataggttaattctgttgtcaaggaagtgggtttgccataatggaggaattcagcttccttttattctctctttctctctctctctcttgccctctttttgcctaattgccatgggatgatgcaacaaaaaggccctttccagatgtgagcaccttgatcttggagtttg

SEQ ID NO: 574623 - DNA, 457 bp, Homo sapiens
aaagccttttaattggccttggaagtttttataaagatgacattttacatttaaaccagaatgcagtaaaaagactcctcttgcaggcagcacagaaaaaaatgtttcttagargcagcttctaaggccatccaatttcttttaattcaaggtactcatcatgccagagcatcatactttgaggtcttgctcgattgggcctaacattcccctgtctgaaacttccctagaagttttacacactaaaagttgagttgaaggctatgcagagagaataatcaagttggtagctgagcggcaaaagatctcataaaccaggctctcattcctgggaaaaggtcagtccagtgaagcagttgtgtctcattttagcctctgtatggtactggcaaagaagtctttaataagagacatttcaatggaaatagaataaaacaaaggctaatgtttggagcag

SEQ ID NO: 574624 - DNA, 619 bp, Homo sapiens
atgcatattgaacgtatatcatttgctgaacaacatgtttgacccatgttcaataataagtgctttaccatttcaaatagacatgccaaaagatagccatttatacctctgcattttatttgttattctgtgggtttgagaagaaatgaaaacaacacttctggctgggcaaggtggctcacgccagtaatcccagcactttgggaggccaaggtggacagatcacctttgcccaggaattcaagaccagcctggacaacgtggcaaaaccccatctctactaaaaatacaaaaaactatcccgatgtggtgatgcatacctgtagccccagctactttgagggctgaggtgggaggatcacctgagccaggcaggcagaggttgcggtgaacctaggtcctgccattgcactccagcgtgcgcaacagagtaagacmctgttcccccagtgctccttcctgccccccccaaaaaaaagaaagtaacattgcttatcatttgaatcttcagaaaacaaagagttaaaagaaaattctatcctagtgctttgtatttatgcagcccaaataaagactccaaggctgcagtgtacatcatacattatctatttgtgtactc

SEQ ID NO: 574625 - DNA, 589 bp, Homo sapiens
tattaaagtcctttattttataattgcactgtatataaaataatatcatattttaggaaatacacatactgtaatatttaggaataagtgttcataatgtcttcaattcactataaaattgttcagtgcaaaacatttatacacacatgcacacagttaatgttaaaaagctaagcaattggtgaatatgggtgaagagaataagaaagttcatagagtttcttccaacttctctatttatttttatgctttttaaaattaaaagtacaaagaaggattgaaagagcaggggaggggggagtttttcattcattctgaaccttactctcatgcctttcasaagaatgggaatggaagctatcaaacaaaaggaaaattagacatttttcatgatggcaccataattgccacacattcatctcccttaatgatttattttaaataaaatgtcatttgtgtgtgtgtgtgtgtgtgtgtgtgtgtatacataatatgtgtaattgatgtgtaaataatatatttatatttatataccatatttacatttatattaattatgtgtagataatatctatggtgtgtatatata

SEQ ID NO: 574626 - DNA, 622 bp, Homo sapiens
atgggccaccacctgacccctgctactgtgggataccataatccactggggaacctaattccatggtagcagagctgactgtcctctctagattatagacaacaatcactgtagtcttttttttgttttgttttgtttttttatgatttctgatattcccctcagcaatgcagctcttaaagctttgggaaaaagtatttcctacatgctgaaaattgtcctggtgtagaagtgatctccacctggaagaggccctgatttgactgtctgtgctatgcttaratctaattctcattttagggatggagtctgtgaagaatgttgagagtaggtactcaagagaatccacatatctttatgaagtatctgtactaggtgacatcatgaagagttgttttgttttgctttgtttagttttgtttaatataagagattagttctcttaggcagaaatgggcaggtaggatggtaggagaggatacttccaccaaaaaagtatgttcaggaagacttgatagttctaattctgtgccccatcggtgtctgcctaactgaccccaaagcacatcttagggtcttggttcttcccaattgccactcctgccttagcatgagacctagt

SEQ ID NO: 574627 - DNA, 606 bp, Homo sapiens
agtttaccttgtggttcaagaaagctacatcagttatatctgtaatatccacacattagctagtgggaaagaaaaaggagagaaatagtggaaccattccttcttttaaaaaaatattttacagaaatctcaaataaccctttagtatagtttggatatttgtcccttgaaactccatgttaaaattggatcccctaactggctagccatatgcagaagactaaaactggaccccattcctttcaccctgtacaaaaattacttcaagatggattaaagacttaaaagtaagacttaaaattttaaaaatcctaggagaaaactaggaaattccattctagacataggccttggcaaatatttcatgataaaatctccaaaaacatttgtaacaaaaacaaaaattgataagtgggacctactkaaactaaagagcttcctcaaagcaaaggaaactatcaacagagaaaaaaggcacaaaatgggaaaaaatatttgcaagctatgtatctgacaaaggtctaatatccagaaaatataaggaacttaaatcaagaagcgaaacacaaacaacccacttaaaaaataggcaaaatacatgaacag

SEQ ID NO: 574628 - DNA, 599 bp, Homo sapiens
caaacaacccacttaaaaaataggcaaaatacatgaacagacacttctcaaagaagacatacattcagccaatgggcatatgaaaaaaaatgctcaacatcaccaatcattagataaatgcaaatcaaaaccacaatgagataacatcacatagcagtcagaatagctattattaaaaagtcaaaatataacaaatgttggcaacattgcagagaagagggatcaattatacactgttgttttgaaagtaaattagttcagccactgtggaaagcagtttgaagatttctcaaagaacttaaaatacarctaccatttgacccagcaatcccattgctgcaatatacccaaaggaattaaaatcattctacaaaaaggcacatgcatgcatgtgttcatctcagcactattcacaataccatagaaatggaatcaatctagatgtccatcagtgttggaatggataaagaaaatgtggcatgcatacaacatggaatactatgcagtcataaaaagagaaaaattatgtcctttgaagcagcatggctgcagctggggagcattatactaagcaaattaatgcatgaatagaaaacaaa

SEQ ID NO: 574629 - DNA, 618 bp, Homo sapiens
ctcctgttagaacaaatttttgttgaatttatgtgggtaagtatattgtcagaaagttaacaacactcatgaatattttytgaattacagagggatcaggaagggagaaaaggtgaatgattcaatgctgctcaaaaaaagtatactttaccaaatttctgtaagctatagatagcttaaaaacaaacataaaaaattcctttaatctagcaaacaaaaagaattaacaatgtttcaagcaaaaagtataataataatagtgcctcatcagtttatttccaaataattaatttttgttctcccttgatgttggattagcaagtttatgaatccaggtcttttttttcttttaacagagttctagaaattctcgaagttatcagaaacctatacttgtcgcagttattctcattcttttcatatatctcattgagatacaatattataagattataattgcttgcaaagagctgtcataaaaagcataaaaaaagtactgtgctatgtacagcaagacataaaatggccatgattaaaaatctgatgggagtttattattatttctatggcataaaacaatttaatatgtagttgccccttgaacaagagaggtttcaa

SEQ ID NO: 574630 - DNA, 573 bp, Homo sapiens
tttggaaatttgcaaccatttcaaaaaaacttggagacaaactgtgtagcctagaaatttcaaaaaaaagaaaaagtatgtaagtaatgaatgtagaaaatatatctagatactataaaatatatataaattaattataaaatattaaaatttatcaaagcttatgtacacaggcacagactrtacatggcactatttgcagtagagaaaaatgtaaagaaacataaagatgaagtagtaaatcataactgcataaaattaattgtagcacatactgtactactgtaagcatttcttaaccacctcctattgctattgtagtgagcttatgttgtgagtatctgcttaaaatgctatgtaatgctaatcatctttggatgagtagtacatcctgatagtaaattgtgtatcaaagtaaaaagttatctctactgggtattatatatttttcatcctgcttagtgcaataacataaacctaagtaacaccatgggactgaaacaaagtgccagtagtaatgcaggaagtgttcccaagaaacacagtcatgacataataagaaaaagtttaaat

SEQ ID NO: 574631 - DNA, 563 bp, Homo sapiens
tggagtttgccccctacaaataaccatttactgtaattattgccagttaccgttaaagttgcagctgttgctagtatctcatcagtaaccatatacccaaatgtcaggtgttgtctcacagtataaaataacccttgatatccccaaaagtcaaagtgaccagggagctcagtgcaaaaagaaagcagagtttcaaacttgtggggatcccaaccgcaactcttgtgactttgtgaggaagacaagaacaacataaaggaaacagtggtgcaccttttttgtttctctaaggatttcaagagtgctagaagtctcctttaggtgtttttatattgtctccagaactctgatttttcctcttattgcatcaaatggagaaagtagyagcttgagggggagcatttcgagagagctagttgcaagatcaaaggtagcaaaaggaaggaagggcagaagtatatggatgagcaggtcttagaggagtgatttgggggagatcttaactttccccaaaaggccagtgaagttcagttagtagggatttgagaaaaggggttcagtag

SEQ ID NO: 574632 - DNA, 453 bp, Homo sapiens
tctgcctggcttctggggaggcctcaggaaacttacaatcatggcggaagtccacaaggaaaccagcactttacatggctaaggaggaggaataggaagagaagcaggaggtgctacacacttttaaacaaccagatctcatgagaactcactcactattgcaaggacagtaacaagggaaatggtattaaaccattcgtgagaaactgccctcatgatccaatcgcctcccaccaggcctcacctcccactttgggaattacaattcaagatgagatttggtggagacacagatccaaaccatatcaagacctaaacacatatatacacacacgaagatcttgtagctttccatttagaattttagtcawggcgtagtaatacaactctcttgcatataaaatatacttgaatccaaattacatttctgataaaatgaggcctgttcacaga

SEQ ID NO: 574633 - DNA, 302 bp, Homo sapiens
tagactgaggtcaactctggatagtctcactgttccaacagaagcctcatgagatctggagttccaaatttgtctacagagtactctgtaaagacacacacacataggtgcatgcagacatacacaaccacacataaacayaccatgaagaaacagaggcaactacagctagataggacaaaaaaaaagaaaaaaacctcaaagaacacaaaactacaacaatcaacaatacagaacctcattataaacaataaaaccattcacaaatagaacaatcagaaacaatgaaaggttaaagaaac

SEQ ID NO: 574634 - DNA, 302 bp, Homo sapiens
tagactgaggtcaactctggatagtctcactgttccaacagaagcctcatgagatctggagttccaaatttgtctacagagtactctgtaaagacacacacacataggtgcatgcagacatacacaaccacacataaacacaccatgaagaaacagaggcaactacagctagataggacaaaaaaaaagaaaaaaacctcaaagaacacaaaactacaacaatcaacaatacagaacctcattataaacaataaaaccattcacaaayagaacaatcagaaacaatgaaaggttaaagaaac

SEQ ID NO: 574635 - DNA, 636 bp, Homo sapiens
attgttagtacctttctttttgatcatatgaatgatcttttaaaaagtgaagatagagttttgtggattaaataccattcaaattataatttattgttttatttcactggcactgctagaaaactagtaggtttaactatgtaaagacgctccatgtttttcatattttaactaaatgttatatttagtttaactatataaatattaacttcctaataccccaatatattactcacaagccatgaatgaacatactttacatggtagtcaktaaaaaacaacttttacaagtagactcagatgccagtatgtaattcccaaaaggctaagaggctaagaacttggtcttgtgtactgctgtattactaatggccgagaaaatgcctgggactcagtgaacactccataaatattgatcctatgagcgtgacagtgtgtgtgtgtgtgtatgcacgcatgtgtctgcgtgtgtgtgagagacagagagaaggagagagagagaaagaagagagatcaacttccatctcattatttcaggcaagagccaccataaacaatgtgtactaagtcgtaagaagaaatggaattagagctttattttagaataagtactcactgatattaagcaatgtcaaa

SEQ ID NO: 574636 - DNA, 636 bp, Homo sapiens
attgttagtacctttctttttgatcatatgaatgatcttttaaaaagtgaagatagagttttgtggattaaataccattcaaattataatttattgttttatttcactggcactgctagaaaactagtaggtttaactatgtaaagacgctccatgtttttcatattttaactaaatgttatatttagtttaactatataaatattaacttcctaataccccaatatattactcacaagccatgaatgaacatactttacatggtagtcattaaaaaacaacttttacaagtagactcagatgccagtatgtaattcccaaaaggctaagaggctaagaacttggtcttgtgtactgctgtattactaatggcygagaaaatgcctgggactcagtgaacactccataaatattgatcctatgagcgtgacagtgtgtgtgtgtgtgtatgcacgcatgtgtctgcgtgtgtgtgagagacagagagaaggagagagagagaaagaagagagatcaacttccatctcattatttcaggcaagagccaccataaacaatgtgtactaagtcgtaagaagaaatggaattagagctttattttagaataagtactcactgatattaagcaatgtcaaa

SEQ ID NO: 574637 - DNA, 636 bp, Homo sapiens
attgttagtacctttctttttgatcatatgaatgatcttttaaaaagtgaagatagagttttgtggattaaataccattcaaattataatttattgttttatttcactggcactgctagaaaactagtaggtttaactatgtaaagacgctccatgtttttcatattttaactaaatgttatatttagtttaactatataaatattaacttcctaataccccaatatattactcacaagccatgaatgaacatactttacatggtagtcattaaaaaacaacttttacaagtagactcagatgccagtatgtaattcccaaaaggctaagaggctaagaacttggtcttgtgtactgctgtattactaatggccgagaaaatgcctgggactcagtgaacactccataaatattgatcctatgagcgtgasagtgtgtgtgtgtgtgtatgcacgcatgtgtctgcgtgtgtgtgagagacagagagaaggagagagagagaaagaagagagatcaacttccatctcattatttcaggcaagagccaccataaacaatgtgtactaagtcgtaagaagaaatggaattagagctttattttagaataagtactcactgatattaagcaatgtcaaa

SEQ ID NO: 574638 - DNA, 636 bp, Homo sapiens
attgttagtacctttctttttgatcatatgaatgatcttttaaaaagtgaagatagagttttgtggattaaataccattcaaattataatttattgttttatttcactggcactgctagaaaactagtaggtttaactatgtaaagacgctccatgtttttcatattttaactaaatgttatatttagtttaactatataaatattaacttcctaataccccaatatattactcacaagccatgaatgaacatactttacatggtagtcattaaaaaacaacttttacaagtagactcagatgccagtatgtaattcccaaaaggctaagaggctaagaacttggtcttgtgtactgctgtattactaatggccgagaaaatgcctgggactcagtgaacactccataaatattgatcctatgagcgtgacagtgtgtgtgtgtgtgtatgcacgcatgtgtctgcgtgtgtgtgagagasagagagaaggagagagagagaaagaagagagatcaacttccatctcattatttcaggcaagagccaccataaacaatgtgtactaagtcgtaagaagaaatggaattagagctttattttagaataagtactcactgatattaagcaatgtcaaa

SEQ ID NO: 574639 - DNA, 477 bp, Homo sapiens
ccccgccccatcaagccttgctataagtcactaattgatttatgaggacacaaccttcatagcctaatcacttgctaagggccccccatcttcctactgttgtatcagggattatgtttcaacatgaattcttcagaggacacaaacatccaaaccatagcaattaaaactcacatctttatttgtaaatmatatacttatttgcattatagtcttttcatattgctttattatcgctagtcactctaatgtatgttttttggtttgttgagtgtattattcttaattatgttggctttcctcatgtattttgaaatacttgattttaaagtcatcttatatagaaggcatcttttgcttgatcttgcgcactttcatgtgtcccatcttggctcgagcttcctgtgtaaactctctgtttatcgttttagggaataggatcactattatgtttaggtgacatggtattgacccacc

SEQ ID NO: 574640 - DNA, 477 bp, Homo sapiens
ccccgccccatcaagccttgctataagtcactaattgatttatgaggacacaaccttcatagcctaatcacttgctaagggccccccatcttcctactgttgtatcagggattatgtttcaacatgaattcttcagaggacacaaacatccaaaccatagcaattaaaactcacatctttatttgtaaataatatamttatttgcattatagtcttttcatattgctttattatcgctagtcactctaatgtatgttttttggtttgttgagtgtattattcttaattatgttggctttcctcatgtattttgaaatacttgattttaaagtcatcttatatagaaggcatcttttgcttgatcttgcgcactttcatgtgtcccatcttggctcgagcttcctgtgtaaactctctgtttatcgttttagggaataggatcactattatgtttaggtgacatggtattgacccacc

SEQ ID NO: 574641 - DNA, 577 bp, Homo sapiens
attttggttttaattcttaaggactatggaatcaattttcttattggtaaaattacattcagtacagataagtattaaatggataatatrtatcagcatttggcagatatgaacagtcaatgtatttacttctctcttgtttttgctcttcattgtcattcatgtcttccaaaagatttatatatatatataacatatatatatatacatatataaagaatatatatatatataaaaatataagcttttaaaaatctctgtgaaaccagccatagggttacatgcttgtaattccagctacctggaaggctgaggtaagaagattgcttgagcccaggagtttgagactagcctgggcaacatagcaagaactcatcttagaaaataataactataataataaatatctgtcaagattgatagcaaagatataaactaaaatatatatcaccattgtattcatttcatatatttgatttgtattcatttcaatcatacaaccatttaactgggctatttgtaataccaataaaaatgctgacaattatagatcatttgttttactattttttaaaaa

SEQ ID NO: 574642 - DNA, 640 bp, Homo sapiens
agcagaaattcaaagaatcattagaggctactgagaacaactacataycaatagattggaaaacctagaagaaatagataaatgtctagacacatacgacctgcaaatacattaaaccataaagaaatccaaaacttgatagaccaacaagaagtaattagaagcagtaactaaaaagtctcccagcaaaaaacagctgggacacaatggcttcacagttgaattttattaaacatttaaagaactaataccaatcctatttaaactattcttaaaaatagaggcagaaggaatccttccaaactcattctatgagcacaatattattactctgataccaaaaccaaacaaagatgcatcgaaaaaagaaaaaggaaggaaggaagcaagcgagcaaactacaggacagtatctctgatgaacactgatgtaaaaaccttcaacaaaatactagcaagaataattcaacaacacatttaaaagtccattcatcatgaccaagtgggatttatcccagggatctgaggatggttcaacatttgcaaatcaatcagtgtgataaatcataccaacacaatgaaggaaaaaaaattacatgatcatttcaattgatgctgaaaatgcattggataaaattcaa

SEQ ID NO: 574643 - DNA, 465 bp, Homo sapiens
cccttgaataacacaggtttgaaccacgagggtccacttacaygccaattttttttgcccaaatgcagatgaaaaatacagtatttgtgttatttgaaacttgtgtataccaagagcccacttttcctgtatgtgggttccacagggcagacagcaggacttcggtatgtaaggatctgggtgtgtgaggggatcctggaaccagtccccctcgtataccgagggaagactgtagttttaagttcccttcaatctaaaatgtgcattttaaaatcttcccccatactgcaagattactgaaaactcctatccaacatccgtacattcctcaggacttgatgtttataatattcctgtgaaagaaaatgggcagttatttttccttcaaatcacatgagaatactcaggcccagagggattaatatcaaacaaccaagtgacacatttgcaatgcaaggggccaag

SEQ ID NO: 574644 - DNA, 591 bp, Homo sapiens
tttctacttttattttacattcaggggtacacatgctgttttattacttgggtatattgtgtgatgctgaagttcagtaaacgaatgatcttgtcacccaggtactgagcacactatccaatagttagtttttcaaccattgtccttctccctccctgtctcctctagtagtccccagtctattgttgccatctttacgtccatgagtacccaatcttttgtttccacttataagtggaaacacctctggttttctgtgttaattcacctaggataatggcctccagctgcatccatgttactgcaaaggacacgatttcattgttttttttatggctgtatggtttcccatggtgtatatgtatcacattttctttaatccaccattgatgggcacttaggttgatcccatgtctttgctattgtgaacagcactgcaatgaacatatgggtgtaygtgtcttttcagtagaacgatttgttttcttttgcatatatacctagtaattgaaattgctggatggaatggtagttctgttttaagtcctttgagaaatctccaaactcctttctacagtggttgaactaatt

SEQ ID NO: 574645 - DNA, 537 bp, Homo sapiens
aaccctgtctgtgctaataatacaaaataataagttgggcttggtggcacacgcctgtaatcccagctactcaggaggctgaggcaggagaattgcttgaacctgggaggcagaggtgagaaccgaggtcgcaccactgcactccagcctgggcgataagaccaaaactccatctcccaacaaaacaaaacaaaacaaaacacacacacaaacaaaaagagttagaaaaaaaaaaacccctcatctgattccattggcctacccagatattctaaaataatcttcccatctgaagatccttaatcacatccccagtgccatgyacagtaacatagtgacaagtttgggggattagcacctgcacaccttgggggagatgtattattttgcctaccacaaaacctctgccatactattttctatttattatgtgtgttggtgtgtaggatttgaacacatatttatctgtgtatagttcatgctggagaacacaatataacacataaagtatggcaatgaaaagaatgtgtaaatttt

SEQ ID NO: 574646 - DNA, 537 bp, Homo sapiens
aaccctgtctgtgctaataatacaaaataataagttgggcttggtggcacacgcctgtaatcccagctactcaggaggctgaggcaggagaattgcttgaacctgggaggcagaggtgagaaccgaggtcgcaccactgcactccagcctgggcgataagaccaaaactccatctcccaacaaaacaaaacaaaacaaaacacacacacaaacaaaaagagttagaaaaaaaaaaacccctcatctgattccattggcctacccagatattctaaaataatcttcccatctgaagatccttaatcacatccccagtgccatgcacagtaacatagtgacaagtttgggggattagcacctgcacaccttgggggagatgtattattttgcctaccacaaaacctctgccatactattttctatttattatgtgtgttggtgtgtaggatttgaacacatatttatctgtgtatagttcatgctggagaacacaatataamacataaagtatggcaatgaaaagaatgtgtaaatttt

SEQ ID NO: 574647 - DNA, 605 bp, Homo sapiens
ataaaacaactgtggattacaagagtcttagaacagtaatggttaaaaacacaattcacaaggaaatttgcttacttctgtggcatacaacaattttacataatgatyataattactactaaaagtgtatgctaagacatattagaatcacaggaatctcatgcaatcctggaatacacactaataacacatttgtatgaatataatccaaataaggttaaaccccattcatatttgacaatactattagcctgaagtccaaaagagacatattcacctttgttataataaaatgattttatttgacaacgattttattatatcaaacaagccaaatgtgtcttttttggacttcaagtttacctaatatcaaaaattaatgaggaccgaagttagagtttgattttggaaagttagtcaaatataaaaagcttaaaacacttgatatcacaaaatagaatcacaggttattgtaaaataagtcattcatttagtcaaagtgataactcaaagatttcaaaaaaaggcaaaaattttcattctttgagagaggagacttaatttcccaaacaataagccctaataataaagatagcataaggcca

SEQ ID NO: 574648 - DNA, 605 bp, Homo sapiens
ataaaacaactgtggattacaagagtcttagaacagtaatggttaaaaacacaattcacaaggaaatttgcttacttctgtggcatacaacaattttacataatgatcataattactactaaaagtgtatgctaagacatattagaatcacaggaatctcatgcaatcctggaatacacactaataacacatttgtatgaatataatccaaataaggttaaaccccattcatatttgacaatactattagcctgaagtccaaaagagacatattcacctttgttrtaataaaatgattttatttgacaacgattttattatatcaaacaagccaaatgtgtcttttttggacttcaagtttacctaatatcaaaaattaatgaggaccgaagttagagtttgattttggaaagttagtcaaatataaaaagcttaaaacacttgatatcacaaaatagaatcacaggttattgtaaaataagtcattcatttagtcaaagtgataactcaaagatttcaaaaaaaggcaaaaattttcattctttgagagaggagacttaatttcccaaacaataagccctaataataaagatagcataaggcca

SEQ ID NO: 574649 - DNA, 458 bp, Homo sapiens
ggtctcgaactcctgacctcgtgatctgcccaccttggcctcccaaagtgctgggattacaggcttgagccaccacgcctggcctgcaagctatttttaaatcaagttttcagttatttgtttgtcaggggaaataatccaattcctttttgtgggtgargttttttaaggtaaaatttacacacaataaaattaatcttttggagtatcgttctgagttttgacaaaccgaaattctttagacaattcttcaggcatttctttatctaatttaaaaacatatattccagtacaaactagatgaatgaatacacaaagtgttttgcaattcttagtgacattaacagaagaaggggaaacgtcctccctcagtgggttcctgaatcacagtttattttgacttggaaacacaacatgtttgattggctggaacataagccacccaggaatagatttac

SEQ ID NO: 574650 - DNA, 583 bp, Homo sapiens
gtctatagttttctttttataatgtgtctttgtctgtttttggtaacagggtagtgttggcctcatagaataagtttagaagtattccatcctcctctattttttggtataggcctaatagttatttacagaacattttatccaagagctgcagaaagaaaactataggccaatatccatgatgagcattgatgcaaaaatcctcaacaaaatactaccaaatcgaattcaacagcatattgaaaagatcattcatcataaccaactaggatgtatcccagggatgcatgaagagcacttgcaccctgatggttcaatagatgcaaattgggaggcagagcaaaatggcagactaggtggcatctttaggtggcagaatagaaagctcccctgttatacacacacacacacacacacacacrcacacacacacacacaagttgacagctatctacacagaaaaaacaccttcataagaaccaaaaacaggtgagcactcatagtacctatagtacctggtttaaacttcatatcactgaaagaggcactgaagaaatagcaaaaactgtcctgaattgccaac

SEQ ID NO: 574651 - DNA, 583 bp, Homo sapiens
gtctatagttttctttttataatgtgtctttgtctgtttttggtaacagggtagtgttggcctcatagaataagtttagaagtattccatcctcctctattttttggtataggcctaatagttatttacagaacattttatccaagagctgcagaaagaaaactataggccaatatccatgatgagcattgatgcaaaaatcctcaacaaaatactaccaaatcgaattcaacagcatattgaaaagatcattcatcataaccaactaggatgtatcccagggatgcatgaagagcacttgcaccctgatggttcaatagatgcaaattgggaggcagagcaaaatggcagactaggtggcatctttaggtggcagaatagaaagctcccctgttatacacacacacacacacacacacacacacacacacacacacaagttgacagctatctacacagaaaaaacaccttcataagaaccaaaarcaggtgagcactcatagtacctatagtacctggtttaaacttcatatcactgaaagaggcactgaagaaatagcaaaaactgtcctgaattgccaac

SEQ ID NO: 574652 - DNA, 446 bp, Homo sapiens
gtgcaccaccatgctgggctaattttcgtagagaaagagtctcactgtattgcccaggcaggtcttgaactcctgggctcaagcagttctctcatygtggcctctcaaagtgttgggattactggcgtgagccactgtgcctggtcttgtttgtttatatttgagaaagcacagagttcccaactaaagaagcagaatcaagttgtttaatgtttgtctgctagtatcctagtgataagatagccaaattgttgaaagttgggttttaagaacaattgatcagttttcaatagaagtggaaacataaaaagagtgttaaatgaaaagttgagagagctctctgggtaggagtcagttttgaagaagggatgaggacagtaaactgcgactctagaattccttgcagtgtaaggtttcctctgggtcacacagccttccttgagctc

SEQ ID NO: 574653 - DNA, 602 bp, Homo sapiens
aaattgattcttttcttatcaaattttgtaggatgagatgcagatctgatttctaggtattgcagatcatgagactgaaaaattcataggatgctttattttctcctctttctttcgctacctggcaaactgttggcctggggtctgggaagccatctctgtgttgagcccccaacctgctctccatgaagttccaagaaggtaacctgaccgcgttggtcttacccctctgattatacagtgccattagacctgtgagaggggctgtgacagtggaacccgaatgaagacaggaaaagtctgtagaggactgatggttatgttcaccattcaaattgcaagaaaaccaataagaagtcagtaaagtgcattcaaagagaaaggtgggactcgtgaaggtatgatacttttctacaatggtataggtatgttaaggtgtrtgaacttttaactctggtcaaaactgattcctcctgccagattctcctggttcgaagcaagggagcctcagggaaaggatttaggactgaaaaagaagccctcatctgccattttcttctctctgttcttatagttatgtcacattaattttaatgaggcca

SEQ ID NO: 574654 - DNA, 602 bp, Homo sapiens
aaattgattcttttcttatcaaattttgtaggatgagatgcagatctgatttctaggtattgcagatcatgagactgaaaaattcataggatgctttattttctcctctttctttcgctacctggcaaactgttggcctggggtctgggaagccatctctgtgttgagcccccaacctgctctccatgaagttccaagaaggtaacctgaccgcgttggtcttacccctctgattatacagtgccattagacctgtgagaggggctgtgacagtggaacccgaatgaagacaggaaaagtctgtagaggactgatggttatgttcaccattcaaattgcaagaaaaccaataagaagtcagtaaagtgcattcaaagagaaaggtgggactcgtgaaggtatgatacttttctacaatggtataggtatgttaaggtgtatgaacttttaactmtggtcaaaactgattcctcctgccagattctcctggttcgaagcaagggagcctcagggaaaggatttaggactgaaaaagaagccctcatctgccattttcttctctctgttcttatagttatgtcacattaattttaatgaggcca

SEQ ID NO: 574655 - DNA, 375 bp, Homo sapiens
acgccacagaaaatgaatccagacacagacttatacctttcacaaaaaggaagtcaaaatggattgtaaatctaaatgtgaaatttaaagctttaaaatttcttgaaggagacagcacaaaaatctacatgatctcaggtttggtgatgagattttaaatataataccattaacattatctgtgaaaggagaatttggtaagttggactccattaaaattaaaaatttctctgtgatakacactgtgaaaacactgcacaaagaaacccctgactcgaagagactatatgcaaaactctgatattggactcgcgttttaaaatacacacaaatttcaacactatgaaaactatcacaatttttaaaatgagcata

SEQ ID NO: 574656 - DNA, 375 bp, Homo sapiens
acgccacagaaaatgaatccagacacagacttatacctttcacaaaaaggaagtcaaaatggattgtaaatctaaatgtgaaatttaaagctttaaaatttcttgaaggagacagcacaaaaatctacatgatctcaggtttggtgatgagattttaaatataataccattaacattatctgtgaaaggagaatttggtaagttggactccattaaaattaaaaatttctctgtgatatacactgtgaaaacamtgcacaaagaaacccctgactcgaagagactatatgcaaaactctgatattggactcgcgttttaaaatacacacaaatttcaacactatgaaaactatcacaatttttaaaatgagcata

SEQ ID NO: 574657 - DNA, 375 bp, Homo sapiens
acgccacagaaaatgaatccagacacagacttatacctttcacaaaaaggaagtcaaaatggattgtaaatctaaatgtgaaatttaaagctttaaaatttcttgaaggagacagcacaaaaatctacatgatctcaggtttggtgatgagattttaaatataataccattaacattatctgtgaaaggagaatttggtaagttggactccattaaaattaaaaatttctctgtgatatacactgtgaaaacactgcamaaagaaacccctgactcgaagagactatatgcaaaactctgatattggactcgcgttttaaaatacacacaaatttcaacactatgaaaactatcacaatttttaaaatgagcata

SEQ ID NO: 574658 - DNA, 375 bp, Homo sapiens
acgccacagaaaatgaatccagacacagacttatacctttcacaaaaaggaagtcaaaatggattgtaaatctaaatgtgaaatttaaagctttaaaatttcttgaaggagacagcacaaaaatctacatgatctcaggtttggtgatgagattttaaatataataccattaacattatctgtgaaaggagaatttggtaagttggactccattaaaattaaaaatttctctgtgatatacactgtgaaaacactgcacaaagaaacccctgactcgaagagactatatgcaaaactctgatattggactcgcgttttaaaatacacamaaatttcaacactatgaaaactatcacaatttttaaaatgagcata

SEQ ID NO: 574659 - DNA, 564 bp, Homo sapiens
agcaaacaaaccatatagtgaaatacacacrgtcaatataacactaaagaatagaactgagaccaaacctagcagccgcatcagtaaattagagtggatttaacccatttattaaaaggcaagactgattttcagattggttcacatagtggcacccaactctatgctgtataaagaagtcatatccaaaacacagtgatccaggaaggctgaaaatgacaggagggtgtatagcaatgaagagagaaaaagagcttgggagttttaatcctgactgcagccaagctagtatcaggccaaaagcattaatggaaacaaagagggccgctgtcaatgctaaaggctgcaatttgcagagaagatacactaggtgtggttatgtctgcttcacataacatcaccagaacctctacgatgcggaaaccacaggggcggtggggagacatgagggacacgcagttccaggacattgtgactgccttgctcagcctgagacatgtgaaggggaccaaaacatacgcctccaaatgtaccagactttgtgctgtgataatagggaataca

SEQ ID NO: 574660 - DNA, 564 bp, Homo sapiens
agcaaacaaaccatatagtgaaatacacacggtcaatataacactaaagaatagaactgagaccaaacctagcagccgcatcagtaaattagagtggatttaacccatttattaaaaggcaagactgattttcagattggttcacatagtggcacccaactctatgctgtataaagaagtcatatccaaaacacagtgatccaggaaggctgaaaatgacaggagggtgtatagcaatgaagagagaaaaagagcttgggagttttaatcctgactgcagccaagctagtatcaggccaaaagcattaatggaaacaaagagggccgctgtcaatgctaaaggctgcaatttgcagagaagatacactaggtgtggttatgtctgcttcacataacatcaccagaacctctacgatgcggaaaccacaggggcggyggggagacatgagggacacgcagttccaggacattgtgactgccttgctcagcctgagacatgtgaaggggaccaaaacatacgcctccaaatgtaccagactttgtgctgtgataatagggaataca

SEQ ID NO: 574661 - DNA, 585 bp, Homo sapiens
agaccagaagtttgagaccagctgggcaacagagggagaccctatctcaaaaaacaaaacaaaacaaaacaaaacaaaacacaacaacaacaaaagaagcagcaaaggaaataaccccatctgtgaaaaagcttcttgctttcataaaagcttatttattatgccattatttatatagggaaaagttggaaataaccttactatattaaaatagaagtaatctgtgacartggttcccaggctttttggcaccaaggactggtttcgtggaagacaattttctcatggattgtgaggtgggggcaggggatggttttgggatgattccagtgccttacatttattgtgcacttttttttcaactcacttgccattataaagcttgacaccagttgcagcttaattgtcacttgccactcactgatagggtttttttgtttttgtttttgttttttggagacagtctcactctgttgcccaggcaggagtgcagtggcgtaatcttggctcactgcaacctccgtctcccaggttcaagcgattctctcatctcagcctcctgagtagctgggattacaggcatgt

SEQ ID NO: 574662 - DNA, 422 bp, Homo sapiens
ctagactttttcccatgcattttcaagtataaatgaccatgaatgcataaatacaaacacagttttttagtattttgcattttaaactaatactgaattatacygtatgtctgttttacaatttgcttttttaactttctattcatctttccattcagttaagcacctcattattttttaacagctacatgttattccataatatgcatatatagctaatgtattctttactaatgcaccttatgtattacttacttatgtattacttactaatgcaccttgattcaatcacatttgttttcaaattttcttttgtggggatttctgtactatgttgtcctgtaagggggtctgccggaagaaaggtataaggtgaccctaggtttgcactatgcaaagaagacaggtaaaaacatcccagg

SEQ ID NO: 574663 - DNA, 560 bp, Homo sapiens
agccacacggtaattactaagtaaggaacagttaaaatacttctatttagtgtggtaagagttaatggaaaaaagaaaacatttatgttaataacggttttaagtctgattcaccgtgatatgctactcagaagaaataatattgctttcaacaaaaaaagaattatcaataaaaaacagtaactaaattttagaattataatygtagctgtagcaaaatacctattggaatattgaacttacttttcttttctcatttctctcttccatattttttctcaagactaaaaatcaaacccactgaaccaacaaaccactatcaactgttgtttcttatattatttataggagaataaatcaaaagcccttgactatagctgacttctctgagacactggaaatgacaataagggatcaccatgtgcatatttcctcaagccaatatttaacagaatttctaaaattacctcccaactgggcgcaatgtctcacgcctgtaatcctggaactttgggaggctgaggcgggtggatcacctgaggtcaagagttcgataccag

SEQ ID NO: 574664 - DNA, 560 bp, Homo sapiens
agccacacggtaattactaagtaaggaacagttaaaatacttctatttagtgtggtaagagttaatggaaaaaagaaaacatttatgttaataacggttttaagtctgattcaccgtgatatgctactcagaagaaataatattgctttcaacaaaaaaagaattatcaataaaaaacagtaactaaattttagaattataattgtagctgtagcaaaatacctattggaatattgaacttacttttcttttctcatttctctcttccatattttttctcaagactaaaaatcaaacccactgaaccaacaaaccactatcaactgttgtttcttatattatttataggagaataaatcaaaagcccttgactatagcygacttctctgagacactggaaatgacaataagggatcaccatgtgcatatttcctcaagccaatatttaacagaatttctaaaattacctcccaactgggcgcaatgtctcacgcctgtaatcctggaactttgggaggctgaggcgggtggatcacctgaggtcaagagttcgataccag

SEQ ID NO: 574665 - DNA, 632 bp, Homo sapiens
gaacttggctcactgcaacctccgccccccagattcaaatgattctcctgcctcagcctcccaagtagctgggattacaggcgcctgccactgcgcctggctaatttttgtgtgtgtgtgtgtgtgtgtgtttttttttttttagtagagacggggttccaccatcttggccagggtggtcttgaactcctgacctcgtgatccacccgcatcagcctcccaaagtgctgggattacaggcgtgagtcaccatgcccggccccaattaagtgttttaatagtaagagttatgcagcaaaggcagagaaaatgggataaagatactgtggcagttgtaatttgcatgtctcagaagacctcactatgaagatgacagttgacaatacctgaagaagtcatttcagacatgtagatatctgggggaagagcayttcaggtaatgaaaagagctggtacaaaggccctgaggcaggagcatggttgatgctggccatggccaaccttgctgaagtggaagaaacagagaaggaaggtgaaaacagaatgggaaagacttttcgatgattgtaagaagtttgcattttaaactcagtgaaagattttaagtagaggagttacatatctgaatcaat

SEQ ID NO: 574666 - DNA, 542 bp, Homo sapiens
atgtcaggaggaaagatacaactaaataatctaaaagaagagattttatacaatgtgttatatatttatatgaaagaaaccctttcttaatacaattttcatgttaattgtgtcatttcattcattacctaatgtacaattggaaagtttgaaaaagctagtttatattcaaaacaaarcaaaaacttgagaatgatttgatcttaggaattcattatgcattatcagttatattggtaaaattaactaaaaaagctggtttcttctattgaaaaatcatctcacacttgatagtctactgcgtattctctacatggagtaaacaacatactgtgtattaataagaccccacttaatctgggatattttgaaaggccttaatgtgtcggataaatggtagatataatgaaaaatgtcttttagtggaattgatagtaaaagatttatgcctagatagcttaaagaaaaaaacagtacttttgtgatatagctaattaatgcttaccaggaaagtattataatattaggatcagaacaaaaca

SEQ ID NO: 574667 - DNA, 542 bp, Homo sapiens
atgtcaggaggaaagatacaactaaataatctaaaagaagagattttatacaatgtgttatatatttatatgaaagaaaccctttcttaatacaattttcatgttaattgtgtcatttcattcattacctaatgtacaattggaaagtttgaaaaagctagtttatattcaaaacaaaacaaaaacttgagaatgatttgatcttaggaattcattatgcattatcagttatattggtaaaattaactaaaaaagctggkttcttctattgaaaaatcatctcacacttgatagtctactgcgtattctctacatggagtaaacaacatactgtgtattaataagaccccacttaatctgggatattttgaaaggccttaatgtgtcggataaatggtagatataatgaaaaatgtcttttagtggaattgatagtaaaagatttatgcctagatagcttaaagaaaaaaacagtacttttgtgatatagctaattaatgcttaccaggaaagtattataatattaggatcagaacaaaaca

SEQ ID NO: 574668 - DNA, 542 bp, Homo sapiens
atgtcaggaggaaagatacaactaaataatctaaaagaagagattttatacaatgtgttatatatttatatgaaagaaaccctttcttaatacaattttcatgttaattgtgtcatttcattcattacctaatgtacaattggaaagtttgaaaaagctagtttatattcaaaacaaaacaaaaacttgagaatgatttgatcttaggaattcattatgcattatcagttatattggtaaaattaactaaaaaagctggtttcttctattgaaaaatcatctcacacttgatagtctactgcgtattctctacatggagtaaacaacatactgtgtaytaataagaccccacttaatctgggatattttgaaaggccttaatgtgtcggataaatggtagatataatgaaaaatgtcttttagtggaattgatagtaaaagatttatgcctagatagcttaaagaaaaaaacagtacttttgtgatatagctaattaatgcttaccaggaaagtattataatattaggatcagaacaaaaca

SEQ ID NO: 574669 - DNA, 600 bp, Homo sapiens
aaaatcagctcacggattggcttccatctgggtgttctgctgctttcaacttagtctcctctctctagcattaattgtcacctgttgtttttcctccggtgtccttactttctattcttcactatattatcgtgcctctttggcttgctttctttctctctactcggatttctttctttctgtgcaactaaactcattgtttttctttgtgctgcttgcgatggctttctgatggttactttctgtgtcatttacttagttatttttcctcttcacctgtgatatttgggctattttatactaatctaaatattatttctttcctttagaaatacttttttatgtgtgtgtgggcggtggggagcggggagagaaggtaagagaaaaagactaaaaagatgtccttctacaggaaaataatatccctttctatsagctgcttctactttcttttacttcaagatatccccatttatatcaactcacccacaacaaaatccattaaaaggtttagttgacttgctagcacatcattaaacatccatttcagttatgtgtgtactatcactacatgtacataattattgctagctacagtgc

SEQ ID NO: 574670 - DNA, 600 bp, Homo sapiens
aaaatcagctcacggattggcttccatctgggtgttctgctgctttcaacttagtctcctctctctagcattaattgtcacctgttgtttttcctccggtgtccttactttctattcttcactatattatcgtgcctctttggcttgctttctttctctctactcggatttctttctttctgtgcaactaaactcattgtttttctttgtgctgcttgcgatggctttctgatggttactttctgtgtcatttacttagttatttttcctcttcacctgtgatatttgggctattttatactaatctaaatattatttctttcctttagaaatacttttttatgtgtgtgtgggcggtggggagcggggagagaaggtaagagaaaaagactaaaaagatgtccttctacaggaaaataatatccctttctatgagctgcttctactttcttttacttcaagatwtccccatttatatcaactcacccacaacaaaatccattaaaaggtttagttgacttgctagcacatcattaaacatccatttcagttatgtgtgtactatcactacatgtacataattattgctagctacagtgc

SEQ ID NO: 574671 - DNA, 605 bp, Homo sapiens
  misc_feature 360: n = A,T,C or G
aacaaaatccattaaaaggtttagttgacttgctagcacatcattaaacatccatttcagttatgtgtgtactatcactacatgtacataattattgctagctacagtgctagctagctggatttattcttcctaacaaaactccttattctgtttcctataatgtcagtagcagctacacacccaatcctcatagttgccaacagcaaccatttctgatttcctgaccctcccttacaaacggcaacaacaaaaaaagaataggatccagtaaaaacatcttgatttaaaagcatcttgattttctggaacaagtctgttcttccaatcatcaaaacagaatatccatgtctccttatntcaatactaaacattttcttcttcagaatgacccccgacttcaccagctacatgaggttgtcagtgagttaattgacaattctaactctatatttaaattgtctgattaamtccatggagcaatgtcagaaacgtcagaggaaggagtcatagctatggaaagaatacagctctgaaatttagaaacatgggttttagttttggctgttactagctagttgtaatctggacaaattatttaatcc

SEQ ID NO: 574672 - DNA, 620 bp, Homo sapiens
aatctacccttttaggaaaggtaattggttcctttccagtgtctgaatcttgaacattcttctatttctagtttattatcaactgcctgtggttagaccaagtgcttatcaaccaattaaaaaggtcaaagaaaagcccatggaaaatgacctaaccaaattatcggcagatgtttgatatttctagacttatgatatgcatatattataacaaatgcaaagatgccggattgttttaaaattttcttctttgtaaatggaccyggcagtcagcctttcattcttctgtgactttacctctactaaggaacccgatcatagctgcagagaggctgtgaaattgtcctaagaccatagctcaagaaggataagaaaaaagaaaacctcgggggaaagaaaaaaaagcaaaaaatgttctcttttcaaatctataaaaatggttcttaagagctggaatttttcttaaccagccaaaagcaatggttgcccagtgggaggaaaaagcagaagggaagtaaaaggtcacagggagcattatgtgtgtatgtgtttttaaaaatttttcatggtttcttgtcctgaatattttttttaatacaagagaaaatttaaattggtgt

SEQ ID NO: 574673 - DNA, 620 bp, Homo sapiens
aatctacccttttaggaaaggtaattggttcctttccagtgtctgaatcttgaacattcttctatttctagtttattatcaactgcctgtggttagaccaagtgcttatcaaccaattaaaaaggtcaaagaaaagcccatggaaaatgacctaaccaaattatcggcagatgtttgatatttctagacttatgatatgcatatattataacaaatgcaaagatgccggattgttttaaaattttcttctttgtaaatggacctggcagtcagcctttcattcttctgtgactttacctctactaaggaacccgatcatagctgcagagaggctgtgaaattgtcctaagaccatagctcaagaaggataagaaaaaagaaaacctcgggggaaagaaaaaaaagcaaaaaatgttctcttttcaaatctataaaaatggttcttaagagctggaatttttcttaaccagccaaaagcaatggttgcccagtgggaggaaaaagcagaagggaartaaaaggtcacagggagcattatgtgtgtatgtgtttttaaaaatttttcatggtttcttgtcctgaatattttttttaatacaagagaaaatttaaattggtgt

SEQ ID NO: 574674 - DNA, 526 bp, Homo sapiens
atcactggaaatgagatgattaaacaccaaaattttaatgatgaaaattgagccagaacatagcttggttctgcaaccaacaaagcttttctctgtgaattaaacctgcctactcagccagggcagaaggggacarccgttggtctcttgcagggcaggctactccactcatgctctggggagaggctgatcctgcagagaatgctgagctgcccagtccttctccccagctcactcagccactcagggaggaggaggaagggagcaggaagagagaggtctcagtgtttctcccacacttttcctgcataggggaatgtttccctctacagaaattccaaaaatgttacattgtctgcaatttgctttaaaatactccatcctgacgagttagtgggtgcagcgcaccagcatggcacatgtatacgtatgtaactaacctgcacaatgtgcacatgtaccctaaaacttagagtataataaaaaaaaagaaagaaaaaataaaataaaataaaataaaataaaa

SEQ ID NO: 574675 - DNA, 526 bp, Homo sapiens
atcactggaaatgagatgattaaacaccaaaattttaatgatgaaaattgagccagaacatagcttggttctgcaaccaacaaagcttttctctgtgaattaaacctgcctactcagccagggcagaaggggacaaccgttggtctcttgcagggcaggctactccactcatgctctggggagaggctgatcctgcagagaatgctgagctgcccagtccttctccccagctcactcagccactcagggaggaggaggaagggagcaggaagagagaggtctcagtgtttctcccacacttttcctgcataggggaatgtttccctctacagaaattccaaaaatgttacattgtctgcaatttgctttaaaatactccatcctgacgagttagtgggtgcagcgcaccagcatggcacatgtatacgtatgtaactaacctgcacaatgtgcacatgtaccctaaaacttaragtataataaaaaaaaagaaagaaaaaataaaataaaataaaataaaataaaa

SEQ ID NO: 574676 - DNA, 592 bp, Homo sapiens
cccatgcacatatagtcaactgatcttcaacaatacacaatgttgaaaggatagtatctgtgttagtccattgttgtgttgctgtaaaggaatagtggaggctgggtaatttataaagaaaagagttagttgccaaatggttctgcaggctgtacaagcatktctccagcatttgcttctggtgagggattcaggaagcttataatcattgtgaagggaacgggagccagcatgtcacatgatgagagcgtgagcaaggggatgtggggtaccacgctcttttaaacaactagatctcgtgtgaactcagagtgagaactcactcattattgcaataatggccattaatgagggatctgcccccatgagccaaacattccccacgaagccctatctccaacactggggattacatttcaacatgagatctggaggggacaaacattaaaattatatcagtatcttcaataaaaggtgttgggaaaaattgaatttttttcacatgccaaagatattcagatgcaatagaataaaattgtattcttatctaacagcataaacataaattaactcaaaatagattaaagactta

SEQ ID NO: 574677 - DNA, 583 bp, Homo sapiens
tgtcacataagcctaggaacactaactgggaaccccatgagtagatgcagataactgcaaagtggttttatttttatttcccttgtgcataacccacctcaaccccacaactatgcctcttgtcaacaggaagaagctagagtgaycatcagccttttcccatctctatagccaacaccttaagagtaaggtgctatggagcccaaagcagggtttaaaactacctttgcaaattatatcagggagaaaattatgacagtaaaagagatctgatttaaccaccccgccccatcttgcctttcccttcaacattcctgagcttaggctaagctaactttgagagacatttagtttatatgacttttatcttattttgttatttttatagagatgaggtctccctatattgcccaggcttgtatcaaactcctggattcaagcaatcctcccaccttggcctcccaaagtacaaggattacaggcacgagccacagcacccattcaatataaaatttagttttaaatgataataggcctcccccaaaactcaaccacctttgtaaatctaatgaaacattatcag

SEQ ID NO: 574678 - DNA, 487 bp, Homo sapiens
ccttaaggtaataaaaaccatctatgacatacccacagccaacattatactgcatgggaagaagctgaatgcattccttctgagaaccagaacacgactagcatgcccactttcaccacttctrttcaacacagtacttgaagttctagctagagcaatcagaccagaaagagataaaagacatccaatttggtaaagaggaagtcaaactgtcactgtctgctgatatgatcgtatacctagaaaaccctaaagacttatctaaaaagctcctagaactgatgaatgactcagcaaagtttcaggatacaaaattaatgtacacaaatcagtagctttgctatacaccagcagcgaccaagctaagaatcaaattaagaaccacttttacaataacagcataaaaaataaaatacttcaaaaaatacctaaccaagaagatgaaagacctctgcaaggaaaactacaaaacactactgaaagaaat

SEQ ID NO: 574679 - DNA, 600 bp, Homo sapiens
ttaaaactgaactctggccatatcatctcctgattaaaatccttgagacacacacacaaacacacatacacacacacacacacacacacacacasagcaagatactaatctaagcacttcacattcattaactcaaatattcctcaaagcaagcctatgaagtagatgcttattatccccatatttacaggtgagaaatctgaggtacagaaaagataaataacttccccaaagttcaaatatctagtaagtgttacaagctaggttctattcaccaagtctggtttcagtccatgaccttatcccctcttcaagctgaatctaatatccccatcttggcctacacagctccccctgacctagcccctgcctaagtttctgtctatatctcattcagttcttcctcttgtctagtgtgctccagccactccagattcctcaccttgccacctaaagggcttaatgctctccaaccacccttctgccctgtacatgttttggaggccttctcattcattaagtctcagcctaagtatcttcccttatctccttatccaaatacctactgaactcctcgtatcattactgctctccccttct

SEQ ID NO: 574680 - DNA, 600 bp, Homo sapiens
ttaaaactgaactctggccatatcatctcctgattaaaatccttgagacacacacacaaacacacatacacacacacacacacacacacacacagagcaagatactaatctaagcacttcacattcattaactcaaatattcctcaaagcaagcctatgaagtagatgcttattatccccatatttacaggtgagaaatctgaggtacagaaaagataaataacttccccaaagttcaaatatctagtaagtgttacaagctaggttctattcaccaagtctggtttcagtccatgacyttatcccctcttcaagctgaatctaatatccccatcttggcctacacagctccccctgacctagcccctgcctaagtttctgtctatatctcattcagttcttcctcttgtctagtgtgctccagccactccagattcctcaccttgccacctaaagggcttaatgctctccaaccacccttctgccctgtacatgttttggaggccttctcattcattaagtctcagcctaagtatcttcccttatctccttatccaaatacctactgaactcctcgtatcattactgctctccccttct

SEQ ID NO: 574681 - DNA, 600 bp, Homo sapiens
ttaaaactgaactctggccatatcatctcctgattaaaatccttgagacacacacacaaacacacatacacacacacacacacacacacacacagagcaagatactaatctaagcacttcacattcattaactcaaatattcctcaaagcaagcctatgaagtagatgcttattatccccatatttacaggtgagaaatctgaggtacagaaaagataaataacttccccaaagttcaaatatctagtaagtgttacaagctaggttctattcaccaagtctggtttcagtccatgaccttwtcccctcttcaagctgaatctaatatccccatcttggcctacacagctccccctgacctagcccctgcctaagtttctgtctatatctcattcagttcttcctcttgtctagtgtgctccagccactccagattcctcaccttgccacctaaagggcttaatgctctccaaccacccttctgccctgtacatgttttggaggccttctcattcattaagtctcagcctaagtatcttcccttatctccttatccaaatacctactgaactcctcgtatcattactgctctccccttct

SEQ ID NO: 574682 - DNA, 574 bp, Homo sapiens
tagatttctagctttaagattgtttaattcatgtttagatgcagaaggatagtcaagctgattaaaattttgagtcaataactttaacttttacttttcatttaagtaattttaaatgtattaaattgttcagatgttgtaaagccagttktatttgttatagaatttcagttttccgtattttgagttgtgcatcatcctgaaggctaagagtaattaattacgattgtcattgtccaaaattgatctaatcagggcagaatggtgcgacattcaaaggagatttcatttcttctttgaactcatgaatgatgatataatctaaatgttatttataatccttttcaaaaaaacaaaattcaaatttatcttagaatttcattttacgaaaatggtattttatttatacaaactcgtatgctttctttaggcaattagaattacattttaaatacattttagtatagcttggaatatgtagtaagtaaatataaagcaataaatagttttactttgatgtgatcatttcacatttgtgtgtatagaatattaatgtacatttagagtgtttaaa

SEQ ID NO: 574683 - DNA, 574 bp, Homo sapiens
tagatttctagctttaagattgtttaattcatgtttagatgcagaaggatagtcaagctgattaaaattttgagtcaataactttaacttttacttttcatttaagtaattttaaatgtattaaattgttcagatgttgtaaagccagttgtatttgttatagaatttcagttttccgtattttgagttgtgcatcatcctgaaggctaagagtaattaattacgattgtcawtgtccaaaattgatctaatcagggcagaatggtgcgacattcaaaggagatttcatttcttctttgaactcatgaatgatgatataatctaaatgttatttataatccttttcaaaaaaacaaaattcaaatttatcttagaatttcattttacgaaaatggtattttatttatacaaactcgtatgctttctttaggcaattagaattacattttaaatacattttagtatagcttggaatatgtagtaagtaaatataaagcaataaatagttttactttgatgtgatcatttcacatttgtgtgtatagaatattaatgtacatttagagtgtttaaa

SEQ ID NO: 574684 - DNA, 574 bp, Homo sapiens
tagatttctagctttaagattgtttaattcatgtttagatgcagaaggatagtcaagctgattaaaattttgagtcaataactttaacttttacttttcatttaagtaattttaaatgtattaaattgttcagatgttgtaaagccagttgtatttgttatagaatttcagttttccgtattttgagttgtgcatcatcctgaaggctaagagtaattaattacgattgtcattgtccaaaattgatctaatcagggcagaatggtgcgacattcaaaggagatttcatttcttctttgaactcatgaatgatgatataatctaaatgtkatttataatccttttcaaaaaaacaaaattcaaatttatcttagaatttcattttacgaaaatggtattttatttatacaaactcgtatgctttctttaggcaattagaattacattttaaatacattttagtatagcttggaatatgtagtaagtaaatataaagcaataaatagttttactttgatgtgatcatttcacatttgtgtgtatagaatattaatgtacatttagagtgtttaaa

SEQ ID NO: 574685 - DNA, 574 bp, Homo sapiens
tagatttctagctttaagattgtttaattcatgtttagatgcagaaggatagtcaagctgattaaaattttgagtcaataactttaacttttacttttcatttaagtaattttaaatgtattaaattgttcagatgttgtaaagccagttgtatttgttatagaatttcagttttccgtattttgagttgtgcatcatcctgaaggctaagagtaattaattacgattgtcattgtccaaaattgatctaatcagggcagaatggtgcgacattcaaaggagatttcatttcttctttgaactcatgaatgatgatataatctaaatgttatttataatccttttcaaaaaaacaaaattcaaatttatcttagaatttcattttacgaaaatggtattttatttatacaaactcgtatgctttctttaggcaattagaattacattttaaatacattttagtatagcttggaatatgtagtaagtaaatataaagcaataaatagttttactttgatgtgatcatttcacatttgtgtgtatakaatattaatgtacatttagagtgtttaaa

SEQ ID NO: 574686 - DNA, 226 bp, Homo sapiens
tggagatttctcaaaaaaactaaaaatagagctaccatatgatccaacaatcccactactgggtatctatcmaaaggaaaagaaatcagcatatcaaaggaatatgtgctgtattagtctgacctcacactgctataaagaactacctgagaggtggctggcaagatgaccaaataggaaaagctccagtctgcagctcccaactagatcaaagcagaagtcaggt

SEQ ID NO: 574687 - DNA, 551 bp, Homo sapiens
agtcaagaaagagaagggttataacatgtccaatggagttagcctcgaagaggtcacctatgatccttctgggatctgtttctgttgagtggtgagaagtgagggcaaaaatcaatggtttgacaactgaatggaagaggacaagctatcctattgaaaagtgtgatactaacttagaaattacatttacaaaacataatttgtgatattgagaaatacttagaatataacactaagtgaaaygcaggatataaaacattacctatactatatgattccaattctggtataaattagaggcataaggagcaggattaagatctcaccctctgaagccagactccctgggatcaaatcctgactaggccactgacaggatgtgcagccatggtaaagtccctcactgggtggtggttagcctggcacacagaaagtgctcagtaaaatgttagctattaaatgctgaatgtagatatatacacatagaaacaaaatatcctcaggtgaggctgggcgctgtggcttatgcctgtaatcccagcactttggga

SEQ ID NO: 574688 - DNA, 551 bp, Homo sapiens
agtcaagaaagagaagggttataacatgtccaatggagttagcctcgaagaggtcacctatgatccttctgggatctgtttctgttgagtggtgagaagtgagggcaaaaatcaatggtttgacaactgaatggaagaggacaagctatcctattgaaaagtgtgatactaacttagaaattacatttacaaaacataatttgtgatattgagaaatacttagaatataacactaagtgaaatgcaggatataaaacattacctatactatatgattccaattctggtataaattagaggcataaggagcaggrttaagatctcaccctctgaagccagactccctgggatcaaatcctgactaggccactgacaggatgtgcagccatggtaaagtccctcactgggtggtggttagcctggcacacagaaagtgctcagtaaaatgttagctattaaatgctgaatgtagatatatacacatagaaacaaaatatcctcaggtgaggctgggcgctgtggcttatgcctgtaatcccagcactttggga

SEQ ID NO: 574689 - DNA, 551 bp, Homo sapiens
agtcaagaaagagaagggttataacatgtccaatggagttagcctcgaagaggtcacctatgatccttctgggatctgtttctgttgagtggtgagaagtgagggcaaaaatcaatggtttgacaactgaatggaagaggacaagctatcctattgaaaagtgtgatactaacttagaaattacatttacaaaacataatttgtgatattgagaaatacttagaatataacactaagtgaaatgcaggatataaaacattacctatactatatgattccaattctggtataaattagaggcataaggagcaggattaagatctcaccctctgaagccagactccctgggatcaaatcctgactaggccactgacaggatgtgcagccatggtaaagtccctcactgggtggtggttagcctggcacacagaaagtgctcagtaaaatgttagctattaaatgctgaatgtagatatatacacatagaaacaaaatatcctcaggtgaggctgggygctgtggcttatgcctgtaatcccagcactttggga

SEQ ID NO: 574690 - DNA, 551 bp, Homo sapiens
agtcaagaaagagaagggttataacatgtccaatggagttagcctcgaagaggtcacctatgatccttctgggatctgtttctgttgagtggtgagaagtgagggcaaaaatcaatggtttgacaactgaatggaagaggacaagctatcctattgaaaagtgtgatactaacttagaaattacatttacaaaacataatttgtgatattgagaaatacttagaatataacactaagtgaaatgcaggatataaaacattacctatactatatgattccaattctggtataaattagaggcataaggagcaggattaagatctcaccctctgaagccagactccctgggatcaaatcctgactaggccactgacaggatgtgcagccatggtaaagtccctcactgggtggtggttagcctggcacacagaaagtgctcagtaaaatgttagctattaaatgctgaatgtagatatatacacatagaaacaaaatatcctcaggtgaggctgggcgctgtggctyatgcctgtaatcccagcactttggga

SEQ ID NO: 574691 - DNA, 440 bp, Homo sapiens
ttttataaacaggagttcccctggcacaaggtgtctcttgcctgctgccgtgtaagacatcagtttactcttccttcatcttcttccatgattatgagaccacctcagccatgtggaaytatgattccattaaaccacttttctttataaattatttggtctcaggtatgtctttattagcagcatgataatggactaatacagggcctttcctaatctttgaattttctgtatacggtgactcttgaataaaatatttattataaaattagagtgtgtccttgtttctattgatccttgtcctcagttacttgacccattttctaaacaactttaaacctcatcttccctgtcatctcctctgcaggaacacagctgcctcctccctgcaatttctgacactctcaggatgtgggttttcacattgtgtctctcacaca

SEQ ID NO: 574692 - DNA, 440 bp, Homo sapiens
ttttataaacaggagttcccctggcacaaggtgtctcttgcctgctgccgtgtaagacatcagtttactcttccttcatcttcttccatgattatgagaccacctcagccatgtggaactatgattccattaaaccacttttctttataaattatttggtctcaggtaygtctttattagcagcatgataatggactaatacagggcctttcctaatctttgaattttctgtatacggtgactcttgaataaaatatttattataaaattagagtgtgtccttgtttctattgatccttgtcctcagttacttgacccattttctaaacaactttaaacctcatcttccctgtcatctcctctgcaggaacacagctgcctcctccctgcaatttctgacactctcaggatgtgggttttcacattgtgtctctcacaca

SEQ ID NO: 574693 - DNA, 440 bp, Homo sapiens
ttttataaacaggagttcccctggcacaaggtgtctcttgcctgctgccgtgtaagacatcagtttactcttccttcatcttcttccatgattatgagaccacctcagccatgtggaactatgattccattaaaccacttttctttataaattatttggtctcaggtatgtctttattagcagcatgataatggactaatacagggcctttcctaatctttgaattttctgtatacggtgactcttgaataaaatatttatyataaaattagagtgtgtccttgtttctattgatccttgtcctcagttacttgacccattttctaaacaactttaaacctcatcttccctgtcatctcctctgcaggaacacagctgcctcctccctgcaatttctgacactctcaggatgtgggttttcacattgtgtctctcacaca

SEQ ID NO: 574694 - DNA, 446 bp, Homo sapiens
aacatgtacacacatacataaatacataaataaataaatcccacaataatatgtctaagggacataggatccaactgcaaaagctcccaatgttcaaagttgaaacaaattgaatgacaaaaatcagtaaagtagtagtggattataacccaaagtataaaataaatatgcgtgagtccatactgctacaaataaatgatcaggtaatttaaactgggagagaatagacaaatcttctatgcagaataattycaaataatatctgaggatattctgccctcaaggtagtggaacataaggtggaccacgcatagtgactttattccaaagattacagtacgaataggtgaaaaaagaataacttttcagtggagaaatcagataaatactaccccaaccctgtgatcaaggataacagtatgccatgacaaagaaatcacattgat

SEQ ID NO: 574695 - DNA, 446 bp, Homo sapiens
aacatgtacacacatacataaatacataaataaataaatcccacaataatatgtctaagggacataggatccaactgcaaaagctcccaatgttcaaagttgaaacaaattgaatgacaaaaatcagtaaagtagtagtggattataacccaaagtataaaataaatatgcgtgagtccatactgctacaaataaatgatcaggtaatttaaactgggagagaatagacaaatcttctatgcagaataattccaaataatatctgaggatattctgccctcaaggtagtggaacataaggtggaccaygcatagtgactttattccaaagattacagtacgaataggtgaaaaaagaataacttttcagtggagaaatcagataaatactaccccaaccctgtgatcaaggataacagtatgccatgacaaagaaatcacattgat

SEQ ID NO: 574696 - DNA, 446 bp, Homo sapiens
aacatgtacacacatacataaatacataaataaataaatcccacaataatatgtctaagggacataggatccaactgcaaaagctcccaatgttcaaagttgaaacaaattgaatgacaaaaatcagtaaagtagtagtggattataacccaaagtataaaataaatatgcgtgagtccatactgctacaaataaatgatcaggtaatttaaactgggagagaatagacaaatcttctatgcagaataattccaaataatatctgaggatattctgccctcaaggtagtggaacataaggtggaccacgcatagtgactttatkccaaagattacagtacgaataggtgaaaaaagaataacttttcagtggagaaatcagataaatactaccccaaccctgtgatcaaggataacagtatgccatgacaaagaaatcacattgat

SEQ ID NO: 574697 - DNA, 586 bp, Homo sapiens
gtgggtgacagggtgagaccctgtctcaaaaaacaaacaaaaaacttctacatcacaaaaagataaaaraataatttctaaagattttagtcatattaaaacactatctatacacaacagtggaggtgaatgtttctctgctacagtgaacaaacattcttctttgagaaaatacatgtatttaaatgcatagtattcaaagggttaagaagcagaacttggcctgtctgactttgccttggattgttaggggattttttttgtttttgttttcttcagtaattcttgttctgaggattgttagttttttgaagtccagttatgggagatggatcctcagggttccctgccaaataagaatgagagagctcaggtgagaggcagggtaggcgagctcagctgcccctagtgtctctttgctctttccttgctaggatcattgctgggaaaataggtaccctgtgtagctccagggagtctataaattagcaacccacctttctttctttccttccttccttcccgccttccttccttccttccttccttccctccctccctccctccctcccttcctttcttcttc

SEQ ID NO: 574698 - DNA, 598 bp, Homo sapiens
gttatctcatttaatattgcctattttgtacagatgaggaaaccgaagttgaaagaagttaaaaactttccaagggctttcctcaagcaacaacgagtaggcaccagggccagaattcaaattccagtctgaatttatctttttcctcatattatgctaatacctcatcacttacatgtgtcctgtagataaaatgacattacatttgagcctccttttctgcttgatattaatgcatgaagaatgaaaaggcatacatgagggagtggatattggtgtgtgaggaagaaagaaggcctcattctagataattgtggcaaataaccagttcttccctatatcgcccaccagaagtaaaacaccttcattccctgaggagaagttccctgaggatcacgctacactttccacacccttgggttttggtaggaagaaatcagcagagtggacattgcttgattgcttattggtgaatgctatgctgtttaaatggttctcaactgtctrtaactctttattttaattttttttttttgagacggagtctcactctgtcgcccaggctggagtgcagtggcacgatcccggctcactgcaa

SEQ ID NO: 574699 - DNA, 275 bp, Homo sapiens
agatctttcaccctccttttgctttcagttgctgtataatgacttcactttttctctaatcatattaaagtctgcaggtatgctgtccatatagcaatcctgcacacacataaaagctgcatttttcaatacaagataaaaagatattttgcaaaaagcagaagaatattgtgcctgctggcatatctgcagtgactccttcaggaatttccttttatttttttcacaatgggtcttacactyggatttatttattttgaaatggcagtcaactg

SEQ ID NO: 574700 - DNA, 561 bp, Homo sapiens
cccgccttggcctcccaaagtgctgggattacaggcatgagccaccgcgcccggcctattccccagtttttgtgtcctctgatccccaccagaacctagattcctgacggccaactgaccctcataaggcttatctcaagcacagctccaggggagcagcacctcatgaccactctcttgtggaaccactctctaagatcagtgttaattgcccaattaaacagccctgatgctgacagaatgtaagctcattagtaagtgccagagcacattccaattattaacctttatggtcgtcattataaagaggagggagcaactatggatttctgcatgaatgattacgctcatcactctgagccagaaggaagaaagatgggtagagggaaaggyggtatgctgtgggagagttatccaaaacaactttagaagcaaatgacattttagaagcaaagatggccataaagtgccttggatcagtggcacatcagaatcaagaggggagttctttaaaactataagttcatagatcctgaccccagaagttgattcagtgggatt

SEQ ID NO: 574701 - DNA, 561 bp, Homo sapiens
cccgccttggcctcccaaagtgctgggattacaggcatgagccaccgcgcccggcctattccccagtttttgtgtcctctgatccccaccagaacctagattcctgacggccaactgaccctcataaggcttatctcaagcacagctccaggggagcagcacctcatgaccactctcttgtggaaccactctctaagatcagtgttaattgcccaattaaacagccctgatgctgacagaatgtaagctcattagtaagtgccagagcacattccaattattaacctttatggtcgtcattataaagaggagggagcaactatggatttctgcatgaatgattacgctcatcactctgagccagaaggaagaaagatgggtagagggaaaggtggtatgctgtgggwgagttatccaaaacaactttagaagcaaatgacattttagaagcaaagatggccataaagtgccttggatcagtggcacatcagaatcaagaggggagttctttaaaactataagttcatagatcctgaccccagaagttgattcagtgggatt

SEQ ID NO: 574702 - DNA, 522 bp, Homo sapiens
aaaatgctttccattctgatttcaagaattattaatgcttatttatatccaagcttcttacacacagggcattcctagaatgtgaactaagtaataaacaataataataataagtgctcctggtctctttgtggccagtcttacggagtctcagccctaagtcaatcatggcagtgcagttccaaccaatggaacatggagccctgttccatccaatagatttaggaccactgactgccctgagtctccctgcgcttactgtgctacacttactctttgactggttcagttgtcaagatgtttgcccttatttttagtgtccagaggtctgctggatggggcccasacctggctctgatgttaatacctcttgaggccccaggcccagctgtccaaggtctgcagcccaatgttgttgactgaggcccaaatttgggcctgcatcaaactgagtcaaattcctggagtcatgttaccactacccactggacaatgagtgtggccactacctactggtatcct

SEQ ID NO: 574703 - DNA, 382 bp, Homo sapiens
aatatatagtagccattcctaattytacccatcccaattacatataaggtttaattccattagttttttttaataaaaccctaccatttaagggtttccagagggcccctatagttttgatattctgaaattttggtgaactagtcagtatacaaacatcagaaagtgtaagtagtacacgttggaaaggcgtcagtatacacactgcacagggcaataaggcctataagatgtttattataacactaagaatatctcttggcagcagatattcgtaatgtgaactggaatgacactgtgtgctctagacacgatagcacaggagaaatggaggtggaagagaaacccacaggaatggacatgtcttcttattggcagatcc

SEQ ID NO: 574704 - DNA, 382 bp, Homo sapiens
aatatatagtagccattcctaattttacccatcccaattacatataaggtttaattccattagttttttttaataaaaccctaccatttaagggtttccagagggcccctatagttttgatattctgaaattttggtgaactagtcagtatacaaacatcagaaagtgtaagtagtacacgttggaaaggcgtcagtatacacamtgcacagggcaataaggcctataagatgtttattataacactaagaatatctcttggcagcagatattcgtaatgtgaactggaatgacactgtgtgctctagacacgatagcacaggagaaatggaggtggaagagaaacccacaggaatggacatgtcttcttattggcagatcc

SEQ ID NO: 574705 - DNA, 382 bp, Homo sapiens
aatatatagtagccattcctaattttacccatcccaattacatataaggtttaattccattagttttttttaataaaaccctaccatttaagggtttccagagggcccctatagttttgatattctgaaattttggtgaactagtcagtatacaaacatcagaaagtgtaagtagtacacgttggaaaggcgtcagtatacacactgcacagggcaataaggcctataagatgtttattataacactaagaatatctcttggcagcagatattcgtaatgtgaactggaatgacactgtgtgctctagacacgatagcacaggaraaatggaggtggaagagaaacccacaggaatggacatgtcttcttattggcagatcc

SEQ ID NO: 574706 - DNA, 580 bp, Homo sapiens
accatgaaccatgtttaaatgtgctaggttgaatgtttgaagtcaggactctgttggaatatcaggatgcgtaattactacacatattatgtagtcctgattacctgagttctccctacctgagacatccttctggctaggttgtcaaccattctttcaaacatcttttatagtagaggccaaaagactgcaagctgctagccctgaagagcttagagtctagagcatcatcattattagctactgcaagtaattttccatcattgtaccttggtttcctcattgtcagaatggacataatgatggcatctatcacgtagagtcgctctgaggagtaaatgaatgagtagatatatggaaagttgttggaataatgcatggcatagcataagagctctagaaatgctctctattgctgtcattatcattatttctgttctcacggaattgatgcatattataartgtcaacaattctcttaggatggtgcacattttaccatattttttatcatgcagatgaaatacatgtaaataaaagcacacatttaaattaatatttctttctttcattagtggtt

SEQ ID NO: 574707 - DNA, 468 bp, Homo sapiens
ctggccgctctccttcaagtggtgactcagagacttccagtcagcaagagggagggagtaagaagcagggacaagaaagtgtgaaagaactcacatctgctacttaattgcctttcatttatgtgccactgctgagaactggtgacatcttcctytgtgactacttctttaaatccacacccccacacacaacagtaattaactattttctccttggggccaccacttttctttgtgcatgcattaattatcacactcgtcacattatactacaattacttgctcatacgtctgtccctattatactgtaagtacagggaccaagtctttccactgctgtgctttcagagcctgctataacatccaagatgtactaggggctctgcaaatgtgtgatgaagaaattaacactcatatatgcatgcgaaggaatcgccaagtcatgcagagcaaaacgtgaatggtgac

SEQ ID NO: 574708 - DNA, 391 bp, Homo sapiens
ccatctctactaaaaacacacacacacacacacacacaaaaatagtggggcatggtggcacatgcatgtaatcccaactacttgggaggctgagacacaagaattgcttgaacccaggaggcagaggtttcagtgaaccaagatcatgccactgactgggcaayagagtgagagtccatctcaaaaaaaaggtaaagaagagagttacctcccaggccttttcaaaagagagaaagagctaaacttctgatataataatctgaagaatttcaaagagacagattacagaatttaaaaattaaaaacttcttgcattaagagtaaatcaatatttttaataaaatcttgttctaaccaattcttcagttttgtatttgtgtattttaatatc

SEQ ID NO: 574709 - DNA, 585 bp, Homo sapiens
tgtagttgcagctactcaggaggccacagtgggaggatcacttgaggccaggaggtcaaggctgcagtaagccatgatcacaccactgtactccagcctgggcaacagagcaagaccctatctccaaaaaaaaaaaaaagtatagcactggacaaagctatccaacagagtatcttcccttttaaaactcacagacccctttgaaaatccaagaaaaagttatgactrattttcccagaaataaatacatataagggatcaccataaacatgtgtgatagtatcttcccttttaaaactcacagacccctttgaaaatccaataaaaagttatgactaattttctcagaaataaatacacctaagggatcatcgtaaacatgtatgatatgtgggtttcaggatttcacaaattcctggagtttactcatggaatccaggttaaaactcctgcccatgggttttgaaataggttcacctgcccagggaggtaattgtttgtcatttctttgctgcctgcatctgcacagtggctcaagaaggtgaacagcagacagaaaacatttgactctattgactggtttca

SEQ ID NO: 574710 - DNA, 585 bp, Homo sapiens
tgtagttgcagctactcaggaggccacagtgggaggatcacttgaggccaggaggtcaaggctgcagtaagccatgatcacaccactgtactccagcctgggcaacagagcaagaccctatctccaaaaaaaaaaaaaagtatagcactggacaaagctatccaacagagtatcttcccttttaaaactcacagacccctttgaaaatccaagaaaaagttatgactaattttcccagaaataaatacayataagggatcaccataaacatgtgtgatagtatcttcccttttaaaactcacagacccctttgaaaatccaataaaaagttatgactaattttctcagaaataaatacacctaagggatcatcgtaaacatgtatgatatgtgggtttcaggatttcacaaattcctggagtttactcatggaatccaggttaaaactcctgcccatgggttttgaaataggttcacctgcccagggaggtaattgtttgtcatttctttgctgcctgcatctgcacagtggctcaagaaggtgaacagcagacagaaaacatttgactctattgactggtttca

SEQ ID NO: 574711 - DNA, 422 bp, Homo sapiens
tcccagctattcaggaggctgaggcaggagaatctgggaggcagagattgcagtgagccaagatcacaccactgcactccagcctgggggacagagcgagactccatggcaaaaaaaaaaaaaaaaaaaaawatagataaaggctgtcacctgttgcaggagtctgaattatgccagctcagtggctgatctcagccacccacaaagaggcaccttgcccaggtaacatcagcaactgggccgcagagaaatgctcaccatgtccacaagagcattagtgcagcactgccattagctccaggctttagattcttagaggaccccttcagtgagcatttcaaagctgacacccctgacatcaataaaacaaagaagataaatggcagttttcataaaattgcaaggaccaccaaccccacccc

SEQ ID NO: 574712 - DNA, 562 bp, Homo sapiens
tatttattgaaaacaatttttaattactgaatataagttttaatttattttcctctggaatctataatgtcatggaatcaaataacagagtcacagtaaattttctaccataaaagtttaacagcttgtaactatggaaagttgttggctatctttatggttctttttaggtgttttgtaagaacaattcataaatattaaaatgtcaaatatatgtgaactaattaagaaatgtaatttagttttttggaaactatgttgcctaggctggccttgaattcctgggctcaagggatcctcccacctcagtctcttgaatagctgaggctacwggtattcgccaccatgcctggctaaggactgtaacttcaaagagaatacttaatgatttgcaaactaatacatacactataactataactgagtttacatatttgtagattttccatagaataactcatttttggttaaactcattctttcaaaaataaatgtttactgagtgcctactatgtgtcaaaggctattctaatcagtagaaataaagccgtgaacaagttag

SEQ ID NO: 574713 - DNA, 592 bp, Homo sapiens
tgactttaataatcagttggagaggaaacatagtgattaagtgtgaatgtgtgaaaggttggccttccatgcttgtttatagtttataagagtgtgtgtaaatggaaaaatgtattgatgaggacaagaagtgcaggggcttcatagtcaagagaacaaagtaagaagggttttggtttatcttgttattcacttgcatatataaaatttaggaacaattttggcagtctccttctcaaaaaggttgtggtactttgttgtaagagaattgcgtgttgatggccactttgtatacacatggatttggacgttccagagattgagagatggaaagattccctttagaagggtgtggacagggccagcagtaactatcaattgtagcttayctcacctttttgtcttctttccacagtataatttcaaagatgcctccttctaacatattaaactactattcccatagctgaaaatactgcagtgattttctctggagggtgaggtaatcaggatatttttacatttttcttccctttgtatagttcaagttcttacaattagcttataatcattttatatttagaaaaaagca

SEQ ID NO: 574714 - DNA, 560 bp, Homo sapiens
tgggattactggatcaaatggtagttcttttagttctttaagggatctttgcattattttccatagtggttattctagtttacattctcaccagcaatgcagaagtgttccttttcaccacatccacaccaaaatctattatttttttgattttttgattatggccattcttgcaggagtaaggtgatataacattgtggctttgatatgtatttccctgatgatgttgggcattattttcatatattttttgggcatttatatatgttcttttgagaaatttctattcatgtccttatcccactttttgttgggattgtttgtttcttgcttgctgatttgtttgagttcctttttgattctggatattcgtcctttgtcagatgcataccttgtgactatttactcccacttagtgggttgtctgttttctctgctgattgtttcttttgctgaaggtttttagtttaattaagtcacacctatttatcttctttttgttgcatttkcttttgggttcttcatgaagtctttgcctaagccaatgtctagaagggttt

SEQ ID NO: 574715 - DNA, 426 bp, Homo sapiens
caaaacatacaagactcttcataatctgactccagtctaattttgaagtccctctccagcaatttttctatacttaagcttttttgtaattctaaagaaaagaatcttatttcaatttgttcaggtgtggatataacaaaaaattctcagagayctgttttagttgttagtgctatttgtcaagtatttctggttctttgccttcctagtacatagtgggactgtacttctctttttttggtagggctgagtgactatttccagccagtgagttttgatggtagcttccaagctggagcattaaattgctaatgcaagactctctggagcccttttcctctgccacaatgtgtgacagtgttcagcattgtgactactctatcagcctcctttccagactaagaagacttggagtaaagacccaag

SEQ ID NO: 574716 - DNA, 458 bp, Homo sapiens
atatggatattaataaatgtgattcatcacataaataattaaaaacaaaaaccatatatgatcatctcaatagaggcagaaaaagcattggtaaaatccaacatcccttcttaataaaaccacccaacaaactaggcatyaaaggaacatatctcaaaataataagatccatctataatagaccacagccaacatcatactgaatgggcaaaagttggaagcattccccctaagaactagaagaacacagggatgaccactctcatcactcctattccatatagtacttgaagacctagccagagtgatcaggcaagagaaagaaattaaaggtatccaaataaagagaaagtcaaattatctttcttcactgctgagatcattctatacctagaaaaccctaaaaactctgccaaaatgctcctataactgataaatgacttcagtaatgtttcatg

SEQ ID NO: 574717 - DNA, 565 bp, Homo sapiens
tttggggtaaggtctgtaggctgtgtctggttattaatgatgtatgcaatggtcttgaagcccaacttttagaaagttgaatgccagagactagctctgggaagaaatgtgttaaacaatgacccctttcctctcttgtctcccgctctggcattcatcagccatagtaataggctatgatagagaccacaatgttctgttatatgtacctctcatactgcaggcataaagcaaccgagtcatgattgaataattatcagacagtaagaatacttttcaggagaggatgtttcctgactttttctaaatagcaaataccttcccaacctcagaaaagaggtatttttatactttacattataaagtgtaaaaatatctgaggacattaagaagaaatcagaggctgggcatggtggctcacgtctgtaatcacagcactttgggaggctgaagcgggaggatcacccgagggcagaagtttgagaccagcctgaccaacaaggcaaaacccygtctctactaaaaatacaaaaattagccaggcatggtggtgcatacctgtagt

SEQ ID NO: 574718 - DNA, 620 bp, Homo sapiens
tgctcttttcatccaggctggagtgcaatggtgcaatcttggttcattgcaacctctgcctccctggttcaagcgattctcctgcctcagcctcccaaatagctgggattacaggtacctgccaccacgccaggctaatttttgtatttttagtagagacagggtttcaccacattggccaggctggtctcaaaaccctgacttcaggtgatccgccygcctcagcctcccgaagtgctgggattacaggcgtgagccactcactgcgcccagcctggaagacagagactgagcagtcacttagcctaatgcataggaaagctgagataccatatcctttttttccagttccaaggactttcaaccacaccacactacctatcttgacagtgaacttggaatttagtttctttgacttttctgcttacagcattctgtccttaactcatgcaatttttttttattggtttgggtacttaagtcttatctctctgtgtaaatgttcagctgcttggactctatctaatacctacgttgtatcacagctagctttttaaattttcgtctcttctttatcattttcataccagtaaaatcagattaaaatgaaaatgttatgg

SEQ ID NO: 574719 - DNA, 446 bp, Homo sapiens
gcaaaataattaattttctagaattcagggctcagcaaacatttaatgctataaccctttaaaaaaatcataaggtcagggatcatggcacttaaaattgcatcctgtaccatttggagataggaattttaggttgtaacatactcaatatacttccttgtggtctgggaagaagtagcctcttcaggtgtgtgaagttatatgggtcgaaacacttagccaaataacaggccgtgagttactggaactcagatgtaggtctgtaaatctattctttgtggaggggggtccattgaggccaccagagtctgtgwcttggagaagagttacagagaacatgcctagggacaatggagggtcaagacaggggcctgagcatggagaagatttggggtccatacagtgtgctgtggcttgaaggatggtccttgctgagactattgctg

SEQ ID NO: 574720 - DNA, 487 bp, Homo sapiens
cctctgttttcttttgctttgtgtttgcctgctttgttttcwctcttcattttatttttagcatttttgtgtcattttgtttcagttggtctcttgtaaacaacatgtggtcaggtttttaaaaaaacaaattggagtatcttttctttaactcagggagtttaacttactgatatttagtgtcacttctgaaacaattttaatcatatatagttaagtattattgtgtgattatttaatgtacattatataatccagttttgtaaaacattatatcctttaacatataaaatgtatacacccaaaatgtttggaaggatatttattgaacaaatatttattgagcacacgctatatatcacttgtcattcttctaggtactgaggtgatacctaaaatgtaagcagtgtttattttaaagtgaccaggctacagataatttatttttctttttgcttatttgcacttcctatagtgaccaagtatc

SEQ ID NO: 574721 - DNA, 515 bp, Homo sapiens
agaatgtgaagatacagaaacattttacgtaaagttgtataaaacatcttttaaagaaaatataaagttttggatatacatcaaaatcagcagagccactaaataaataaataggcattgtaaaataacaasagaaaatttaaaaggatatctaaaaaatattgacgcctatgatttttaaaatatgtttaagaaatccggtatttcacagggcagcctttcacaacacaggtatgttaggacattaaggtccttctgtttttaatttactagtgtttatagggttacaaatgtcttctacccttgtcttttgtctgatggtgcaaaaaattttcataagcatgtatttctgaatgcctgatggtttgacatatataatatgctgctagtattaaaatatgagacggaaaacgcatccaatcttctcactgtttacataaattctaggtttctcctatttacctcaagcacgtatggattgaattcttaccttttaatattgccatggcattcac

SEQ ID NO: 574722 - DNA, 416 bp, Homo sapiens
gaattcaagaatttcaaagatatcttattttaaaataccaaaataggaatagaatatgaagggctggttatgagtaatatgatacaattttatgagatgatgagattacaataacaatacctcctctcatagaatagccagcaagtctccactaaataacagtgccttgattttatagatgtttcatcatggatattgagttaatgtgaaccatttgtagacacaggagtttattaaagacttatataatatctttcaagtatttagaatagtgttgaaattaagcctgcatccccacgattttcagcggtgctgatgcctaataaactcaaccccttgcatgccaaaattggcttaaagcccatctgttacccaagctacacttcaagcatcraggttcaaaaatgtgattttga

SEQ ID NO: 574723 - DNA, 384 bp, Homo sapiens
atgaagggctggttatgagtaatatgatacaattttatgagatgatgagattacaataacaatacctcctctcatagaatagccagcaagtctccactaaataacagtgccttgattttatagatgtttcatcatggatattgagttaatgtgaaccatttgtagacacaggagtttattaaagacttatataatatctttcaagtatttagaatagtgttgaaattaagcctgcatccccacgattttcagcggtgctgatgcctaataaactcaaccccttgcatgccaaaattggcttaaagcccatctgttacccaagctacacttcaagcatcgaggttcaaaaatgtgattttraatatgcaagagtttgaggaattc

SEQ ID NO: 574724 - DNA, 568 bp, Homo sapiens
tcattcttttcatcagtttcagaggaataataaatttcaaaattgttcaaggtacttcttttagttcaagtaacatttgacaggtgtaaaactgtagacagactgatacaaacgtattctaattgactcaaaattatatgggacctattttaaaatctagattttaaaatrtcgtgtcaacatacacatgttctccttgtgaaataattgttttttattctctggatagaataatttaatctttaaaccttccattcactcttagaaacaatatattacataaggatatgcttataaaaataattcccaactagcttttcagttcagaaatatatgtgaagaatcatcaaacatctaatggatttcaaggagaaatgggttagtaatttattccatatgtctcaatttttcctagactcaaggcttcctttaaaataattgtaggcatttaagaaaccatgcaaactaaaaagaagaaactgtgacgctgccacttaggctttttaagtctttggacatgattcaatatattttttaaattgtatcttaattagacattgtgagttca

SEQ ID NO: 574725 - DNA, 568 bp, Homo sapiens
tcattcttttcatcagtttcagaggaataataaatttcaaaattgttcaaggtacttcttttagttcaagtaacatttgacaggtgtaaaactgtagacagactgatacaaacgtattctaattgactcaaaattatatgggacctattttaaaatctagattttaaaatatcgtgtcaacatacacatgttctccttgtgaaataattgttttttattctctggatagaataatttaatctttaaaccttccattcactcttagaaacaatatattacataaggatatgcttataaaaataattcccaactagcttttcagttcagaaatatatgtgaagaatcatcaaacatctaatggatttcaaggagaaatgggttagtaatttattccatatgtctcaatttttcctagactcaaggcttcctttaaaataattgtaggcatttaagaaaccatgcaaactaaaaagaagaaactgtgacgctgccrcttaggctttttaagtctttggacatgattcaatatattttttaaattgtatcttaattagacattgtgagttca

SEQ ID NO: 574726 - DNA, 579 bp, Homo sapiens
ttttatttttacaatattaatatgtttgatacctgtgtatatttttttacaatgtgttattttatttttgtcatagagtcatgtcatgcataataacattttagtcaaagatggattacatatacaaaagtggtcccatgagattataatagatatttttacatacttttctacgtttaattatgtttagatacataacctcttaccactgtgttcttattgcctgcagtattcagtacagtaatgtagtrcacagatttgtagcctgggagaaagaggctataccatataacctaaacgtggtaggctgtacaatctaggtgtttgtaatactctctgtgatgtttgcaaaatggtaaaattgcctatgaatacatctgttaaaacgtatccctatcattcagtgatgtgtgactgtactaaaatgctcaatgtaagtttcaatgccctccataaaattgttgtactgtgaaatacaaatctctcacccatggcctgaatatgtttgcaaactaagcagatcatgggaaggagaatgtgctggcaccgctgggatgattttctcactctacatgaata

SEQ ID NO: 574727 - DNA, 579 bp, Homo sapiens
ttttatttttacaatattaatatgtttgatacctgtgtatatttttttacaatgtgttattttatttttgtcatagagtcatgtcatgcataataacattttagtcaaagatggattacatatacaaaagtggtcccatgagattataatagatatttttacatacttttctacgtttaattatgtttagatacataacctcttaccactgtgttcttattgcctgcagtattcagtacagtaatgtagtacacagatttgtagcctgggagaaagaggctataccatataacctaaacgtggtaggctgtacaatctaggtgtttgtaatactctctgtgatgtttgcaaaatggtaaaattgcctaygaatacatctgttaaaacgtatccctatcattcagtgatgtgtgactgtactaaaatgctcaatgtaagtttcaatgccctccataaaattgttgtactgtgaaatacaaatctctcacccatggcctgaatatgtttgcaaactaagcagatcatgggaaggagaatgtgctggcaccgctgggatgattttctcactctacatgaata

SEQ ID NO: 574728 - DNA, 597 bp, Homo sapiens
  misc_feature 585, 586, 587, 588, 589, 590, 591, 592, 593, 594, 595, 596,597: n = A,T,C or G
tgtggcctgcatagagtggcgctgcctgtggaggcgatgggagagaagaaggagggcggtggtgggggtgatgtggcggccacggagggtggcacaggggctgyggccagccgggcgctgcagcagtgcgggcagctccagaagctcatcgtcatcttcattggcagcctgtgcgggctgtgcaccaagtgcgctgtgtccaacgacctcacccagcaggagatacagaccctggaggtaaggggttcggggacccgggctgggctccaggagcggcccggacacctccttcggggccccagttcactcctggccgagttgcatctttgagcccacgtcacccccttggaggcttcccctccctcctgcactcgctgatgcggcagccagaggacccaggaccagccctcaccttgggcaggatttgtggagcgggtgcgtggtgggaactgggatggaggctccagggtcccgtgggggtgggggtgggctgcgtgaggacatccccttaccccctgaatttccatctggtccagccctctcatcttgtaggtgaggaaaccgaaggcctgagggagaaatgannnnnnnnnnnnn

SEQ ID NO: 574729 - DNA, 622 bp, Homo sapiens
attttgcattctgtcccactacccattggttttcatgtcaagataatgtcagaaattctttacaattgcttccagaaggagtagccttttgatctrgtgcacaggtgtccagtcttttggcttctcagggccacattggaagaagaatgctcctgggccgcacataaaatacactaatgctaacaacagctgatggggttaaaaaaaaaaagttttgtgcataattttcatgctacccaccaccacagataggtggaaaagtccttgtaggcaaagggttggacaccggctgatctagtgtcttgtcgtccgttttggctttctccctgattccagaatgcaggtagagatgtagagacatgctctcaggacagctgttgagataaaaaaattcgttgtcatttattcccaagcacagctgtttctcatggcattgaaaaagtctccattcaaactgctgtcacatataaaatctatttatgtaagtctgtatttttctgttgtcttggcctttgtaggcagtagtgtgttttaaccgagcaaactgtccttccaaataatgaagccgaagtcagcctacctacttgccatttttcttccccttccatttttgtaacctcag

SEQ ID NO: 574730 - DNA, 622 bp, Homo sapiens
attttgcattctgtcccactacccattggttttcatgtcaagataatgtcagaaattctttacaattgcttccagaaggagtagccttttgatctggtgcacaggtgtccagtcttttggcttctcagggccacattggaagaagaatgctcctgggccgcacataaaatacactaatgctaacaacagctgatggggttaaaaaaaaaaagktttgtgcataattttcatgctacccaccaccacagataggtggaaaagtccttgtaggcaaagggttggacaccggctgatctagtgtcttgtcgtccgttttggctttctccctgattccagaatgcaggtagagatgtagagacatgctctcaggacagctgttgagataaaaaaattcgttgtcatttattcccaagcacagctgtttctcatggcattgaaaaagtctccattcaaactgctgtcacatataaaatctatttatgtaagtctgtatttttctgttgtcttggcctttgtaggcagtagtgtgttttaaccgagcaaactgtccttccaaataatgaagccgaagtcagcctacctacttgccatttttcttccccttccatttttgtaacctcag

SEQ ID NO: 574731 - DNA, 442 bp, Homo sapiens
aagcacacagttctgtatgattccacttatatacaactctaggaaatgcaaactaatcttggggacaaggacggatggcagggggaatgcagaaaattacagagggacatgaagaaaygttgggagatgaatatattcactatcatgattgtggtatcgttttcaagggtgtatatgtatatatcaaagcttatggaattgtacatgtcaaacatagcttatatcaactatacctcaataagcctggttttaaaatttttctttttgaaaaaaggacaagaatctaagcttccttattcctggtttagtagtaaacttgaacaatttcacctgtctcctatacttaaaatgacatttcagaattttaaaaacaggattttaataaaatagcgaagttattacataaaatatttgctagtagttaacaaatatatttgtaata

SEQ ID NO: 574732 - DNA, 442 bp, Homo sapiens
aagcacacagttctgtatgattccacttatatacaactctaggaaatgcaaactaatcttggggacaaggacggatggcagggggaatgcagaaaattacagagggacatgaagaaatgttgggagatgaatatattcactatcatgattgtggtatcgttttcaagggtgtatatgtatatatcaaagcttatggaattgtacatgtcaaayatagcttatatcaactatacctcaataagcctggttttaaaatttttctttttgaaaaaaggacaagaatctaagcttccttattcctggtttagtagtaaacttgaacaatttcacctgtctcctatacttaaaatgacatttcagaattttaaaaacaggattttaataaaatagcgaagttattacataaaatatttgctagtagttaacaaatatatttgtaata

SEQ ID NO: 574733 - DNA, 634 bp, Homo sapiens
accactcagtcttggcagcgcagatgaaaaactgggaaccatttgtgttgggtccagcatttgccatggacaagatgccagaacctgtatgctttcggatgaggttctcatcatcaaatttctccccatagatggacttgtcaccggtgccattagggcrtgtgaagtcaccaccctgacacataaaccctggaataattctgtgaaagcaggaacccttataacgaaatcctttctctccagtgctcagagcacgaaagttttctgctgtctttggaatcttgtctgcaaacagtttgatggagatgcggcccaagggcttgccatccctggtgatttcaaaaaagacgacggagttgaccatggctgatagtacagggctcacagcgatggtggcgtctgcaaagataaccactgatcttttcactgtctttatagtttggccttttccagagtgttgtatagttgaaatcacagtatgtacccttttcagactggcttctttcacttagcaaaatgtctttgttttttctgtatctttttgtggcttgatagttttttccttttagcactgaataatattccactgtaggaatataccacattttgcttatgcagtcacctattgaaggac

SEQ ID NO: 574734 - DNA, 634 bp, Homo sapiens
accactcagtcttggcagcgcagatgaaaaactgggaaccatttgtgttgggtccagcatttgccatggacaagatgccagaacctgtatgctttcggatgaggttctcatcatcaaatttctccccatagatggacttgtcaccggtgccattagggcgtgtgaagtcaccaccctgacacataaaccctggaataattctgtgaaagcaggaacccttataacgaaatcctttctctccagtgctcagagcacgaaagttttctgctgtctttggaatcttgtctgcaaacagtttgatggagatgcggcccaagggcttgccatccctggtgatktcaaaaaagacgacggagttgaccatggctgatagtacagggctcacagcgatggtggcgtctgcaaagataaccactgatcttttcactgtctttatagtttggccttttccagagtgttgtatagttgaaatcacagtatgtacccttttcagactggcttctttcacttagcaaaatgtctttgttttttctgtatctttttgtggcttgatagttttttccttttagcactgaataatattccactgtaggaatataccacattttgcttatgcagtcacctattgaaggac

SEQ ID NO: 574735 - DNA, 634 bp, Homo sapiens
accactcagtcttggcagcgcagatgaaaaactgggaaccatttgtgttgggtccagcatttgccatggacaagatgccagaacctgtatgctttcggatgaggttctcatcatcaaatttctccccatagatggacttgtcaccggtgccattagggcgtgtgaagtcaccaccctgacacataaaccctggaataattctgtgaaagcaggaacccttataacgaaatcctttctctccagtgctcagagcacgaaagttttctgctgtctttggaatcttgtctgcaaacagtttgatggagatgcggcccaagggcttgccatccctggtgatttcaaaaaagacgacggagttgaccatggctgatagtacagggctcacagcgatggtggcgtctgcaaagataaccactgatcttttyactgtctttatagtttggccttttccagagtgttgtatagttgaaatcacagtatgtacccttttcagactggcttctttcacttagcaaaatgtctttgttttttctgtatctttttgtggcttgatagttttttccttttagcactgaataatattccactgtaggaatataccacattttgcttatgcagtcacctattgaaggac

SEQ ID NO: 574736 - DNA, 634 bp, Homo sapiens
accactcagtcttggcagcgcagatgaaaaactgggaaccatttgtgttgggtccagcatttgccatggacaagatgccagaacctgtatgctttcggatgaggttctcatcatcaaatttctccccatagatggacttgtcaccggtgccattagggcgtgtgaagtcaccaccctgacacataaaccctggaataattctgtgaaagcaggaacccttataacgaaatcctttctctccagtgctcagagcacgaaagttttctgctgtctttggaatcttgtctgcaaacagtttgatggagatgcggcccaagggcttgccatccctggtgatttcaaaaaagacgacggagttgaccatggctgatagtacagggctcacagcgatggtggcgtctgcaaagataaccactgatcttttcactgtctttatagtttggccttttccagagtgtygtatagttgaaatcacagtatgtacccttttcagactggcttctttcacttagcaaaatgtctttgttttttctgtatctttttgtggcttgatagttttttccttttagcactgaataatattccactgtaggaatataccacattttgcttatgcagtcacctattgaaggac

SEQ ID NO: 574737 - DNA, 679 bp, Homo sapiens
tatttatatccctcagaatacctcaaagttcccaagagcagtcagtatttaactctaaactatatcatctatatgatatatttattatatataatatatatatttattatwtgtataatacatattatatatttattatatattatatttatattgattatatataatatatatatatttattattatatatttttttgagacggagttttgcttttgttgcccaggctggagtgcaatggcgctatctcggctcaccacaacctctgcctcccaggttcaagtgattctcctgcctcagcgtcctgagtagctgggattacaggcatgtgccaccacgcctggttaattttgtatttttaatagagaaggggtttctccatgttagtcaggctggtattgaactcccatcctcaggtgatctgcctgcctcggcctcccaaagtgctgggattatagatgtgagccaacgtgcccagccaactatgtaatattttaattgtgtagtgataaccctcatcaaaagaagtattcattatggtcagtgtactctgcttatttaccactgaagcttaacacaaaattgttgaaataaacatgcatattgaagtacttagctagctattgaggcaatacaggtttctagatttactcatttttttcactgtacacacatgtcg

SEQ ID NO: 574738 - DNA, 553 bp, Homo sapiens
accacagttagatactctatggctagaactggccactttggaaaataatttgatggcttctaaatatrtgaaacatagaattgtcatatgacccagaaagttattcctaggtatacacccagattattggaaagaggtgttcaaacacaaattgtacacaagtatttttagcagcagtatctaaaatagccaaaggctgaacacaactcaaatgtcaataaaaatattattggataaacaaaaggttatatccatgaaattgaatgttatacagttataaaaagaaataaagtaccaatacgtacatgaaccttgatagcattatgccaactgaacgaagccgggcagaaaaggccacctattgtacgattctatttagatgaaaacaaaataggaaaatctatagagacagaaaacagatttgtggttgcttaggattgagtaggggatgggtgcataggacgttaacagctagggaaggcggggtttctttttgaagagatgaacatgctctataattcattgtgatggcggctccacttatctgtgcata

SEQ ID NO: 574739 - DNA, 553 bp, Homo sapiens
accacagttagatactctatggctagaactggccactttggaaaataatttgatggcttctaaatatatgaaacatagaattgtcatatgacccagaaakttattcctaggtatacacccagattattggaaagaggtgttcaaacacaaattgtacacaagtatttttagcagcagtatctaaaatagccaaaggctgaacacaactcaaatgtcaataaaaatattattggataaacaaaaggttatatccatgaaattgaatgttatacagttataaaaagaaataaagtaccaatacgtacatgaaccttgatagcattatgccaactgaacgaagccgggcagaaaaggccacctattgtacgattctatttagatgaaaacaaaataggaaaatctatagagacagaaaacagatttgtggttgcttaggattgagtaggggatgggtgcataggacgttaacagctagggaaggcggggtttctttttgaagagatgaacatgctctataattcattgtgatggcggctccacttatctgtgcata

SEQ ID NO: 574740 - DNA, 553 bp, Homo sapiens
accacagttagatactctatggctagaactggccactttggaaaataatttgatggcttctaaatatatgaaacatagaattgtcatatgacccagaaagttattcctaggtatacacccagattattggaaagaggtgttcaaacacaaattgtacacaagtatttttagcagcagtatytaaaatagccaaaggctgaacacaactcaaatgtcaataaaaatattattggataaacaaaaggttatatccatgaaattgaatgttatacagttataaaaagaaataaagtaccaatacgtacatgaaccttgatagcattatgccaactgaacgaagccgggcagaaaaggccacctattgtacgattctatttagatgaaaacaaaataggaaaatctatagagacagaaaacagatttgtggttgcttaggattgagtaggggatgggtgcataggacgttaacagctagggaaggcggggtttctttttgaagagatgaacatgctctataattcattgtgatggcggctccacttatctgtgcata

SEQ ID NO: 574741 - DNA, 553 bp, Homo sapiens
accacagttagatactctatggctagaactggccactttggaaaataatttgatggcttctaaatatatgaaacatagaattgtcatatgacccagaaagttattcctaggtatacacccagattattggaaagaggtgttcaaacacaaattgtacacaagtatttttagcagcagtatctaaaatagccaaaggctgaacacaactcaaatgtcaataaaaatattattggataaacaaaakgttatatccatgaaattgaatgttatacagttataaaaagaaataaagtaccaatacgtacatgaaccttgatagcattatgccaactgaacgaagccgggcagaaaaggccacctattgtacgattctatttagatgaaaacaaaataggaaaatctatagagacagaaaacagatttgtggttgcttaggattgagtaggggatgggtgcataggacgttaacagctagggaaggcggggtttctttttgaagagatgaacatgctctataattcattgtgatggcggctccacttatctgtgcata

SEQ ID NO: 574742 - DNA, 452 bp, Homo sapiens
ataggtgtaagtataaaaatgtatttaagagaatcccacaagcttggtataaggcagaaaataaatagatgcgacatgaataagtagtttattacatttgtatgctacctgcggactagaggaagcaagaaacacagccactatgcttgattagcattatagagatggtacratgatggttgccagaagctgggggaaggaggaaatggggaagtattgtttaatgggtatagagtttcagttttacaagatgaaacgaattatggagatggatggtagggacggctgcacaatgttatgactatatttagtaccactgaactgtacacttaaaatggttaacagagtacattttatgttatgtgtattttaccacaataaaaaaaataaaataccttaggaacattttcatgaaaaagcccacataaaattcattttaatgcacgtgttta

SEQ ID NO: 574743 - DNA, 453 bp, Homo sapiens
cataggtgtaagtataaaaatgtatttaagagaatcccacaagcttggtataaggcagaaaataaatagatgcgacatgaataagtagtttattacatttgtatgctacctgcggactagaggaagcaagaaacacagccactatgcttgattagcattatagagatggtacgatgatggttgccagaagctgggggaaggargaaatggggaagtattgtttaatgggtatagagtttcagttttacaagatgaaacgaattatggagatggatggtagggacggctgcacaatgttatgactatatttagtaccactgaactgtacacttaaaatggttaacagagtacattttatgttatgtgtattttaccacaataaaaaaaataaaataccttaggaacattttcatgaaaaagcccacataaaattcattttaatgcacgtgttta

SEQ ID NO: 574744 - DNA, 482 bp, Homo sapiens
ataagtagtttattacatttgtatgctacctgcggactagaggaagcaagaaacacagccactatgcttgattagcattatagagatggtacgatgatggttgccagaagctgggggaaggaggaaatggggaagtattgtttaatgggtatagagtttcagttttacaagatgaaacgaattatggagatggatggtagggacggctgcacaatgttatgactatatttagtaccactgaactgtacacttaaaatggttaacagaktacattttatgttatgtgtattttaccacaataaaaaaaataaaataccttaggaacattttcatgaaaaagcccacataaaattcattttaatgcacgtgtttatgcatagctttctatttttctcttttctctttatattccaaattctaatcagagaagggaatcccctctgtacctccaggatattcagtaaagaccactggaggtccat

SEQ ID NO: 574745 - DNA, 482 bp, Homo sapiens
ataagtagtttattacatttgtatgctacctgcggactagaggaagcaagaaacacagccactatgcttgattagcattatagagatggtacgatgatggttgccagaagctgggggaaggaggaaatggggaagtattgtttaatgggtatagagtttcagttttacaagatgaaacgaattatggagatggatggtagggacggctgcacaatgttatgactatatttagtaccactgaactgtacacttaaaatggttaacagagtacattttatgttatgtgyattttaccacaataaaaaaaataaaataccttaggaacattttcatgaaaaagcccacataaaattcattttaatgcacgtgtttatgcatagctttctatttttctcttttctctttatattccaaattctaatcagagaagggaatcccctctgtacctccaggatattcagtaaagaccactggaggtccat

SEQ ID NO: 574746 - DNA, 609 bp, Homo sapiens
aatggtacactcattcctgagggcaccgaggagggaggatagctttagatttctaagggagagttttatccattcatgaaggtccaaccccatgaccaaacacctcccagtgagccccacctgcaacattggggatcaaattttaacatgagattggaaggggcaagcattcaaaccatagcaagagttaaatttcctttttaaaaaattcactgatatgattccatttcgccatagataaaaactagtatttcagcctaccattgagtgtgcttatagctcaccaaaagggcactcagtctcgggaatacagatttgcatagaggtatcctattgcagtcaaagaaagagcaatgagggatagaaaaggttagtgatggagacaccagcgctgcattttgcaacaaacaatgtaaaaactttatggattggttctgttaacttacttcagtttacattcctctcaggtgggagaatygttgcgttttttcttaagatagaaaagcaattcaggtaatctgaaatctccacaagaaggataagaagcacagcagaaactattctaggcaggaagtcaatcctttcaactgtctgtgctccatagaaaca

SEQ ID NO: 574747 - DNA, 576 bp, Homo sapiens
tggtgaaacgccgtctctactaaatacaaaaaattagccgagtgtggtggtgcatgcctgtaatctcagctacttgggaggccgagctaggagaattacctgaccctgggaggctgaagttgcagtgagccaagattgtgycattgcactctagcctgggcaataaaaacaaaactccatctcaaaaaaaataatgtattttagggtaatattttgagtatctttacctccatatgtacaataaaaattattgcgatttttaatcttttctgtggagaaaacacaggtgtgatttctagtgtagctgaacatcgtttatttgacagtattgcacttgtgtgtgggtgtgtgcgtgtgtagctactttttaatttggttctcacaaaatgattagatactaacaattaattcagtaaaatgtatgttttgcaatatttctccatgttattatgctttaaattagtttaatcatgcccctataatgtgtacattttaacctttgactataggtctcaatcttactttggttcctgtatttgaatttatgctaataaagtcccacagcttaataagatt

SEQ ID NO: 574748 - DNA, 499 bp, Homo sapiens
atggcttttagaaatgtaaacgtgccaggctcagttaatcattcctatacccagacaagggagtatctcagggaaagcctgtctatatcaatgcagattttctctacaaatgcaaatctccccaacaaacacagcttttcagctattcttgtagaagaagctatctccagtcttccgagtagccatcgtgaaatatgtcaaaaagctggccaggcgcatgcctgtaatcccagcactttgggaggctgaagtgggtagatcacctgaagtcaggagttggagaccagcctgaccaacatggtgaaacgccgtctctactaaatacaaaaaattagccgagtgtggtggtgcatgcctgtaatctcagctacttgggaggccgagctaggagaattacctgaccctgggaggctgaagttgcagtgagccaagattgtgccattgcactctagcctrggcaataaaaacaaaactccatctcaaaaaaaataatgtattt

SEQ ID NO: 574749 - DNA, 576 bp, Homo sapiens
tggtgaaacgccgtctctactaaatacaaaaaattagccgagtgtggtggtgcatgcctgtaatctcagctacttgggaggccgagctaggagaattacctgaccctgggaggctgaagttgcagtgagccaagattgtgccattgcactctagcctgggcartaaaaacaaaactccatctcaaaaaaaataatgtattttagggtaatattttgagtatctttacctccatatgtacaataaaaattattgcgatttttaatcttttctgtggagaaaacacaggtgtgatttctagtgtagctgaacatcgtttatttgacagtattgcacttgtgtgtgggtgtgtgcgtgtgtagctactttttaatttggttctcacaaaatgattagatactaacaattaattcagtaaaatgtatgttttgcaatatttctccatgttattatgctttaaattagtttaatcatgcccctataatgtgtacattttaacctttgactataggtctcaatcttactttggttcctgtatttgaatttatgctaataaagtcccacagcttaataagatt

SEQ ID NO: 574750 - DNA, 576 bp, Homo sapiens
tggtgaaacgccgtctctactaaatacaaaaaattagccgagtgtggtggtgcatgcctgtaatctcagctacttgggaggccgagctaggagaattacctgaccctgggaggctgaagttgcagtgagccaagattgtgccattgcactctagcctgggcaataaaaacaaaactccatctcaaaaaaaataatgtattttagggtaatattttgagtatctttacctccatatgtacaataaaaattattgcgatttttaatcttttctgtggagaaaacacaggtgtgatttctagtgtagctgaacatcgtttatttgacagtattgcacttgtgtgtgggtgtgtgcgtgtgtagctactttttaatttggttctyacaaaatgattagatactaacaattaattcagtaaaatgtatgttttgcaatatttctccatgttattatgctttaaattagtttaatcatgcccctataatgtgtacattttaacctttgactataggtctcaatcttactttggttcctgtatttgaatttatgctaataaagtcccacagcttaataagatt

SEQ ID NO: 574751 - DNA, 601 bp, Homo sapiens
aaagcagaccagcagttgcctgggtctcagggtagaagcagagatcaaatacaaacagggagaagggaacttttggggatggtggaaatactctaaaattgagtggtggtaacagaactatatacttacgtacaataaatgaattttatagaattaaaattatacctcaataaagcattaaaaaaatcttgcaaaaattccctttcagaataaagggcatccaaattggaaaaaaaaaaagtcaaattatcgttgtttgcagatgatatgttcttatatttggaaaaacctaaaggstccaccaaaaaactattagaattgatcaacaaatacagtaacattgcaggatacaaaaccaacatacgaaaatcaggagcacttctacctgccaacagtgaacaatctgaaaaaaaaaaaaaaaaaagtaatcccatttacaatagacacaaataaaattaaatacctaagaatttagttaaccatggaagtgaaagagctctacaatgaaaactataaaacactgatgaaagaaacagaagaggacacaaaaaagtggaaaaatattccatgtacatggattggaaaaatcaattttgttaaa

SEQ ID NO: 574752 - DNA, 601 bp, Homo sapiens
aaagcagaccagcagttgcctgggtctcagggtagaagcagagatcaaatacaaacagggagaagggaacttttggggatggtggaaatactctaaaattgagtggtggtaacagaactatatacttacgtacaataaatgaattttatagaattaaaattatacctcaataaagcattaaaaaaatcttgcaaaaattccctttcagaataaagggcatccaaattggaaaaaaaaaaagtcaaattatcgttgtttgcagatgatatgttcttatatttggaaaaacctaaagggtccaccaaaaaactattagaattgatcaacaaatacagtaacattgcaggatacaaaaccaacatacgaaaatcaggagcacttytacctgccaacagtgaacaatctgaaaaaaaaaaaaaaaaaagtaatcccatttacaatagacacaaataaaattaaatacctaagaatttagttaaccatggaagtgaaagagctctacaatgaaaactataaaacactgatgaaagaaacagaagaggacacaaaaaagtggaaaaatattccatgtacatggattggaaaaatcaattttgttaaa

SEQ ID NO: 574753 - DNA, 602 bp, Homo sapiens
tctgttgcacaggctggagtgcagtgacatgatcacagctcactgcagcctcaacctcctgggctcaagcartcttcccactttaatctcccaagtacctgagactacaggcacatgccgccatgtctagctaatttctgtttttgtttttgttttctagtgatagggtttcgctgtgtttcccaagctggccttgaactcctgagctcaaacaatccacccatctcggcttcccaaagtgttagcactacagatgtgagctaccacatctggcctcgtattacaatttagagaaattaaagcctggatttcaatggaggtgactacaagacaaatctattgcaagataagattaaatataggataaaaattaggaagttaaatatgtgtagtttatgatatttgtaaatctgtattgactcgcttgttccctaaatgtagatagaataccagatttaacaagaaagaaaattgcaaacaactaacatttattgatctccaaatctgagcacttccacaaatattatctaacaatctccctcattacctttatgaggcagacaattgtccatgtcagagacgttaaaactgaggttcaaaaa

SEQ ID NO: 574754 - DNA, 622 bp, Homo sapiens
cttggcttgctgcaatctccgcctcccaggttcaagcgattctccatcctcagtagcttggattacagtcacccaccaccatgcccggcttacttttgtgtgtgtgtatttttagtagagacagatttcaccatgttgaccaggctagcctcgaactcctgacctaaagtgaactgcttccttcagcctcctaaagtgctgggattacaggagtaagccaccatgcctggccaagcatagyatcttaatacttacctatattgcttctatttttttgtatctttcttatggttgtttcagctctttgttatgcaaaatgtaagactaaaaagtgatttaggttttctctcagctgtgctattttccagtttagaatgacattttggggaactgttctctgcttcggattatcacagttctcaaaagaggagtatgcatttgcttgctccaattcctcttcttctacactctcttaagcattcctcaaccagtctaatatctcatagttccccaaaactgctctgttcaagaccattagtaagatctttgatgttaatctgtggaccgtatctctgtccttattttacttgaagcccaacagcaaataaaaaagttgttctcc

SEQ ID NO: 574755 - DNA, 622 bp, Homo sapiens
cttggcttgctgcaatctccgcctcccaggttcaagcgattctccatcctcagtagcttggattacagtcacccaccaccatgcccggcttacttttgtgtgtgtgtatttttagtagagacagatttcaccatgttgaccaggctagcctcgaactcctgacctaaagtgaactgcttccttcagcctcctaaagtgctgggattacaggagtaagccaccatgcctggccaagcatagcatcttaatacttacctatattgcttctatttttttgtatctttcttatggttgtttcagctctttgttatgcaaaatgtaagactaaaaagtgatttaggttttctctcagctgtgctattttccagtttagaatgacattttggggaactgttctctgcttckgattatcacagttctcaaaagaggagtatgcatttgcttgctccaattcctcttcttctacactctcttaagcattcctcaaccagtctaatatctcatagttccccaaaactgctctgttcaagaccattagtaagatctttgatgttaatctgtggaccgtatctctgtccttattttacttgaagcccaacagcaaataaaaaagttgttctcc

SEQ ID NO: 574756 - DNA, 556 bp, Homo sapiens
ctttttaaaatttttttgagacagggtctcactcacatcactcaggctgcagtgcagtggtgtgatcatggctcactgcagcctcgacctctcaggctcaagcgatcctcccacctcagtctccccagtagctgtgactataggtgcataccaccatgctcagctaattttcaaaatttttttatagagatgggatttcaccatgctgcccaagctagtttcaaattcttgagctaaagcaattctgtccaccttggccttccaaagtgctgggattacaggcatgagcccaacatataagtttttgaaaatgtgtccaatacaagataaatgtgctaagagctaaaagtgagaagggcaggtgtaatcattgctctggcttttctctctcttcagagttagagtcattcataycctttatatttgttctggaaaattagttaaatataagatgagacaaatgtgagaatgggtagaaagaaaggaggaaacaagtctgacctactgttttatttcacactaccttgttttactcacggccaaacatgttatcctt

SEQ ID NO: 574757 - DNA, 599 bp, Homo sapiens
tattattcaataataaataatttgtattatttatttcagataataatacattcaaataataataatcataatttcagtatcttccacagaaaagggagagaaggctaagttttagctccttctgtggcccctacctcaggagtaatgccttaagtcaggaggtggttttatatttatgcatgtgtagcatctctagtagcatagcagcgacactggggagctctgcagagggattarcaggtggcagagggttaggaatggcctccaaggcaccagcaggggcagctgagtgcgagacccaggcaggtgctgaaggacatttctatctaatgcctcatagcagtggtgtttagaatcaaccatgcagagcctgtgtttcttatctataaaatgatggcaataataccaattttttcacaggttttttcaatgaagattaaatgacatagtgattgcaatatgcttagcacagtgtgtggaaaattgctagctttagacaagagtcttgactctttccatcctcaacaccttggaccaagcaagtgtacgatcaccatgatgcaaagtgttcagcatttgcacaaagtctagtgtggttc

SEQ ID NO: 574758 - DNA, 520 bp, Homo sapiens
aaacattttaatttttggtagagatgagatatcacccaaattggtctcaaactattatgcacaagcaaccctcctgcctcagcctgctaaagtgctgggattgtaaatatgaatcaccatgccttgccatttttygttgtttttttttaatggtgtatttgaaaagcataagttttacattttgatgaagtacatatattatctttttcttttatggcttttgcttttttgtatcctaaaaatctggacgactactacaaggctaaaaagtgttttctcttatgttttcttctggatgttttatcattttgacttctatgtttaggtatgtgacctcagtctatggtgtgaagtaaagatggatgtcaatttttttcatatcgatagacagcgccatttgttgaaaagactatccctttctcattgaagtaccttggtactcctgtcatataccaatcacccatatatgtgtggatctttttctatcccattgattcttacatgaatacccactgccttg

SEQ ID NO: 574759 - DNA, 520 bp, Homo sapiens
aaacattttaatttttggtagagatgagatatcacccaaattggtctcaaactattatgcacaagcaaccctcctgcctcagcctgctaaagtgctgggattgtaaatatgaatcaccatgccttgccattttttgttgtttttttktaatggtgtatttgaaaagcataagttttacattttgatgaagtacatatattatctttttcttttatggcttttgcttttttgtatcctaaaaatctggacgactactacaaggctaaaaagtgttttctcttatgttttcttctggatgttttatcattttgacttctatgtttaggtatgtgacctcagtctatggtgtgaagtaaagatggatgtcaatttttttcatatcgatagacagcgccatttgttgaaaagactatccctttctcattgaagtaccttggtactcctgtcatataccaatcacccatatatgtgtggatctttttctatcccattgattcttacatgaatacccactgccttg

SEQ ID NO: 574760 - DNA, 490 bp, Homo sapiens
cctgttagggccttaaaagcatgtgtctgaactgcctactttttttwagccatagccagagaaccacagacatgggctttaaaggctttgtgttttaaagtttttttattgatacaaatatttgtacctatttatggggtacaggtgatattttgttgcatgcatagactgtgcagtgattaagtcatgatattttgggtacctatcatctcgagcatttatcatttctatatgctgggaacatttcaagtcctctgttacagcttttttgaaatatacaatagattgttgttaactatagtcaccctactctgctatcaaacattaaaacctattccttctgtctaactgtgtatgtgtacccattaaccaaattctctataattctcacaagctctcaccatctacacacccttttcagcctctggtatctcttattgtctacctccatgaaatcaactttttttagattccatatatgagtgagaac

SEQ ID NO: 574761 - DNA, 562 bp, Homo sapiens
ataggcgcatcaccataaattagaacatgtggagcttttgtttttcctttgactttcaagtccatcatttttattagtgttcttagaacccctttctctgaagacagactttgcaactttctctaaagtttttaaagagacaaccactttgataaattgaaggaaagcaagaacagagagcttggattttatctgtttttttttttatttttccattagcataaatataacatacaaggaaaattcatgtgtgccttaggtcatgactgtaatgcttgcatcttctctaggaagaagccgtttttttgaagttggtataaaagtatgtgtcaagaacactaccttgaattttaccttgaagtcataagccatccacagaatgtgtacgtttaggcaaaaatgctcattaaataaacytacattctgtctaaaagtttgttgtaaaacttatcaattgaaatttctcaatatttgcaactatgtcgtagcaatgtatagccacatatgaagggccaggtgtaacctgcattttcagtttggcacattgcccttctgtgatatt

SEQ ID NO: 574762 - DNA, 615 bp, Homo sapiens
ctgttgtggggtggggggagggacagcattaggagatacacctaatgttaaatgatgagttaatgggtgcagcacaccaacatggctcatgtatacgtatgtaacaaacctgttgtttgttacatacatacatacatacatacatacatacaaacgttgtgcacatataccctaaaacttaaagtataataaaaaaaaaaactaaaagacttaaacagccacacttaatagtggagaactttaacacaccactgacagcattagacagataatgaaggcaaaaaactaacaaagaaattctggacttaagctcaacacttgaccaactggacccaatagatatctgcagaatacttcacccattaatcacagaatatacattcttctaatctgtacatggaacatacttcaagattgaccatattctcagccataaagcaagtctcaatcaattccaaaaaaaatcacaattatactaaccatacactcagaccacagtggaataaaaatacaaatcaataccaagaagatatctcaaaaccacakaataatatggaaattaaacaacttgctagtaaattacttttggtaagcaacaaaatcaaggcagaaatc

SEQ ID NO: 574763 - DNA, 598 bp, Homo sapiens
cagtactatgcatttctatgcaccagtaatgttcatgctgagagccaaattaagaacacaatcccatttacaatagccacacaaaaaataaaacacctaggaatacatctaacctaggaggtaaaagacctctacaaaaagaactaaaaacactgccaagagaaatcataaatgacacaaacaagtgtaaaaacattccatactcatggattgaaaaaatcaatatcactaaaaygaccttattgcccaaagcaatctacagattcaacactatttataacaaactaccaacataatttttcacagaattggaaaaaaactattctaaaattcatatggaataaaaaaagagctcaaatagccaaagcaattctaagcaaaaagaacaaagccagaggcatcacatcacctgacttcaaactatactataaggctgcagtaaccaaaacagtatggtactgatacaaaaacagatacataaacctatggaacaaaataaagagcccagaaataaagcagcacgtctacagccatctaataatcttcaacaaagttgacaaaaataagcaacatgaaaaagactccctattcaataaat

SEQ ID NO: 574764 - DNA, 598 bp, Homo sapiens
cagtactatgcatttctatgcaccagtaatgttcatgctgagagccaaattaagaacacaatcccatttacaatagccacacaaaaaataaaacacctaggaatacatctaacctaggaggtaaaagacctctacaaaaagaactaaaaacactgccaagagaaatcataaatgacacaaacaagtgtaaaaacattccatactcatggattgaaaaaatcaatatcactaaaatraccttattgcccaaagcaatctacagattcaacactatttataacaaactaccaacataatttttcacagaattggaaaaaaactattctaaaattcatatggaataaaaaaagagctcaaatagccaaagcaattctaagcaaaaagaacaaagccagaggcatcacatcacctgacttcaaactatactataaggctgcagtaaccaaaacagtatggtactgatacaaaaacagatacataaacctatggaacaaaataaagagcccagaaataaagcagcacgtctacagccatctaataatcttcaacaaagttgacaaaaataagcaacatgaaaaagactccctattcaataaat

SEQ ID NO: 574765 - DNA, 485 bp, Homo sapiens
gagggatctaggagaacatggagggaagaatgtttcaggcagcaggaacagtaagaacaaaggccctgtagcgggaatgtaactaataggttcatggaacagcaaggatgccactgtagctggaaggggcaagagtggatacaggggaaccaggtggaagatgattgcaaacatctgctgcagaaacgacagtgtctcaagatcaggaagggagctgtggaggtaatgagaagtaggcagattccaaacatattttgcaggtagtcaacaagatttactcatggtattcatggagggagtgagaraagaaaagacttgaagatgattcggaggtttttgtcctaacagtggaaagcactgtgctgcattactgagatacaccatagctgatataaccagtcttctttttttttagagagatggggtcttgctctgtcactcaggctggagtgcagtgctgtgattatagctctctgcagccttga

SEQ ID NO: 574766 - DNA, 531 bp, Homo sapiens
ggtggtgcgtgcacacttctaaggggtatgagaggaaaacattggaatattyatatttactttttatctacaattaggcagatattaagctttattaacatttttaaaagaatttttatactaacttttaataaacttgtggacactgacagccatattaggtcaggcagtcactagacaagtgtggtacccaagggaccctggagtaagagtgatgttcaaatgttgctgacagtagcgtccagctcacttgttcactttcagcacattgcaacatgttgcagtttacttgtgcctggtctagtggatttacaaaggatactccttagttttagctaaactaacctgccaaatggaatcatgactttacatgatgtcttccaggagactatggatcaaggataacaccaataatagaagaacaagtgaacccataagaaaagatagggccaggccaggcacggtggctcatgcttgtaatcccagcactttgggaggccgaggcagatggaacacttgaagacaggagtt

SEQ ID NO: 574767 - DNA, 381 bp, Homo sapiens
tattaataataacagttaacatattttcatagcctattgtggkaaagcattgtattaagttttttatatacatgcctttcagttaattctcacaacagccttataaggtgtataatattaacccgattttacagcattaaaaaaactgaggttccaagaggcaaacttacttatggtcatataaaaataagtgacagggccactattaacacagataacctcagatcccatgtgcctttccacaaccctattacctataaaagtgtctatttagtgaaagcttacgggcatcctgagttgatggcgaaacttcaaattacacactggtttgtaaactagcttaggtggaggcttgtcttgggatatcaggcccaacagtgc

SEQ ID NO: 574768 - DNA, 381 bp, Homo sapiens
tattaataataacagttaacatattttcatagcctattgtgggaaagcattgtattaagttttttatatacatgcctttcagttaattctcacaacagccttataaggtgtataatattaacccgattttacagcattaaaaaaactgaggttccaagaggcaaacttacttatggtcatataaaaataagtgacagggccactattaacacagataacctcagatcccatgtscctttccacaaccctattacctataaaagtgtctatttagtgaaagcttacgggcatcctgagttgatggcgaaacttcaaattacacactggtttgtaaactagcttaggtggaggcttgtcttgggatatcaggcccaacagtgc

SEQ ID NO: 574769 - DNA, 381 bp, Homo sapiens
tattaataataacagttaacatattttcatagcctattgtgggaaagcattgtattaagttttttatatacatgcctttcagttaattctcacaacagccttataaggtgtataatattaacccgattttacagcattaaaaaaactgaggttccaagaggcaaacttacttatggtcatataaaaataagtgacagggccactattaacacagataacctcagatcccatgtgccttyccacaaccctattacctataaaagtgtctatttagtgaaagcttacgggcatcctgagttgatggcgaaacttcaaattacacactggtttgtaaactagcttaggtggaggcttgtcttgggatatcaggcccaacagtgc

SEQ ID NO: 574770 - DNA, 381 bp, Homo sapiens
tattaataataacagttaacatattttcatagcctattgtgggaaagcattgtattaagttttttatatacatgcctttcagttaattctcacaacagccttataaggtgtataatattaacccgattttacagcattaaaaaaactgaggttccaagaggcaaacttacttatggtcatataaaaataagtgacagggccactattaacacagataacctcagatcccatgtgcctttccacaaccctattacctataaaagtgtctatttagtgaaagcttacgggcatcctgagttgatggcgaarcttcaaattacacactggtttgtaaactagcttaggtggaggcttgtcttgggatatcaggcccaacagtgc

SEQ ID NO: 574771 - DNA, 518 bp, Homo sapiens
acttacattttcattaaaaagctagttttgacacaaagcaaattcttttttcctttgtttcgaactgaagctagaaccccaataacaataaaatctcaaggttgaaagaccatctcccccagggcagggcgctgtggcttacgcctctaattccagcactttgggatgccaaggctggcggatgatttgggcccaggagtttgagaccagcctgggcaasatggtgaaactccatgtctaccaaaaatacaaaaattagccactctcataacacagtctcaaagtaaataataataataataaacaaaaacaaaaagattatctctcccaagtgcccatctgaagctgaattccctgtagatcattttggccagctctgcatcgctctggatttgggcaaattttccttgtgttaagccaaaaatcataccgcaggtacggacaaaataagtccacactcttttgtgtgtgtgtgtgtgatggaatttttgctcttgttgcccaggcctggagtgcaa

SEQ ID NO: 574772 - DNA, 569 bp, Homo sapiens
ggggagggcggggggtggagacggagtcttgctctgtctcccaggtgaaatgcagtggccccatcttggctcacagcaacttctgtctcccaggttcaagggattctcctgcctcagcctcccaagtagctgggaccacaagtgtgtgccaccaccaggcccggctaatttttgtatttttagtagagacagggtttcaccatgttagccaggctggtctcaaactcctgayctcaggcaatctgccctcctcggcctcccaaagtgcttggattacaggcttgagacaccgcgtctggctgcttatggttaatttctaaataaataagattaatcactaagagtttcttgatgaaagtgattttggcatctctgactggagttaggtaagaaaaattgacatggacaaaaagactctgatttcctcatgtttacatgctacaaatattcaattaaaaaaaaccatgatagcttaggttcatggttaacaagcatattcacatggaatactatggtctggatgttgttagtccttgccaaaacttaagttgaaatttaattgtcagtgt

SEQ ID NO: 574773 - DNA, 569 bp, Homo sapiens
ggggagggcggggggtggagacggagtcttgctctgtctcccaggtgaaatgcagtggccccatcttggctcacagcaacttctgtctcccaggttcaagggattctcctgcctcagcctcccaagtagctgggaccacaagtgtgtgccaccaccaggcccggctaatttttgtatttttagtagagacagggtttcaccatgttagccaggctggtctcaaactcctgatctcaggcaatctgccctcctcggcctcccaaagtgcttggaytacaggcttgagacaccgcgtctggctgcttatggttaatttctaaataaataagattaatcactaagagtttcttgatgaaagtgattttggcatctctgactggagttaggtaagaaaaattgacatggacaaaaagactctgatttcctcatgtttacatgctacaaatattcaattaaaaaaaaccatgatagcttaggttcatggttaacaagcatattcacatggaatactatggtctggatgttgttagtccttgccaaaacttaagttgaaatttaattgtcagtgt

SEQ ID NO: 574774 - DNA, 629 bp, Homo sapiens
tgtttaatggccaattaaactggataactttgtccaactaactctttattatggcttttaacatattatgatctatttttactattatatactatttactataatgttttmtatgtcatcttccctatttgtaaaccctgttttgaatttttgaggcacaattagtccttttatcttcatatggctttggaaaactataacttattttatgtggcatttcatgtggcatttcctcagtacctattttattatgtaataaatattccataaaaatgtattaagttggtcactatacctttcttcttccccaaacataaagaatttagaagttgcaaaaccaaaatcttccatctcaattggcatatattgttacacagtattttatttctacctcattctctactgaaaataactcattgttcttattttcattattagcaatattatttacatacagaatgcttttcttaggtatatcagtgatttctagtttcgttgtttactgattatttataaattaaaaattttgttaaggttgacagagcatgtttctttctgtttttaaatttacctgtcaaatttttccttgtaggctacaagtttttgtaacaaatcaagtaaatgtttct

SEQ ID NO: 574775 - DNA, 462 bp, Homo sapiens
ccggggctgttctgagggctgggactgtcagccaatccgtctgtcgccgccgttcccaccagtccggctgtggctgcggtccgcgcagcgcaggggcgaccggcgagctccggcagcgacccgggcggcgcgattcccgcgagtccttgccccggctcagccgtctgtgcygcccgcccacccccgggactgaccaatgggggcgcgggggcggggcctgggcgcggaggccgcgcccgctaggagccccgggcggcggcaggtgttgcgggtggggcgaccccgaggtgcgacctcggcgtggctggcggttggtccgggcgaggagcccgcagcctgggcgtcagcgtggtcagggccgtcgtggctcccgccgcgggcctcggcgcagagatcctaaggccgcggcgccgtcccggtcccgccagtggtgccacccggctgcctcgccgtggtgtgccg

SEQ ID NO: 574776 - DNA, 580 bp, Homo sapiens
ttttcatctctgattttatttggatcttcttttttcttagttttgctaaagctttgtcaattttaacttttcataaaatccaaggttttttttattgatcttttgtattgttttcttcacttcaatttcatttatttcaatgaaataaattttaatttctgctttgatctttattatttattttattctactaattttaggtttgatttcctcttgcttttctagtttttaaagatgcgttagcattgttacgttgattctttgaaacttttcctcttttttgatgtaagcacttttagctatgaacttccctcttagcactgctttaactctttttcataagttttggtatggtatatgtccattatcatttatttcaagaaatgtttcamttttcttgttcattccttcattgacccactagtcattcaggaggatattgtgtaacttccatgtgtttgtgtagtttccaaaattcttcttgcttttgatttctacttttagtccattgtggttggagaaaatacttggtattatttcaatttcttaaaatgttttaagacttactttgtgacttaat

SEQ ID NO: 574777 - DNA, 588 bp, Homo sapiens
atttcattttctcctgctatttaggaactaatctgtcattgttctcttggctagagaaatatggttttccacaggtaggagtaagtgcaattttagttcactttgaggcaattcttatattactggatggattcgactatatttactagggatgaaaattatatctcttttcaatacaaagagaaagtgaatttagtgagagcggttcattccatttcataagggtctccaaaggcttggccttttccctctttctccatatctactaaggcaaattctcttcagggagattcagatatcaaattgagaaggcactgcaggaaaaaatttacctccattcctggagatggttctrggctaagccattcactttcctgttcttcagcttcaccccattaagaaaagaagaacacaagtagctgtttcccatgagtacctgttttaattctaccttcagggggaaaaaccagcttgtttgcaagtaatattatagttactatgcaatatataacctaatgtcacaaataacaatacagtgtgcatggtgcacattgcattaaagatttaatgaggcaggaaagttttccc

SEQ ID NO: 574778 - DNA, 588 bp, Homo sapiens
atttcattttctcctgctatttaggaactaatctgtcattgttctcttggctagagaaatatggttttccacaggtaggagtaagtgcaattttagttcactttgaggcaattcttatattactggatggattcgactatatttactagggatgaaaattatatctcttttcaatacaaagagaaagtgaatttagtgagagcggttcattccatttcataagggtctccaaaggcttggccttttccctctttctccatatctactaaggcaaattctcttcagggagattcagatatcaaattgagaaggcactgcaggaaaaaatttacctccattcctggagatggttctaggctaagccattcamtttcctgttcttcagcttcaccccattaagaaaagaagaacacaagtagctgtttcccatgagtacctgttttaattctaccttcagggggaaaaaccagcttgtttgcaagtaatattatagttactatgcaatatataacctaatgtcacaaataacaatacagtgtgcatggtgcacattgcattaaagatttaatgaggcaggaaagttttccc

SEQ ID NO: 574779 - DNA, 634 bp, Homo sapiens
aaaataaaaagatgctccacatcrtatagtattagggaattttaaattaaaataagatagcagatacacttattagaatggctagaatccagatcactgacaccaaatgctggccagagtgcggaccaacagaaactctcattcagtgctggtgagaatgtaaaatgatacagctactttggaagacagttggtggtttcttacaaaactaaacataatcgtaccacatgatccagcaaatacgatccttggtatttacccaaaggtgctgaaaacctaggtccacacagaaatctgcgcttggatacttatagcagctttatacataactgccataactttgatgcaaccaagaagcccttcagaaggtgccttagtccattctctgttactagaacagagtacctgagactgggtaatttctacagaaaagaggttcacttaggctcatggttctataggctgagaagtccgagattgggagcccgcatctggccagcctctggtgaaggcctcatgctgccttgtaatatggtggggaagaagaagaggaagtggacacttgtgaaaagggcaaatcaaaaggggtggcctcacttgataacaacccactctcatggtaactaattgagca

SEQ ID NO: 574780 - DNA, 634 bp, Homo sapiens
aaaataaaaagatgctccacatcatatagtattagggaattttaaattaaaataagatagcagatacacttattagaatggctagaatccagatcactgacaccaaatgctggccagagtgcggaccaacagaaactctcattcagtgctggtgagaatgtaaaatgatacagctactttggaagacagttggtggtttcttacaaaactaaacataatcgtaccacatgatccagcaaatacgatccttggtatttacccaaaggtgctgaaaacctaggtccacacagaaatctgcgcttggatacttatagcagctttatacataactgccataactttgatgcaaccaagaagcccttcagaaggtgccttagtccattctctgttactagaacagagtacctgagactgggtaatttctacagaaaagaggttcacttaggctcatggttctrtaggctgagaagtccgagattgggagcccgcatctggccagcctctggtgaaggcctcatgctgccttgtaatatggtggggaagaagaagaggaagtggacacttgtgaaaagggcaaatcaaaaggggtggcctcacttgataacaacccactctcatggtaactaattgagca

SEQ ID NO: 574781 - DNA, 607 bp, Homo sapiens
ctccagctgggcggacccagcagagctggacagtgtcaggctgcagggctcccatcttgcctcgtgatgtggtttggatctgtgttcccacccagatctcctgttgaaatgtaatccccagtgttggagatggggcctggtgggaggtgattggatctgggggtgggttctagtggcctggtgggaggtgattggatctgggggtgggttctagtggcctggtgggaggtgattggatctgggggtgggttctagtggcctggtgggaggtgattggatctgggggtgggttctagtggcctggtgggaggtgattggatctgggggtgggttytagtggtttagcaccatctccctagggctgctctcatgatagagttctcagatgtggttgtttaaaaacatgtggcacctcccttttctctctcttgttcccactcctgccatgtgaaatgagctgcttcccctttgccttctgccatgattgaacatttcctgaggcttccccagtcacgcttcctgtgcagcctgtggaactgtgagccaattataccccttttcttcataaattacccagtcttaggtatttatttacagcagttcaaga

SEQ ID NO: 574782 - DNA, 567 bp, Homo sapiens
tctgtgaaatattctgttggcatttccagtgtagcatgtcaaaaactaaattaattatctgtcattctccttctactttcctctttcctcccatgctctaatccaaatgcctttcttctcatatccttcattttggttagtgcattaccatttacccagtcactcaaactagaaactttagaattaacctcaactcttcttctttcttatcctcaactcttcttctttcttatcctcaactcttcttctttcttaycctctaaatttacataagtggatcattatcaattttctttgaacaaagactagattttacccttctctgttaccactgctactacttagtttaagaactgaagatattttaccactattgacttgctaccatatttcagttttctagttgttttaaccaatatagttctacaaggcaaacttgtaatcatgttactccccaaatacaaaaatttttggatgatattcaaggttctttgacaatttggaccttgctttcatctccagttacagctcctctggtatattcttaatctttcctgaatacacata

SEQ ID NO: 574783 - DNA, 468 bp, Homo sapiens
aatatctctttgtctcaatttacaatggggatgataatargatcattgtgaagattaaatgagttaatgtatgtaaagtgcttaaaacagtgagtggtgtatagtatctgctgtatggttttgtgctatttctgttatcaataactagctttcttaagtgacatgagctacattttctttcatttagttttccaagacatgggagattttcagtctgcatgatatctaatcctttgtagccactgaaggcattaaatgtctgagtgttttgagcctgtactaaaaggggaactcctatatatattttgttattacagtgtaatattgaagtgctactcttttttgcctcttcataccagattctgtcctgcttctgattttcctggctatctgaaatgttgatgataattactctgttttcatttttactccatatctcaggcttgatacataccactgttttatgtc

SEQ ID NO: 574784 - DNA, 516 bp, Homo sapiens
acacatgcatatgcacacatgcatgtacatatatgtatatatgtatatatatgtaggcatatacatagagtttccctatccacttgattgatgggcatttgggttggctccacaatttggcaattgtactgctataaacatgataaacatgtatgtccaagtatctttttcaaataatgacttcttttcctctgggtatacacccagtagtgagattgctagatcaaatggtagttctacttttaattctttaaagaatctccacactgttttccatagtggctgtactagtttacattcccaccagcagtgtagaagtgctccctgtstaccacattcatgccaacatctactgttttttgattctttgattatggccattcttgcaagagtaagctggtattgcactgtcgtttcaatttgcagttcactgatcattagtgatgttgagacttttttcatatgtgtgttggccctttgtataccttccatgagaattgtgtattcatgtgctta

SEQ ID NO: 574785 - DNA, 548 bp, Homo sapiens
attaggtttcagctatttatctttgtttttattgcatttgcttttgggttcttggtcatgaaatccttgcctaagccaatgtctagaagggttttccaatgttatcttctagactttttatagtttcatctcttaggtttaagtccttaatctatcttaagttgatttttgtataaggtaagggatgaagatcatttaattctccttcatgtggctagccaattatcccagcactatttgttgaaaaacgtgtcctttccccaactttatgtttttggttgctttgttgaagatcagttggcagtaactatttgaatttacttctgggttctctattctgttccattggtttatttgcctaattttataccaataccatgctgttttgataactgtggccttatagtatagtttgaaatgagatagtgcgatgcctccagatttgtttgttctttttgcttagwcttgctttggctatgcaggctcctttttggttccatatgaattttagaattttttgttctaactctgtgaagaatgatgatggc

SEQ ID NO: 574786 - DNA, 608 bp, Homo sapiens
atgagcaaatgcactatatattcctttgggcagcctttacacagaatcacaagagcccataattgatattgaaaggagaaaatgcaggttgatgatatatattaaaaatgtaaaactcctgcagttgatgcagctgtgtgtagcaggtcaaggctaagataactcctttggccttcagtttgtggtggtgatggccagtggataagtgccttcagttgtgaagatgaatgccctcctactcttattttgcttctgttatgtgatttacttggattaatagggcaggtaaaagcacagctgcgcagttccaagcttcaagaggcytcaggtgcatttcttgcactctcttgcacctttcacattgctataagaacatgctgcacgtacatgccagtttcaggagcagaatgagatacatggagcagagtcaagccattgtcacatgagtgagaaaacagtaagcagtgaagttcagtatggattagctgaatgccacagatacgagaaataaatgtttactgttttaaggcattggggtctggggtgatctgttacgcagtaaaagtccgttgataacacaacttccttcccaagtcccaccaccacca

SEQ ID NO: 574787 - DNA, 562 bp, Homo sapiens
gggacatatgaacaaataaaaaatgaaagaaggaaggcaagaaggggaaaagaaacaagaaaatgaaaacatgactacatcaatacttmtttttctggaatgaggcccacataaggttttctctttaatagtggcagaagatgataaataaaagatcttttttttttttttttttttttgggcaagtgatctctaaatgtaaaaagtctgagattcacttatacatactcgaactattcaccttttttttggagggggggaccctcacctatacaaaaatgtggtggggggggtctgagtcctctccctttttgaacattccaggattttcattcctgtgtcatgctttgtcatggagggggcagaagggaggagaacatatgattggcacaagtcgctgttactcttatccttgtagctcttgttatacagctctttatcttgtcatggggttaattgttttaacattttgatctctacacatcttcactgataatcatggacaatatgagaaactacaactaaaacatgtgttaaatcagccatcaatatttcaaaaatt

SEQ ID NO: 574788 - DNA, 562 bp, Homo sapiens
gggacatatgaacaaataaaaaatgaaagaaggaaggcaagaaggggaaaagaaacaagaaaatgaaaacatgactacatcaatacttatttttctggaatgaggcccacataaggttttctctttaatagtggcagaagatgataaataaaagatcttttttttttttttttttttttgggcaagtgatctctaaatgtaaaaagtctgagattcacttatayatactcgaactattcaccttttttttggagggggggaccctcacctatacaaaaatgtggtggggggggtctgagtcctctccctttttgaacattccaggattttcattcctgtgtcatgctttgtcatggagggggcagaagggaggagaacatatgattggcacaagtcgctgttactcttatccttgtagctcttgttatacagctctttatcttgtcatggggttaattgttttaacattttgatctctacacatcttcactgataatcatggacaatatgagaaactacaactaaaacatgtgttaaatcagccatcaatatttcaaaaatt

SEQ ID NO: 574789 - DNA, 562 bp, Homo sapiens
gggacatatgaacaaataaaaaatgaaagaaggaaggcaagaaggggaaaagaaacaagaaaatgaaaacatgactacatcaatacttatttttctggaatgaggcccacataaggttttctctttaatagtggcagaagatgataaataaaagatcttttttttttttttttttttttgggcaagtgatctctaaatgtaaaaagtctgagattcacttatacatactcgaactattcacctttyttttggagggggggaccctcacctatacaaaaatgtggtggggggggtctgagtcctctccctttttgaacattccaggattttcattcctgtgtcatgctttgtcatggagggggcagaagggaggagaacatatgattggcacaagtcgctgttactcttatccttgtagctcttgttatacagctctttatcttgtcatggggttaattgttttaacattttgatctctacacatcttcactgataatcatggacaatatgagaaactacaactaaaacatgtgttaaatcagccatcaatatttcaaaaatt

SEQ ID NO: 574790 - DNA, 415 bp, Homo sapiens
gcccgccacccagcacccttgccccagggccgccagcgggcaactcgtctcctgcccgcatcccacctccgctcgccaacccgcgccctctgccctgggcgcgcaacctgccttgcccggggccgcccctgcgctctccggaccccctctcgccgctgtcagcgcaaagtgactgtcgctgcactcaccttttctaggacatggtggggaggctggggcgggggaargggaacggctagactcccgccgccgctgctgccgccgccaccagcaagtccaatattggctgatcggcggtgaggatggagaggatgataatcccggcagtggcagtcgccctgctgacggtgggtagagcaatagtgctgttaccctacaagaggcggcgaggcagcggcgccaaatcgcgcagagg

SEQ ID NO: 574791 - DNA, 595 bp, Homo sapiens
gcagtgactcatacctgtggtcccagcatttttggaggccagggcaggcagctcgcttgagcctaggagttagagaccagcctgggcaacatggcgaaaccccgtctctacaaaaaatacaaaaatrttagacatggtgttgcatgcctgtagtcccagctactcaggaggctgaggtgggaagataaattgagtccaggagtttgaggctgcagtgaactgtgacagtgtcactgcactccagcctgagagacagagccagaacctgtctcaaaccatccccccaaaatttacattactatgtagaactatacacagtgtgtttatgcttgattaattgatttttttaacctgttaaataatttaaagttgagaaccaaatagaaatgaacctaacaagcttcacatagtcactaaaaaccagacaatagtgcaggcttttgtacaactagtgatgtgtgtgtatatgatattaggaatgatcatcaattctcccttgtatctgggcatttcagatcggtcaaggatcattatatcaaattagagctgtggccaacaatgagtaaggagattgaattggtaataaaaggtttca

SEQ ID NO: 574792 - DNA, 592 bp, Homo sapiens
caaacaacttagcagcaagaaaacaaataacctcatttaaaaatgggcaaagaacctgaacagagatttctcaaaagatgtaccaacagccaacaagtatatgaaaaaatgctcaacatcactaattatcagagaaatgtaaattaaatctacaataagctatcacttcacgtatgttagaatagctgttatcaaaaagtcagaagataacaagtattagggaagatgtggagaaaagggaactcttgcataccattgatgggaatgtaaattagtacaaacattatggaaaacagtaaggaaattcctgaaaaaattaaaaatagaactagcatatgatccagcaattccacyactgagtatatatacaaagaaaatgacattagtatattgaagagatatctgcattcccatatggattgtagcattattcccaataacaagatacagaatcaacctaagtgctggtaaaggatgaatggatttttaaaaatgttatatatatatatatatatatatatatatacatacacatataacatatcacatttatacacacacaatgtaatgttttaaaagtttaaaaaatgtt

SEQ ID NO: 574793 - DNA, 607 bp, Homo sapiens
tggtgtagtcctaatctccaagctagcaggcttgagacccaggggagctgatgtctcagttcaagtctaaaggcaggaaaaaatctaatgtccggctagaaaatcggcaggaggagttctcctttcttctcagatgatcagcttttttgttctagttaggccttcaattgattggatgatgcccactcacattggagagggcaatttgctttactcaatcaactgatctgaatgttaattttatccagaaacaccctcacagacacacccagaatcatatctgaccctggtgtccagtcaagtcgacatgcaaaattaaccatcacagatggtgtttaatgttttaatttatagctaaataaatgctaatttttttcaaaataaaaatatctttttttactataaaagtaatatatggccttccttggtacttccagtcacaagcatttgcccagcccagcccagctgagtctctggttgtttatagtgccattgtggttgtgggacccgaggtatagtgcatgtgcaaatttttgtcccccaggactgtgacacaaccacagccaaggccagtgttctasggcctacctgggatggcaggaccaat

SEQ ID NO: 574794 - DNA, 571 bp, Homo sapiens
gtcatggtgctaactgcatttccttgaaaatctacagggttgggtgcacacaccccaggtgtgtgaaagatgatcaattaagtgtaggaagaaaatgataggacttatccagtatttagttaaaaaaagtcttagtactatttaatctatgtactgataggcccaaatgttggacattcacatgccattttctgtctaggaacattgttttttcttagtagagctgttgagctagtgataaatagggggcaaatcatgatattttccattctattttgtgtagtaggatgggtacggaagatataagtctgagtgtccctrtaaactttttaaaattaatcagggaagaagggagggggagaaaggaaaatgaaccgagcttgcagcactttcagcattcgtcaggagtcagttcgctcgctgacctgcttcctcatatttctttctttcttttgttttttttgagatggagcctcactctgtcccccaggctggagttcagtggtgctatctcggctcactgcaactcccgcctcccaggttcaagtgattctcctgcctcagcctcctg

SEQ ID NO: 574795 - DNA, 620 bp, Homo sapiens
taggattgtctggctatggggtctcttttttggttccatatgaaatttaaagtagtttttttctaattctgtgaagaaagtcagtggtagcttgatggagatagcactgaatctataaattaccttgggcagtatggccattytcaagatattgattcttcctacccatgagcatggaaatttcttccatttgtttgtgtcctcttttattttgttgagcagtggtttgtagttctccttgaagagatccttcacatccctcgtaaattgtattcttaggtattttattttctttgtagtaattgtgaatgggagttcactcatgattttctctcagtttgttattggtgtataggaatgcttgtgatatttgcatattgattttgtatcctgagaacttgctgaagttgcttatcagcttaaggagattttgggctgagacaatgtgttttctaaatatacaatcatgtcatctgcaaacagggacaatttgacttcctcttttcctaattgaataccctttatttctttctcttgcctgattgtcctggccagaacttccaacactatgttgaataggagtggtgagagagggtatccccatcttgtgccagttttca

SEQ ID NO: 574796 - DNA, 393 bp, Homo sapiens
gtgtccgtgcccgctagggtctcgggagtttttataggcacaggatgggggcgtggcgggycagggtggtcttgggaaatgcaacatttggccgcggaggaaggagtgcccgtcctcacctagatccatgggcacaggcccggcggcggagccctgctcccctcccttatcagtaccgcggttagtgctctgctttatggccgcagcaatctcagacactttcggagcgtgtttttttttcttgtcctttcgctccccttttcgggcgccagctttcaaaccagaccaaaggtgtgcttttcccccattatctcccagccttctttccttttcgcctctactcaagactgtgtccacaattaagctctcaggaggaggaggcctccagctgcc

SEQ ID NO: 574797 - DNA, 393 bp, Homo sapiens
gtgtccgtgcccgctagggtctcgggagtttttataggcacaggatgggggcgtggcgggccagggtggtcttgggaaatgcaacrtttggccgcggaggaaggagtgcccgtcctcacctagatccatgggcacaggcccggcggcggagccctgctcccctcccttatcagtaccgcggttagtgctctgctttatggccgcagcaatctcagacactttcggagcgtgtttttttttcttgtcctttcgctccccttttcgggcgccagctttcaaaccagaccaaaggtgtgcttttcccccattatctcccagccttctttccttttcgcctctactcaagactgtgtccacaattaagctctcaggaggaggaggcctccagctgcc

SEQ ID NO: 574798 - DNA, 608 bp, Homo sapiens
acaataaaatcctcctttctctctatagttcagattatgtaggtattcgtgttctgttttcaagttcattgactttttccttagtcttctgcattcgattatggagatcctccaattaagctttttatttcccctaagagttttggttaatacatttttttaattcttaagtttaaattggtgtttatgtattcgaaatatttggtgagactttccaactttccattcacttcacgaatgttatccccgattctaggagcattgttataatatctgctttaatgtatgtgtcagatgattttgacatctgtgtcctctcaatattgttattcgaggattctctttgccatgtgaattaagatctccctgttttttcataatgctgaatattgtggggcttgtaacctggacttctttggattatgtgatgagacactgtgtcttgttgaaatcttaaggataatattgctatttttgtttttgcaggcacacaattgccttgtattyaagctccaagtaccaaccagactttcatgtgttgtcgtttcaaagataactctatttgaaagccttgacactgctgttcagagatctccaaagtgtgtgca

SEQ ID NO: 574799 - DNA, 558 bp, Homo sapiens
gatcgtttctctccaccgcagatattctggccaggctctctggttaaccatcttgatgtcctgagcactctgtttgtactgagactctgatttatgttcaaatgatgctcttccatagcaaggcttcctgctttgcccaaagagcattcaatttttcaagcaatttagggctccttcctcacccagtatctatgtgaaaccttaaagggaagcctattctttccaggaagataatcctgttgtggttttaacctcaatctgtaaattcgctggggtaactgggaaagaagtcataaagatattaaaggattgaggtttatccacatttactgtgtcagctcckgaggtgaacagcatgagtcttgctgcagcttcagcccccatcacacttcataggtgaagaaaacatcctccataaacactgtagcatggataacagaaggaaaagattctggagaggttatgcaggaagaatctacagtatttgtcaagacattgggtggagagatttgagggagaggagacaaaggcactggcaagtcttgagcacagtgtagc

SEQ ID NO: 574800 - DNA, 458 bp, Homo sapiens
aagctctgacattcaaaactaaacacctttctctaacatgttgctttaattatttaagcattctgcctgggattttttcaattactcttgggagttttcataaaactctmccaacatatctccaagtggccaggcttttcaatcactgcttccctccgtgtgtatttcacacacacacacacacacacacacacacacacagcacttaaattgaacaggtttatttcttcacacaggaattcctacgaacagcccggttttctccaccatatgtccactccttctctgcatagctgaattttgattcttacactctaatattttacatattcttacactctgatatgatcttgtctcttattctttatggctctgctctgtaattttgttgttgttgttctgagatatagttggacatgtaacttgtacatgacacaccttagcaaggaggcaaccta

SEQ ID NO: 574801 - DNA, 574 bp, Homo sapiens
aatcatatcaagtatcctttctggccacaatggcatgaaacaagaaatcaacaacaggaggaatttttgaaaattcacaactatgtggaaattaaacaacatgctcctgaacaaccaatgggtcaaagaagaaatcataagggaaattgaaaaawtactttgggacaaatgaaaatggaaatacaatataccaaaacttacaggatacaagagcagttctaagagagttttcatcaaaaaagatgaaagatcacaaatagactacctagcatccattacacctcaaggactggaaaaacaatcaactaagctagttacaaagttagtaggaagacggaaatgataaagatcagaagaagtaaacagaagatagaaaaaataaagagaccaaccaaactaagaattttttttaaaggtaaataaaatttacaaacctttagctagactgattaagaaaaaaaatgcaaagactcaaataaaatcagaaatgtaatcagaaatgaattgaagaggtaacgactgttaccacagaaatacaaaggattatttaaaaactactatgaacaattatatg

SEQ ID NO: 574802 - DNA, 574 bp, Homo sapiens
aatcatatcaagtatcctttctggccacaatggcatgaaacaagaaatcaacaacaggaggaatttttgaaaattcacaactatgtggaaattaaacaacatgctcctgaacaaccaatgggtcaaagaagaaatcataagggaaattgaaaaattactttgggacaaatgaaaatggaaatacaatataccaaaacttacaggatacaagagcagttctaagagagttttcatcaaaaaagatgaaagatcacaaatagactacctagcatccattacacctcaaggactggaaaaacaatcaactaagctagttacaaagttagtaggaagayggaaatgataaagatcagaagaagtaaacagaagatagaaaaaataaagagaccaaccaaactaagaattttttttaaaggtaaataaaatttacaaacctttagctagactgattaagaaaaaaaatgcaaagactcaaataaaatcagaaatgtaatcagaaatgaattgaagaggtaacgactgttaccacagaaatacaaaggattatttaaaaactactatgaacaattatatg

SEQ ID NO: 574803 - DNA, 574 bp, Homo sapiens
aatcatatcaagtatcctttctggccacaatggcatgaaacaagaaatcaacaacaggaggaatttttgaaaattcacaactatgtggaaattaaacaacatgctcctgaacaaccaatgggtcaaagaagaaatcataagggaaattgaaaaattactttgggacaaatgaaaatggaaatacaatataccaaaacttacaggatacaagagcagttctaagagagttttcatcaaaaaagatgaaagatcacaaatagactacctagcatccattacacctcaaggactggaaaaacaatcaactaagctagttacaaagttagtaggaagacggaaatgataaagatcagaagaagtaaacagaagatagaaaaaataaagagaccaaccaaactaagaattttttttaaaggtaaataaaatttacaaacctttagctagactgattaagaaaaaaaatgcaaagactcaaataaaatcagaaatgtaatcagaaatgaattgaagaggtaacractgttaccacagaaatacaaaggattatttaaaaactactatgaacaattatatg

SEQ ID NO: 574804 - DNA, 579 bp, Homo sapiens
taaaaagtgcattgttgtaaattctaattcagcrtatccttttcatttggggagataggtaggaacaaggaggatgtggtgtttttgtagctcttcattgcagtaaaacatttaaatactattatttaaaaatgacatagttaatattctcctcaatacttagcatatgtatcttatcttttctagtaaatacagaagaaatattcttcacttcaaagaacctcactgaagctttaatatgactgtaaaatatatataaaaaataaatagaaaattggagacaactatcatgatgggttcatctaacttctacatgagactgtctacatcttgtctattttaaaatgagacaagatacaattagtgattaaaagagtaagcaagtgtcattgtttgcatagatatttctaagactatgataaaatagccatatatgtttgcaagaatttttattgactatgtgaagtcaaatgataagaactgttacacattcccaaggagttttcgtattaattttaatttattctaaaatgaaaagcaataaaacagaaaaatatgtgaacaaatattttcaaaaga

SEQ ID NO: 574805 - DNA, 579 bp, Homo sapiens
taaaaagtgcattgttgtaaattctaattcagcatatccttttcatttggggagataggtaggaacaaggaggatgtggtgtttttgtagctcttcattgcagtaaaacatttaaatastattatttaaaaatgacatagttaatattctcctcaatacttagcatatgtatcttatcttttctagtaaatacagaagaaatattcttcacttcaaagaacctcactgaagctttaatatgactgtaaaatatatataaaaaataaatagaaaattggagacaactatcatgatgggttcatctaacttctacatgagactgtctacatcttgtctattttaaaatgagacaagatacaattagtgattaaaagagtaagcaagtgtcattgtttgcatagatatttctaagactatgataaaatagccatatatgtttgcaagaatttttattgactatgtgaagtcaaatgataagaactgttacacattcccaaggagttttcgtattaattttaatttattctaaaatgaaaagcaataaaacagaaaaatatgtgaacaaatattttcaaaaga

SEQ ID NO: 574806 - DNA, 579 bp, Homo sapiens
taaaaagtgcattgttgtaaattctaattcagcatatccttttcatttggggagataggtaggaacaaggaggatgtggtgtttttgtagctcttcattgcagtaaaacatttaaatactattatttaaaaatgacatagttaatattctcctcaatacttagcatatgtatcttatcttttctagtaaatacagaagaaatattcttcacttcaaagaacctcactgaagctttaatatgactgtaaaatatatataaaaaataaatagaaaattggagacaactatcatgatgggttcatctaacttctacatgagactgtctacatcttgtctattttaaaatgagacaagatacaattagtgattaaaagagtaagcaagtgtcattgtttgcatagatatttctaagactatgataaaatagccatatatgtttgcaagaatttttattgactatgtgaagtcaaatgataagaactgttacacattcccaaggagttttcrtattaattttaatttattctaaaatgaaaagcaataaaacagaaaaatatgtgaacaaatattttcaaaaga

SEQ ID NO: 574807 - DNA, 565 bp, Homo sapiens
tactaaagtgttttctatacaaagaattgtgtatttgaagtcctttttctatctcactggtaatgaaacatattttttctttccacacttcatctgcaatagcattgagggattttaactctaatttggaatacagcataatattctgagaggcaggaaaagatcactttaaatcataaagaattagattagatatttcatttctctgtaagtaaaaatgaatattttactaagatgagagaaggtgaaaatgcatgacacacatagaaggtgtgtccttctctatccattttctattattmattattgcttgaaatagtttctttgacgagctctaatatctttttgcagctgtaattcaatgtaagaaatatggatgactgtttattattgttactaaatgaaaaaagccttttttccttggatacaatagataaatgtttaaagacaaacaaaatgtccttcttatgttgtacaatctacatgagacagatgataggatatttctctaactgatggctgagtaaatcacttcattttcattgtttccacagtgttgaccaac

SEQ ID NO: 574808 - DNA, 676 bp, Homo sapiens
actttgtccctaaggggaaaatgaatgtgctgggatctgtacatgagtttattagctcaatgtagggaacaaatcaaggtcagaatatagatgcrtggcacgtgatgctgaattctagttctggttcttcagtcttaaggctgccacctttgtgtggcactttacagtttacgaaatactcttccatttcttgtcttttaactcacgatgacgctggaaaggaaatactgtttcccccattttataaaggaagaaactgagactaaaatggtcacctttcttgaagtttgttattcagcaaatattcttaagcatatgccataggaaggctttatgatacatactggggatacagagataaataagatttagaccctactttgttttttaactatttattgtgaagaatttcaaatatgcacacacactggaaaaagagtgtaatgaaactgctgtatcagtcattttgcatcaacaattgtttactcatggtcagtcttatttcatccatgtccccatccaaccttttatactattttgaagcaaattccacacttcaaattaatttatttaaataatttcactgtgtatctctaataataattattattaaacatgaccatctaaaaattaacatccctttaataatatcaactatccaggaagcgttcaaatt

SEQ ID NO: 574809 - DNA, 537 bp, Homo sapiens
ggcgctgtggctcatgcctgtaatcccagcactttgggaggctgaggcaggtggatcacttgagatcaggagtttgagaccagcctggccaacatgatgaaactccatctctactaaaaatacagaaattagctgggcatggtggtgggcacctataatcccagctactcggtagactgaggcaggagaatcgcttgaacccagtaggcggaggttgcagtgagccgagatcgcgctatggcactccagcctgagtgagagagagagactgtctcaaaaaaaaaaaaaaaaaaaaaaaaaaagagtagtataccagctttccttgaccaatagccacgggttatgtttgagggattgctttcctttacagtctttcattattattcaagaataaaacaatgtattggttcaaaccatatgtttgcctaaaatatcacctatcttgatatgtrtggtcctaatatacagctgcagcgtttgcgcagtagataactgtaggaggcgctatttgcacaggcggtgatatgaatggcacag

SEQ ID NO: 574810 - DNA, 520 bp, Homo sapiens
taattgatttgaaactaaccatgccctgaagtgtgtacatgtcaaattgattcaaattgatccagtgagtttaaataaagcttaggccagggagcatgatgacacctgatagaaattttcctaaagcacttgacttgggggactcaattatgctgccatctccacacagtaaattattagataaatactgtttttttttycatttatcacagactgaaaagataggacagttcaaagaaaaaaaaacactaggaaaagttagataagtgtaaaatgttctatttataattcttccttctgaaaagccgcagagaactcacattttagagcatgctggtttgaaatatatatatgtttacaggctttgtttcagagcctgatagtcaacatcacagtctcaagttgaaaatggttggaaatgaagcactgataatagaagcactggaaaaacacaagccttgtccgggatgagtgatccttcttcaggggtgatcaattcaagcactttcccaaagagaac

SEQ ID NO: 574811 - DNA, 368 bp, Homo sapiens
atctagctgctctggtgaggacgtggagaacctttatgtctagctcaagtattgtaaatacaccaatcrgcattctgtatctagctcaaggtttgtaaacacaccagtcagcaccctgtgtttagctcaaggtttgtgaatgcaccaatcgacactctgtatctagctgctctggtggggccttggagaacctgtgtgtggaaactctgtatctaactaatctgatggggacgtggagaacctttgtatctagctcagggattgtaaatgcaccaatcagcgccctgacaaaacaggccactcggctctaccaatcagcaggttgtgggtggggccagataagagaataaaagcaggctgccctagcc

SEQ ID NO: 574812 - DNA, 368 bp, Homo sapiens
atctagctgctctggtgaggacgtggagaacctttatgtctagctcaagtattgtaaatacaccaatcggcattctgtatctagctcaaggtttgtaaacacaccagtcagcaccctgtgtttagctcaaggtttgtgaatgcaccaatcgacactctgtatctagctgctctggtggggccttggagaacctgtgtgtggaaactctgtatctaactaatctgatggggacgtggagaacctttgtatctagctcagggattgtaaatgcaccaatcagcgccctgacaaaacaggccactcggctctaccaatcagcaggwtgtgggtggggccagataagagaataaaagcaggctgccctagcc

SEQ ID NO: 574813 - DNA, 511 bp, Homo sapiens
tgaaaaaacacatttgggtatgatttaatatatccatacatacagaagttttgctttgtaaaggacaaaaatttaaatttttaccaaaatatcacttcaggttttttgtttgttctttgccagttttttctggtgtgtgtgtgtgtgtgtgtgtgtgtgtgtgtgtgtgtaatttatraggaacaatggaaaatttgaaagcataataaaaagtgttacttactcacttgcctataaaagaaaccccttaaaggtgagaagaaatattttatttggggtagttgtatcttatgaatctttatttaaatcagtcattgtgaattaaaaaaaaactatacagttctgaaaacaaattgaactaccaacttaagaagcaacagtatcttaaatctatattttaaaaggtgttaataaagggttatctctagctgacaaattactgtatgccatctttaagccagttaattatgctggaaaacagcctttgtctcatttatactgacaacccacc

SEQ ID NO: 574814 - DNA, 511 bp, Homo sapiens
tgaaaaaacacatttgggtatgatttaatatatccatacatacagaagttttgctttgtaaaggacaaaaatttaaatttttaccaaaatatcacttcaggttttttgtttgttctttgccagttttttctggtgtgtgtgtgtgtgtgtgtgtgtgtgtgtgtgtgtgtaatttataaggaacaatggaaaatttgaaagcataataaaaagtgttamttactcacttgcctataaaagaaaccccttaaaggtgagaagaaatattttatttggggtagttgtatcttatgaatctttatttaaatcagtcattgtgaattaaaaaaaaactatacagttctgaaaacaaattgaactaccaacttaagaagcaacagtatcttaaatctatattttaaaaggtgttaataaagggttatctctagctgacaaattactgtatgccatctttaagccagttaattatgctggaaaacagcctttgtctcatttatactgacaacccacc

SEQ ID NO: 574815 - DNA, 536 bp, Homo sapiens
atggacttgagcatgcatgaaattttacagtgattaacctgactttatttccctcttcgagggccatagagtagagatgacaattgtggtggctttctcaactttaccaacctytatgttttatagcagcttttttttaaaacctctgtagcacagactgagaagggcacctgaaagataatgatggccctttctggagtttgctcttttagttcttccaaacagatttgttagtgattacttccctgtataaaatagtttttgtttgacatagactgttttctagtttcctgacttaatgctgcctcatactcacgccttaaaattgtcagtggctttctttttttttctttttttttttttttgagatggagtctcgctctatcaccaggctggagtgtagtggcgtgatctcagctcactgcaacctccacctcctgggttcaagctattctcctgcctcagcctcctgagtagctggggttacaggtgcccactactacgcccagctaatttttggtatttttggtagagac

SEQ ID NO: 574816 - DNA, 588 bp, Homo sapiens
tatttcatatgaatggaaagttttatatctattaggaagatgtacaaattctaagcttatstacaattaatatgggggcatcaaaatatataaaacaaaaattgccaaaatttcaagaaaaaaaaacacaaatccacaacattgaggggtatttgatggaacaaacagataaaaatcagtaacaatataataaacaacacaagaaaaaaattttgaccagatgattatatattgaccactgaaggcaataactgtagatgatacactctgtttcaggcagacaaaaccatttttcggtgttcaatttgttttcagatttccagtgttcaataacctctatggctagtggccactatacaagacagtgcagttctaacaattcacatgtctttctccgtatttaaaaatcatttttttgtgtgtgtgatgttatcttaactcttactttactgtaatttattgaagaatattggggaatatatatccttattaactaaagatgataaagatgataattatatgtgaagtactttttcaaaggctgtccaggctccagtgcttttaacccagaggcattacttttatatt

SEQ ID NO: 574817 - DNA, 588 bp, Homo sapiens
tatttcatatgaatggaaagttttatatctattaggaagatgtacaaattctaagcttatctacaattaatatgggggcatcaaaatatataaaacaaaaattgccaaaatttcaagaaaaaaaaayacaaatccacaacattgaggggtatttgatggaacaaacagataaaaatcagtaacaatataataaacaacacaagaaaaaaattttgaccagatgattatatattgaccactgaaggcaataactgtagatgatacactctgtttcaggcagacaaaaccatttttcggtgttcaatttgttttcagatttccagtgttcaataacctctatggctagtggccactatacaagacagtgcagttctaacaattcacatgtctttctccgtatttaaaaatcatttttttgtgtgtgtgatgttatcttaactcttactttactgtaatttattgaagaatattggggaatatatatccttattaactaaagatgataaagatgataattatatgtgaagtactttttcaaaggctgtccaggctccagtgcttttaacccagaggcattacttttatatt

SEQ ID NO: 574818 - DNA, 588 bp, Homo sapiens
tatttcatatgaatggaaagttttatatctattaggaagatgtacaaattctaagcttatctacaattaatatgggggcatcaaaatatataaaacaaaaattgccaaaatttcaagaaaaaaaaacacaaatccacaacattgaggggtatttgatggaacaaacagataaaaatcagtaacaatataataaacaacacaagaaaaaaattttgaccagatgattatatattgaccactgaaggcaataactgtagatgatacactctgtttcaggcagacaaaaccatttttcggtgttcaatttgttttcagatttccagtgttcaataacctctatggctagtggccactatacaagacagtgcagttctaacaattcacatgtctttctccrtatttaaaaatcatttttttgtgtgtgtgatgttatcttaactcttactttactgtaatttattgaagaatattggggaatatatatccttattaactaaagatgataaagatgataattatatgtgaagtactttttcaaaggctgtccaggctccagtgcttttaacccagaggcattacttttatatt

SEQ ID NO: 574819 - DNA, 588 bp, Homo sapiens
tatttcatatgaatggaaagttttatatctattaggaagatgtacaaattctaagcttatctacaattaatatgggggcatcaaaatatataaaacaaaaattgccaaaatttcaagaaaaaaaaacacaaatccacaacattgaggggtatttgatggaacaaacagataaaaatcagtaacaatataataaacaacacaagaaaaaaattttgaccagatgattatatattgaccactgaaggcaataactgtagatgatacactctgtttcaggcagacaaaaccatttttcggtgttcaatttgttttcagatttccagtgttcaataacctctatggctagtggccactatacaagacagtgcagttctaacaattcacatgtctttctccgtatttaaaaatcatttttttktgtgtgtgatgttatcttaactcttactttactgtaatttattgaagaatattggggaatatatatccttattaactaaagatgataaagatgataattatatgtgaagtactttttcaaaggctgtccaggctccagtgcttttaacccagaggcattacttttatatt

SEQ ID NO: 574820 - DNA, 523 bp, Homo sapiens
gttatagtgtgtttttcatttcgtttttgttttgttttcttgttttatttctctggctatagtatagactccatgagggtgggaacttgttattcttaatttctgttctatcaaatcctggagtggtatctgcacactagacatatactacttatttgctaaatgatggatagatgaataaatgtggagatactaacacttagagaatcccatttttacgtcaagtattgtactaagtattattatctatgttagtttacrtagttactactgtgagttaagtgttgttttcatcttgctgatgagaaaaatgggaacttcagtcttataatgctgtataagcccttaaggagctcccagtctgattatatcattagacaataagctcattatataataaatccagattttgtgttttttccacaacagcatgtagaaatctcacatagcaagcttaaattaagtggttagatttagctctgctcttcacgcctccagtgaattatgcatgcctttgtggatt

SEQ ID NO: 574821 - DNA, 529 bp, Homo sapiens
ccaagcaaaatgaagcttattaaatagtcattatgactaccccctttagtttccattgggtccaaataaatgcatataagacattcatagtgaaagagaaaaccataagaatattcttctatgaaagaagcatcaaggtgacactacatcaaaaacgtctttttatattagggtgtgtggtcatcctatttctcttgtttgcgcctcaggaagaatctctagatatagactatatttcataaaaggttgagctktgtgtcatttatgatagccttttataataacgagtcatttatgaaatatatatcatatggaaacctattgcagtaaatcacatccatgatagtaagtttaggccttgacagtgctactatctttctggggatccaaagtctttacattttcccttgagtcatgatgtaatagtacccttccattatcatttaaaaagtctgactgtctcaagttttctctcaggtgtcctcctgctgttttataagaatcctcataatacacatttgcaaaaccc

SEQ ID NO: 574822 - DNA, 549 bp, Homo sapiens
catctcttacagcacttaccatttttttttttttggtaaataatatagctttaatagatctggggctagttagtgatttttttggagaaatatggagacaatctttctgctgagtgtgtgtaggtgttctgaacatgtcacccatatgtgctaatgtaagaaataggcaactaattgcctcagttacagtgcatgggaygtgctattgtgcacactccctctccatgatgcacgtggcagtgctgaattcttgctttatttaacacaggcctcaataaagacaaatgattgttcattaaaaaccatcctgtgacatgcagagtggctgtggtgaggatatgtagacactaattcaaaattaaaaaaaaatttaaggtggcaaatttttaatgtaaatatacctaaagataatatgtgaaaccatatcatgaagttttgtgtgtttttcaaaaggcatacattttaaagtttacaatgaacccttttatgagtacaacactttagctgaattgaccaaatctaacgcatattctagaagccagctaagac

SEQ ID NO: 574823 - DNA, 549 bp, Homo sapiens
catctcttacagcacttaccatttttttttttttggtaaataatatagctttaatagatctggggctagttagtgatttttttggagaaatatggagacaatctttctgctgagtgtgtgtaggtgttctgaacatgtcacccatatgtgctaatgtaagaaataggcaactaattgcctcagttacagtgcatgggacgtgctattgtgcacactccctctccatgatgcacrtggcagtgctgaattcttgctttatttaacacaggcctcaataaagacaaatgattgttcattaaaaaccatcctgtgacatgcagagtggctgtggtgaggatatgtagacactaattcaaaattaaaaaaaaatttaaggtggcaaatttttaatgtaaatatacctaaagataatatgtgaaaccatatcatgaagttttgtgtgtttttcaaaaggcatacattttaaagtttacaatgaacccttttatgagtacaacactttagctgaattgaccaaatctaacgcatattctagaagccagctaagac

SEQ ID NO: 574824 - DNA, 549 bp, Homo sapiens
catctcttacagcacttaccatttttttttttttggtaaataatatagctttaatagatctggggctagttagtgatttttttggagaaatatggagacaatctttctgctgagtgtgtgtaggtgttctgaacatgtcacccatatgtgctaatgtaagaaataggcaactaattgcctcagttacagtgcatgggacgtgctattgtgcacactccctctccatgatgcacgyggcagtgctgaattcttgctttatttaacacaggcctcaataaagacaaatgattgttcattaaaaaccatcctgtgacatgcagagtggctgtggtgaggatatgtagacactaattcaaaattaaaaaaaaatttaaggtggcaaatttttaatgtaaatatacctaaagataatatgtgaaaccatatcatgaagttttgtgtgtttttcaaaaggcatacattttaaagtttacaatgaacccttttatgagtacaacactttagctgaattgaccaaatctaacgcatattctagaagccagctaagac

SEQ ID NO: 574825 - DNA, 549 bp, Homo sapiens
catctcttacagcacttaccatttttttttttttggtaaataatatagctttaatagatctggggctagttagtgatttttttggagaaatatggagacaatctttctgctgagtgtgtgtaggtgttctgaacatgtcacccatatgtgctaatgtaagaaataggcaactaattgcctcagttacagtgcatgggacgtgctattgtgcacactccctctccatgatgcacgtggcagtgctgaattcttgctttatttaacacaggcctcaataaagacaaatgattgttcattaaaaaccatcctgtgacatgcaragtggctgtggtgaggatatgtagacactaattcaaaattaaaaaaaaatttaaggtggcaaatttttaatgtaaatatacctaaagataatatgtgaaaccatatcatgaagttttgtgtgtttttcaaaaggcatacattttaaagtttacaatgaacccttttatgagtacaacactttagctgaattgaccaaatctaacgcatattctagaagccagctaagac

SEQ ID NO: 574826 - DNA, 500 bp, Homo sapiens
ttctccaggttatatagatatctgttagctctagttggtttatagttttattaaagtcttccattaatcrttttctaactagttcaattcattactgatggtgagatgttgaattctacatgtattaatatggaattgtatatttttggtattcaattttgtccattgttgctttgtatttggtattttgcttacggtatttatgtattagttgcacatagttttataattattacatcctcttaaggaattgatcattttatcatataaagcatccttctctgtttcaattataactttttatcataatggttattttattggcattaatatagtcattccagatttttgataaatatttgcattttgaatattttttcattttactgttaacttacttgtctgtgaacctaaggtgtgtatcttgtaggtagcatctagttgaatcaagcttttgctggtttttactgttttctatatgtcttgtgtcttttcttttc

SEQ ID NO: 574827 - DNA, 561 bp, Homo sapiens
gttatgataaaacataatctaaaattcagctttatgaaagacataaaccaaggcatacaaataagaggacgtttgagtaaagtcaatcagacacttgctgtatagccttgggtaggttattcatcctctttcaatctcagttgtgtcaaaagtaaaacaaaaataacagcacctaccctgtgaagagaatgtgatttgataaccttctgtacctggtgcatagtaggaacacaataaacaytatctctaataatatgtaacggtaaatcataagttcctggtattgaaaattaacttatgtaccagatggaattcttcattaaaattatttcaaactcttagtcttatatatgtcgtaaagagaattatccagggccaaatcatctgagcatgaaaatagctccttggagaactatagctttcactgggaatccaccaatataatagagactatcaaaatgatcaggaacaaaacagttttctatttgaaaatctgattcatggagctccataagacctgaataaaaagggaaaactttcatcctagatacgtaaacatgt

SEQ ID NO: 574828 - DNA, 638 bp, Homo sapiens
tagaatataattattcaataattattagcatagttattcaataattattagaaaaatgcacaatattatgtatgtatataacacataaccctgtaaactggactggcatattctcatgtggaatccagtccacactattattattattttgttttttattttgtttttatattgttttcattttgtttgtattatcattttttgtttgtttgttctggcagcccatttctatatagatgcatcccaagcacagatttatttataatagtagtgagtaagtggtgtgtgtgtgtgtgtgtttcaatttgttgaatttttttctttttttccccaaaactctcttttccataattttctacatatccaggaaagaataaattccatatagtctaataatgttttatattaattatctatttataagttgtacaatagaaggtgttgtgcccatacatgaataaatttatttaggttaaaatgtttcatttttcaaaaacactttttagtcattttctttgtgcctcartagagtacaaaatttacatggacttccttatcatatttaaatagagatatgtgatgtttatattgttttttttgttcgctctggcagcctaattctatgtagatgcacccta

SEQ ID NO: 574829 - DNA, 545 bp, Homo sapiens
tgccagatgtaaagttctaggtttggtgaagagttaaaagccctcttactgatgtgctataagattttacaatagagcattaagcagcaacttgaaaatgtggccagatgttgatatgtaaaattttcacatatttttggagtaactttgaaagcctcagagtagttaatatatactcatagactgcatatcatttgcttcatagatggtctgataatgttcacaattaaaatgtttgggaacgccataaaatttttttcacaaatctctttggtcaatacaaactaccttatgtgtaactatcaacaatgaaactgtttcaatccaaagagaaggcaattgtaaaagtctgggatactgcagaaaacataagccaaggtgactttcaatctttagtccctactaatgggtttatgtaacacagaccttttttgttctttcttcaattataataattatatgtcggccgggcgctgtgactcacgcctgtaatgccagcactatgggagaccgaggcrggtggatcacttgaggtcgggagttcg

SEQ ID NO: 574830 - DNA, 635 bp, Homo sapiens
taatgtatgtcacaaaatgcatgccgcatatgtaattttaaattttcaagcagctgtgtttttaaaaagtaaaaagaaacaggctgaattaattttaatatgttttatttaacccagtatatgcaaaatattattccaaagtttaatcaatacaataaattatatattcatatttcttttttcatactaagcattctaaattcagtgtgcattttatactgagtgtacatctcaacttggagtagccacattttacatgctaaagccagtggctacccattggatagcacagctctggagaatagttgaataaatttgaggaggtccatgcaaattgtaatataaaaaaaaaaaaacctgtgctttgaatacaggctttgtgagaaggatatgaatgatggaggtttggccagctgtggccatatgtatggtgctgtaccttctctgacccccttaaaggtgactggggagccacagaggatctgctgcatggagatgtcaaatcctagtgagcagtstggatatctgtgacttgctcggagtggctgcaggggctggtgggttacactattcatgtggacactccctgtagggagaggccagggattctgacagatgcaccactttttttcacc

SEQ ID NO: 574831 - DNA, 410 bp, Homo sapiens
agataaaagatttattttctaactttgagggtgagagaatccttcttttatttatactgaggtgaagaaaacaagaaaccagctcraaagtaaatgtataggcaatcccattgtttgttgttgcagcataaaacaattgtcctcacattttttgattttattaatgtagtttatacaacatgcagtcctgatatacagttatttttaggattaaaaaaaggatagcattggtacccaaataataactcctcttgtctgacaagtttacgaaatgtaatggtatgatgccatcgttatccagattgatttttaacagattttattatttgtgaccattttcattatcctttgagatcaagcaagtggctgacagttataatggataaacctgactcatgggcattgttctt

SEQ ID NO: 574832 - DNA, 410 bp, Homo sapiens
agataaaagatttattttctaactttgagggtgagagaatccttcttttatttatactgaggtgaagaaaacaagaaaccagctcgaaagtaaaygtataggcaatcccattgtttgttgttgcagcataaaacaattgtcctcacattttttgattttattaatgtagtttatacaacatgcagtcctgatatacagttatttttaggattaaaaaaaggatagcattggtacccaaataataactcctcttgtctgacaagtttacgaaatgtaatggtatgatgccatcgttatccagattgatttttaacagattttattatttgtgaccattttcattatcctttgagatcaagcaagtggctgacagttataatggataaacctgactcatgggcattgttctt

SEQ ID NO: 574833 - DNA, 553 bp, Homo sapiens
cattagcaatatttgggtatctccttcagaaccgagttgcctttcctatcctttcctttcctttccttttctttcttttttagaaatgaggtctcattctgtctcctgggttggagtgcagtgatgcaatcttagctcattgcagccttgaactcctggcctcaagcagtcctcctgcctcagcctccagggtcactgggattataggcatgacaggcgtgagccaccacgaccagcgtgttttaccaaatgtttgattttaagccttttaggaccagctcatctaagttaaagattttaaaagagggagaaaaattccgacttgaagcttttctttcctctgcctagcagtctctgagtgtggatgyagcctttcatgtgtgaaataatttcctatttacctcgaaaaagatgccattaccctcaaattctttgtccagcctctcattctagtgtagctcagcagcagacctatgatgagagactgttctggaagaagtagcattgacttattgtggagtatttacattttgttaggctgcagtggcataag

SEQ ID NO: 574834 - DNA, 613 bp, Homo sapiens
tattttcgttccctcctttatccccagtgcctgaaacagtctaagtcagaaataaatgaataaatkaagtcaattttactttaaagaagtaaagctaaaaattatctcatagaagacagaatatgtggctgcgtataactccataacaattggtggatcaataaataagatggcatgtagtgaagagtgtaggactgtggaagaaaaataaagaaacttacagaacaacttttgaagtagtcaaagacaatgctattagagaaaggataagtaggaaccaaataatcaaatcaggtgaaaaatgagaaaacccaataagtaacagccaaaaggattgcttgagacaggaaaagtcctcccattgagcacagcccttctttgcctgcagcagagatgatcagcttcctgtcaggattaaagcattgttaggagcatcctccagtgaggcacgggagaggcttagtttagttcagcccctgccttacctcttctattagtttaagatctgtgttgtattggaatgcagcgtagcacaagtgaccaaagggactgtgatttctacaaaaggaaagaaaatgtcttactgatgataccagcaaaaatagtgtaagtg

SEQ ID NO: 574835 - DNA, 613 bp, Homo sapiens
tattttcgttccctcctttatccccagtgcctgaaacagtctaagtcagaaataaatgaataaattaagtcaattttactttaaagaagtaaagctaaaaattatcycatagaagacagaatatgtggctgcgtataactccataacaattggtggatcaataaataagatggcatgtagtgaagagtgtaggactgtggaagaaaaataaagaaacttacagaacaacttttgaagtagtcaaagacaatgctattagagaaaggataagtaggaaccaaataatcaaatcaggtgaaaaatgagaaaacccaataagtaacagccaaaaggattgcttgagacaggaaaagtcctcccattgagcacagcccttctttgcctgcagcagagatgatcagcttcctgtcaggattaaagcattgttaggagcatcctccagtgaggcacgggagaggcttagtttagttcagcccctgccttacctcttctattagtttaagatctgtgttgtattggaatgcagcgtagcacaagtgaccaaagggactgtgatttctacaaaaggaaagaaaatgtcttactgatgataccagcaaaaatagtgtaagtg

SEQ ID NO: 574836 - DNA, 539 bp, Homo sapiens
ggcaaaataatcttttgccctatataactagtggcgtcaacatattttgtcttttatttaaagttgcaattacttaaactctagaaaataatttgctttctattgatctgaaattagctcaggtgaaagaaatacaaaatgattcagcttgtcaaatatgatttactgtgctaggaacatatctctagcatgttggggataatcatttttctcattttaactttttccctgagtaccctctacaattatctaatataagcatattctgtatacatttaagtaaatcacaagttaaacactctttgtagtaaagatagagctagaaatagtttttaaaaagtattttattcaaaactttttgaaaccatgtacatagccttatgttttgcaaataaaataatatcattccttattttgattgttctcaaawttttttttttttttttacattttttcctagtgtgccctggtatgtgaatgtacagccccggaaagtgtgagcggaaaagataacttaccttttttgaattcaggtatgt

SEQ ID NO: 574837 - DNA, 592 bp, Homo sapiens
catgagatactaacagtgctcatagactatacaaaactgttaacttagataattctttgaaattccagtcatgaattcttaaaagaatgcatggcttgcaaacttaacttaaaaaaagatcctcctagttttaaggactgagagatttattagtcgactaagcttgtctactcagtagaaaagagaaaacataggggaaaaagttggagcaatgctggattcaaggagcagaaaatgcccatcctaacctcctcccaccaccaaaatcactgcagcaagttgtaaatgatgtatgaaatgacaaatccctgcccagtgcacaagaagaatataaatactgctctgtaatcactgcagtggtgtgctattcgctaaaattttcagcttaggtgaacccagaaaaacctcacctcatctataaatccaaaaaagaaatgaaccgaaatgaaattatattattttactgtatgcaacaacctcctcttttttctttttccctagtcagaaaaacatacttattgaatatcaaaatacttaggtattactaaggcatttgtctaacaaacatttttwaaaaaaaacttttaaataa

SEQ ID NO: 574838 - DNA, 586 bp, Homo sapiens
gggtttgaacccaggttttgtttgaatcctgtatttgactctagctgcatgacttttcacatttttaaaatttctctgagctttagcctttttctgtgtgaaatgaagataatatgttctccataattctgatgattaaataaaatgacataaagtgtgaagccccttgccctatttgacgcaaagtaagtacttgcaaaatttgggtcartattttcctcccttttcacgacagaggcatgtgttctggcctggaaggaatgctgcattttgaactggaagttctgagtttggcttttcactttttaatttattagacaattcactcgaactttctgaatagatattaactattttttcatgaaaataggtatgttttctcctatgagaataacatataaaaatgtataaactgcaatgttaaataagcataagatattattataaattaacatacctgaataaaaagtatggacatacataagatccaggtttctatgaatctgttcttcagagaggtggaaaactacacttttgtcttactctacaattacgagaattttctttgatcagtttctccaacggc

SEQ ID NO: 574839 - DNA, 539 bp, Homo sapiens
cacttgtctttttctatctcagctttctatcacacagcgagccgccctcgttagttctggaagttgatattgagtgtctaccccatgccagactagctctcctttctgcagataaaggaacaagtcacctttggaaaaactaaggcttagattatactgcttttcaaataactgacacatttggaaatttttggaacctctcctcggtaaataawgttgtagagagcaaactgaggcagaggaagtaccccacacagactgatgtaaatccacatcaaagttctgccttcaaatgaagtggcattcctattcaaatgtaaagctttatatgcataaaaattaggtgatcaccagaggaaaataaagtaattttcaaaatctaatttaattcacttaataagaccataaaccaaagaaaatgaaagatgccaaggaaaagagaagatatataccaaccaataacaggtttcatttcctactaagaaaaaaaaaaaaagagtgctcagtaagatttgaacagagaatgaggccaattcatt

SEQ ID NO: 574840 - DNA, 526 bp, Homo sapiens
aagttacacaaacagcataatgaatgttcagcccttaatatcagatggcaaatgataaacagaactccaagtatcactctttcctattgataagaactgtcctaagagatttttaatgatgcactagcaatttttatgtaaggtgacgaaaatgctttttaaaactaggtaatcttgttttgctaaaacactgggaagattaacactaatacttgaygtgattacatatatgtcaagtatatgtaatggctcatgcatgcacatatatgtaatcatgtatgtcaagtattagtattcaaaacaaattagtattactattaattcctaatgaacttgaggccacataagccagtgggaaaagattcaagccaatctcaatgtaaatcctggtttgtcactaactagcttggtgactttgggcagccttcttcctcatcaggaaagtgggaataatcatctaaaccattctatgaggtgtgtaacgttagtagtcattcatataaagtgcctaaaattgtgcttggca

SEQ ID NO: 574841 - DNA, 592 bp, Homo sapiens
agttgattgatgttgctgagaacttcctttgctttggctgtgttttcaggtgaatagtaaataaactggtatccggtactgcaacaacaaagataaaaataagttacacaaacagcataatgaatgttcagcccttaatatcagatggcaaatgataaacagaactccaagtatcactctttcctattgataagaactgtcctaagagatttttaatgatgcactagcaatttttatgtaaggtgacgaaaatgctttttaaaactaggtaatcttgttttgctaaaacactgggaagattaacactaatacttgacgtgattacatatatgtcaagtatatgtaatggctcatgcatgcacatatatgtaatcatgtatgtcaagwattagtattcaaaacaaattagtattactattaattcctaatgaacttgaggccacataagccagtgggaaaagattcaagccaatctcaatgtaaatcctggtttgtcactaactagcttggtgactttgggcagccttcttcctcatcaggaaagtgggaataatcatctaaaccattctatgaggtgtgtaacgttagtagt

SEQ ID NO: 574842 - DNA, 581 bp, Homo sapiens
atgaaagcttcttgcattcaaattaatttaagaaaagctgcaggygacatgtgtcctctgagcatcttcgagggccttgaaaggctactgaaggctctgagatgtcctacaggaaagaaattcactttcccttttttttttcttttcttttttttttagaggactttcaaacttatttggccacagaattcctttattcaaaaaacatgtattaataaccaaagggataccggttttacaaaacaacactggaaaaagcagatataaatgtgtccagtgaagcagaaacacagtgataataatgaaactgactttggtaaatatgggcaaatccaatacaaaattttcaggtcaaatataattcctttcaggcctaatcattcctgcaaattatcttcaaagctaaattagctctcaaacttcttaagcaggtaggtctttgtgtacagatattaactttacgtgatttgcattttaaaaaaggaaaggtttcaggcttttctatacaaattgaggaactattgaagtgtactctggtttgtgttgtcccttcagtgactgagaactctaaaccaatttgc

SEQ ID NO: 574843 - DNA, 608 bp, Homo sapiens
  misc_feature 1, 2, 3, 4, 5, 6, 7, 8, 9, 10, 11, 12, 13, 14, 15, 16, 17,18, 19, 20, 21, 22, 23, 24, 25, 26, 27, 28, 29, 30, 31: n = A,T,C or G
nnnnnnnnnnnnnnnnnnnnnnnnnnnnnnnttggctactttttcaatgattttccttccttttgggtttcctatttttccttatcttctataggctttcacttagtgcctgggtggaatcaaagcaaggaacatgcttaatctagtgatgctatagaattctagcataaatttctccccaaaaccattttggatgggcagcttttttacatgccctaaagcatgtttcctcaattgaactttgtggaaaaaacagaatggtaaatccaggttataaactaaagaactaaacacaagacatccaaaagtatggttcaccctgtcactgaactagaatgtaaaatgtagaagccactctctatttattctgttaaaatttaccatacaaagaatacaggtatccacacttcttgtcaattaggagagtcacaaatgaaatatctatttcatgtttccaaagattttttcaaagatgwcttaaagatttaggaaaaaaaattcttaaatgctaaattatgctttcaatttatcacctatcaagttggaaaggctagtaataatagcttaatcattattcatcaccaaaattctactgaattttaccttat

SEQ ID NO: 574844 - DNA, 608 bp, Homo sapiens
  misc_feature 1, 2, 3, 4, 5, 6, 7, 8, 9, 10, 11, 12, 13, 14, 15, 16, 17,18, 19, 20, 21, 22, 23, 24, 25, 26, 27, 28, 29, 30, 31: n = A,T,C or G
nnnnnnnnnnnnnnnnnnnnnnnnnnnnnnnttggctactttttcaatgattttccttccttttgggtttcctatttttccttatcttctataggctttcacttagtgcctgggtggaatcaaagcaaggaacatgcttaatctagtgatgctatagaattctagcataaatttctccccaaaaccattttggatgggcagcttttttacatgccctaaagcatgtttcctcaattgaactttgtggaaaaaacagaatggtaaatccaggttataaactaaagaactaaacacaagacatccaaaagtatggttcaccctgtcactgaactagaatgtaaaatgtagaagccactctctatttattctgttaaaatttaccatacaaagaatacaggtatccacacttcttgtcaattaggagagtcacaaatgaaatatctatttcatgtttccaaagattttttcaaagatgtcttaaagatttaggaaaaaaaattcttaaatgctaaaktatgctttcaatttatcacctatcaagttggaaaggctagtaataatagcttaatcattattcatcaccaaaattctactgaattttaccttat

SEQ ID NO: 574845 - DNA, 605 bp, Homo sapiens
aaaaaccaaaaccaaaaatattcctcctctacctctgccttgcccttcccctctaatcagtcactaagtcctaccaattcttcctccataatgtctatttcatgtgtcccctcccaatagcaacattccaattagttttattacttctcctgtgttatacctgaagaacctacttcccttcctccagtatctgttccttccatttcattcatgtcaagttttcatcttaaagctctactttcactattttatttttttcctattaaaagtccttagacattgcccagtacttaaaggggcttaactacatagcctgtctttcaagtctttgtatcaggatctgtcaaagtttatggacactcagtatttttggctcacactgatccacctcatcacataccattaaataatgaagtatggyttagtggaaagcacagtgaatgttgagtaacaaagcccttggttatagtgctgactctatacagtaaacagctatgtaattatgagcaggcaactcagcctctgtaaagattttccagctataaaatataaagattgtaaaccatcctacttatctcacaagacttatgtgatcaaaaagaaaa

SEQ ID NO: 574846 - DNA, 471 bp, Homo sapiens
tctcacaagacttatgtgatcaaaaagaaaagttcttaggtttaaatataaaaattcttcagtatatggaaatgagtagtatcatttatatagcctgggccacaaagcttcaagagcatgacgtaraaatgttgatcatcagtttttcagactaactggcttgtagattactgtttactgctataaacagtactctccaaatatgaggaattatacaaatacaaataagataaagcaatttttaccttcctcatgacactattaaaaatatatatttggaaacatttcaatgctaaatgtaaaatataaaccagctctagctccttgaattaagaaatattttatcagcaaggtgagaaaacaaggttggcatcttgcaaatgtcgtcagatttccaaaattgcattaaaattaacaggccattcttccaggagttaggtggtgttgcattgtgattttgatttgcatttc

SEQ ID NO: 574847 - DNA, 637 bp, Homo sapiens
tacattgggtacagttgcactgctcggatgatgggtgcaccaaaatcacagaaatcaccactaacaaacttattcatataaccaaacaccatctgctcctcaaacacctatttaaaaataataataataaatggatggccatcatgatctgcccattgggttccagttgcaggtaacatggagtatgcacactctacagcattgtgcacactgaatgcagctataaaacctaaacggaacacaaggarcagccatttgaggaccaaaactaaatagcaccatgcatattggggaaggagatcagaatcttaaatatcattgaaccagcagtgagtttaccatttcttcccctttggtttctcccaacctagattagacacagcttgaaatgcaagtgtgggcattagtgtagacagagagagctccaggagaattcttttagttctgactcatgggcaggaaagtggtctcctaatactcagaaaaatgaagggagatccttttttctctctccactctctcatgccccagctctcaagtagtcttgcagtggcaatgatggcagtatttagggctcacagggacctaaaactatgaggggcaaaaagttacctctctgattggagaagctatgatc

SEQ ID NO: 574848 - DNA, 584 bp, Homo sapiens
aaagacaagctactgacttggagaaaacatttgcaaatcacatatctaacaaagaacttgtatccaaagtatataaagagctcttaaaattctaaagttgtaagaaaacaaccaacccaattaatcaatgatccaaacacttgaacagatatgtttcaaaaaaggatatatggatggcaaatagcacatccaaagatgttgaacattattggccattaagttttaattaaaattaaaactactatgagacgccactttaacacccttacaatggctggcaaggatgaagactgactgaaactctcatacatctctgtaargaaaaacagctcagctgctttttataaagttaaacacacacttacataaaccagcaatcccaattctaaatatttaccctagagaaatgaaaacttagggtcacataaaaacctatacatgagaaattcagcagcttcattcataatagccaaaaaactggaaacaatagaaatatcctttaatgtaaatggttaaacaaactttgttgtatccacaacatgcaatattaatttggcaataaaaagaaactgttgatacaccac

SEQ ID NO: 574849 - DNA, 618 bp, Homo sapiens
  misc_feature 618: n = A,T,C or G
gctttttataaagttaaacacacacttacataaaccagcaatcccaattctaaatatttaccctagagaaatgaaaacttagggtcacataaaaacctatacatgagaaattcagcagcttcattcataatagccaaaaaactggaaacaatagaaatatcctttaatgtaaatggttaaacaaactttgttgtatccacaacatgcaatattaatttggcaataaaaagaaactgttgatacaccaccaacttggatgaattgtaaagacattggactgaatgaatgaagttatcccaaaagattatatactatacaattcaatttattcaatttcattctcaaaaaggaatagctattttsatggacaacagatcagtggtggccaggggttggtgtgggtgtgaaggggtttctttgtggtaatggaaaagttctgtatctggactgtggatacggactctgttcatacatgtgttaaaattcatagaactgtacaacaataaaaagtcaattttactctatgttaatgtataaaatgggataaatgagaaaggacacatccattttctccgataataaatcaataccaaacaaacaaacaaaaaaatcgcacan

SEQ ID NO: 574850 - DNA, 562 bp, Homo sapiens
tttaccttctaaatgtaatccatcaccaagttctgttgattcagttccttacaaaagctgaaatttatgtacatgactaccctggtctaagccaccatcatcaaaagcctaggcacccatagtatctcctaacttgtttttccctctacacttttgtcccattttctaaatgtaatcatgttgccctgtgctaacaatttcaattgttcttaaggaaaatatattattgagtgcttmttatatgttaggtattgtgctaaattccaagaataatacaaataacaaaactgaggaattatttttatgttgctcagcagctcctaactaatctgaagcctgagtattattccgaaatcagtgtctcagctccaaacacaccagctttctggacagatggcatgccctgtctgctcttctgtccattgagaattcgtggcatagtatagtcagcatacctatgaagtgtgctaggtttctaagccagaggacactaaaataaatcacagactcaagatttgtatctgagacagaaccaactttcagctgaaatgcaaaagaacta

SEQ ID NO: 574851 - DNA, 531 bp, Homo sapiens
ctgggtcactatgtaatataatcctactatgttttgcataatgtagatgtttttgataaagaattcacctaaataaatctgaatttaatttggagtttttaatatatatttttaatatttttaaaaggtattcttgaagtgctatcattttgaaataaaatgaaccatcatttaaattatagtcacaaaatgttttaagatatagaatcagaaaataaaatatcttctgtctctcagaatagctttactgcttagaaaaccaattctacattatatgaaaacatttaagtaaacacagagaatgtgtctctttaacatatttccttgtgcagcaactaggatttcaaagctgggattttaaagactcttatcggccatcttcttcatatataataatatgaaatgataaaaatatagatttaggatatagatacatacatagatatrtttatcactgttctaaaatatagctctaaaatatagaataccgaatatctgaagtatttagtgctaaacaaaatgtatatgttt

SEQ ID NO: 574852 - DNA, 600 bp, Homo sapiens
actcacacctgtaatcccagcactttgggaggtcaaggcaggtggatcacttgaggtcgggagtttgagaccagcctggccaacatgacaaaaccttgtctctactaaaacaaaaattagctgggcatggtggtgggcacctgtaatcccagctagctgggaggctgaggcaggagaattgcttgaacccaggaggcagaggttgcagtgagccaagatcacaccactacactccagcctgggcaacagagggagactctatctaaaaaaaaaaaaaaaaaaaaaaaagaaaaaaaattaaacagtatgtttcaagaaaaactaaatagaaaaacagaatatacttaaaaattttaaaccaagggtaaaaacaaaatttctaacatcttcaaaaagaaaattttctgaataacatttggtcaaggatggaataaaactaaaattaaagactttcaaaaatactaaaaatggaaacatgcacgtcaaggtttgtgtatgtgatctaagatctgctcatcacaaatatttttttatcacatagtttttaaatagtttcttcatttaaacagacagaataraaataaaagcagcatgcagtcc

SEQ ID NO: 574853 - DNA, 579 bp, Homo sapiens
tattatcttgacaactctgactaagggttatgcgtttatggatttaagataaaaataaagtttctcttctcttccactcttaacagaaaccaggagataaaagaacttggtgagctttctccacattgggacaatctgcgaaaaaatgtccttactcactgtgatcaaatggtgaatatgtaccaagacattctgacagaacttagcaaggaaacaggtgtggaagcaattwctctacttactcaaagtgaattgcatttcctgcatgtgaaatgaaaaaaaaaataataaatagattttatgtagataggagaactggagattttttaaaactcttttatttctaactttaacatcttaaaacaaagaaaaaactaccctattttaccttacagaattattatatgaataattgagacaatttttaaaaatattgaatttgtaaaagaaaagcaactcataaatataggatatgtttttctttctgaagttattttaacatttttctgtcaaatttatcttttaacacacatattaatttatcattatttactaataatgtttaatttctggtttcca

SEQ ID NO: 574854 - DNA, 599 bp, Homo sapiens
taaggctaattaaaaatatcagttgatattgaagcagaaggctgtaaaaaatactgaacatggtatgtcggctagatcttctcaatgtacagggaaaaattcttttcaaaattttagggtctgtaagaacaacatatttcattcactacttgggtaaaaatatatcttcttgaacactgaaatgaggatctattcatcctttcctstgcaatcatccattctcaaaggtacactagggacattatcattatcaaaattggtaccataatggaaattttgatttcgaacatcccattcttcaaccaccagattcaaaacttctagtacatgtacatgcgtcctgccaagaattagagtgcttacttttcaacagcaccaacagaagccagaagaaagtacactatttctagcatgttgagagaaaatactgcattttaaaatctagagctgtatgctcccaaagattatcttttgaatataagcacaatatttaaattttgtcaatttggttgtttacagaatatatatttagagttcattatctttactttcttttgcctgaaatataagaacttacagccaatcaataaaagaaaata

SEQ ID NO: 574855 - DNA, 631 bp, Homo sapiens
tataaaataaaacagaatattacattacaagaatttatattccataatattcacaactgatgtgctgtgaaaataaaatttattaaagtatattagtataaaaacttttgttttkaattttggggtttatgtttcattcttgtcactgctggctaagatctattgtggtgagtattctacttgttgcatttagtttaagtaatgaataaggatgaaaaacttaacttaatgagtttcagggcaccctaagttaactgcaggttattccatttgtcagtatgagacatgacaacattagttctgctcagttacttatttcaagagctacatattagccttgtatctggtgactctgccagctattgtttgcaaagcttcctctccaaatatagcaggcttattaatcaaatgtgaatagacacaatttactaatggtaaagatgaaaaaaaaaattagaccacatccaaataacttgccagtaaaatgccaaggcttagcccatcttacttgcattattaccttgcaataataattcagctaaacattcaaatcagtagccacaaaacttaaataaatttaactgcaatccaaaatctgttaaatacatgttataaaagaaagtagaaaaat

SEQ ID NO: 574856 - DNA, 348 bp, Homo sapiens
ctcccaaggaatcaaattataatcaaaagaaaaactttaattaccatctccttcaaaatgatatattgtcagctactgaacacagtccaaaagaaaaaaaggaactgacaggggcttttatttaaattattcttatttctagagtgcccatgtaattttaccataatttttaaaagaaaattttgtgacagagaatgttctttctgaaaagaaaaaaataaagtatattttaattgaaatatactttattgaaatattgaaaatgaatrggagataaattttagctatagcctacgagactgacatttttaaatttggagtattgggaatgacttccaacgaaacaca

SEQ ID NO: 574857 - DNA, 539 bp, Homo sapiens
tataggttatggacagcttatttgcctgatatgattttcccctttttatgcaaaaagtctcctatttataatagagaataagaaaatatctacccttattcctccttacagtagtaagaaaacttctcagtcccagagtttttgccctgtgactgtgtaaccactgatcttataggtgacaaggctkctttagctctgtgttgttgtttgcagtggtctgtgattctagtgggcagccaaggttggtaacccctgctctctatattattaatcttattgcattatgattatttgtgaaactttttctcccattctagtttttagcacttttaagtcagcaactatatctgatttctatgtgaattccaatgcctgttgtatttgatctatagcatacttatatatacaaggtgctccatctcttattcaagaaaagcacaatgtattacagaaacggcatacaagaaaaaaacctaatacattactgtggcctagtaaggctacaagagaagcaaaagtaaaatattagggaggagagc

SEQ ID NO: 574858 - DNA, 539 bp, Homo sapiens
tataggttatggacagcttatttgcctgatatgattttcccctttttatgcaaaaagtctcctatttataatagagaataagaaaatatctacccttattcctccttacagtagtaagaaaacttctcagtcccagagtttttgccctgtgactgtgtaaccactgatcttataggtgacaaggcttctttagctctgtgttgttgtttgcwgtggtctgtgattctagtgggcagccaaggttggtaacccctgctctctatattattaatcttattgcattatgattatttgtgaaactttttctcccattctagtttttagcacttttaagtcagcaactatatctgatttctatgtgaattccaatgcctgttgtatttgatctatagcatacttatatatacaaggtgctccatctcttattcaagaaaagcacaatgtattacagaaacggcatacaagaaaaaaacctaatacattactgtggcctagtaaggctacaagagaagcaaaagtaaaatattagggaggagagc

SEQ ID NO: 574859 - DNA, 539 bp, Homo sapiens
tataggttatggacagcttatttgcctgatatgattttcccctttttatgcaaaaagtctcctatttataatagagaataagaaaatatctacccttattcctccttacagtagtaagaaaacttctcagtcccagagtttttgccctgtgactgtgtaaccactgatcttataggtgacaaggcttctttagctctgtgttgttgtttgcagtggtctgtgattctagtgggcagccaaggttggtaacccctgctctctatattattaatcttattgcattatgattatttgtgaaactttttctcccattctagtttttagcacttttaagtcagcaactrtatctgatttctatgtgaattccaatgcctgttgtatttgatctatagcatacttatatatacaaggtgctccatctcttattcaagaaaagcacaatgtattacagaaacggcatacaagaaaaaaacctaatacattactgtggcctagtaaggctacaagagaagcaaaagtaaaatattagggaggagagc

SEQ ID NO: 574860 - DNA, 539 bp, Homo sapiens
tataggttatggacagcttatttgcctgatatgattttcccctttttatgcaaaaagtctcctatttataatagagaataagaaaatatctacccttattcctccttacagtagtaagaaaacttctcagtcccagagtttttgccctgtgactgtgtaaccactgatcttataggtgacaaggcttctttagctctgtgttgttgtttgcagtggtctgtgattctagtgggcagccaaggttggtaacccctgctctctatattattaatcttattgcattatgattatttgtgaaactttttctcccattctagtttttagcacttttaagtcagcaactatatctgatttctatgtgarttccaatgcctgttgtatttgatctatagcatacttatatatacaaggtgctccatctcttattcaagaaaagcacaatgtattacagaaacggcatacaagaaaaaaacctaatacattactgtggcctagtaaggctacaagagaagcaaaagtaaaatattagggaggagagc

SEQ ID NO: 574861 - DNA, 618 bp, Homo sapiens
agtttatatagcgttttagaaacaacaatagaagaagtgggtgatgagggtagacactggtgggcaaaatcatggatgctttgaatgcccagtggataagtatggactcctcaaagttcctaagcacaagagtaaggtactcagaaactgtgctttaaaagttcagtctccctaattatcttgtaattttaataaatatggttgtatgacctgaattgctttatataaatactataagcaatgttcttatgctaaacccttttcattatgtggccaatgtattaatcacaaaagagatcaycaagggacataaattatatcttttctcagatgacagtattttattggcttagctgagaaaaaaataaacaaaggtgaaatagtacagtggctgtggtagttcccaaaaaacctggtctaaaagacttggctatctgggttttttatttgtttgtttgtttatttttgttttttttttttttggtggggggcaatatcaaatgaaagatgaggcaaagaaaaatttcctcacttgtgatttcatgtcctgcaaaatgtcactgtttactttaacctaaagcccaaattactcatttcatatagtcatttttacttcta

SEQ ID NO: 574862 - DNA, 521 bp, Homo sapiens
atatcttttctcagatgacagtattttattggcttagctgagaaaaaaataaacraaggtgaaatagtacagtggctgtggtagttcccaaaaaacctggtctaaaagacttggctatctgggttttttatttgtttgtttgtttatttttgttttttttttttttggtggggggcaatatcaaatgaaagatgaggcaaagaaaaatttcctcacttgtgatttcatgtcctgcaaaatgtcactgtttactttaacctaaagcccaaattactcatttcatatagtcatttttacttctatacattgctgttgactgacgtgcaatatttgttgctgaaaaagcctgcagaaaaagtattggcatggtgcgataactctgtaatcattaagtctctgctcaagtcagctcttaatttaacgggtaggctgatagccatgctcaccagtatattgcctcagcaagctgtatttgtctcaaaccactgccctatggagaattcttttaagatccacaaagt

SEQ ID NO: 574863 - DNA, 622 bp, Homo sapiens
  misc_feature 586, 587, 588, 589, 590, 591, 592, 593, 594, 595, 596, 597,598, 599, 600, 601, 602, 603, 604, 605, 606, 607, 608, 609,610, 611, 612, 613, 614, 615, 616, 617, 618, 619, 620, 621,622: n = A,T,C or G
cagggcaaagtctaggctcatctctagccagctgaactaaatatgaattcacttgaggatgattttcaggaaacaacagaaaaatgaattccatgcaattcagcaaatatgtgacagtgcctccttgaagagccacaccctgttaatgtaattcaattttatttgtcagttaccaagcaggaggccagagaaaatccaaatgattaatttagaagtgatgtgtgtgccttctggaaacgttagaaacacttaccccaacttctggcgggggatccttatgttctggtaggacactggttcgaacctgtggagaaaaacattttctgtaagactttggagtagaaactagtgcagaagcctcgcacaggtgctgggtttcaatttccttcatctcgcgtcaattcagactctgtggttaatcattaatgaattcacctgtgtgcaacacctgcggcagtgcaatgaagctgtgctgttacagttcctgaacttcctggacagagctgcctggaacctcactccatctayttatctaatacagatatatccaggatttaggcagatctctttaatctcctaaaaaggnnnnnnnnnnnnnnnnnnnnnnnnnnnnnnnnnnnnn

SEQ ID NO: 574864 - DNA, 521 bp, Homo sapiens
atatcttttctcagatgacagtattttattggcttagctgagaaaaaaataaacaaaggtgaaatagtacagtggctgtggtagttcccaaaaaacctggtctaaaagacttggctatctgggttttttatttgtttgtttgtttatttttgttttttttttttttggtggggggcaatatcaaatgaaagatgaggcaaagaaaaatttcctcacttgtgatttcatgtcctgcaaaatgtcactgtttactttaacctaaagcccaaattactcatttcatatagtcatttttacttctatacattgctgttgactgacgtgcaatatttgttgctgaaaaagcctgcagaaaaagtattggcatggtgcgataactctgtaatcattaagtctctgctcaagtcagctcttaatttaacgggtaggctgatagccatgctcaccagtatattgcctcagcaagctgtatttgtctcaamccactgccctatggagaattcttttaagatccacaaagt

SEQ ID NO: 574865 - DNA, 580 bp, Homo sapiens
tatagccaggcagcaacagtatcttattaactctaccttaaaaataaaactaaattcggatacatctcctcttcctcctaatttctccaaactcatcttcatgatcctctctgccccctacagtttattttccatattgcagcccaagttgtgtctaaaacttgtcagttcaaaatcttctgttgattatttgacctcactcaaagtaaaaggcaaaggtcttacagtgttttctatagagctctacatcatctcactccccattgctgtrgtaatcagaatgctaagatgttccccaagattctcagcccctggtgcagctgctctacataacacccgccccttgattacaggttgcaccgtgaatatatgctgcctgtaattatacacaggtggctgggataaccatgcataatagtgtcttagcagactggagatggaaattctgaccttgaggaggcaaaccaccatgtgaactgccaatgtggagggccttatggcaagaatggccttgagactgagtgttatcctgataaccaacaagaaaatgcgaacctcagtcttaaagccacaagaaaat

SEQ ID NO: 574866 - DNA, 280 bp, Homo sapiens
attgaagtccttgacttatggttagggtttgaagacggcaggaggcagacaagaagagaaatataatttattttccttaactccttgaccacaagtgcacattgtgggacttactctgttacttatccatcctttcccttcccactccattgctacctccactccttaatctgtttgctcaaccaagctactattttatgcagtggagccattaaaaaatagagatgagagatgattaacaggcaaggagraaaacaagaaggaaaagacagggaaggtg

SEQ ID NO: 574867 - DNA, 519 bp, Homo sapiens
gaaaagacagggaaggtgggacatgaacagaaggggattaggattggtgagtttagggaaaaatgacttagagtggtgtgtctcttctcctgtggcagaattaagtgtccagagaaaaaaaaatctagaactatttccacttgtttttttctagctcaaaccctacttgtaaaaaaaaaaaaaaaatgtggtctcttgaatccagaggaaggaatatatatgctctcagttctgactgagaagaaaataatatggatcacaaaagaaaattcacactttagtgtacttaaatatacccttctggtctcacagggtttaataacgggcttcatgcctctctgctttccccaatgcaccctttccattttctactggaagtggggtttggagaaaagaattagaaaaaaacaaaacaaaacagtattttrcctcttttggatttcacttacataattaaatgagttatatgatctgtacttaaattgatatttacctttactcctgttttaaacaaatcac

SEQ ID NO: 574868 - DNA, 459 bp, Homo sapiens
acacagtggcttctactattccactttttagtttgcaagttcttacttgtactttctaaaccaatgaaacgtcttttttatgtacatcctttatttagtcctattcttgctttaattcaaattttccaggtactattatatgacctttaaataagcaaagtccagtgtgctttatttcctttcctggcctattcccacttatccacgagttcacttgctttgatttcgtttgccaccttccaaggtctagtcagttctatttctgcctagtttgacttctggtattttcatgttgtccctatggagataatacccaaacctggtctcctgattccttccaacctcaaaatcttctcagcttcatcctagaccttatgccctaatatacttgatcaaagtacagagtargaaaggtccaggagtaaaaatcataccccaatactctgcaaatataaaagt

SEQ ID NO: 574869 - DNA, 593 bp, Homo sapiens
ataggcaaaacagtgataatagtcaaaaagtttacattttgtggaagaacataaaggggyctttcagttacggttaatcttttccctgattctgatccctgtgctctctcttgcattggggcttttaattatgctcttccgtcttgcattttcccctctcaatttccacaattggtggtgtacctgctctcttcatggggagagtaatgacgagaaacatctgagttgccagatctaaggctcacttctgtggaatgtttatatttactgggcattatggtaagtgcaggaggaaaaaaagagaacaagaaaaaccacacagctctctccaccactccccccacacataaagctcatattcccatgggagacatggaccactaaacagactactgtagtacagttggtaagaaccaagatagagacggggatgtgatgtaaaaaggagagacatctatatagggagggaggtagtagaaactgaagaaggcttcctggaggaggcgatagctgagctaagtttataggatgattacatgtggttaggaaagtggggggttcctgtgatttgcatggaatgccttgatcagagg

SEQ ID NO: 574870 - DNA, 507 bp, Homo sapiens
ttgctggagtttataagccaaggggcagtgaatggcactatcattccccagatgtatgtgggagtcttccttgatacctctgggttcttacctccactcctaacacacatacaacccccaagttgcccctaaatacctctgtaatttatcttctctccatctgtgctgacactataagccaatccatcttccttctctgatggggttaccacaataatcaattattaatgtaagcctcatcacaaggaagaggacattgaaataattcaggcaaagtcccctctaataaagatyttgcaataacagtatttatatcatgtaacacagccaagtgtttgatttttccatgacataaattccatatgtacatttttttaaagtttgagatgttctacacttagctttcaaagctctgaaaaatatagtatattttatttgtagatgactggcaatttatttatagatgacttttctgctgtatgctgcctttgcaatgatgactattaa

SEQ ID NO: 574871 - DNA, 655 bp, Homo sapiens
ttgtggctgctttcttctcttccctgtatcacttatttttttacttccttgtggttgtcctagcattgcttgatctcaggctgtgctcctagagaatctgaattgagatgccaaggaaaggttttaatctaggaggttttttgaccattgagtgacaaatgaaaatgtcattatgaataaatagccctaggcttcctgattggaaagtttaccaattttcatgaaccaagttatcttctatcctcatctattttaatgtatgaatgtacctcttctttactttaatgaaattaatgtgcttattaatttctttcctttttaaaaaatgcagtgactctcttactctgccccattttgttttgcaatgttttcattactgtgtctggtttattacacttttatcatatagttcccctatattggaacttttctcaatgtggagagacagtatgmtagttgtttgtccttttcagaatgcgtaccttttttactgtcatctcttagaacaaacaggttcatcagtatacttctctgtataaattgtggcataatggaagagtgcaatacattttaaacaaaagttatggagtcctcacagcttgtatcaagatactcctcacagaatactaaacttttctgattacattttgccaaa

SEQ ID NO: 574872 - DNA, 523 bp, Homo sapiens
ctctgtataaattgtggcataatggaagagtgcaatacattttaaacaaaagttatggagtcctcacagcttgtatcaagatactcctcacagaatactaaacttttctgattacattttgccaaacttatcttaggcaaggaaatgtacaccacccccagtatcccagaatgtggtcaggggcttcactatcactcttctaccttcctcgtcatcccccctttacttattctttctgataataatttagagataatataaattgtaactgtatggtgcatctattagtaytaaataaaaattgttagctaatattttcattataactgtatactgaaagcaaagctgaaactttgcatattaagttgatatattatacttgctgtatatctcagattcaacctaattgctcagattcttctagacttggatatatcaatcttttggaattacttgtttgctttagtggttgttgcttttttcctgaacttgtacatcctgccatttgagtgcaaacagaatt

SEQ ID NO: 574873 - DNA, 389 bp, Homo sapiens
gtccaaattcatcaagttgtaaaaatatatgcaagtttttctaggtcaattttacttcagtaaagctgttttttaaaaaatgtagacatatattccactaagcctaaactaaatgtattctcacttcaacttcccccaaaacattgcctgtagcctctctagaactacccaataagaagggaaggaaaagggaggggaaatctgaatagagactgaactctgaattaatgaaagtttaaataackaacttttgccaaatttgcaaaaacatttgaccacaagcatatttataattccttgtagtgtcttatacgaggactatgcaagtggcaggccctgacacttcagctgtttcagctttacggtgaatctgtgtcttcaattcatcc

SEQ ID NO: 574874 - DNA, 600 bp, Homo sapiens
atattaatatagacccatgggaatttttcatttcgttaatgactcagtaatatctttttgctgttcaggttgtgccaactttgtgttttgggagcgccttaaggttggctgttgtgccctttatgtayacctattctattaaaaaaaatttttttagcatgtcattactttctagagccacaagatgctccagaatcatcttgtattttccctgacccagccctgcaatcaaccaactttccaataaaccttgatccttttcattagagaatagtgtttagaaatcaagcactgaggactagttatgctcactgctactatggtgtcactgctttccctttcattagctaggactagaaaatacgtgtcctatagtaattatgtatacatacttccatatttatttccttatctgcctctattctttatttttcattctttttattatcattttttataattttattgatcacttattatcacttaaacaacacaataaaagtaagttaaaaaataaagcaggttggggataagaaattttaagacagacatattgataagcaagaaaacaatcagatttgaaaaacaataagcacactt

SEQ ID NO: 574875 - DNA, 600 bp, Homo sapiens
atattaatatagacccatgggaatttttcatttcgttaatgactcagtaatatctttttgctgttcaggttgtgccaactttgtgttttgggagcgccttaaggttggctgttgtgccctttatgtatacctattctattaaaaaaaatttttttagcatgtcattactttctagagccacaagatgctccagaatcatcttgtattttccctgacccagccctgcaatcaaccaactttccaataaaccttgatccttttcatwagagaatagtgtttagaaatcaagcactgaggactagttatgctcactgctactatggtgtcactgctttccctttcattagctaggactagaaaatacgtgtcctatagtaattatgtatacatacttccatatttatttccttatctgcctctattctttatttttcattctttttattatcattttttataattttattgatcacttattatcacttaaacaacacaataaaagtaagttaaaaaataaagcaggttggggataagaaattttaagacagacatattgataagcaagaaaacaatcagatttgaaaaacaataagcacactt

SEQ ID NO: 574876 - DNA, 641 bp, Homo sapiens
ttgcatcaatgttttatagttttcattgtagagacctttcatttctttggttaattcctaggtatttaattttatttgtgactatcataaatgggattaccttcctgattactttttcaaactgtttgctgttggtatatagaaatrctactaatttttgtatgtagatttttttctcctgctaccttattgaatttggttatcaattccaataattctcttcttaagtctttagttttttccaaatataagattatatcatccacaaagaaggataatttgatttcttcctttccaatttggaggccccttatttctttctcttgtctgattgctccagcgaggacttctagtagtatgttaaataatagtggcaagagtgagcatccttgtcatgttccacatctttgaggaaaagtttacagttttcccccattttgtatattagctgtggagtctgtcagatatggcttttattatgtcgaggtgtgttccttttatacccagtttgtttatactttttatcatgaagggatgttgaattttatcaaatccttttacaacatcaattcaaaggattatttattttttgtcattcattctgttgatatgatgtatcacactgattgatttgcctatgt

SEQ ID NO: 574877 - DNA, 641 bp, Homo sapiens
ttgcatcaatgttttatagttttcattgtagagacctttcatttctttggttaattcctaggtatttaattttatttgtgactatcataaatgggattaccttcctgattactttttcaaactgtttgctgttggtatatagaaatactactaatttttgtatgtagatttttttctcctgctaccttattgaatttggttatcaattccaataattctcttcttaagtctttagttttttccaaatataagattatatcatccacaaagaaggataatttgatttcttcctttccaatttggaggccccttatttctttctcttgtctgattgctccagcgaggacttctagtastatgttaaataatagtggcaagagtgagcatccttgtcatgttccacatctttgaggaaaagtttacagttttcccccattttgtatattagctgtggagtctgtcagatatggcttttattatgtcgaggtgtgttccttttatacccagtttgtttatactttttatcatgaagggatgttgaattttatcaaatccttttacaacatcaattcaaaggattatttattttttgtcattcattctgttgatatgatgtatcacactgattgatttgcctatgt

SEQ ID NO: 574878 - DNA, 562 bp, Homo sapiens
ctgatctatattcctttgggtatatactcagcaaaaggattgctgggtcaaatggtatttctgcctctaggtctttgagaaatcctcatactgtcttccacaatggttgaactgatttatactcccaccaacagtgtaaaaatcatttctttttctctacaactttgccagcatctattgtttttggactttctaataatagccattgagtggtgtgagatggtatctcattgtagtttcaatttgtatttctctagtgatcagtggtgttgagctttttttcatatgtgtgttggtcacatgtacatcttaatttcataagtgtctgttcgtatcctttgtccacttttaaatggcattgtttgcttttttcttgtaaatttgagttccttacagatgctggatattagatctttgtcagatgcatagtttgcaaaaattttcccccattttgtaggttgtctgtttactctgttgatagtttcttttgctgtgcagaagctctttagtttaattagatcttgtttgccaatttttgyttttgttgaaattgcttttggca

SEQ ID NO: 574879 - DNA, 565 bp, Homo sapiens
aaaaagacaaatagggacattatacaatgacaaaagacttgtccaacagaaaaatgtcagaatcctaaatatatatgcacctaacactggagcgcccaagtttataaaacaattactactggacctaagtaatggacctaagaattacttataagtaattccctataattccttataagaattacttataagcaattccctataagaattcacttataagtaacaattactattggacctaagacaataacataataatagtgggggactacaatactccactgacagcactagacaggtcaccaagaaagaaagtcaacaaagaaacaatggatttaaactataccctggaataaatggacttaacagatatttaacagaacattctacccaacaaacacagaatatacattctattctcraatgcatggaactttctacaagatagaccatatgataggccacaaaacaagtctcaataaatttaagaagattgaaattataccaagtactctctcagacaacagtggactaaaactggaaatcaactccaaaaggaaccctc

SEQ ID NO: 574880 - DNA, 525 bp, Homo sapiens
tacactgccagaaaaataaatgtgcagaatttaatgaagttgccaaataaattcatttctactgagatcaaaataggttttctaatactgagtgatcaaaacaaacctttcccctgaaatakctatactgtttgctgttagagggcattctcagtcctctatctaaagcatttttcaaaaagagtagtaagcagaaatgtacagtgagaagaaatggctggtacaaatctaagagagggacccagaaactagaatacctgaagtatcatctatttctgctgctcactacctttgagaacatgcatgtgttgcctaacctctcagtgcatcactgtccttgtttgtaatgtagaaacaatagcacattcacagtcatattttaaaaagttagatgaccatcttggtggctccaagtgcagaatatgtaatgtgcaattttgtgagtcacaaaatatttttaaaggactaataagctagagaatttaatatattttctttccagatcttattaaaatttaaacttct

SEQ ID NO: 574881 - DNA, 584 bp, Homo sapiens
tataagtagttatatatacttactatatttgcatgatggagatggggaaagtttttaaggtgggcgaataaaaaattatgctaactggggagaagtggttttcccaatcagaaaagtccctgtagatataacacggaatatcaagcacgagaaaattgacagtaatttagcctagaaagatcactagatatataaagggaagggaaactagcaagatctgtaatgcattggtcatgaaagaggtagtgtttaacctttttgtctgtatgatagtcaaagtcctggaggattttaaasagaaaaaaatagcatcagcattttattttagagcaatcattaggcaacgaagaatcatgagagaatttcccagttgttatggattgggagactaggattagggctacacaatcactttcctaggtcccagtcacttttgccttcatgagccacttcctctaggaaaagtaattattactgtgttggtatcgttggtggcccaggagcacgtacactgctgggaattttttagaatctcaggttttactccatacctactgaatcagaatctgcattgaacaagatcc

SEQ ID NO: 574882 - DNA, 572 bp, Homo sapiens
actggcaaaaggactgccgaaagsctatattttattacattaccttattcttaaaccctttgcataaaggcctaagatctaaaaattttttatcttagcataatagtattataccatcagaactataataaaaaattagattacttcttctattatgacacccatttttcatagtttaatgatgctgtgatcaaaatacccttggcaatttgatatgcatgttaagacaggttataaattacaatcaaaggtgaaatggctttatgaaattatgtatctataaagaaaaatgcaagcaagccatttttttataaagtagaactcaatctcatcacacttacaaacaaaatttgctttcttgctcattttgaaaggaaagtagtttctactcttttgaaaaaacattgtttacataagtaaacaagccagggctgctgtgaaagttattatggaagatacaatttatatattttctggaaaatatatcgcctcatatatacagacaaaacctttgctttaacatgtttgtgcaactaattacttactttccaatgagtacaatttcccactag

SEQ ID NO: 574883 - DNA, 557 bp, Homo sapiens
aagccaaaatatatcatcctcctctactacaaagggaagatagagaccctcaagtgagaagttcttaatctttcatgtccctgtgtcagacaggatacttttggctggaagtggcagaaccccttaccaaaagtggatttaatgagtaaggatttttaaaagtcatatgtaaggtaaagttccatagtaggtgatcccagagtcagttcygttgtataatattgtcattagaggcccaaccacttttccacctgtgacagattcaagagcgtcccctcatgacccctaacttctagtattcatgactttgtctaatcccttttcctgatgggtggggcagacatgtgactttcttctaaccagtagaatgtggaaaaggtgacaagatatcgctctcatggttttgttatataatcttgctaacagactttctttaaagactctccttgctatctttaaaaaagtaagcagctatgctttggaaactcctatggcaaaaagctgagggcagcctccaggtaatgaggaacaacacaagccaataggcagctagaaac

SEQ ID NO: 574884 - DNA, 540 bp, Homo sapiens
ggggggtctcactgtgttacccaagctggtcttgaactcttggcctcaaacaatcctccygcctcaacttccaaagttctgggattataagcatgagccattctgcctggccagtgttttttcgcacctagaattggccctgtctttttattttcacccttgttatttttttgtatgacttgctttatatctactagatttcatatctccaatgtgtctctcttccagtctgcctttcctttttctaccaaattaagttactctgaagctcagctccagttctatgactctcttgctcttcactattcaatggctgtagcctcctgagtttgagttcaaagaaccacatggcatggctccagaccgcatctccagactgccttcatatgcacttctctccagctgaactgtgaatgaataatctataccttgtttgctctcaatgtatagagcagttgattttgttgattgtttctactatttatttcaatcacaacattcctatgtgacaaagttttatattttccgttttacagatag

SEQ ID NO: 574885 - DNA, 537 bp, Homo sapiens
ccacgcctggctaatttttatttttgtagagatggggggtctcactgtgttacccaagctggtcttgaactcttggcctcaaacaatcctcccgcctcaacttccaaagtkctgggattataagcatgagccattctgcctggccagtgttttttcgcacctagaattggccctgtctttttattttcacccttgttatttttttgtatgacttgctttatatctactagatttcatatctccaatgtgtctctcttccagtctgcctttcctttttctaccaaattaagttactctgaagctcagctccagttctatgactctcttgctcttcactattcaatggctgtagcctcctgagtttgagttcaaagaaccacatggcatggctccagaccgcatctccagactgccttcatatgcacttctctccagctgaactgtgaatgaataatctataccttgtttgctctcaatgtatagagcagttgattttgttgattgtttctactatttatttcaatcacaacattccta

SEQ ID NO: 574886 - DNA, 540 bp, Homo sapiens
ggggggtctcactgtgttacccaagctggtcttgaactcttggcctcaaacaatcctcccgcctcaacttccaaagttctgggattataagcatgagccattctgcctggccagtgttttttcgcacctagaattggccctgtctttttattttcacccttgttatttttttgtatgacttgctttatatctactagatttcatatctccartgtgtctctcttccagtctgcctttcctttttctaccaaattaagttactctgaagctcagctccagttctatgactctcttgctcttcactattcaatggctgtagcctcctgagtttgagttcaaagaaccacatggcatggctccagaccgcatctccagactgccttcatatgcacttctctccagctgaactgtgaatgaataatctataccttgtttgctctcaatgtatagagcagttgattttgttgattgtttctactatttatttcaatcacaacattcctatgtgacaaagttttatattttccgttttacagatag

SEQ ID NO: 574887 - DNA, 406 bp, Homo sapiens
tcaagggaccctcccacctcagcctccatagtagctgggactacaggtgcgtgccaccacacttggctaatttttgtaatttttttgtagagatgaggtttcattatgttgcctaggctggtctcgaactcgtgggctcgagcaatacwcttgcctcggcctcccaaagtgctgggattacaggcatgagccaccacgcccagccaatctttattttctctcaaaattttaattcacaagtaaaagctgaaaatgtgtataaataaggagttttatattgttaaaataataatgcaattttcagatgtttaacttattagacaaatggcattgctaaaaatttcccttagggcatcatttgtttgccttcacgtttgtgataatcaacgtcataattttatcagtg

SEQ ID NO: 574888 - DNA, 527 bp, Homo sapiens
gagaaacagacaaaaatattatttttcttttattttttacttctctcttcctcatgccttcctcccctcccttcttttgtttctttgttttttgttttttttttttaaattggkcagccatatatgatgccacagagaagacaagttaggtaagaactagaaatggccagtagactttataatcagaaggtcattggtcactgtagaaagagtaactggcaatggcatgggttgaagctagctgcagactgaatatgattttcaaaagaaatttggccacaaagaggaggagataaaagcctaattcttcttatagctagagaaggatataatttaaggaaaaaaattttaggagaaagactagacctgacaggaaaattctgagagtgtgtttgaagaatgacttttgccattgagacagggagtaaggggtacagttgagtacaggtgcagagggtgagggagttctttcccaatgcctcctttctctctgggaaatggaaagggaagtgatctgtgagagtaag

SEQ ID NO: 574889 - DNA, 527 bp, Homo sapiens
gagaaacagacaaaaatattatttttcttttattttttacttctctcttcctcatgccttcctcccctcccttcttttgtttctttgttttttgttttttttttttaaattgggcagccatatatgatgccacagagaagacaagttaggtaagaactagaaatggccagtagactttataatcagaaggtcattggtcactgtagaaagagtaactggcaatggcatggkttgaagctagctgcagactgaatatgattttcaaaagaaatttggccacaaagaggaggagataaaagcctaattcttcttatagctagagaaggatataatttaaggaaaaaaattttaggagaaagactagacctgacaggaaaattctgagagtgtgtttgaagaatgacttttgccattgagacagggagtaaggggtacagttgagtacaggtgcagagggtgagggagttctttcccaatgcctcctttctctctgggaaatggaaagggaagtgatctgtgagagtaag

SEQ ID NO: 574890 - DNA, 589 bp, Homo sapiens
tattaaaatttcatgcgggcaattaggaaaaaatgcccaaaaaaggctcttttgagggacaataatttcaaaacaaggttgagaatcgctgatagaagaatagaagatcagcaccacaataaaatgtgagccaccagcacagtgggactatagacagattttgaacataaattccaattgtgcattgcaagtacagtttcatttgtttgctaaccatcaatcgtacacttttttagtacatcagcctctttataactcatgctaggccgtgtatgccagggttctaaggcagggcactggctccatcagcttcgtctcactctagtcctttcctccaggagctgtcttttgagggaaatgagataaggaaagtgaagcacttggcayggagcattctgtgagtacaagtgtagacagatgtgggatcacagaggaagaatagttaactttgccagaaggtggttaggaaagaattcaataaatagatgactttggaccaaggagtttgcaaaattgaatgggaaaacaaccacatctttattatcaattaaccacatctaaaatttactgtttcctttaattacaatgt

SEQ ID NO: 574891 - DNA, 589 bp, Homo sapiens
tattaaaatttcatgcgggcaattaggaaaaaatgcccaaaaaaggctcttttgagggacaataatttcaaaacaaggttgagaatcgctgatagaagaatagaagatcagcaccacaataaaatgtgagccaccagcacagtgggactatagacagattttgaacataaattccaattgtgcattgcaagtacagtttcatttgtttgctaaccatcaatcgtacacttttttagtacatcagcctctttataactcatgctaggccgtgtatgccagggttctaaggcagggcactggctccatcagcttcgtctcactctagtcctttcctccaggagctgtcttttgagggaaatgagataaggaaagtgaagcacttggcacggagcattctgtgagtacaagtgtagacagmtgtgggatcacagaggaagaatagttaactttgccagaaggtggttaggaaagaattcaataaatagatgactttggaccaaggagtttgcaaaattgaatgggaaaacaaccacatctttattatcaattaaccacatctaaaatttactgtttcctttaattacaatgt

SEQ ID NO: 574892 - DNA, 557 bp, Homo sapiens
gcatgactagagaatgaacactttattgtcatgaaactaattcataccaagcctgacatatttttaacaaaactaagtaggagcatgtaataaaaactgtacgctaacaatttcaaaactctttaacgaagcctcttttcattgatttcttgaaggagaatcagaatcttttggagaacagtactgagctattaaaatgctaatagaaatgtatcccttaagtcttagtacaaatagtacaggcagaggtcattaggtaaactaaaaatcctgtaagctattctctcttttctctctctctctctctctctctctctctctctctgtctctctctccctccttctgtctctctccccaaactaaagttgatacaatacaacaaatttttaaaagtcagggctctatatacatcagcatagagacttcatatagattccatrtgatttggattttatgcttaactcagaacaagcttatttacttctttactaaaaaacatgtgtaaaaataaaaaccatcaatagtgactttgcagagaatagcaaatattcaaaga

SEQ ID NO: 574893 - DNA, 526 bp, Homo sapiens
aaatcatttccagtatcttccagaccttgcatgctttgttctaatgcccttctccatttgtcatttgctccaaattcattttgcctctctactacccttgagttaggcatatttcccatttctaaattaaattgctttttaaaaaataataaacaactagatcaggatattcagttttccttttcatcctctstgaaaacagttgcctgtaacctcttccttgatctggagtggaagatcaggccacaggttctgaagcacatgcaaatatgatctgatttaaccagccactgtgggcctggctccccagtgtctcagaataatgtaaggctcaagtataatgtcaagccttcaaactgagctttttactgttcttcatctagtattcctcctgcacatacttacctgttaaatttcagcacctttgtgggtagatcctgattttcctccattcctgacctcccttataaaagatggtcattcctgaccatctttgaaaattctatcaaactgacataaccagccc

SEQ ID NO: 574894 - DNA, 531 bp, Homo sapiens
tgtgtgtgtgtgtgtgttttgtgagctttatcaggcaatttggtacaataaagtttagcttttggttgaaaatattgaattattatagtcactgttgagaattattttgctacatcacgtttgtttctttgcccaattagagctgtccataagcagataaaaaagtcaaaacagacagaaagatttagtaacaacctcttctaaattattttacaaaactcctaagaagtttttgaaactaattcctctragtaattgtatgatttttctcatccactcccaactttgaagtggaagggtgttcatcatctaaagaagtacttatataaatatactgaggctgatataggtccacctctaacctctcctcagtacagagctggaaccgtagcttagaactcttctttagttcttgagctttgatcaccataactacaatgtctatttctttgccagatgttgaggaagcaggcaagcacacagatttattggatgggctataaaggtatatttacaaataatagatagagc

SEQ ID NO: 574895 - DNA, 624 bp, Homo sapiens
tgcttttttagacattatgttwttgtacacttaatagacctcagtatagtgtaaacatacattttatatgcagtgggaaaccaaaaaatttgtgtgacttgctttattgtgatatttaccttattactgaatccacagtatctctgaggtgtgtctgtaccttaaaggcctgtgttgccttaagattttctttgatcagatgaaaaccaactagcactgttcttgggggtccagaagattctttttttttcacagagctttatttagatataatgaacaaataaatgttgtatgaatttatgatatataatgtgatgttttggtataccctttgtggaatgattaccacagccacagaggtaacatattcatcacctcacttagtagttacgtttgtgtatgtatgtacatgcgagtgtggtgagaacatttaaagtctatactcttagcagatttcaagtacacaatacagtattaactataatcaccatgctgtgcattagatcaccagaacttactccttctatctaactgaagctttgtaccctttgaccaacataatcccatttccctcaagttccctagtctctggccaccatcattcgactctctgcttccatgagt

SEQ ID NO: 574896 - DNA, 624 bp, Homo sapiens
tgcttttttagacattatgttattgtacacttaatagacctcagtatagtgtaaacatacattttatatgcagtgggaaaccaaaaaatttgtgtgacttgctttattgtgatatttaccttattactgaatccacagtatctctgaggtgtgtctgtaccttaaaggcctgtgttgccttaagrttttctttgatcagatgaaaaccaactagcactgttcttgggggtccagaagattctttttttttcacagagctttatttagatataatgaacaaataaatgttgtatgaatttatgatatataatgtgatgttttggtataccctttgtggaatgattaccacagccacagaggtaacatattcatcacctcacttagtagttacgtttgtgtatgtatgtacatgcgagtgtggtgagaacatttaaagtctatactcttagcagatttcaagtacacaatacagtattaactataatcaccatgctgtgcattagatcaccagaacttactccttctatctaactgaagctttgtaccctttgaccaacataatcccatttccctcaagttccctagtctctggccaccatcattcgactctctgcttccatgagt

SEQ ID NO: 574897 - DNA, 570 bp, Homo sapiens
tatattgtatttccattatcatttgtttcaagaaaattttcagctgtcttcttaatttctttattgatccactggtcattcaggagaatattgtttaatttccatgtatttgtatagtttacaragttcctcttctttttaatttatagttctattccattgtggtcagagaagatgattgatattatttcagttgttttgaatgttttgagacttgttttgtcacccagcatatggtctatcctagagaataatgcatatgctgaggaaagaatgtgtattctgcagccactgaatgaaatctgtaaatatttattagatccatttagtctatagtgcagactttttttgttgattttttatctggaagacctcttcactgctgaaagtggagtgttcaatattccagctattattgcatcatatctctctctttacctctggtaatgtgtactttatatatctgggtgctccagtgttgggttcttatatatttaaaattattatattatcttgctgaattgacccctttatcattatatagttacctcctttgtcttttcttataga

SEQ ID NO: 574898 - DNA, 644 bp, Homo sapiens
aatgccaattatcagaccacaattcttattgcctgaatgagactctctggaagagggatttagcagtctaatttagctctttgggtgattctgacacaggtttgagcagcactggactgaaacactaactgattttggagatggactacggggaaggggagcagggtagattggaggtggggccatgtcttgatgaatcatggtcattaattaagcataattaagctaactgaaaatacamtgaatgaaataaatgattggttttgaataaatagcaccatgtcacccaaaaataaacataatatcaggatgtgaatgtcacagtgatgatccaaggacgataactaactagatgtgtccaccttacaagacagagcagagctagctgaaattaaatgttgagagagggaaattgtagaagtggctgaaatatccactataaaatatattacaaaagagatgtgaattgaaataaaactagaatttatctttcctttgccaatttttctcaagtattccttttattcaacatgtgttaaatacctactatatgctaggtactttgccacatactgcggacataacccaaatgtgatggtccttggcctcaagaatgttatcatctattgcaaaatgactattag

SEQ ID NO: 574899 - DNA, 424 bp, Homo sapiens
aaaaatatcctgacctatttgcaatactcagtccacaaaggtgtgatcaccaaataattaacagaacaattaggactacttcttaagtataattttgcaagcaatacttgatgagtgtgggattttctttttttttggtaatgttaggtttttaaaatgtacctccatcaggttaagagsacatttgtgatttttctctctactctgaccacacacacatttctagtgggattttttttttgtctaagtgaaagtatgcattcatttgttcactccttgcacattatcctaataacttttctgtccaggcactgttttaggcactgaagagacaaagatgagtaaacaaagcccctgccctcttggagctcacttcctcataggaaaacagataataaacagaatacactaacaaaataatatt

SEQ ID NO: 574900 - DNA, 556 bp, Homo sapiens
ttccttctccatcttaattctttttactcaagtgsgtagctccttctcaccttcccaactcatctctttccatccgctccctcagctacagccatactggccttccttctgtttgtagaacataccaagaaccttcctgtttccaagctgctgaacttacacttccttctacttgatgcattcctccctccaatcaccccatggcatgctaatcacttttttcagttctcagctcaaatgtcacccctaagagtagcctttcctccctctgtcaccctccaacacatgttaccctgaggtttttcttcatggcgtttctcactatcttaacggttttgatgactcatttgtgttttgtgcatattgtcagcctctctctctcaacccagagatcctgggagcagagaccgtagcttttgtgctttcactcctgtatgccagcacctggcacatactagttgctcaacaaatatttttggatggaagttacttggaactctaaaagaagcagaacagccttgaagggctgttttgaagatcagataacacaaggctt

SEQ ID NO: 574901 - DNA, 542 bp, Homo sapiens
gagagaatttgaaaatattgtaaaccaactcggaggtgttttgctttttttttcaccaaacactagcatttccaaacaatgttagtgataaaataccccttcttttccaaaatattttgttgtagtagttactattaaattttaataatgtrtgcaagctccaaatagctcattattattattatagctgttattattagttagtaaacactgtggcctctaagaaaattaattcagagaagtcccagttatgtccactgacacaagacttccgttatctactcgacggtaagtgcataacagttccagatttttgtcttgcgtcaggcatagctcatgtctccagcccctcttggtgccatgtattcctgtatctaaacagtaaattgatgtgaaacgtggagagcacagagattgtaaaaatgaagaaatgcacctcaagttaaattaattctgtcattctgtgtgtccacacttgtggtgtttatattggtatttaatatttggatcctgcaaagtagatcattttgtttggtgagcgc

SEQ ID NO: 574902 - DNA, 542 bp, Homo sapiens
gagagaatttgaaaatattgtaaaccaactcggaggtgttttgctttttttttcaccaaacactagcatttccaaacaatgttagtgataaaataccccttcttttccaaaatattttgttgtagtagttactattaaattttaataatgtgtgcaagctccaaatagctcattattattattatwgctgttattattagttagtaaacactgtggcctctaagaaaattaattcagagaagtcccagttatgtccactgacacaagacttccgttatctactcgacggtaagtgcataacagttccagatttttgtcttgcgtcaggcatagctcatgtctccagcccctcttggtgccatgtattcctgtatctaaacagtaaattgatgtgaaacgtggagagcacagagattgtaaaaatgaagaaatgcacctcaagttaaattaattctgtcattctgtgtgtccacacttgtggtgtttatattggtatttaatatttggatcctgcaaagtagatcattttgtttggtgagcgc

SEQ ID NO: 574903 - DNA, 542 bp, Homo sapiens
gagagaatttgaaaatattgtaaaccaactcggaggtgttttgctttttttttcaccaaacactagcatttccaaacaatgttagtgataaaataccccttcttttccaaaatattttgttgtagtagttactattaaattttaataatgtgtgcaagctccaaatagctcattattattattatagctgttattattagttagtaaacactgtggcctmtaagaaaattaattcagagaagtcccagttatgtccactgacacaagacttccgttatctactcgacggtaagtgcataacagttccagatttttgtcttgcgtcaggcatagctcatgtctccagcccctcttggtgccatgtattcctgtatctaaacagtaaattgatgtgaaacgtggagagcacagagattgtaaaaatgaagaaatgcacctcaagttaaattaattctgtcattctgtgtgtccacacttgtggtgtttatattggtatttaatatttggatcctgcaaagtagatcattttgtttggtgagcgc

SEQ ID NO: 574904 - DNA, 572 bp, Homo sapiens
gaggtctaatgccacaagcaaagaaagactgtaaatttccccaaggtgtctgggaaatagaattttatattgcatccatttgtgggtagggtagcccagaagtgtcacacgtattacacctcagtagttccccaacgcctctccgtcattccatgtcacagcgtgcaattcctactctacatcccagtattgtccaaacaaacaattgacttcccatatcttcacacagaatatcataagcctgtgcataaaatatgccaagattatttggcattgcatttggtaaargaaactctatagctgatttttccctccttgtctccaacaactttgtttcattgtgcccaaaagatacaaagtatagtctagcccagacaggggatttattttggcatatcctaaaagacagatttccaaatatttcagaaaagcatcctaatctagaaagaaggtgttatcattcctatatcattattaatcatagaatttagttttgtaagccaaggcccaaaggtaacattggacagggaagagaaacatctgttattgttgttctctacaaatatttattt

SEQ ID NO: 574905 - DNA, 572 bp, Homo sapiens
gaggtctaatgccacaagcaaagaaagactgtaaatttccccaaggtgtctgggaaatagaattttatattgcatccatttgtgggtagggtagcccagaagtgtcacacgtattacacctcagtagttccccaacgcctctccgtcattccatgtcacagcgtgcaattcctactctacatcccagtattgtccaaacaaacaattgacttcccatatcttcacacagaatatcataagcctgtgcataaaatatgccaagattatttggcattgcatttggtaaaagaaactctatagctgatttttccctccttgtctccaacaactttgtttcattgtgmccaaaagatacaaagtatagtctagcccagacaggggatttattttggcatatcctaaaagacagatttccaaatatttcagaaaagcatcctaatctagaaagaaggtgttatcattcctatatcattattaatcatagaatttagttttgtaagccaaggcccaaaggtaacattggacagggaagagaaacatctgttattgttgttctctacaaatatttattt

SEQ ID NO: 574906 - DNA, 603 bp, Homo sapiens
atctcctgaccttgtgatctgcccgcctcggcctcccagagtgctgggattataggcgtgagccaccacgcccggccaagtcagcttttcaatgaagcataatttgcaaataaagtacctgcagagagatagcccaatgcttcccaaattttcatgtgtacagtaattacstgggaacttcttaaaatgtgttttgatgcagtagatctaggatggggccagggatttggcatttctaacaagttttccagggatgctactggtatcacacattgaagaggaggggaagttgaagagacaggtcctgttcttatcaaagcctcattctttatacaaaacactttcagatgatgtgctctctttgacaaagagtaataaccaggctgcgcctgtgaaaattgatgaaaaaattgcaatcaggggaaagtgtgatctgttctgtgtttttcaatctacagtatttttacaaagtgccacctctaggtcattgtgagtttgcataatttaggcagcttcaagtctaagattgcatctacactgacaataaacaaggaaataatagatcatactgcatttgagtggtgacatggacatgactgcaac

SEQ ID NO: 574907 - DNA, 603 bp, Homo sapiens
atctcctgaccttgtgatctgcccgcctcggcctcccagagtgctgggattataggcgtgagccaccacgcccggccaagtcagcttttcaatgaagcataatttgcaaataaagtacctgcagagagatagcccaatgcttcccaaattttcatgtgtacagtaattacgtgggaacttcttaaaatgtgttttgatgcagtagatctaggatggggccagggatttggcatttctaacaagttttccagggatgctactggtatcacacattgaagaggaggggaagttgaagagacaggtcctgttcttatcaaagcctcattctttatacaaaacactttcagatgatgtgctctctttgacaaagagtaataaccaggctgcgcctgtgaaaatwgatgaaaaaattgcaatcaggggaaagtgtgatctgttctgtgtttttcaatctacagtatttttacaaagtgccacctctaggtcattgtgagtttgcataatttaggcagcttcaagtctaagattgcatctacactgacaataaacaaggaaataatagatcatactgcatttgagtggtgacatggacatgactgcaac

SEQ ID NO: 574908 - DNA, 339 bp, Homo sapiens
ctataaactgttgcttatctttaaattacacttaataaattcttcctagagatcagatcttgacaacaaacttacagtataaaagaataacacgtagtaaaaaaataatttttctcttttagatatgttttaagttctaggatacaagggcagaacatgcaggtktgtttcataggtatatacatgccatgggggggtgctgtacccatcaacctgtcatctacgttagctatttctcctaataatctccttcccctagccccccagcccctgataggccctggtgtgtgatgttcccctccctgtgtgcacgtatctcattgttcaactcccatttac

SEQ ID NO: 574909 - DNA, 534 bp, Homo sapiens
gacctctggggtgcccagtcagacctggggaagagttcacactgcagacccatcatcctgcctaggactatcttaaggtagggggaaggctgaagaaaaatcacactattttttctctctctccacattagtactattgtacagtggaaaacgtttctcttcttcttcttcttcttcttttttttttttttttttttgagacagtgtcttgctctgtcacccaggttggagtgcagtggtgcgatctcagcttactgcaacctctgcatcctgggttcaagcgattcttgtgtctcagcctcccgagtagctgggattacaggcatgcgcaaccacacctggctaatttttgcatttttagtagagatggggtttcaccatgttggccagactggtcttgaacccctgacctcaaatgatccacccgccttgacctcccaaagtgctgggatttcaggcatgagccaccatgccrgactccagttgaaaactttttaaaggatggtcaaatacatggtaaacaagaccttcaca

SEQ ID NO: 574910 - DNA, 489 bp, Homo sapiens
tatgtattttatatgtaaaggcaataattgggacaaaatacactaagagattaaaagtgcttaattctggataatagattatttctattttcttttgcacagttttttttccttttcctatattttctacaaagcgtatatactattccgtaatcagaaaaagtcaaattttatagaacttgttttccagggctcttgtaatgataatagatcattacactaatacaaaaaagtgcttttatagcacatgacaaaatgtgtgctcaacatatggtcattataaaaaagaagatgctgctaataaaaataactaattagatgagtggttactatttttcagatcctgtacaaagcactwtatgtttattttctcttttaattctcatatcagtcttatgtggtaagtattggccttaccaccattatagagaggtaggaaacggagaattattaagaaagttgtggcttatttttgaaaacactttccta

SEQ ID NO: 574911 - DNA, 634 bp, Homo sapiens
ggaaagtaaatttacccctgtggctgctggccatagagaataggagttcaaatggattttctaaactgtgcaaggaataaaaatttcttgtttttgtttcgtgtctgaatgttttccatgaaactaaaatcgaacacagagcagttaaaaagaaatctgaacattttcctacaggggatttttgaaatggattgctgcttttcctaaggaaaaagaaaaagtaaagtgtagagctaaaggtgggaattttacaaggtgataaattgcaagtaccaagaagagtaagtcgtgaaaattatatcttctttcacgtttaataacgcagggatctttctattataaatagtgaggaagatatttattttcagattacaatgttcgtaaagatatatatatatatactaatttatttattaaatatagcacactctaggttgccacaaaagcaaaatgaaacagaggaagtggctttttatctagctaagtgagacaaaaaccatcytattcaaggaaagagagatttgcatgtctccaaaacccatttcagtagttcccattgatcatacgcaccggataatagctaatttcttcatttttatttgcctatttgtttcaaattatgttgagtggtgtc

SEQ ID NO: 574912 - DNA, 524 bp, Homo sapiens
tgcatgctgggagggaatgggacaatattttcaaagtgctgaaagaaacaactgtcattcaagaataccgcatcatgcaaacctatccttcaaatataaaggagagacaaagtctttctcagacaaaaaataatacaattcactactactagactcatcttacaggaaatgctaaagggaattattcagtctgaaaggaaaaaaacactaacatgcaagaaggaaacatttgggggtataaaacccattggcaaaattaagcacacagacaaaccaagaatactctaatactgtaactgttgtgtagaagccgctcataattctagtaagaagtytaaaagcccagtctatccaaagcagtaatagctacagcaacctgttcagacataggcaatataaaaatatataaattgagataactaaaagtcaaaaggggaagcatgaggttgaagtgtacttttttttaaccactttttctttgttttgtttctattgttttttttttttttttggtcatctgagat

SEQ ID NO: 574913 - DNA, 524 bp, Homo sapiens
tgcatgctgggagggaatgggacaatattttcaaagtgctgaaagaaacaactgtcattcaagaataccgcatcatgcaaacctatccttcaaatataaaggagagacaaagtctttctcagacaaaaaataatacaattcactactactagactcatcttacaggaaatgctaaagggaattattcagtctgaaaggaaaaaaacactaacatgcaagaaggaaacatttgggggtataaaacccattggcaaaattaagcacacagacaaaccaagaatactctaatactgtaactgttgtgtagaagccgctcataattctagtaagaagtttaaaagmccagtctatccaaagcagtaatagctacagcaacctgttcagacataggcaatataaaaatatataaattgagataactaaaagtcaaaaggggaagcatgaggttgaagtgtacttttttttaaccactttttctttgttttgtttctattgttttttttttttttttggtcatctgagat

SEQ ID NO: 574914 - DNA, 622 bp, Homo sapiens
tcactgccagaaactggaaaagacccaactatacatcaatagattaatgagtaagtgagttgtagcatatcgatacamtgaaaagtacagatataaaaaggataaaccattgatacatgtagcaatgcagattaatctcaaaataattatgctgagtatataaaaagacaaaacatgattacatactgtatgagcctattcatatacaattgtctagaatataaactaatctgtaatgatagaaagcagatcagtggttgcctggggagggagtagggcacacaagggattacaaaaaggcaaaaagaaacttttggaggtgattgatccattcattatcttgattgtggtggtgatttcacaggtgtgttcatgtcaaattttagcaatgtatacagtctaaagatatgcagtttattttgtgtcaattaaggtcattaaaaatattattataatgaagttcccctgatttaaagatgagaaaagtgtcagtacggtgtttcttccccaggcatggcagctctccaaatatatagattgtaaatggccacctattttatctgctcacaaggccacacttaatgtactccctccagatttcttcaagtattaagtagtcttt

SEQ ID NO: 574915 - DNA, 557 bp, Homo sapiens
gtaaacatcttgaccataatttcacaagagattctcaaccagaactatccatctaaaatgttcttagattcctgacttcagaagctgggtgagatcatcaatgtttgttcttataagctgttaagttttggaataacttgttttgcagcaataattaactagtgcggctttgtggttaatgcaaggagttgaaatcagactgtggttgacattgccacattttagctatgtgaattctatgggttccttatttttctgagctccgaatttatcatttaaaaatagcaacctcatctcataatatctacctcatagagatatgattcaatggggaaaattcatgtraacacactcagcactgtgattgccacgtagttcagtgctcatcaattcaacagtaatttaaagaaattctcaaaataaatataaatatttaaaaaccctcttatcgccatttggagtacagctagttctaatttaaagcagtggagaaacatatttattagtaagaattcaatgagcagtacagatgtgatgggcaggaagtaggtgaaaat

SEQ ID NO: 574916 - DNA, 572 bp, Homo sapiens
tctgctttactcttgtatctgtcacttaatagtggcatgattgcaagcatttcctctakgcaccattctccagaaatacttcctttaattatgacatatctttattaatggtgtaatttataaatctatctggagcatttattgtattttttccatttttataaagagttgtttatttatcataaatgatggggtaaccacttctagggaagccaggccttctggatcataaggccaaaaatgaatcatcacctacttggcaacaatataatataattgtaggcaaagcactgcattgaaagcatgacgaattgatggttaaggaagtatacacagaaaacaggacccttgatcagaggttggcatactgtggcttgcaggccaaatattgcctgctgcttgtttttgtaaataaaatattattgaacacagctatatcaatttattcatatattgtcaataactgcttttgaactacagtggcagaattgagtggctgcaacacagacctcatgcttcacaaagcctaaggtatttactatctggccctttacagaaaaagtctgctggtg

SEQ ID NO: 574917 - DNA, 583 bp, Homo sapiens
agctgtcaatggatctaccattctggggtctggaaaatggtggccctcttctcacagctccactaggcagtgccccagtggggactttgctctgtgtgggggcttcaaccccacatttcctttctgaactgccctagcagaggctctctatgagggccttgcacctgcaacaaatttctgcctggacatccaggcatttccatacgtcgtctgaaatctaggcagaggttcccaaacctcaattcttgacttctacgcactggcaggctcaataccacatggaagctgccaaggcttggggcttgcaccctctaaagccatgacccaagctatacatttggccccttttagccatagctagaacaactgggacacagggcaccaggtccctaggctgcacacagcaggatggctctgggcctagctcatggaaccattttttcctcctaggcctccaggcctgtgataagaggggctggcataaacgtctctgacatgccctggagacattttccccactgttttgrcaattaacatttggctcctcattacttacgcaaatttctgcagccagcttgaattt

SEQ ID NO: 574918 - DNA, 583 bp, Homo sapiens
agctgtcaatggatctaccattctggggtctggaaaatggtggccctcttctcacagctccactaggcagtgccccagtggggactttgctctgtgtgggggcttcaaccccacatttcctttctgaactgccctagcagaggctctctatgagggccttgcacctgcaacaaatttctgcctggacatccaggcatttccatacgtcgtctgaaatctaggcagaggttcccaaacctcaattcttgacttctacgcactggcaggctcaataccacatggaagctgccaaggcttggggcttgcaccctctaaagccatgacccaagctatacatttggccccttttagccatagctagaacaactgggacacagggcaccaggtccctaggctgcacacagcaggatggctctgggcctagctcatggaaccattttttcctcctaggcctccaggcctgtgataagaggggctggcataaacgtctctgacatgccctggagacattttccccactgttttgacaattaacatttggctcctcattacttaygcaaatttctgcagccagcttgaattt

SEQ ID NO: 574919 - DNA, 628 bp, Homo sapiens
aactgttacctaagcacttcagactcttcaaatcccacacccacacattctgaactcatctgcatccagatatgaataaagatgaatagcatcttgaggaaattgcttctccattctcaaatggcaaaagccatggagtatactcctcatagtgtctaaggaatttctaagagcaacaagaaagcatcctaaagtcaccattttgtaaaaaaaaatcacatccttctatggcaacctgcccactggggatttcaaattaaaaggcaccttagaattcccttcctgtaattctctctcttttttttaaaggacttctttattttactaaactcaagttaattaggttttggcaggtcagcagctccactcagcatctctttatagggaatgggtctaagagatcttgatgaaattgcaaatgcttagaaacagtcacttgcttgcatsctgggtaaataggaaagcatgctgactgtatttatttttgtatcattatatcaccgtggggtgagctagtaaaaaaaagtagaggttgctaatattttggggtgtgtgtatgtgtgtgtatgcgcatcctaaaataatttattttttcttaatctcaaaccattattccatgattgcaaga

SEQ ID NO: 574920 - DNA, 651 bp, Homo sapiens
gctgactgtatttatttttgtatcattatatcaccgtggggtgagctagtaaaaaaaagtagaggttgctaatattttggggtgtgtgtatgtgtgtgtatgcgyatcctaaaataatttattttttcttaatctcaaaccattattccatgattgcaagaagtccccaacactagaataaattgttcactaaatgtttatttataaattggatatttttcacttaaatcattagtgttcattgattcattaaacacacagttactgagtgccaattatgtgccaggctggtggtatacacagatgcaaaagcgaggtccatttttatcccaagagatgcttacaaggtgactagatgcccaggctaacctacattagtttcttgtcttagctagggctgccataacaaattgccatagactggttggcttaaacaacaggaattcatttctcacagttctggagaagataccagcagggttgatgcctggtgtaggctctttccttgggttgcagacagccgccttctcactgtgtcctcacatggcctttccttggtgtgtgcaggcagagagagagagaggaagcatgctttctgttgtcttttcttgtaagaacactaatctcatgttgaggaccccaccttcatga

SEQ ID NO: 574921 - DNA, 598 bp, Homo sapiens
tttattttactaaactcaagttaattaggttttggcaggtcagcagctccactcagcatctctttatagggaatgggtctaagagatcttgatgaaattgcaaatgcttagaaacagtcacttgcttgcatcctgggtaaataggaaagcatgctgactgtatttatttttgtatcattatatcaccgtggggtgagctagtaaaaaaaagtagaggttgctaatattttggggtgtgtgtatgtgtgtgtatgcgcatcctaaaataatttattttttcttaatctcaaaccattattccatgattgcaagaagtccccaacactagaataaattgttcactaaatgtttatttataaattggatatttttcacttaaatcattagtgttcattgattcattaaacasacagttactgagtgccaattatgtgccaggctggtggtatacacagatgcaaaagcgaggtccatttttatcccaagagatgcttacaaggtgactagatgcccaggctaacctacattagtttcttgtcttagctagggctgccataacaaattgccatagactggttggcttaaacaacaggaattc

SEQ ID NO: 574922 - DNA, 541 bp, Homo sapiens
cacatatattagtaacagtggtttcttttataagtcgataaacagatatttcaataaaattggtttgtgctataatcttatgtattatattttatgcatttaaacaccattccagggcccgcaggctttgtcagactgtcaaagggcactatggagtaaatcagagtagaagaccttggcctggagattgataaagccacattaatgtggcactctgatatgtgagaaagagaccttgccctctggctggggagmtaggctgcctttgaactgatctatgctatgaggtattatttagtacattcctcttccttataagccctcttctttcagtctttattactcccattctcttttttttgtcttctcttattcttatgggatttttttttccccttatcctttggtttaggtttactatcagatatctcttagtcttactgtgctaagtattgggttctcttcctttggatagattttttttttttttttttttgccatgcttctcttacacctctttctctcctgcccccacctttcc

SEQ ID NO: 574923 - DNA, 547 bp, Homo sapiens
cgtgaccatatactaagtgctggtaaaaatgtagagcaactagaacttttgtatacacctgatggcaatgtaaaatggtgcaaccaccttggaaaacagtttgacaatgtcttaaaatagtaaaaatatacccgtcatacgacccatcctttcctttyttagaattttacccaagataattggtagcatatattcacataaggatttgtacacagatgttcatagtcactttatgtaatagtaaaaactgaaaacaggctgggtgcgctggctcacgtctgtaatcccagcactttgggaggccaaggcaggtggaccacctgaggtcaggagttcaagacgagcctggccaacatggtgaaaccctgtgtctactaaaaatacaaaaaaaaaaaaaaaaaattagctgagtgtgatggcgggcgcctgtaatcccagctactcgggaggctgaggcaggagaatcacttgaacccgggaggtggaggttgcagtgagctgaaattgcgccattgtactccagcctgggcaacaagagtgaaactct

SEQ ID NO: 574924 - DNA, 338 bp, Homo sapiens
tgacttgataaacagtagtatgacattaaaatgggaaattagttgtcaataaaagaaaagatcaaggccatgcaaagacataaagatgaatgcatattgctaagytaagtataccagactgaaaaggctacatgtatttttcagtttacatgacattctgaaaaggcaaaacttagacaaggtaaacagatcagtgattgtcagtggttttgggagagagattcaatgagcaaagcacaggagatgtttttagggaggtaaagctattctttttcatactataaagctagatacatgacagtatgaatttgttagtatccatagaaacttatggcata

SEQ ID NO: 574925 - DNA, 558 bp, Homo sapiens
agggggaaggatcacctgagcctgggaggtcaaggctacagtgagctgtgattgcaccactccactccagcatgggtgacagagtgagaccttgtctcaaaaaaacaaaaacaaaacaaaacatggaagtacagtgcagttgatatctctttgacatactgattacattacctttgggtacataaccatattgggattgctagattatatgttattttctatgtatattgacatcagtagcagataatcctaaggcaacccaaggtatgttygaaaatttgtaggctttagatagagcacctagaaggctgggacaaggtctgtatcacttctatatagtacatttcttggcatgaactactcaatgaatgaatgaatgaatgaatgaacaagtgaaataaaaagtgtatttgttcttcagaaaagtatgttccagatatgtaagtggttggcattgtgtattctttgtctgctgctgcataaaacacccccaatagttggcagcttaaaacaattaacatttattattctcacagtttcttcaggtcaggaattcaa

SEQ ID NO: 574926 - DNA, 629 bp, Homo sapiens
gctgttatccatgcttgtttttcctcacacaatgctagagtaccaggcccataacctcatatatagaaggtactcaatatgagtagaaytaatgaaagaactggcatataaataggctggcttagagaaacagaggtgtgaggagttaatcttcacactattcacttaaaaggtaaattgcataaacatggagccagactgcccgagttcaaatcctaactctgctacttacttcatcttgtgcttcagttgcctgctcggaaaaatgggataatagtggtatctacctcataggctggtcatgaggattaaatgagttaattaaaacatgtaaaagtttacagcactgcctggcacatggtaaggatacaataatagtagctactattatgtaagataagtacagatcttcaaaaaggaaacatgaaatataaggctattaaggcctttctacactttcccctacacatcccctttccagatacatgaatacacacacacacacacacacctgtgcacaagcataaacccctcataaaactaaaaagagaagttcctcacaggctacgaggaaaaatactcgattacccactggggatcctgatgtagtgtctgcccctttaaatgaa

SEQ ID NO: 574927 - DNA, 567 bp, Homo sapiens
acactaaaaatagacaaacgaattcctgagcatgaggaaccacaaatgcaattaaagaaaatgttatttaaaatcaaggctgtagcagtttaatgagtaagtaaaactgttctgggtttatatgaatcgggcatcatccgaggccaattaaaattctaaacaaaatatacactttacatacctgtatatggacatattttaaattyttgtaataataataagagtgtcgtgcttttattttgaccttaaaataacatttttttgtaaaatggaatttggtattggtttgcaaatgctaatagtctgcaaatttaggatgatgacagtaggagaaatgcaaaagaactgatttatttataaaactaaaaataatatttagtggcataaaaatttgcatagacccctttaatagcattggcaggcaagtgactgtctaaattctctgagaacatcatcatttttgactaagaggcatcaattatactatgaaaactataactattctttaagccaaaatatacagatgaggactataatatacagaagagtctttatccaatttgccag

SEQ ID NO: 574928 - DNA, 601 bp, Homo sapiens
gggaaagggacatcctccacccccgaaaacacatccccactggggaaactgaagatctagtttgcaggagaagtttccaaccttacctggagccgagtcaatttagagagctgagtgaaatacatggggtagaggaagcagcaggaaaggtcctgggagctggctgggtccccaagcaggccattcctgcctggtgtcacagggatcctttgggagggcggccagaggctcaggggaaaatgccacagggagaaggtagagctgaactttgtaagaatttgaactgggcgagaagcttcctggccagaactcgggggaggatgtgaatccagcatgtagactccacaggcaggggaaraaccaaagcccttttctttcacagctgggagatggggagcctggggtaagttctcaagccctgctagcccactggcctggaaacagacttggtgctgttagagggggcactgcaggaatgagattgaccctttggattgtgtgggagctgggtgaggcctgtgactgccggctttcccccacttccctgacaacctgcctgactcagcagaagcagccataatcctcctaggtacacaactcc

SEQ ID NO: 574929 - DNA, 179 bp, Homo sapiens
ttgtgcatgtatacacttgtactaagaaaatatcttcattttatttcytttttgctttatcatgtgacataagatttattgacttcatatcagcatttaagtattgttaactttatgaatagcatttgggttgggaattagtgtgtttccagttgtacaaaggatagttgtattatgtt

SEQ ID NO: 574930 - DNA, 179 bp, Homo sapiens
ttgtgcatgtatacacttgtactaagaaaatatcttcattttatttcctttttgctttatcatgtgacataagatttattgacytcatatcagcatttaagtattgttaactttatgaatagcatttgggttgggaattagtgtgtttccagttgtacaaaggatagttgtattatgtt

SEQ ID NO: 574931 - DNA, 568 bp, Homo sapiens
catctagtgctgaaacagtgatagtggccaagggctcaaagaacacaataatcgccctgcttagaatttctggaagaacaggaacaaaccaccaccaggctttgaatggggaataaacagctaatccctcaatgttcagatgtcagggcaggccaaaggcatgaagaatattcaggggtcgggcacagtggctcacgccaacaamtgggaggctaaggtgggtggattacctaaggtcaggagtttgagaccagtctgtctaacatggtaaaaccctgtctctactaaaaaatataaaaattagccaggagtggaagtacatgcctgtaatctcagctactcaggaggctaaggttggagaactgcttgaacctgagaggcagaggctgcagagagccgagatcattccactgcactccagcctgggcaacagagtgagtgagactctgtctcaaaaaaaaaaaattttaagaaagcattcaggaaccataatttcatgcaacaaacaaaataaggcaccaggaaacaaccctaaagtgagggagatgtgtgatgtctcagagaattc

SEQ ID NO: 574932 - DNA, 568 bp, Homo sapiens
catctagtgctgaaacagtgatagtggccaagggctcaaagaacacaataatcgccctgcttagaatttctggaagaacaggaacaaaccaccaccaggctttgaatggggaataaacagctaatccctcaatgttcagatgtcagggcaggccaaaggcatgaagaatattcaggggtcgggcacagtggctcacgccaacaactgggaggmtaaggtgggtggattacctaaggtcaggagtttgagaccagtctgtctaacatggtaaaaccctgtctctactaaaaaatataaaaattagccaggagtggaagtacatgcctgtaatctcagctactcaggaggctaaggttggagaactgcttgaacctgagaggcagaggctgcagagagccgagatcattccactgcactccagcctgggcaacagagtgagtgagactctgtctcaaaaaaaaaaaattttaagaaagcattcaggaaccataatttcatgcaacaaacaaaataaggcaccaggaaacaaccctaaagtgagggagatgtgtgatgtctcagagaattc

SEQ ID NO: 574933 - DNA, 462 bp, Homo sapiens
gggtgtgaacactttccaaaagaagacataggcagggcacagtgactcacgcctgtaatcccagcaatttgggaggcccaggtgggcggataatttgaggtcaggagttccagaccagcctggccaacatggytaaaccacatctctactaaaaatacaaaaattagccgggcgtggtggcacatgcctgtagtcccagctacttgggaggtgaaggcaggagaatcgcctaagtctgggaggtggagattgcagtgagccgaggtcatgccactgcactgcagcctaagtgacagagtaaaactctatcttaaaaaacgaaaaaagacatatatgtggccaacaaacatgaaaagaagctcaatatcactgatcattagagaaatgtaaatcaaaaccaccagttttgattggtgagataccatctcataccagtcagaatggctattaaaaagtaaaaaa

SEQ ID NO: 574934 - DNA, 462 bp, Homo sapiens
gggtgtgaacactttccaaaagaagacataggcagggcacagtgactcacgcctgtaatcccagcaatttgggaggcccaggtgggcggataatttgaggtcaggagttccagaccagcctggccaacatggckaaaccacatctctactaaaaatacaaaaattagccgggcgtggtggcacatgcctgtagtcccagctacttgggaggtgaaggcaggagaatcgcctaagtctgggaggtggagattgcagtgagccgaggtcatgccactgcactgcagcctaagtgacagagtaaaactctatcttaaaaaacgaaaaaagacatatatgtggccaacaaacatgaaaagaagctcaatatcactgatcattagagaaatgtaaatcaaaaccaccagttttgattggtgagataccatctcataccagtcagaatggctattaaaaagtaaaaaa

SEQ ID NO: 574935 - DNA, 457 bp, Homo sapiens
ccaccatgcccagctaatttttgtatttttagtagaaatgtgggtttcattatgttggccaagctggtctcgaactcctggcctcaagtgatctgcctgccttggcctcccaaagtgctgggattacagctgtgagccaccgygcctggcttgaagcctattttaaggtatcaaatagtttatattttgtctacaagtcaaaatcttttatcttcctaggcaattctaaatcaatgtgtattttataagatatttaattgacaactgtgtgacttatacatatttgaaccatcagtatgcttggaaatggccatttaggagtctataaacctccagcatgttatttttcttagaagcagattactctaagtgaattaatttatctttccatgttcaaagtttggtttcaaaacttgacactttgaatataggaaaggttttgtttgattttgggaat

SEQ ID NO: 574936 - DNA, 543 bp, Homo sapiens
tgggcaactaggcaagaggcggttgcctgggccaggacarggcagggcagggaagggctggggtgatgcagagggcttggggcccaggccagaggggctgggtgtctccatggacgtgtcctcagggtgctcacctgggagacccagaagaaggagataacacgtaagggtgaggctggtccctggaaatcagttgacatcttgcaaatgtggagccctgaggtggagccaagcccgaggcacagcccactcagtggcacaagccacgaagggccggcctcacccagacctgggggctcatgattgacagcctcttgttacgtgagggaagcagcactcctcccgtggcagaaaagttgggcctgagttgttccatctattccgtatgtgcagctgcgtacaccatacagggtgataagaccatgagcctgaggctctgacaccccagggtccagtcctgtgtcctcaggcaccactcccctttgtacctcctgtcccaacagccaagctccacagggccaagactacagcatcctttgctca

SEQ ID NO: 574937 - DNA, 562 bp, Homo sapiens
gtcagtagtacccaaagcactctacagatttaatgcaatccttttcaaaatcccaatgatctttttttgcagaaatagaaaaatccatcctaaaattcatatggaatttcaaaggaccctgaataaccagaacaatcttgtaaagaagaacaacaaaacttactacaaagatacagtaatcaaaacagtgccgtactggcataaagacaggcttatggaccaaggaagagaccagaaaggacagaaataaagcctcacatatacagggaaatgattttttacaagggtgccaagaccattcaatggggaaaggagagtcttttcaacaaatgatgctgagaaaactggctgtccactaacaaaagaatgaaactggacccttacctaacgccatgtatggaaattaactcgaaatgggtcaaagacccaaatgtcagagctaaaactacaaaactcttagaagaaaayatacggcaaaagtgtcacgacactggctttgacaatgattttatggatatgatctcaaaggcacaagcaacaaaagaaacaacagacaaatagc

SEQ ID NO: 574938 - DNA, 427 bp, Homo sapiens
cgatataagctttttaaaaagcatcactctgcttctttacctctttgacatatggaataaaattgcaaaagctgatcactttagtagaactctcttttttttctccctgttttttgagacagggcttctcgatctgttgctgaggctggagtgcagtggcgccatcactgctccctggagcctyggcctgccctgggctcaagcgatcctcccacatcagcctcctgagtagctgggactgcagatacatgccaccatgccctgctaatttttttttttttttaatagagacagggtctcaccatgttgtccaggctggtctcaattcctggcctcaagtgatcctcccacctcagcctcctaaagtgctgggattacgggcatgcgcccctgtgcccagccctggtagaactcttaacatcttagt

SEQ ID NO: 574939 - DNA, 256 bp, Homo sapiens
tcctgttctagggaagacaaaaaagaaagaaaatacacgtgtccttagtacattagaaggttccaagtactgtagagaaaaataaagtaggttggactcggtggctcatgcctgtaatcccagcactttgggaggytgaggtgggaggattacttgagctcaggaatttgagaccagcctgggcaacatggcaaatcctgtctctacaaaaaaaaaaaaaaaaaattagctgggtatggtggcgtgcacctgtagt

SEQ ID NO: 574940 - DNA, 583 bp, Homo sapiens
agcttaaaatatttacaactaggagcagaagattacattcacaaaatgtagtaagatggtcaaattgaccaagattattctcaacagcaagtgyggtggctcacacttgtaatcacagagctttgggagccaggcagcaggattgcttaagcccaggagttcagaccagcctcagcaacatcccagaccctatctctaccaaaatttgtttaaaatatgctgaggcaggaggatgtcttaagcccaggaatttatggctatagtgagctatgttcacagtactacactcagtccatgtgacagagcaagaccatgtcattataacaaacaacaacaaaaaaaagggtatgcatcaattcaagcacatacgtgtgaattttctcagataattactggttggtgtgttctcctttcccagaaatccaagacatatctgaaatatgcacacttcccaggaaattttattaagatgtttaattagcagaaaataatatataatacataagcaaaatatcatatgtatatcaaccactgatattgcttaagatattttaatctgcaaaacccaatacactcacatccc

SEQ ID NO: 574941 - DNA, 583 bp, Homo sapiens
agcttaaaatatttacaactaggagcagaagattacattcacaaaatgtagtaagatggtcaaattgaccaagattattctcaacagcaagtgtggtggctcacacttgtaatcacagagctttgggagccaggcagcaggattgcttaagcccaggagttcagaccagcctcagcaacatcccagaccctatctctaccaaaatttgtttaaaatatgctgaggcaggaggatgtcttaagcccaggaatttatggctatagtgagctatgttcacagtactacactcagtccatgtgacagagcaagaccatgtcattataacaaacaacaacaaaaaaaagggtatgcatcaattcaagcacatacgtgtgaattttctcagataattactggttggtgtgttctcctttcccagaaatccaagacatatstgaaatatgcacacttcccaggaaattttattaagatgtttaattagcagaaaataatatataatacataagcaaaatatcatatgtatatcaaccactgatattgcttaagatattttaatctgcaaaacccaatacactcacatccc

SEQ ID NO: 574942 - DNA, 555 bp, Homo sapiens
cttatgattcataatgtccagtatataataaaattattagaattgcaaagctgaaaaataatcctttaaccaggagataacttcataaatagaagtagacctagaaatcacagatgtgatgaaatctactgttagcccctgctttgagttctttattttagttattttatattttttcattcttatgtaaaatgttagttctaatattttcattasaatctggacatatttttaaatctttgagtcctggtatgccttctgcaaaaaaactaatgatatttagcatttataaggattatacagcatataaaatgctcagattagtattttatacataagaaactattttttggagagctagaaacatgcttgttaatgagtttaactttataatgtttatgaaattacaagtatttttataaacatactttatgtttgttatcatattttatcttcagaacaatctgagaagacaggtacattatcatcctcatcttagatatgaaaaaaaaaaattaagtgcagggaggataagtaacttgtccatggtcctac

SEQ ID NO: 574943 - DNA, 484 bp, Homo sapiens
gatttatcccaggagatctgaagggtaaaaataatatgatcatctcaatagatgaaggaaaygtatttaataaaatgcaacattatcttcacttaataaacaaattactcaactaatatgagcctatagaaggaattgtactttaacacaataaaggccatatatgatacatatgcatcatacatcacacaacaacaaacatcaaacatctttcctctaataactagaacaagacatgtatgcccactttcactactattactcaacatagtacttgaagttctagtcaaaacaatgatgcaaaacaatgaaatatagggaatctaaattggaaaagagaaagtcaaagtgtccttgtttgcagacaacataattatatatataagaaaaccctaaaaactccaccaaaaaaccttagaactaataaccaaattcagtaaagttgctggatgcaaaatcaacacacaaaatttagtagcatttc

SEQ ID NO: 574944 - DNA, 484 bp, Homo sapiens
gatttatcccaggagatctgaagggtaaaaataatatgatcatctcaatagatgaaggaaatgtatttaataaaatgcaacattatcttcacttaataaacaaattactcaactaatatgagcctatagaaggaattgtactttaacacaataaaggccatatatgatacatatgcatcatacatcacacaacaacaaacatcaaacatctttcctctaataactagaacaagacatgtatgcccactttcactactattactcaacatagtacttgaagttctagtcaaaacaatgatgcaaaacaatgaaatayagggaatctaaattggaaaagagaaagtcaaagtgtccttgtttgcagacaacataattatatatataagaaaaccctaaaaactccaccaaaaaaccttagaactaataaccaaattcagtaaagttgctggatgcaaaatcaacacacaaaatttagtagcatttc

SEQ ID NO: 574945 - DNA, 601 bp, Homo sapiens
accagtcaggtaaaagaagtatccatagaaggcacactataaacacccacatccagcaatccttcattttcaaaaaggcaaggttactatcagctcttgatactggaaccccaatttagctggggtctctcaaaacaggactaaattgaaagcttaaatgaacacaaccccagaaaaacatatcttaccaaagtggttcactaaaaaataaaaatcttgattggacctataacctatatttaattaaagaaattaataattaaaacattatcttaaaaacatcaggccaggatggtttactattaartaatactgtatatccaatgaacgaataatttcaatctttagtaaactctttcaaagactaggaaaatcagtctataaaaagaaagacaaggtatcaatgagtttacaaagcccacattttctctacttcagaagagaaattgttggaccttatcatgtgcatatattttattgtgtgagatgctaattttgttttccaaaattcttatgtgtatcagcattctatctaaaagtataaagagagtttcatatataatatgggagacactgttatcatcagatctcttaatttgcc

SEQ ID NO: 574946 - DNA, 467 bp, Homo sapiens
attttctctacttcagaagagaaattgttggaccttatcatgtgcatatattttattgtgtgagatgctaattttgttttccaaaattcttatgtgtatcagcattctatctaaaagtataaagagagtttcatatataatatkggagacactgttatcatcagatctcttaatttgccaatctagtgcatataaatgatttattgtgaacctccttgctttgttttcccagacgccaagttagagtcatgtgaaagctttttgccatataactgaccactgccttcccagccatcaactcttctttgagccgttttttctccttctttcttacaacaacaactcactacccttcaactttaaactttctgcaaataacatatggggaagttatcactgtcaagcctagatgtgtggtgttatcggtaagtacaaaacttgtttgccattacatagaactgctagct

SEQ ID NO: 574947 - DNA, 576 bp, Homo sapiens
tattattgtgctctcactaccaagcgctgtactagtatactagtgagatcaagggtcctctgtggtcatgaaaatcacaatctaatgcaaatactcataataatgatttttacagtaattattattaaattataattgtattaagtgctagaaaaaaggtgcatgatgctacgaggatgtgtacatggacttctaatctaatgtcggctgcagagatgcagtgattcaaggataatcagagaaagctgactcagggaagtgctctttaaggtgaaatggaaaaggtgtataaaagctagcccagcaaagggtaaaaatgataaagaagaaacaacatgtgcaaaaactcwgaggtagaaaaaaatgaggcccttctgaggaatagagggaagggcaacctggtggaaatacagagagtgtaattatggcatggtgaggctacagagggttgaatggtggccctccaaaagatatgtccacttagagcctgtgaatgtgatcttatttggagtctttgcagatattctgaagttaagaatctttagataagattatcgtggattaacaaggtgggcc

SEQ ID NO: 574948 - DNA, 583 bp, Homo sapiens
ggtgactatggcaggcagctttgagaagggcctcaataatccctgcttccaggcattcacacccatgtgtcatctcctgcctttgagtgggcattaagatcaggcatatatctgggaatttggggggttttttwtatttattattttattcccagggcttatcacagtgcctggcacataataaatgcccactaagtatttagggaatgactaattaatcaccttgatttagagaactggagagctggagtgttatagggttagaggagagccagagaaagaatcattaaaatcagtgtttaaaggaaataaaagaaaaactaagtatacaaaaatgaatagtcacttggtccccactgtgttactgtgtggtgacctggttggcaattcagacaaacaggaacctccctgaggcaagagaagtcaaaagtggatggtccaccaccaggacaaaaaaagctcacttgatttaccatgaggcagtgaaatcagtgacaacagtgctctgggcatgtgctagctgtccctccccttggtgtctgaagtagtagtggtcccttcctatactgcaaaatgggtgagt

SEQ ID NO: 574949 - DNA, 583 bp, Homo sapiens
ggtgactatggcaggcagctttgagaagggcctcaataatccctgcttccaggcattcacacccatgtgtcatctcctgcctttgagtgggcattaagatcaggcatatatctgggaatttggggggttttttatatttattattttattcccagggcttatcacagtgcctggcacataataaatgcccactaagtatttagggaatgaytaattaatcaccttgatttagagaactggagagctggagtgttatagggttagaggagagccagagaaagaatcattaaaatcagtgtttaaaggaaataaaagaaaaactaagtatacaaaaatgaatagtcacttggtccccactgtgttactgtgtggtgacctggttggcaattcagacaaacaggaacctccctgaggcaagagaagtcaaaagtggatggtccaccaccaggacaaaaaaagctcacttgatttaccatgaggcagtgaaatcagtgacaacagtgctctgggcatgtgctagctgtccctccccttggtgtctgaagtagtagtggtcccttcctatactgcaaaatgggtgagt

SEQ ID NO: 574950 - DNA, 583 bp, Homo sapiens
ggtgactatggcaggcagctttgagaagggcctcaataatccctgcttccaggcattcacacccatgtgtcatctcctgcctttgagtgggcattaagatcaggcatatatctgggaatttggggggttttttatatttattattttattcccagggcttatcacagtgcctggcacataataaatgcccactaagtatttagggaatgactaattaatcaccttgatttagagaactggagagytggagtgttatagggttagaggagagccagagaaagaatcattaaaatcagtgtttaaaggaaataaaagaaaaactaagtatacaaaaatgaatagtcacttggtccccactgtgttactgtgtggtgacctggttggcaattcagacaaacaggaacctccctgaggcaagagaagtcaaaagtggatggtccaccaccaggacaaaaaaagctcacttgatttaccatgaggcagtgaaatcagtgacaacagtgctctgggcatgtgctagctgtccctccccttggtgtctgaagtagtagtggtcccttcctatactgcaaaatgggtgagt

SEQ ID NO: 574951 - DNA, 590 bp, Homo sapiens
agtatgggggaaactgcccccgtgaatcaattacctctcaccaggtccctcccatgacatgtggggattataggaacattcaaggtgagatttgggttaggacacagccaaaccatattaataggtaactataacacattgacctttacaagcccagtaaagctattggtaacttaattaatgattygtagatatgcaacagaataaaaactactcattcatataaactactcattcatataaacatgtcttgttgctatggtatgcatcacctagctatgaaatgggaagctaattctcgcaaggtattcagctactttacaaaatggcaaagtaaaatttcaaatagagccatacattagaaatgtaaattctgacactggatatttttcatgaattgataatactagggtcctggataggtatgattttagggattataaaaagtccccaagtgcctataacatctgtcacaggcatcagtagcaaaagggaacttgacatggctcataacacagcacaacacagaccagctatgtgaagaacatgagaatgaggtctgataaaatcagcaattaggagaaaagtgt

SEQ ID NO: 574952 - DNA, 314 bp, Homo sapiens
ttaaaaaaacagtgcacctctaatcccagctactcaggaggctgaggtgggaggatcacttgagcccaggagtttgaggccagcctgggcaacatagtgagattacgtcacttaaaaaagaaaaaagaaataaagtttatttaacaataaatgacatcttatttatcctaatagaactgccttaaatgaaacacacacacaaacacacacacacacacacacacacacacacacacaccccttcgtaatagtccttatgggtagcatttttattcatcrtgggaaaaatatgttatgactgattgtattcagtt

SEQ ID NO: 574953 - DNA, 442 bp, Homo sapiens
ttttttttttttttgaaaaaaaaaaagttgaataggtatcataagtcttttaaaagaatcaaaatatagatagtaaatcagactctacactgaaatagatgtytctaatatattcctagtattcaaaagatcctgtcaatgtttcttaatctatcgtttgttattatgaaagtaacatattgagattattcccatcagactgtttgacatggaagtttttacagtctgattgtcctatttcactcaactttaacatgcaaggctaaataaagtcccaaatcaccttgtgaactcaacaaggtaaacttggaaaatgcattatagcttctatgaaacagtttcttaaacatcaattgagttagttgaggaatagttcttgaccttcttcgaaaatatacccaagattaaataataaaatatattttctatatttgaaatattt

SEQ ID NO: 574954 - DNA, 442 bp, Homo sapiens
ttttttttttttttgaaaaaaaaaaagttgaataggtatcataagtcttttaaaagaatcaaaatatagatagtaaatcagactctacactgaaatagatgtctctaatatattcctagtattcaaaagatcctgtcaatgtttcttaatctatcgtttgttattatgaaagtaacatattgagattattcccatcagactgtttgacatggaagtttttacagtctgattgtcctatttcactcaactttaacatgyaaggctaaataaagtcccaaatcaccttgtgaactcaacaaggtaaacttggaaaatgcattatagcttctatgaaacagtttcttaaacatcaattgagttagttgaggaatagttcttgaccttcttcgaaaatatacccaagattaaataataaaatatattttctatatttgaaatattt

SEQ ID NO: 574955 - DNA, 442 bp, Homo sapiens
ttttttttttttttgaaaaaaaaaaagttgaataggtatcataagtcttttaaaagaatcaaaatatagatagtaaatcagactctacactgaaatagatgtctctaatatattcctagtattcaaaagatcctgtcaatgtttcttaatctatcgtttgttattatgaaagtaacatattgagattattcccatcagactgtttgacatggaagtttttacagtctgattgtcctatttcactcaactttaacatgcaaggctaaataaagtcccaaatcaccttgtgaactcaacaaggtaaacttggaaaatgcattatagcttctatgaaasagtttcttaaacatcaattgagttagttgaggaatagttcttgaccttcttcgaaaatatacccaagattaaataataaaatatattttctatatttgaaatattt

SEQ ID NO: 574956 - DNA, 442 bp, Homo sapiens
ttttttttttttttgaaaaaaaaaaagttgaataggtatcataagtcttttaaaagaatcaaaatatagatagtaaatcagactctacactgaaatagatgtctctaatatattcctagtattcaaaagatcctgtcaatgtttcttaatctatcgtttgttattatgaaagtaacatattgagattattcccatcagactgtttgacatggaagtttttacagtctgattgtcctatttcactcaactttaacatgcaaggctaaataaagtcccaaatcaccttgtgaactcaacaaggtaaacttggaaaatgcattatagcttctatgaaacagtttcttaaayatcaattgagttagttgaggaatagttcttgaccttcttcgaaaatatacccaagattaaataataaaatatattttctatatttgaaatattt

SEQ ID NO: 574957 - DNA, 536 bp, Homo sapiens
gttgagttgtttgagtttcttgcatattctggattttaatcccttgttgagtggatagtctacaaatattttctcccattctgtaggctgtctttttcaatctgttgattgtttcctttgctgtgcaggagatatttggcttcatataatcctgtttatttttgcttttgttgcccatgcatttgaggtcttatcaaaaaaatttttgcccagaacaatgttctgaagaatttcctctgttctagtagtttcatagttttgggtcttacatttgagtatttaatccactttgagttaacctttgtatatgtgaaaatacgggatctagtttcattcttytgcatatgaacatttagttttcccagcactatttattgaggacactgttctttctccaacgtatgtttttggtgcctgtgttgaaaatcagttggctgtaaatgtgtggatttatttctgggttttctattctgttccatttgtctatgtgtctttatgtcaacaccgtgctgttttggttactctaattcgtagtg

SEQ ID NO: 574958 - DNA, 535 bp, Homo sapiens
tatgataaattcagtgacatgatgaagctgttttgagagtgtgtgggaagagggctaaaaggctagagagaggtcagggaagatgcacgggatgaaatacaagggtcttctattccacattagcaatcttgaactttatcctgtatgccaaagggaatttttgaagggttttaaataggagagtaatatcaatttgcacttttaggaagattattctggatgctatgtgaaaaacagattcagcagggtggtaagatcagaatcatgaaaaccagccaggagcattgtctccagtaattcaggtgagagatgatggtggtgaactacgatagtgctcaccaggatggaagaaatgcttgtggagttgtaattaacaggagttgcatcaaaaatggggaggtgggaagtgagggaaggtggaatataaatgggggagatgatgagggagagaggaarataaggaatatgacttccacactcctgaccctgctgtctattattccctgagatagaaatagagtagtgatagaggcag

SEQ ID NO: 574959 - DNA, 553 bp, Homo sapiens
ctgcttatgaaaatgaaagtgtaatcatattccctctaagaccttttattagatagtgatcaatgtaattgaagtaaaagttccattttgaatgcatctttccatatacaggctgatctatcatgtaggatatatgtttcctgggatttatgttttgactttgcatttagtacatgatacaacaagtctctgctccmttgggaaatggcgaaatcaaattctttttttattcttatggtaatattcagactcatttattcaaaagcatgaatagcactctgcttgaaagttcagctggttaacttggttgttaaaatgttattctttaagggagaagtcatttcttttttcttctagtaattatgtgccttgcacatagtaggtatttaatcaggatctatttgacttacatttagtgggatgaaagaatccaaactaacaattgttctttggggatatataattttctttctttctttttttttttttttttttaaattttttggagatggagtctcactctgtcgcccaggatggagtgcagaggcacgat

SEQ ID NO: 574960 - DNA, 587 bp, Homo sapiens
aagaagacacatgaccaacaggaggaaggaggaaggcactctgagttctgctggtaggttggcccgactcactcctcattgggatcgctcaggtgcattaatgagcaccccatacagaatcctgctttatttgaaactgccttcagggtccccagttaagacctgttaagatttcggacatgtcctactttatctaaataaatagaattgcacattactacaaagcactcctccccggcaccatcagccatccctcagacttttgcgtttatgaataaaaggtttggggagtggttttagggatttcttacacaccttgtcgtgtgactgaggcttatcaccagccttcaggtgcttctcttgatggtcacttggtagagacttcaaacggataatgaaaggttaatgagcacttgctctgtgcaggcacagtgctcagcatcgcagataatagaaagaagaaaggctcctgcctgccttcaacacattttgactaggaagccgggacacmaaacagataaaattgaacatgaaataagtgttttgtaggaatgcataccacagtcccagagatgccacatagcagc

SEQ ID NO: 574961 - DNA, 608 bp, Homo sapiens
taagtatgacaacctaaatttaaagttgccttactagaactgcgatgattaaaaggaataaaggcaataatccccaccacaacctgcaccacatctgtagtatgaaaaattctggcaaaaacattttaaaagagattcaaactggatggcaatcaagatgattaattaactggaactcatatgaaataaatcaaagccctggcgatgtttaacccagaaaagagaagacttaggagaatgattcgcaagctttttgatgttgagattcctttatactgttaaaaactactgggactccaaggttttgtttataaaagatacaggcatacctcattttatgaactttgctttactgtgcttcacagattaatggtgcttctttttttttgtttttttatgtttttgttttttcaaatttaaggattctggcaaccctctgttgaggtctactggtgtgtgctcatttcaagtctttgtgtcacattttgacaattctcccaatatttcaaacttttgcattrtatgtgttatggtgctctgtgatccgtgatctttgatgttactattgtaattgttttggggtgccacaaactgcgtccatattagat

SEQ ID NO: 574962 - DNA, 591 bp, Homo sapiens
atagttccattccctctccacacctttgtgctattatatacatacaataatatarcattataaatattatttgagcttggcctggtggcttgcacctgtaatcccagctattcaggaagctgagacagtagattccttgaggctaggggcttcaaactagcctggacaacacagcaagaccctgtctctaaaaaaattttaaagattagctggacatggtggtgcatgcctatagtcccagctacttgggaggctgtagtgagaggattgcttgagcatatgttgagtcatccttgcatcccagggacaaatcccacttgatcatgatttaaactcccttctaatttgctgttgaatttagtttgctagtattttgttgaggatttctacatctatgttcatcagagatactggcttgtaatttttttttttcttgtctggctttggtgtcagggtattgctggctttatgagtttgaaagtattttttcctcttcagtttttcagaagagtttgagaaagattgacattcattcttttttgaatatttggtagaattcatcagtaaagctgtctagtcctgggcttttca

SEQ ID NO: 574963 - DNA, 513 bp, Homo sapiens
  misc_feature 61: n = A,T,C or G
aaaattttaatattctatctacatatcttttcaattttaacaattacatttatggtgcctntgaatactcttgggtgcatttataaactaagttcatttttaactcattttataattccatttataagtttaatatattcagttttctttttaagcatttcaactgtttaacaatcaaaacatccccaagtggttgagaatcttagaatttttttccatgaattttatgaattaaatgactctcaagttctggtacattctaaatgagaatcacaaagagaatctatcagtttgatctatgtgtaacatatactttaaatgaaagtattaatattgtggggttattttatcattttaattttactttttaatgttttttttgagacagagtctgctctgtcacccaggctggagtgcaakggcaccatgtcggcttgctgcaacctccacctcccaggttcaagtgattcttgtgcctcagccaaccgagtagctgggcttataggtgtgcac

SEQ ID NO: 574964 - DNA, 414 bp, Homo sapiens
aattttgtcaggtgattgtaagaaraggattttgggattttgacaagacagtgattgaaactgcagaccatgaaatctcagcttgactaggagggaggtcaagcaagaggaggccagtgagcaagagaaagtagatgggtcaagggactggctattttgataaagtggacacttacttgtagaaaaagtacatgaatagtcaacttttaaaataaggagttatgattgaatcacaagtttatttaattagagatttttgaaggttctgaggttctggcaaacctctggacatgacaaggtataagatgtgaaaatggaactgaatgactcagctggagagatgtttgaataacagaggtcatagaatagagaggctgtgtgctaagcaggccagccacatgcatacttgaattc

SEQ ID NO: 574965 - DNA, 511 bp, Homo sapiens
  misc_feature 169: n = A,T,C or G
ttttaaaatttgttagaattagagcaatattcagtctagggatatttattccccactattgaggcgagactttttgtgtattttsctcagctccttatgaatcctgaggttttctgttccggctggcagggacaaacacttttctcagctctgtgtgagccaggtggcngggtttccctctaatccttttgaaggtttctttcccttggcatcaggtagtttcctcccagacatgctctgctcagcgctcaacgaagcctagtctgcaaatctctggcgttttcactctgtgcagctgtctctcctctggcgctctgtcccatgatccctggacatccagctccatctctctgtcttttttttttctttttgagatggatcctggctctgttgcccaggctggagtgcagtggcgtgatctcggctcactgcaacctctgtctccctggttcaagcgattctcctgcctcagcctcccgagtagctgggattacaggcatgtgccaccata

SEQ ID NO: 574966 - DNA, 250 bp, Homo sapiens
ctggcttggctggctggctgacttggctggcttgtgtggctggctgggctggctgsggtggctgggttggctggctggctgggctggctgggctggctgggctggctggctggcttggctggctgggctggctggctggcttgaatggcttggctggcttggctcgcatggctggctggctggcttggcaggctggctggtttagctgtcttgggtggctgggtggctggctggcttggctggcttggct

SEQ ID NO: 574967 - DNA, 250 bp, Homo sapiens
ctggcttggctggctggctgacttggctggcttgtgtggctggctgggctggctgcgstggctgggttggctggctggctgggctggctgggctggctgggctggctggctggcttggctggctgggctggctggctggcttgaatggcttggctggcttggctcgcatggctggctggctggcttggcaggctggctggtttagctgtcttgggtggctgggtggctggctggcttggctggcttggct

SEQ ID NO: 574968 - DNA, 241 bp, Homo sapiens
gtggctggctgggctggctgyggtggctgggttggctggctggctgggctggctgggctggctggctggcttggctggctgggctggctggctggcttgattggcttggctggcttggctggcctggctggctggctggcttggctggcttggcaggctggctggtttagctgtcttgggtggctgggtggctggctggcttggctggctgggctggctggctggcctgcctggctggctg

SEQ ID NO: 574969 - DNA, 552 bp, Homo sapiens
caatgcctcacatattaacatattgataaaattatactcatagaacactactggaagcaaagatagtattagttaaaatttagtgattactgcaaatattattactattacaaacaatatagtatagacattactactactatagttatcttaaaaatctaaaataaaaattttacgtaatagcccattgtaatctctcctgctctgccctggctcagccctagtgccggctctgcccctagtcctactacatccctggccctgacccttccctggtccagccgctgccctggcccttcccatcttcaggycttaccatggccctaccctggtcctgaccctgccctggtctggtcctgaccctggccctaccccagaaaaggggtatggcagagccagggaagggccagggcaaataagggacaggacacacccaaatccaggaaagggccagggccatgacagagccagggcgagtccttggcagggccaggttccaggccagggccaggaaagggtcatggcagggtcactgtatggccaaggtccagg

SEQ ID NO: 574970 - DNA, 613 bp, Homo sapiens
aggacttttatgtctattctactttggcttagtttacatgattcgtagtttattagcctagaaatggccaagaaaacttaaggttcaataattagttataaatatgaaatatccccgatttttaagataaaaacaacttataaatgtatttgtctgtaaaaattgtgtatatttttacagaacatctatttctttttttatttttttatatttatttattatgctttaaattctaggatacacrtgcacagtgtgcaggtttgttgcatatgtatccatgtgccatgttggtgtgctgcacccattaactcatcatttatattaggcatatctcctaatgctatccctcccccctccccccaccccacaacaggccctggtgtgtgatgttccccttcctgtgtccaagtgttctcattgttcaattcccacctatgagtgagaacatgtggtgtttggttttttgtccttgcgatagtttgctgagaatgatggtttccagcttcatccgtgcacctacaaaggacatgaactcatcattttttaatggatgcctagtattccatggtgtatatgtgccacatgttcttcatccagtctatcattattggac

SEQ ID NO: 574971 - DNA, 582 bp, Homo sapiens
tgtatatatacatatatatatgtgatatatatgtatatatgtatatgtgtatatatgtatatatgtatatatgtgtatatatgtatatgtatgtatatayacacacatatatacacgtgtgatatgtatgtatatatacacacatatatacacgtgtgatatgtatgtatatatacacatatatacacgtgtgatatgtatgaatataaatacacatatatatgtgtatatacacacacacacacacacacacacacacacacacacaatggaatactactcagccataaaaaggaaagatttaatggcatttgcaacaacctggatgagattggagactattattctaagtgaagtaactcaggaatggagaaccaaatatcatatgttctcactcataagtgggagctaacctatgaggctgcaaaggcatgagaatgatacagtggacattggggactcgggggaaaaggtgggaagggggtgagggataaaagactacaaatagggtgccatgtatactgctcagatgatgggtgcaccaaaatctcacgaatcaccactaaaggacttactcatata

SEQ ID NO: 574972 - DNA, 582 bp, Homo sapiens
tgtatatatacatatatatatgtgatatatatgtatatatgtatatgtgtatatatgtatatatgtatatatgtgtatatatgtatatgtatgtatatatacacacatatatacacgtgtgatatgtatgtatatatacacacatatatacacgtgtgatatgtatgtatatatacacatatatacacgtgtgatatgtatgaatataaatacacatatatatgtgtatatacacacacacacacacacacacacacacacacacacaatggaatactactcagccataaaaaggaaagatttaatggcatttgcaacaacctggatgagattggagactattattctaagtgaagtaactcaggaatggagaaccaaatatcatatgttctcactcataagtgggagctaacctatgaggctgcaaaggcatgagaatgatacagtggacattggggactcgggggaaaaggtgggaagggggtgagggataaaagactacaaatagggtgccatgtatactgctcagatsatgggtgcaccaaaatctcacgaatcaccactaaaggacttactcatata

SEQ ID NO: 574973 - DNA, 549 bp, Homo sapiens
atattcacattaaactagacagcagcattcccagaaacttctttaggatgtttgcagtaaactcacagagttgaacayacctttccgtagagcagctttgaaacactctgtgtgtgggatccgcaagtggatatttggaccgctttgagacctttgctggaaacgggaatatcttcacatataaactggacagaagcattctcagaaacttcttcgtgatgtgtgcattgtactcccaatttgaatcttccttctcatggagcagttttgaaacactctgtttgtgcatctacattggagaattggaaggcttggatgcccgtggtagaaaaggaaatatcctcatataaaaactagacagaaggattcacagaaaatgctttgtgatgtgtgcattcaaatcgcggagttgaatctttcttttgttagagcacgttttgaaacactgtttctgtggaatctgccagcggacacttggagcgctttgagggctatggtggagaaggaaatatgttcacataaaaactagaaagaagcattctcagaacc

SEQ ID NO: 574974 - DNA, 575 bp, Homo sapiens
  misc_feature 455: n = A,T,C or G
ttctcggaaacatttatgtgaagcgtgcattcaactcacagagttgaacctttcttttgatagaacaagttttgaaaaaacactcttttgaacaattgcaggtgaatcttggagcgcttgaaggcttgtggaaatgggaatatcttcacacacaaactagccagaagcattctcagaaacttcttgtgatgtgtgcgttgaacccagagagatgaamctttcctttgatagagcagtttgaaacgtgttttgtaagatctgcaagcggataatggcttcgcttgtgtccttggtggaaacgggaatatcttctaataaaatctagacagaaatattctcagaatcttcttgtgatgtgggcattcaactaacacagttgaacatttcttttcacagaacagtttgaaacactctttgaacaatgcaggtgaatcttggagcgctttgaagccttngttggaaataggaatatattcacacacaaactagccagaagcattctcagaaacttcttgtgatgtgtgcgtgaacccagagagatgaacctttcctttgatagagctgttttgaaacgt

SEQ ID NO: 574975 - DNA, 254 bp, Homo sapiens
cttttgcaccacagccctcaaagcactccaaatgtctacwtgcagattcgataaaagagttttacaaaactgctctatcaaaagaaaggttcaacgctgtgagttgaatccacatatcacgaaaaagtttctgagaatgcctctatctactttttatgtgaagatattccggtttccaacgaaggcctcaaagcgctccaaatatctactggcagattctagaaaaagagtgtttcaaaactgctctattaaag

SEQ ID NO: 574976 - DNA, 254 bp, Homo sapiens
cttttgcaccacagccctcaaagcactccaaatgtctacttgcagattcgataaaagagttttwcaaaactgctctatcaaaagaaaggttcaacgctgtgagttgaatccacatatcacgaaaaagtttctgagaatgcctctatctactttttatgtgaagatattccggtttccaacgaaggcctcaaagcgctccaaatatctactggcagattctagaaaaagagtgtttcaaaactgctctattaaag

SEQ ID NO: 574977 - DNA, 254 bp, Homo sapiens
cttttgcaccacagccctcaaagcactccaaatgtctacttgcagattcgataaaagagttttacaaaactgctctatcaaaagaaaggttcaacgctgtgagttgaatccacatatcacgaaaaagtttctgagaatgcctctatctmctttttatgtgaagatattccggtttccaacgaaggcctcaaagcgctccaaatatctactggcagattctagaaaaagagtgtttcaaaactgctctattaaag

SEQ ID NO: 574978 - DNA, 346 bp, Homo sapiens
atattggacagcttgagatcttgctggaaatgggaatatcttcacatataaactagacagaagcattctcagaaacttcttcgtgatgtgtgcattctactcccaaatttgaatcttccttytcatgaagcagttttgaaacactctatttgtgcaatctacaattggataattggaaccctttgatgcccatggtagaaaaggaaatatcctcatataaaaactagacagaaggattcacagaaaatgcttgtgatgtgtgcattcaaatcacggagttgaatctttctttgttagagcagtttgaaacactgttctgtggaatctgccacggacacttggagcg

SEQ ID NO: 574979 - DNA, 346 bp, Homo sapiens
atattggacagcttgagatcttgctggaaatgggaatatcttcacatataaactagacagaagcattctcagaaacttcttcgtgatgtgtgcattctactcccaaatttgaatcttccttctcatgaagcagttttgaaacactctatttgtgcaatctacaattggataattggaacsctttgatgcccatggtagaaaaggaaatatcctcatataaaaactagacagaaggattcacagaaaatgcttgtgatgtgtgcattcaaatcacggagttgaatctttctttgttagagcagtttgaaacactgttctgtggaatctgccacggacacttggagcg

SEQ ID NO: 574980 - DNA, 586 bp, Homo sapiens
  misc_feature 428: n = A,T,C or G
tgaagcctttgtggaaatgggaatatcttcacacacaaactagccagaagcattctcagaaacttctttgtgatgtgtgcgttgaacccagagagatgaacctttcctttgatagagcagttttgaaacgtgttttgtaagatctgcaagcggataattggcttcgcttgtgtccttggtggaaacgggaatatcttctaataaaaactagacagaaatattctcagaatcttctytgtgatgtgggcattcaactaacacagttgaacatttcttttcacagaacagttttgaaacactcttttgaacaattgcggtgaatctttggagcgctatgaagcctttgttaggaaataggaaatagttacacatcaaacgagacagaagcattataagaaacttctattgtgatgtgtgcgttgaaccangagagatgaacctttccttgataagagcagttttgaaacgtgtttttgtaagatctgcaagcggataatggcttcgcgttgtgtcctttggtggaaacgggaatatcttctaataaaaactagacagaaatattctcagaatcttctttgtgatgtgg

SEQ ID NO: 574981 - DNA, 586 bp, Homo sapiens
  misc_feature 428: n = A,T,C or G
tgaagcctttgtggaaatgggaatatcttcacacacaaactagccagaagcattctcagaaacttctttgtgatgtgtgcgttgaacccagagagatgaacctttcctttgatagagcagttttgaaacgtgttttgtaagatctgcaagcggataattggcttcgcttgtgtccttggtggaaacgggaatatcttctaataaaaactagacagaaatattctcagaatcttctctgtgatgtgggcattcaactaacacagttgaacatttcttttcacagaacagttttgaaacactcttttgaacaattgcggtgaatctttggagcgctatgaagcctttgttaggaaataggaaatagttacacatcaaacgagacagaagcattmtaagaaacttctattgtgatgtgtgcgttgaaccangagagatgaacctttccttgataagagcagttttgaaacgtgtttttgtaagatctgcaagcggataatggcttcgcgttgtgtcctttggtggaaacgggaatatcttctaataaaaactagacagaaatattctcagaatcttctttgtgatgtgg

SEQ ID NO: 574982 - DNA, 586 bp, Homo sapiens
  misc_feature 428: n = A,T,C or G
tgaagcctttgtggaaatgggaatatcttcacacacaaactagccagaagcattctcagaaacttctttgtgatgtgtgcgttgaacccagagagatgaacctttcctttgatagagcagttttgaaacgtgttttgtaagatctgcaagcggataattggcttcgcttgtgtccttggtggaaacgggaatatcttctaataaaaactagacagaaatattctcagaatcttctctgtgatgtgggcattcaactaacacagttgaacatttcttttcacagaacagttttgaaacactcttttgaacaattgcggtgaatctttggagcgctatgaagcctttgttaggaaataggaaatagttacacatcaaacgagacagaagcattatmagaaacttctattgtgatgtgtgcgttgaaccangagagatgaacctttccttgataagagcagttttgaaacgtgtttttgtaagatctgcaagcggataatggcttcgcgttgtgtcctttggtggaaacgggaatatcttctaataaaaactagacagaaatattctcagaatcttctttgtgatgtgg

SEQ ID NO: 574983 - DNA, 527 bp, Homo sapiens
gacacaacgcgaagccaattatctgcttgcagatgtkaggaaaacacgtttcaaaacagctctatcaaaggaaaggttcatctctctgggttcaacgcacacatcacaaagaagtttctgagaatgcttctggctagtttgtgtgtgaatatattcctatttccaacaaaggcttcaaagcgctccaaagattcacctgcaattgttcaaaagagtgtttcaaaactgttctgtgaaaagaaatgttcaactgtgttagttgaatgcccacatcacaaagaagattctgagaatatttctgtctagtttttattagaagatattcccgtttccaccaaaggacacaaagcgaagccaattatccgcttgcagatcttacaaaaacacgtttcaaaactgctctatcaaaggaaaggttcatctctctgggttcaacgcacacatcacaaagaagtttctgagaatgcttctggctagtttgtgtgtgaagatattcccatttccaacaaaggcttcaaagcgctcca

SEQ ID NO: 574984 - DNA, 527 bp, Homo sapiens
gacacaacgcgaagccaattatctgcttgcagatgtgagraaaacacgtttcaaaacagctctatcaaaggaaaggttcatctctctgggttcaacgcacacatcacaaagaagtttctgagaatgcttctggctagtttgtgtgtgaatatattcctatttccaacaaaggcttcaaagcgctccaaagattcacctgcaattgttcaaaagagtgtttcaaaactgttctgtgaaaagaaatgttcaactgtgttagttgaatgcccacatcacaaagaagattctgagaatatttctgtctagtttttattagaagatattcccgtttccaccaaaggacacaaagcgaagccaattatccgcttgcagatcttacaaaaacacgtttcaaaactgctctatcaaaggaaaggttcatctctctgggttcaacgcacacatcacaaagaagtttctgagaatgcttctggctagtttgtgtgtgaagatattcccatttccaacaaaggcttcaaagcgctcca

SEQ ID NO: 574985 - DNA, 541 bp, Homo sapiens
ccaaactcaaaaaatcacatacacacacacacacacacacacacacacatacacacacacaaatgcaacaaaacctctggactgtgagaaatgtatttctgctcattaaaaattagtctcaggttttctgttatagcagcattttggtaataactaataataaaacaatacactcttgagaattcatagctatgtgatataagtattatttataagaactagtttacawctaagatgtaattcactgtgaaatcagaaaaaagtattaatgcctaattattgggagttatgactgcatattgtaacaattttgaactgcttgagttcagtaaaagaagtcttcatggaagtaaagtaactaacatcaaattagagaaaataattcagaagcaaaacaataacaagtaacagtgaaccttcagtacacttctctgcattaaaaattatttgtatattttaaagacataatttagaacttcctgacactgctgtaaaacatagtctactgatcagaaatataagttttccacacataatgctt

SEQ ID NO: 574986 - DNA, 614 bp, Homo sapiens
ttagcaaatttaagattagaagttaactttcttaagctagcaaagatatgtacaaaaacactatgttactacttggaaagttttcttgcagatgttgaaaaccaaaaaagatattctagaaactgacttttattgaacattgcactagatgtcttagccagcttattaatgtgtgaaataaaactatgttaatgggaaagtagaataaaaaatattttactttcaaatgatatgtgtatagcaataatattcaaaagaattttctatatcaaattattataatttataggataattcagcaatttgttggatacaaattaaaaatgaaaaatcaagyacaaattaacaaaactcagtaattcaatttttgggtatatatccaaaaggattgacggcagtatctcaaagagatatgtgtacactcatggacacagcagcattattcacaacagtcaaaaggtagaagcataaacaaaatgtggtatagacatacaatggaatattattcagcttttaaaaagaaggaaattggctgggtgcagtggtgcacacctgtaatctgagcactttgggaggccaaggcaggcagaccacctgaggtcaggagttcaaga

SEQ ID NO: 574987 - DNA, 395 bp, Homo sapiens
accacatgatcatttcaatagatgctaaaaaaattaataaaattcaacatcactttttgaaaaaaccctcaaaagctggatatagaaagtacatacttcaaaataataaaggccatatacaacaaaaccagagccaacaccatactgaacagggaaaaattaaaaggcttttctctatgatctggaccaacactaagatgcctactttcaccactcttattgaaggtaatactgaaagagctggccagagctattaggcaaaagaaataaataatgacatacaacctggaaaggaagaagtcaaattcrtcttgcatgcagatgacatgatcttatctttattaaaacctaaagactcttgccaaaaaaacctgttagaactcataaatgaattc

SEQ ID NO: 574988 - DNA, 587 bp, Homo sapiens
tgttctctttctttactttcttccaaacaaacagtgatatagtttggctgtgttgccacccaaatctcatcttgaattgtagctcccataattcccatgtgtcatgaaagggacctggttagaggtaattgaatcatgggggcaggtctatcccatgctgttctcatgatagtgaataagtcttatgaaatatgatgtttttctaaattggagttcccctgtatgagctctctctaccagaggttcttcatgagggccctgcccctccagcaaatttctgcctgtacatccaggcatttccatacatcctctgaaatctagctggaggtttccaaacctcaattcttgacttctgtccacccacaggctcaacaccacatggaagctgccaaggcttagggcttgcaccctgtgaagccacagcctaagctgtacctcggctccttttagccatggctagagtggctggaatgcagggcacaaagtctctaggcttcacaaagcaggggttcctgggcctggcccatgaaaccattttttcctcctaygcctctgggcctgtgatgggaggggctgctgcaaaggtc

SEQ ID NO: 574989 - DNA, 588 bp, Homo sapiens
ggcataattaaaccacacaactgatgatagaaatacatcctatggctgaagaactttctcccagaaaaatatttactgttatttactttttcatattcaactaatatttattaagagcctgatgtatgctagacactttcaaatgcttattacatgtcatcctcatgattaccttgtaagggagataccatcagtaccatttggataaatgaaaaactgagactcagagagattaagtggcttagccaaaactccccagacaataagtgcagaagcaaggatttgaattcaggcctgttgggtttccagtccagaagcttccccactgtaccacactgcctctccaaaagcataaggaacctctacaactgacattgcaccaggtcctgagctgctgcctcccgaactcccgccaggctgtacccaataggtgaagccagccagaagggagaggagtaagtaagaaggtcccagaggcracttgcacctggccctgtccaagagtgcagtgcaagcactcccctgtaggggttattatgatggttaatattgagtgtcaacttgattggattgaaggatgcaaagtat

SEQ ID NO: 574990 - DNA, 645 bp, Homo sapiens
gataggaaacttgtgaggagatgtcatggtattatgtaaatgtcttgtaacacattaaaaattcactcactagtttttgcatctagtaataattttctaccttcatcattccttctgtattttttatttgatattccctgtaaggaagagctttcatctttgtgtatttatgtattactgtttaattatttatttatttactataggcctgaggatttttattttattcaatgagctataatacattgctgacattattttgattctcaagtttttccagttttggccaagagctccctaagtgttcatagttcctgtgtcttattggtagactctcatcatgcataagtactttcttaatttctggtctagtaagatgctcagacaccttgcctcaatcttggatttaactttttctccaaggatctatagttcttgtcactggagagggggattayaaaccaagatttgagcactagtttttcacattattaatgacttgccaatggctctattccccctcaacatacagagctggaatacacatgcaaatacacacactcatgtgtatataaatatatgcatatatgcacatattaaaatattttcttatttctatctctttctctgttatatgtttacatg

SEQ ID NO: 574991 - DNA, 432 bp, Homo sapiens
aatatctgcaaacagagtctacaaaamgagagattcaaaactgctcaaatgaaaagataggttcaactctgtgagttaaatgcacacctccaaagaagtttctcagaatgcttccgtgtagtttttatgtgaagatatttactttccacaattgccccaaagctctaaaatgtccacttgcagaccctctaaaagagtgtttcagaattgctcaatcaaaggaaaggttcaattctgtgtgaccaatgcactcatcacagagaagtttgtctgaatgcttctgtgtagaatggatttgaagataattccttttccaccacagtccgcaaagggctaaaaatatccacttgccgattccacaaaaagagagattcaatactgctcaatcacaagataggttcaacttggtaatttgaaagcacacatgacaaa

SEQ ID NO: 574992 - DNA, 570 bp, Homo sapiens
attgttgggaccaaactaaaaatgttggatttaaaatttaaattttttaaatttaaatctttttaaaaataccatagggcacaatgatgccttttaagctgagaagaaaggcaaggaaatttgcattttataaggatcacttgggaccaatgcatagtaaataaattggagaacaacaagagttgagtcaggagaaaattaggaggttattacaggattctaaaagtttaacgagggcctgaactgaaatgttgtcagtagagatggagaagctataggatttaagtataatttaaaaagtagaatcaataggaaatagagatatatttgttgtggatgtgacaagagttggaaggataagatgtctctcagatttccgamttagggaggtagtagatattcgtgctgaatatggagataggaaatacagaagagtataacttggggaaaagatggagaattccatggtgtacctgttgaatttgggggtaagataatctctaacattttggatatgtttacattatagatatctatcagaatctattgaataagcctttgaatatgtgg

SEQ ID NO: 574993 - DNA, 410 bp, Homo sapiens
ggaggaagaagaggaagagatggaggaggaggaggaaggaagagaaaggaggaagaataatatacatataaagttatctacacagaaaatacctgtgaaattggttttctctggggaaaggaactatctgggaaatgaggtggaaggaagattttcactacattcctttcagtgccttttgaatttcatatcacatgcatgtattacccatatgaaaaacagaataacttttaaaagttatagtgcccttcattttataatcacaggctattgacgcctgttcatggtgtttatcccttccatatcttgctttcttgattctcagaacaagaagacagtgggccaagtcctcaggacragtgatgcttggttgttttaattgttgcctttttgtcaaaagcagaaaagca

SEQ ID NO: 574994 - DNA, 571 bp, Homo sapiens
actgtctggaattgatactctcaacagaaattcccttaatagtgtgggattccaaggagggaagaccccttttgttcagagtgataaatcaaggtgagctcttttatcccaatatatattaaattgtagtaatttctctttttcctgtcctgggtgttccacatcactaactgaagcaaggtgaatatccagttaactcagtccaacctaagaacrctctgtcttccaaaataatcacttgagttcatctacaaaaggttgaaactttctaataagagcaaatacaaagacctgctttaactaactgtgtgtgccttctcatagtttcctatgtcggattcccagagaaagcacataattcctccaaatgagttttctgatcacttaaaccaatggagcattccgttcctctcattacttgtcataatgaatattttcaaattaatgtatcacacagttaatatgtatgacattgttgttttcttatcaatttgctgtcaaactttgaaataaacagtcccataacagcagaataactctatatagtttcaaatgcttctaaagctcattc

SEQ ID NO: 574995 - DNA, 571 bp, Homo sapiens
actgtctggaattgatactctcaacagaaattcccttaatagtgtgggattccaaggagggaagaccccttttgttcagagtgataaatcaaggtgagctcttttatcccaatatatattaaattgtagtaatttctctttttcctgtcctgggtgttccacatcactaactgaagcaaggtgaatatccagttaactcagtccaacctaagaacgctctgtcttccaaaataatcacttgagttcatctacaaaaggttgaaactttctaataaragcaaatacaaagacctgctttaactaactgtgtgtgccttctcatagtttcctatgtcggattcccagagaaagcacataattcctccaaatgagttttctgatcacttaaaccaatggagcattccgttcctctcattacttgtcataatgaatattttcaaattaatgtatcacacagttaatatgtatgacattgttgttttcttatcaatttgctgtcaaactttgaaataaacagtcccataacagcagaataactctatatagtttcaaatgcttctaaagctcattc

SEQ ID NO: 574996 - DNA, 544 bp, Homo sapiens
gcatgctgcagtttccacttgacctggcaggtaagtatcctgatgtttgtgcaaagaaatagaaaattacacctcttgattattaactatgctaaaactaagaaggcaagctgaaaggattatcatgtctgtatcccaatattagcttctagttcagcttagaaggaaagtagattgaaacttagtaagccaagaagagtggatccactgtggtacacggtgagcttaagaagtagagcagataattgcatagtgttatatttacttcaaatagcagttccrtcagttatgatttataagacctcctgcaaaccaggtaatacatctgtgtctcagctttctttcacccatgaaatagggatgataatcatagtcactagggttgaagattcttgtcatgactcagtaatatacagtttgcttagcaagttgctgccataaaagttttatttcttattatttgtaagaagtaattttcattcttttttcagacccatgtattagaacttcagaagacataggagcagttaaaattgtcctcatt

SEQ ID NO: 574997 - DNA, 518 bp, Homo sapiens
cccatgacacatggggattatgggagctgcaattcaagatgagatttgggtggggagacagccaaaccatatcagatataaacctcttttaaaggctgtaactctttaaggatacacagtgcctttgtggctaggtcatgaatccaggtgacttaaaaacccatgtacctccatctcccactccgtccaaaaaagaacctgtgcttttttttaactattgctccaagctgccatggtgagctattacagggctttatatatatatttgcttacccgtgaaaatatcttttatgttacatatacacatgtatatttcttcatcattcatataaaaacattgtttctcttaattattgaattctggaattaaaaaaatcttgaatattctatatcctgttatgttttatcattttattttaagcaaggaagaagtatgataaaaacaagtatttggggaaggttatttggcagcagggtattaaaaasatgagagtaaataattgaaataaccagttttt

SEQ ID NO: 574998 - DNA, 556 bp, Homo sapiens
ttcaatgttttattatcatttatagtcactaagaatctcttgcttcctgacacaaaaagacgatccattcttgctttrtattttccctgccccatgcctagagtcagccatttctctgacacctggctccctttactggtgaatcatattttgaatgccaaacctgggcactaggtatgctcacggttcctggggtatcactgcttctaggctttttcagtggacatagtgatgaaagagatgaaaaaatcatgagtttatatcaatatttataggtttttgattacagtaccaatattattactgacaataaacctacttaggcaagttcaagatttccttacaattcttttttaacatacagaaattatgaaaattttccaacatacagaaaagttgaaagaattatacagtgaatacccatatacctaccactaaggttctacagttaatatttgttttatccctctgtccagtccattttatttcatttttattttttaatttttttagagacagggtctcactgtgtctcccaggctagagtgcagtgaca

SEQ ID NO: 574999 - DNA, 556 bp, Homo sapiens
ttcaatgttttattatcatttatagtcactaagaatctcttgcttcctgacacaaaaagacgatccattcttgctttatattttccctgccccatgcctagagtcagccatttctctgacacctggctccctttactggtgaatcatattttgaatgccaaacctgggcactaggtatgctcacggttcctggggtatcactgcttctaggctttttcagtggacatagtgatgaaagagatgaaaaaatcatgagtttatatcaatatttataggtttttgattacagtaccaatattattactgacaataaacctacttaggcaagttcaagatttccttacaattcttttttaacatacagaaattatgaaaattttccaacatacagaaaagttgaaaraattatacagtgaatacccatatacctaccactaaggttctacagttaatatttgttttatccctctgtccagtccattttatttcatttttattttttaatttttttagagacagggtctcactgtgtctcccaggctagagtgcagtgaca

SEQ ID NO: 575000 - DNA, 537 bp, Homo sapiens
tgttgccatattcaggatcagtaagaactgggtccgctccacgccccaacagtagtgggatttcccaccacccacayacatgggaaaagataagtctcctgcaaagtttttgtcttttaagctgaatttatttaactcaaagcatctacccaagagctaagatagcctatagaactccaagtgtggacagaaataattaacagtaattaagacacttgtcattgcttatgtttattaactttaaactattacccatgcttaagtgccaagtgaggatgaataaagaaaaacataaagcagggctcttctggtggggcttcatcattcatctcttcagttaactggagtctcagccgtgatgttccaggcctcttcgctaaaatgctgccgcctgaaaataacttggtgcggaggcaggaaattctaaagaaattaataaggtgacaaccctgctgtctttaaattccatcaatattcatattttgcaacatatggtgagaggagctcggactttgcagttagacaggcctaggttaa

SEQ ID NO: 575001 - DNA, 537 bp, Homo sapiens
tgttgccatattcaggatcagtaagaactgggtccgctccacgccccaacagtagtgggatttcccaccacccacatacatgggaaaagataagtctcctgcaaagtttttgtcttttaagctgaatttatttaactcaaagcatctacccaagagctaagatarcctatagaactccaagtgtggacagaaataattaacagtaattaagacacttgtcattgcttatgtttattaactttaaactattacccatgcttaagtgccaagtgaggatgaataaagaaaaacataaagcagggctcttctggtggggcttcatcattcatctcttcagttaactggagtctcagccgtgatgttccaggcctcttcgctaaaatgctgccgcctgaaaataacttggtgcggaggcaggaaattctaaagaaattaataaggtgacaaccctgctgtctttaaattccatcaatattcatattttgcaacatatggtgagaggagctcggactttgcagttagacaggcctaggttaa

SEQ ID NO: 575002 - DNA, 591 bp, Homo sapiens
tatggtgagaggagctcggactttgcagttagacaggcctaggttaatatcctagctttgatatttactagatgtctcccctgcatttaaatgtgtaagcctcagttttcatctgtgatgatagtattacaaatgaagtaggtacaattatctttacccgtaagggaacttcccatgagcagtgatggctccaaggcatagaaagatgggatgggacttcactgttccctaacaagctataccctccaacccaaaagcacaatctaagtaaaagctatgagcttgctgttgaarccaattcaatggtacaatttgatgttgaaataaaattagaaactcctagccccttcctagcagaatgctacccctcagcccctcctttataagctgccagttcccaaaagaaaatccgtttgtgatccaagtcatctctctaaaatatttcttttcatgacaatgttttaccacaactctactctgatgctttcctctgaataaaatcagcaggttaatgattttaaatatctgggttaatgtttccatttgaaccattccaggagacaaacatgagaatgactaggtatcaaatga

SEQ ID NO: 575003 - DNA, 514 bp, Homo sapiens
gctgaaagtcccatgaagcccaattgagatggatggagacagagggagcatgagacaaacaaagtttaaaaatgaattaattgcaatcattcataaggtcaaatgccaactagacatcccaactccattgggtgtgtgtgaatactacaaagaacatagactccatccctaactttggaacagagcgaatcaactcygtttggagacctaagcagagaccacataggctggttagcgaacaatgaagtcctccattagaggaggattgcaggtgcaatagtcagagatggagcaatcactgtgagctggtgggggtggaaaacaaggcgttcttaaggagttggagcccaaaaagaccttggtgaataggtatttggatgcattcctttggagagcaattatctagcaccttctatgtaggacactgagctagaactgggtttccaaagatgataaagaccatacaaggccctgagtctgctgtaagaacagacgggcacaggaataactctca

SEQ ID NO: 575004 - DNA, 539 bp, Homo sapiens
ctgggtcatagttcttagaataatgaagcaccatggtaagtcatgtgctggtgagaggagcaggggtggaaactgattacatgacatgatgtcattttaagacatttcaggtggggcttcacaatccctgggctgtgaaaggagacaagagaaaagctaacttgatacaagcaatgtccctrcagggcaaaaatgcagagaatcacctgggtgaacccagaccgatggtgtcatgggctttcatcagccttagtcagtaacttttagttctgagttcctccctgggcatcgccaataaggccaagtcctgtgcccagatgtctctgagtgatttttcaccctagcacgtctctctaaaaccatggagtttttctttaagtcctaggctctaaggagagaaatgaaaaacgcttgtgtgccagctcataaaaagttaggttatgaatgcctacagtaaaagttcgcacatgggtccgaggacctggttattttgatggttttcagtgtaagactcacttcaccagcattgttgagtttgg

SEQ ID NO: 575005 - DNA, 539 bp, Homo sapiens
ctgggtcatagttcttagaataatgaagcaccatggtaagtcatgtgctggtgagaggagcaggggtggaaactgattacatgacatgatgtcattttaagacatttcaggtggggcttcacaatccctgggctgtgaaaggagacaagagaaaagctaacttgatacaagcaatgtccctacagggcaaaaatgcagagaatcacctgggtgaacccagaccgatggtgtcatgggctttcatcagccttagtcagtaacttttagttctgagttcctccctgggcatcgccaataagrccaagtcctgtgcccagatgtctctgagtgatttttcaccctagcacgtctctctaaaaccatggagtttttctttaagtcctaggctctaaggagagaaatgaaaaacgcttgtgtgccagctcataaaaagttaggttatgaatgcctacagtaaaagttcgcacatgggtccgaggacctggttattttgatggttttcagtgtaagactcacttcaccagcattgttgagtttgg

SEQ ID NO: 575006 - DNA, 369 bp, Homo sapiens
caagtgatggctgatgctgaggatggacttgagactgggttgaattacatctcccaagaagatakgttcaagtcctaattcccagttcctgtgaatgggaccttatttgaaaatagcgtctttgcagatataatcaattaagatgaggtcatagtagagtagggtggcccctaatccagtgactagcgtccttgtaaaaggggaggaatttgaacacagagacatgtagggaaaatgtcatatgaaaacagagacagagactggagttaggccgccataggccaagcaacactaaggcttgctggcaacaaactgaagcaaagaggtaggcatgaaacagacctccccgtgagccctgaagaaagaacc

SEQ ID NO: 575007 - DNA, 549 bp, Homo sapiens
gactagcgtccttgtaaaaggggaggaatttgaacacagagacatgtagggaaaatgtcatatgaaaacagagacagagactggagttaggccgccataggccaagcaacactaaggcttgctggcaacaaactgaagcaaagaggtaggcatgaaacagacctccccgtgagccctgaagaaagaaccaactgggcttacaccttgatcttggccttctatcctcctgcactatgacagaatacatttctgttgttttaagccacccagtttgtggtactyctaatataaatcccaagtctggttttctgcctccatgagtttccagaattagaacctaagtgtaggaaacattcttctaacccagggctatttctgccacttcaggaagaaggcagaaaatgtgaccacttttgacctcagttctgaggagcacaagaatctaaatcagggaaacatcccttcatcagggtacaagttcaaagggctcagttaagataaattagtatattcaagacgtgagtgtttccattgagggactgttgtgta

SEQ ID NO: 575008 - DNA, 606 bp, Homo sapiens
taggccgccataggccaagcaacactaaggcttgctggcaacaaactgaagcaaagaggtaggcatgaaacagacctccccgtgagccctgaagaaagaaccaactgggcttacaccttgatcttggccttctatcctcctgcactatgacagaatacatttctgttgttttaagccacccagtttgtggtactcctaatataaatcccaagtctggttttctgcctccatgagtttccagaattagaacctaagtgtaggaaacattcttctaacccagggctatttctgccacttcaggaagaagrcagaaaatgtgaccacttttgacctcagttctgaggagcacaagaatctaaatcagggaaacatcccttcatcagggtacaagttcaaagggctcagttaagataaattagtatattcaagacgtgagtgtttccattgagggactgttgtgtagcagtgtacactctggaagccaagacacagtggtcatcctcacaaggagcccagaaagacatatgcctgtccaatttcccaacccaaatgataagtagtctcagtggacagtctaattctatgaatttccagtgttactttggg

SEQ ID NO: 575009 - DNA, 589 bp, Homo sapiens
ccgagtttgcctagcacagcgttttcacagcctgtgcaattagagagcaggtgtgttttaagtgctcakgaaaagaagagccctcatttttattgcaagttttccctcatttctctgagaaacaaaacaaagcaactcaaggaatatgcaggaaaattgtttttgacccaatttgttgtcgttgccaacttactttccaaagtggttaattaggcaagctcagcagaactttccagtttctgcaagggtgccagtttcggagcacctctgtagactccctctgctgagggatgagatggtgacacttttctcagatttccttttgtttatcagatcggggtgtgtgctggggtcggggctgggggtgagccttagctcacatgtgaaaaacagccactagacatttctcatgaatctgagcagtttcagacctcttgtgcatgtgttaagtctgatgtgagcttgtaatcagagccaattcctcaaaactcagttcaagtgggtggtggtaatttgcaaggtcactgcgtcattatcaacacacagcaaaataagagcaggattgcacctcaatacataggacacggtg

SEQ ID NO: 575010 - DNA, 610 bp, Homo sapiens
aaggtaaaaacaaggtcacacctatcagcagcctagctgaacttcctaatccacttactttctgggaaagggctttctaaggacctggtttaaatctgaggtgacagtgggtctaccccctgcatcggtgctgggtgctacragcatcccactggatgcatgtggttccaggctgacaatggctgtcctgttggagctgagagcgtcatctcccagggtgctggaactctcaaatttaaagaaaagagcaagtaaactcaggtgaggcagaaaaatagtctgcttgatacatgcttgatctcatacctgaccccacccacaagtcaaatgccaccttctactaggatgcatggggtccctggcttgcaaattacgctagaaaaaaagcagtaccctggaaaatgtgattcaaatttgtgataaatatttatgtggccagagatgtctcaattcaggtctatgtgtctgtccctcccaaggttgtcaccatctagaacaaactccttcatcagcttattgttccagagagagcagagtgaagcaatcaattgcaccagctctggaaacagaatttaattcttagtctcctggtaactgtgacactggtaaa

SEQ ID NO: 575011 - DNA, 581 bp, Homo sapiens
caatacaacacctgtctcaaacagctatggtaagggtcagtgcaacgtgctcagttatttgcagcccccgaagacttttgcactcacccttgcttctggctaaaaggtacttcagctgcctttcccaatagctgattcttcaacatccactccttggatgagggatttcccgtacaccctacctcaatcaaacatgtatacagttgtccctaggtatacagaagrcagtggttccagcatccctgagtactccaacatccctgcatactcaagtcccacagtcagccctgcagaaccaaggtatatgaaaacttatccctccttataccaagttttgcatcctgagatgagaatactgtattttcaattggcatttcgttgaaaaaaaaaatctacataaaagtggacctgtgctgctgaaactcgcattgtccaaaactgttatgtttttcatgacaatcatcacatcctaaagtatccagtttgctgttaacttgtggattgtcaattccccctcccctccagctctctctctctcatacacaggcaggtacatgacagtgacctctctgaaaactgag

SEQ ID NO: 575012 - DNA, 472 bp, Homo sapiens
accctgctgcccaacctaaagtctggcacacagtagaagtctaacaaatgcgtgtctttttttccctccttcccttctcattaacaatctgatgtaatgaaatgagacagattgtagctattggctgaacaaaggaatcctgaacagtggaatttctagtattgctaaccattccggctaattatccagtttgtgaattattcagatactttgcttgtctttcttttcatcctttgagttatgtcactgctcactgataattaaaaataaatcattcyatcccctatttgtctcttgtaccttgataaatgaccattgaaagaaaaagttgaaactacagactcatatagttggactgaaaaaacgcatactatatttacccgcaatgtactcattctttcaatatgcattcattcattgcctagcagtgcaccttagtcaggtaagtgggacagcccctgagacagggccc

SEQ ID NO: 575013 - DNA, 409 bp, Homo sapiens
ccttagtcaggtaagtgggacagcccctgagacagggccctggtattattagtcaggacttttgtggttacaagagaaagaaaccaaactcaattaagcaaatgaggaattatcatttcacttgwttatgaagttctagggtccagctcaggtatagctagatccagaaacacaaatattatgatcagtcctgtacaattaccaatgatggagatgggattcaaagattagcaagatctggtggtcatatattcatatctgctaccagagggtgggcagggcatcacaactgacaactgccgggatcaacaggggatgagaaagcaattgcctgatggaaagagtggtactgaacaccaaattacaataggtggccaatatctgagaatcaggaccctatgaaacatgt

SEQ ID NO: 575014 - DNA, 594 bp, Homo sapiens
tctggcttttgttgccattacttttggtgttttagacatgaagtccttgcccattctggaaaaaggaaactgccaaagagggaaaccaacactttttcatggattgtgagcctttcttatgaacttgttggtgaaataagttgaagctcattcactcaatagtcaacaatactgattgtgcacttactatcataataaactctcagcacctaggacagtccctgacacagagtaggtattcaatatgtttgtcaaaccagcctgtcatatggagctttggtcttaacttcatttaaaacaatatagrgtaggaaaacgtgatgaggttgtttcttttaggtagctgtcttaatccgttttctgctgctataatggaacactacagagtgggtaatttataaagaaaaacgtttatttggctcacaattctgaagggtgggaagtccaagagcatgatgctggtatctggcgggtgccttcttgcagcatctcaatatggcagaagggcatcatatggggaggatatgtgcaagggaggcagaatgaaaatggggaccaaatgtctatttatcaggagcccacttgtacaataac

SEQ ID NO: 575015 - DNA, 594 bp, Homo sapiens
tctggcttttgttgccattacttttggtgttttagacatgaagtccttgcccattctggaaaaaggaaactgccaaagagggaaaccaacactttttcatggattgtgagcctttcttatgaacttgttggtgaaataagttgaagctcattcactcaatagtcaacaatactgattgtgcacttactatcataataaactctcagcacctaggacagtccctgacacagagtaggtattcaatatgtttgtcaaaccagcctgtcatatggagctttggtcttaacttcatttaaaacaatatagggtaggaaaacgtgatgaggttgtttcttttaggtagctgtcttaatccgttttctgctgctataatggaacactacagagtgggtaatttataaagaaaaacgtttatttggctcacaattctgaagggtgggaagtccaagagcatgatgctggtatctggygggtgccttcttgcagcatctcaatatggcagaagggcatcatatggggaggatatgtgcaagggaggcagaatgaaaatggggaccaaatgtctatttatcaggagcccacttgtacaataac

SEQ ID NO: 575016 - DNA, 535 bp, Homo sapiens
aaacacaaaacatttcatattcagcatctcgttcaaacattccccaaactcttaagaggtaggtactrgattatccccattttatagaagtggagattgagctctagggtgttaaatgactttccaaagtttcccagcctgtgacagagagggtaccaagtctggggccaggctattcagacaaagcctcttaattcctgaatactcccaggctcttgatacatatttgataaacaaatggatgaaagaacaaagtaatgtgccccctgacaatcttgccaatcagagtgttcactagactgtggtgactgccaggcgaccttattttctcattagagggaaattttggaaactagattctatctcacctctccttgttatattgaacacatccccggtataactggaaaattttccttggagcctggtatcctttcccctttaggatggaagcaatgagcacccacttagaactgccctcctagggcatggagccatgaccgcaccaggctgctctgaggacgggagtgctctc

SEQ ID NO: 575017 - DNA, 535 bp, Homo sapiens
aaacacaaaacatttcatattcagcatctcgttcaaacattccccaaactcttaagaggtaggtactggattatccccattttatagaagtggagattgagctctagggkgttaaatgactttccaaagtttcccagcctgtgacagagagggtaccaagtctggggccaggctattcagacaaagcctcttaattcctgaatactcccaggctcttgatacatatttgataaacaaatggatgaaagaacaaagtaatgtgccccctgacaatcttgccaatcagagtgttcactagactgtggtgactgccaggcgaccttattttctcattagagggaaattttggaaactagattctatctcacctctccttgttatattgaacacatccccggtataactggaaaattttccttggagcctggtatcctttcccctttaggatggaagcaatgagcacccacttagaactgccctcctagggcatggagccatgaccgcaccaggctgctctgaggacgggagtgctctc

SEQ ID NO: 575018 - DNA, 535 bp, Homo sapiens
aaacacaaaacatttcatattcagcatctcgttcaaacattccccaaactcttaagaggtaggtactggattatccccattttatagaagtggagattgagctctagggtgttaaatgactttccaaagtttcccagcctgtgacagagagggtaccaagtctggggccaggctattcagacaaagcctcttaattcctgaatactcccaggctcttgatacatatttgataaacaaatggatgaaagaacaaagtaatgtgccccctgacaatcttgccaatcagagtgttcactagactgtggtgactgccaggcgaccttattttctcattagagggaaattttggaaactagattstatctcacctctccttgttatattgaacacatccccggtataactggaaaattttccttggagcctggtatcctttcccctttaggatggaagcaatgagcacccacttagaactgccctcctagggcatggagccatgaccgcaccaggctgctctgaggacgggagtgctctc

SEQ ID NO: 575019 - DNA, 573 bp, Homo sapiens
tagggacaagaggtggatcctatgaccccaggccctgcctagtccctcaaataatgtctgctgaagacacacagccccctgaggctaattgaaactcccatggcctccctgaatcggggaagagtcggaaattatatgccatttatttatttttttaaggcttgttttatttgaatggctgatctgtgtaatcacagaggccagtatgtacagacaaagggggagcttttatttcttggtctcttcctccttagaccaaagtcttgatgatctcctccttcttggcctggaggtgctcttcacggtgcttgcgtgcttccttgrtcttagacctgcgggtctcagcctggtcagccaggagcttcttgcaggccttgtctgccttcaggttgtggatgtgttccatgaggatccgcttgtttttgaacacattccccttcaccttcaggtacaggctgtgatacatgtggcgatcaaccttcttagattcatggtatcttctgtgatacatgtggtgatcaatcttcttagaatcacagtatcttctgagaagctggcatagaatcctcatcc

SEQ ID NO: 575020 - DNA, 573 bp, Homo sapiens
tagggacaagaggtggatcctatgaccccaggccctgcctagtccctcaaataatgtctgctgaagacacacagccccctgaggctaattgaaactcccatggcctccctgaatcggggaagagtcggaaattatatgccatttatttatttttttaaggcttgttttatttgaatggctgatctgtgtaatcacagaggccagtatgtacagacaaagggggagcttttatttcttggtctcttcctccttagaccaaagtcttgatgatctcctccttcttggcctggaggtgctcttcacggtgcttgcgtgcttccttggtcttagacctgcgggtctcagcctggtcagccaggagcttcttgcaggccttgtctgccttcaggttgtggatgtgttccatgaggatccgcttgtttttgaacacattccccttcaccttcaggtacaggctgtgatacatgtggygatcaaccttcttagattcatggtatcttctgtgatacatgtggtgatcaatcttcttagaatcacagtatcttctgagaagctggcatagaatcctcatcc

SEQ ID NO: 575021 - DNA, 547 bp, Homo sapiens
ccctctgatcaagtcaaaagcctggggaggagagggggcatcctggattcctctgttcctttgctccctgaatccagtcaatcatcacatctgattaattccaccaccagacagctctcaactgcatacactactctctcttctctgacaccacccacatcagagctcctaccaccttttgtgagggctcctaaaatagactcctaactggtctctccattctacacttaccgcccagtcctttctccacctaacatctaaagtggaattgcaaaatagaaatcagatcatcatgtctgtcccttccctgtttcagtcacttaaatggtttgtgtgtttgtcttatatacaatgctgtggccataccagccaccaccttttggtctctggaatgtaccaagctgtttggcatgtaccgagactgtattcatttcctatcttacagttctctaggtcggaagmccacatgggtctcacagggctaaagcctcagtgtctgctgggatgcattcctttctggaggctgtgggagagaatgtgtttcctt

SEQ ID NO: 575022 - DNA, 620 bp, Homo sapiens
aaagccttggaacatgctgggcgcattaaaggggagctatctcgcatgtgcaattactcaacacatctttaaaactgtaaacacttgttcacatgtggagaagtttagagccgtacaggcttggaaaacccacctggcaggcrggttccctccgcttctctccagttgagtaaccatcctcggcgcccactcctcctctgagagccaaacaccatcagcagagaaatcattaaggagtgggggacgagagttcatacatgagctatttttatccagagcactcccttttctcctgtctgggttgatctcctccataaaccttgcctccatctttctccccgccacctggtgcagggagaaatgccatctggcttttggctagcagctttctccagctttgaagggtgagtggcactgaggatgcagatatttccaaataaacccagcagaggaagatcgcccagggttggtttttgaaacagcagactgcgtgaccacaaagagaatacccaccatgcacagaaaaaataatctctccaaatgtgttcaagaaaagaatgtagagagcccaaagacgcctgcctataaatatgggagtcaaatggaaagaaagcaaggtt

SEQ ID NO: 575023 - DNA, 620 bp, Homo sapiens
aaagccttggaacatgctgggcgcattaaaggggagctatctcgcatgtgcaattactcaacacatctttaaaactgtaaacacttgttcacatgtggagaagtttagagccgtacaggcttggaaaacccacctggcaggcgggttccctccgcttctctccagttkagtaaccatcctcggcgcccactcctcctctgagagccaaacaccatcagcagagaaatcattaaggagtgggggacgagagttcatacatgagctatttttatccagagcactcccttttctcctgtctgggttgatctcctccataaaccttgcctccatctttctccccgccacctggtgcagggagaaatgccatctggcttttggctagcagctttctccagctttgaagggtgagtggcactgaggatgcagatatttccaaataaacccagcagaggaagatcgcccagggttggtttttgaaacagcagactgcgtgaccacaaagagaatacccaccatgcacagaaaaaataatctctccaaatgtgttcaagaaaagaatgtagagagcccaaagacgcctgcctataaatatgggagtcaaatggaaagaaagcaaggtt

SEQ ID NO: 575024 - DNA, 579 bp, Homo sapiens
aaacccacctggcaggcgggttccctccgcttctctccagttgagtaaccatcctcggcgcccactcctcctctgagagccaaacaccatcagcagagaaatcattaaggagtgggggacgagagttcatacatgagctatttttatccagagcactcccttttctcctgtctgggttgatctcctccataaaccttgcctccatctttctccccgccacctggtgcagggagaaatgccatctggcttttggctagcagctttctccagctttgaagggtgagtggcactgaggatgcagatatttccaaataaacccagcagaggaagatcgcccagggttggtttttgaaacagcagactgcgtgaccacaaagagaatacccaccatgcacagaaaaaataatctctccaaatgtgttcaagaaaagaatgtagagagcccaaagacscctgcctataaatatgggagtcaaatggaaagaaagcaaggtttattctcccccattggcctggctcactgagaactgcactcatatatatgtatgcatcacatgtcatacatggaaaagacccatg

SEQ ID NO: 575025 - DNA, 637 bp, Homo sapiens
tgtcttaacttatcttagatggttgcccatttaagggttacccagcagtcacaggttacaagtacagtgggaagggcctcaaatgctgggtctggacgtagaaacattgcctttcgatagcggtgtggacatggggaagccactccckttctcttcaacagttaatgatccagatgattctgaaatctccatgctctaaagttgtgttccactgtctgcaagaagtccattctagacaatgtgacaatgtagcgtgtggcctttgaagttataccatccaagctcacatacttgctctactgcatgatcttggcttcggtagttaactggtctgtaactctttctcttcacttgtaaaacaatgagaattgtggtacccgcctctgctattttaatcctactttgggtatttgaaaagaaaacccaggtaacacacttaactcaatttctggtccatgatgactattcatgcatcatgcatgcacaaatcattacttttatcatggcaaacaatattttcccatttgggataatctctgagaaatcagtttataaagaagtcaactgcaaacccatctagtcagagtcaagtacacaaaagcccctggccctgatgcagaaatctttctgcaccatc

SEQ ID NO: 575026 - DNA, 637 bp, Homo sapiens
tgtcttaacttatcttagatggttgcccatttaagggttacccagcagtcacaggttacaagtacagtgggaagggcctcaaatgctgggtctggacgtagaaacattgcctttcgatagcggtgtggacatggggaagccactcccgttctcttcaacagttaatgatccagatgattctgaaatctccatgctctaaagttgtgttccactgtctgcaagaagtccattctagacaatgtgacaatgtagcgtgtggcctttgaagttataccatccaagctcacatacttgctctactgcatgatcttggcttcggtagttaactggtctgtaactctttctcttcacttgtaaaacaatgagaattgtggtacccgcctctgctattttaatcctactttgggtatttgaaaagaaaacccaggtaacacacttaactcartttctggtccatgatgactattcatgcatcatgcatgcacaaatcattacttttatcatggcaaacaatattttcccatttgggataatctctgagaaatcagtttataaagaagtcaactgcaaacccatctagtcagagtcaagtacacaaaagcccctggccctgatgcagaaatctttctgcaccatc

SEQ ID NO: 575027 - DNA, 637 bp, Homo sapiens
tgtcttaacttatcttagatggttgcccatttaagggttacccagcagtcacaggttacaagtacagtgggaagggcctcaaatgctgggtctggacgtagaaacattgcctttcgatagcggtgtggacatggggaagccactcccgttctcttcaacagttaatgatccagatgattctgaaatctccatgctctaaagttgtgttccactgtctgcaagaagtccattctagacaatgtgacaatgtagcgtgtggcctttgaagttataccatccaagctcacatacttgctctactgcatgatcttggcttcggtagttaactggtctgtaactctttctcttcacttgtaaaacaatgagaattgtggtacccgcctctgctattttaatcctactttgggtatttgaaaagaaaacccaggtaacacacttaactcaatttctggtccatgatgactattcatgcatcatgcatgcayaaatcattacttttatcatggcaaacaatattttcccatttgggataatctctgagaaatcagtttataaagaagtcaactgcaaacccatctagtcagagtcaagtacacaaaagcccctggccctgatgcagaaatctttctgcaccatc

SEQ ID NO: 575028 - DNA, 542 bp, Homo sapiens
atacttgctctactgcatgatcttggcttcggtagttaactggtctgtaactctttctcttcacttgtaaaacaatgagaattgtggtacccgcctctgctattttaatcctactttgggtatttgaaaagaaaacccaggtaacacacttaactcaatttctggtccatgatgactattcatgcatcatgcatgcacaaatcattacttttatcatggcaaacaatattttcccatttgggataatctctgagaaatcagtttataaagaagtcaactgcaaacccatctagtcagagtcaagtacacaaaagcccctggccctgatgcagaaatctttctgcaccatctggttttaacatacataacttgaattgggaagttctccttgctgaaaattctggggctcctggaagaaagggatgaaaggtttrtatcatctttgtatttttctcatctctgactttgtttctgctatccaagctctatgacctgccagttggtgtctataagcttctggccagtcccaatttgaggagttg

SEQ ID NO: 575029 - DNA, 545 bp, Homo sapiens
attcatgcatcatgcatgcacaaatcattacttttatcatggcaaacaatattttcccatttgggataatctctgagaaatcagtttataaagaagtcaactgcaaacccatctagtcagagtcaagtacacaaaagcccctggccctgatgcagaaatctttctgcaccatctggttttaacatacataacttgaattgggaagttctccttgctgaaaattctggggctcctggaagaaagggatgaaaggtttgtatcrtctttgtatttttctcatctctgactttgtttctgctatccaagctctatgacctgccagttggtgtctataagcttctggccagtcccaatttgaggagttgatcttggagtcctcaaaggcagaagttctcagatgcacaaagtataggcacatgtgggttcaggtgtgctcttctcactgcctagaacaactcctcctctcctgtctttccatttaactccttcaacagatgccaactgagcacctgctacattccatggtctgctctagtaaacagggt

SEQ ID NO: 575030 - DNA, 561 bp, Homo sapiens
aagtataggcacatgtgggttcaggtgtgctcttctcactgcctagaacaactcctcctctcctgtctttccatttaactccttcaacagatgccaactgagcacctgctacattccatggtctgctctagtaaacagggtaatctccatttcacatggagctcacattctataagaggtgtaaggatggtatatgaaaaaaagacaaaagataaatactctatgtgtcagtaagtgacgcaaagaaaaattaaacactgagaacagagatagtgagaagggtatctttttatttaaggcacttggggaaggcttctctgctcagcagagattagaaaaawcccaaaagaagtgggaatgtgagcctagcaaatatctgggggaagaattctaggcaatcacattaacaaaggtcctgaggtagaagtgtacttgggaattggagaaacattgaggatcagtgtagagcacagaggaggtaaggagaagagaaggaggggatgaggtcagagagctgatggggaacccttcaaagtagggcctttgaagacatggtgagga

SEQ ID NO: 575031 - DNA, 561 bp, Homo sapiens
aagtataggcacatgtgggttcaggtgtgctcttctcactgcctagaacaactcctcctctcctgtctttccatttaactccttcaacagatgccaactgagcacctgctacattccatggtctgctctagtaaacagggtaatctccatttcacatggagctcacattctataagaggtgtaaggatggtatatgaaaaaaagacaaaagataaatactctatgtgtcagtaagtgacgcaaagaaaaattaaacactgagaacagagatagtgagaagggtatctttttatttaaggcacttggggaaggcttctctgctcagcagagattagaaaaaacccaaaagaagtgggaatgtgagcctagcaaatatctgggggaagaattctaggcaatcacattaacaaaggtcctgaggtagargtgtacttgggaattggagaaacattgaggatcagtgtagagcacagaggaggtaaggagaagagaaggaggggatgaggtcagagagctgatggggaacccttcaaagtagggcctttgaagacatggtgagga

SEQ ID NO: 575032 - DNA, 592 bp, Homo sapiens
ttcaatttccatgtagttgtggttttgagtgagtttcttcatctcaagttctaatttgattgtgctgtggtctgaaagactgttatgatttcatttcttctgtatttgccaagggaggagtgttttacttccaattatgtgatccattttagagaaagtgtcatgtggcactgaatagaatgtgtatgctgttgttttgggggtggagggttctgtagatatctatcaggtccacttgatccagagctgagttcaagtcctgaatatcctttttaattttctgtcttgattatctaatactgacagtggagcattaaagtctcccactattattgtgtaggagtctaagtctctttgcatgtttctaagaacttgttttgtgaacctgggtgctcctgtattgggtgcaaatatatttagaatagttagctcttcttgttgaattgatccctttgccattatgtaatgcccttgyctttaaaatttttgttggtttaaagtctgttttgtcagaaactaggattgtaatccctgcttttttctgctttccatttgcttgataaattttcctacatccctttattttgagcct

SEQ ID NO: 575033 - DNA, 625 bp, Homo sapiens
tcccacagctctcagaggttttgtttgttcctttatttcttttttctctaatgctgtctgcctgtcttatttcagaaagataggcttcaagctctaaaattctttyctctgcttattctattcagttattgatacttgtggttgcattgtgaagttctcgtgttatgtttttcagctccctcaggtcatttatgttcctctgtaaacttgttattctggttaacagctcctgtaatgttttgtcatggttcttagcttctttgcattgggttagaacatgctcctttagctcagccaagtttgttattacccaccttctgaagcctacttctgtcaattcatccatcttagcctctgtccagttctgtgcccttgctggaaaagtgttgcaatcatttggaggacaagatgccctctggttttttgagttttcagcattttttcattgattctttctcatggttgtgagtttatctagcttcgatctttgaggctgctgacctttggatggggtattttgggggacaattttttgttgatgctgttgttgttgttgctttctgtttgtttttcttttaatagtcaggcccctatttcatagggctgctgctgtttgctgtgggtc

SEQ ID NO: 575034 - DNA, 625 bp, Homo sapiens
tcccacagctctcagaggttttgtttgttcctttatttcttttttctctaatgctgtctgcctgtcttatttcagaaagataggcttcaagctctaaaattctttcctctgcttattctattcagttattgatacttgtggttgcattgtgaagttctcgtgttatgtttttcagctccctcaggtcatttatgttcctctgtaaacttgttattctggttaacagctcctgtaatgttttgtcatggttcttagcttctttgcattgggttagaacatgctcctttagctcagccaagtttgttattacccaccttctgaagcctacttctgtcaattcatccatcttagcctctgtccagttctgtgcccttgctggaraagtgttgcaatcatttggaggacaagatgccctctggttttttgagttttcagcattttttcattgattctttctcatggttgtgagtttatctagcttcgatctttgaggctgctgacctttggatggggtattttgggggacaattttttgttgatgctgttgttgttgttgctttctgtttgtttttcttttaatagtcaggcccctatttcatagggctgctgctgtttgctgtgggtc

SEQ ID NO: 575035 - DNA, 454 bp, Homo sapiens
accaactaatctaggatcaagaccaggggcaggggaagaaacatggctagagccagtgttcctcagcagggttgctaccagtgttttggatgaaattcttattttaggaacttgacatcctagaccccaaatagtaatgcttgactcactcctagtccctgtgagaaccacagttctagcatcttacaatggagccactctgatctctgttgaaaatgccccacagtctgaaagagacacatgctaaccactaacaaagcacaggtgtttgcatgttacacaaatcctgcagtttttactaataaatgtattcagaaaggtagggtaaaattgcttataataatwaaaattcttgtttctagatttttccaagactgtcttgaggttagcatcccaggaattccttcattcccaggcaggccaggatgatcagcaaatctaggtgtcaatgtga

SEQ ID NO: 575036 - DNA, 454 bp, Homo sapiens
accaactaatctaggatcaagaccaggggcaggggaagaaacatggctagagccagtgttcctcagcagggttgctaccagtgttttggatgaaattcttattttaggaacttgacatcctagaccccaaatagtaatgcttgactcactcctagtccctgtgagaaccacagttctagcatcttacaatggagccactctgatctctgttgaaaatgccccacagtctgaaagagacacatgctaaccactaacaaagcacaggtgtttgcatgttacacaaatcctgcagtttttactaataaatgtattcagaaaggtagggtaaaattgcttataataattaaaattcttgtttctagattttyccaagactgtcttgaggttagcatcccaggaattccttcattcccaggcaggccaggatgatcagcaaatctaggtgtcaatgtga

SEQ ID NO: 575037 - DNA, 443 bp, Homo sapiens
ggtgtttgcatgttacacaaatcctgcagtttttactaataaatgtattcagaaaggtagggtaaaattgcttataataattaaaattcttgtttctagatttttccaagactgtcttgaggttagcatcccaggaattccttcattcccaggcaggccaggatgatcagcaaatctaggtgtcaatgtgacctttgaaggatgcatgttcttttccggaagctgtcctgcaggactattgaaaataggtctcagataattttccattctcagtgtggtagagaatctctgatcacacccttaccattgcagattggargatggactcttagagaggcatacgactcttccctgttcacccagtaaagtttttccatgacagccatttcctgctggcaacatcaacatccaaagtaaagtaaaaagcaatgtatatgttacta

SEQ ID NO: 575038 - DNA, 582 bp, Homo sapiens
atgggttttctgcatctaatgaagtgatcacatgatttttataatctttattctgttagtacagtatatcaaatrtgttgatttccgtatttctatggtttgaatatttgatccctccaaaactcatattggaacttaatccccattgtggctgtattgagaggtggagcctttaataggtgattggggaatgatggttctgcccttataaatggattaattcattcatgaattaatggatcaaagagttaatagattactgggagtcatgggagtgggactggtggctttataacaagaggaagatagctgaatgagcatgctcagcttcctcaccatgtgataccatatgcttccttgagactctgcagtgagtccccaacagcaagaaggccctcaccaggtgtggctccttgaccttagacttttcagcctccataactgtaagaaataaattcattttctttataaattacccagtttcaggatttctattgcaaacaatagaaaatagaataagacatatatcttgaaccatccttgtatcccaaggataaatcccacttcattattgtgtatgat

SEQ ID NO: 575039 - DNA, 582 bp, Homo sapiens
atgggttttctgcatctaatgaagtgatcacatgatttttataatctttattctgttagtacagtatatcaaatgtgttgatttccrtatttctatggtttgaatatttgatccctccaaaactcatattggaacttaatccccattgtggctgtattgagaggtggagcctttaataggtgattggggaatgatggttctgcccttataaatggattaattcattcatgaattaatggatcaaagagttaatagattactgggagtcatgggagtgggactggtggctttataacaagaggaagatagctgaatgagcatgctcagcttcctcaccatgtgataccatatgcttccttgagactctgcagtgagtccccaacagcaagaaggccctcaccaggtgtggctccttgaccttagacttttcagcctccataactgtaagaaataaattcattttctttataaattacccagtttcaggatttctattgcaaacaatagaaaatagaataagacatatatcttgaaccatccttgtatcccaaggataaatcccacttcattattgtgtatgat

SEQ ID NO: 575040 - DNA, 582 bp, Homo sapiens
atgggttttctgcatctaatgaagtgatcacatgatttttataatctttattctgttagtacagtatatcaaatgtgttgatttccgtatttctatggtttgaatatttgatccctccaaaactcatattggaacttaatccccattgtggctgtattgagaggtggagcctttaataggtgattggggaatgatggttctgcccttataaatggattaattcattcatgaattaatggatyaaagagttaatagattactgggagtcatgggagtgggactggtggctttataacaagaggaagatagctgaatgagcatgctcagcttcctcaccatgtgataccatatgcttccttgagactctgcagtgagtccccaacagcaagaaggccctcaccaggtgtggctccttgaccttagacttttcagcctccataactgtaagaaataaattcattttctttataaattacccagtttcaggatttctattgcaaacaatagaaaatagaataagacatatatcttgaaccatccttgtatcccaaggataaatcccacttcattattgtgtatgat

SEQ ID NO: 575041 - DNA, 582 bp, Homo sapiens
atgggttttctgcatctaatgaagtgatcacatgatttttataatctttattctgttagtacagtatatcaaatgtgttgatttccgtatttctatggtttgaatatttgatccctccaaaactcatattggaacttaatccccattgtggctgtattgagaggtggagcctttaataggtgattggggaatgatggttctgcccttataaatggattaattcattcatgaattaatggatcaaasagttaatagattactgggagtcatgggagtgggactggtggctttataacaagaggaagatagctgaatgagcatgctcagcttcctcaccatgtgataccatatgcttccttgagactctgcagtgagtccccaacagcaagaaggccctcaccaggtgtggctccttgaccttagacttttcagcctccataactgtaagaaataaattcattttctttataaattacccagtttcaggatttctattgcaaacaatagaaaatagaataagacatatatcttgaaccatccttgtatcccaaggataaatcccacttcattattgtgtatgat

SEQ ID NO: 575042 - DNA, 584 bp, Homo sapiens
aagctgtcccatcctggatttgcatcactcaatgtcacttcaaaagcgggcaggggaagagtctgggagattgcacgggatgtttctaaagaccacccctgaaagtgccttacatcacttcayctacatttctttgaacacagtcacagagatagaagctcactgccaggaatgctgggaaatgtaggcttccactgtacctggggaaagtaaagcctatagcaaacacacagcagctttgactctgccacaagagttacatctggattggaattctgcctctgtctgctagcttggagctctttggatctttttcttcattcaaaacttggaactaatgacacctacccacaagatgtacagaatgtcacatatatagtaagtgataagtatttgcttattaataaatttatattgaaaaaaatatataggcctaaactcttgaaataaattcttaaatatcaaaatattaaaatattaagcaaaatgacaaaaaaaggaaaattgaaaaaacaaataaaaaaattaagcaaaataaccctgaaactatagaataaaattttataccaagaggatagttgtaa

SEQ ID NO: 575043 - DNA, 584 bp, Homo sapiens
aagctgtcccatcctggatttgcatcactcaatgtcacttcaaaagcgggcaggggaagagtctgggagattgcacgggatgtttctaaagaccacccctgaaagtgccttacatcacttcacctacatttctttgaacacagtcacagagatagaagctcactgccaggaatgctgggaaatgtaggcttccactgtacctggggaaagtaaagcctatagcaaacacacagcagctttgactctgccacaagagttacatctggattggaattctgcctctgtctgctagcttggagctctttggatctttttcttcattcaaaacttggaactaatgacacctacccacaagaygtacagaatgtcacatatatagtaagtgataagtatttgcttattaataaatttatattgaaaaaaatatataggcctaaactcttgaaataaattcttaaatatcaaaatattaaaatattaagcaaaatgacaaaaaaaggaaaattgaaaaaacaaataaaaaaattaagcaaaataaccctgaaactatagaataaaattttataccaagaggatagttgtaa

SEQ ID NO: 575044 - DNA, 584 bp, Homo sapiens
aagctgtcccatcctggatttgcatcactcaatgtcacttcaaaagcgggcaggggaagagtctgggagattgcacgggatgtttctaaagaccacccctgaaagtgccttacatcacttcacctacatttctttgaacacagtcacagagatagaagctcactgccaggaatgctgggaaatgtaggcttccactgtacctggggaaagtaaagcctatagcaaacacacagcagctttgactctgccacaagagttacatctggattggaattctgcctctgtctgctagcttggagctctttggatctttttcttcattcaaaacttggaactaatgacacctacccacaagatgtacagaatgtcacatatatagtaagtgataagtatttgcttattaataaatttatattgaaaaaawtatataggcctaaactcttgaaataaattcttaaatatcaaaatattaaaatattaagcaaaatgacaaaaaaaggaaaattgaaaaaacaaataaaaaaattaagcaaaataaccctgaaactatagaataaaattttataccaagaggatagttgtaa

SEQ ID NO: 575045 - DNA, 607 bp, Homo sapiens
taaacataagcaatctgtcaacaattgaatgtcagtgtaatcctttcttttctggtctattttcatacattgtccttctcctcctcttccccagcgaattactccttctccccttgtgaaccagaaaactatgaagaatccttcrtaatttttaaaatttttaattaacagagtttcctaatagcaggagatatgaaatagacactatattaggggaaaatctcgtattaacagcacaaagtttagagtagataattaagaattaatgaattgcctataaaaacttccatagggattaactataccagagaaatgcagtagatacaatttaggagtgtgagttctttaattaattacaaagaaacttttattttacacaggggccacccctgagagggctttcccatgagctaggggagtgagtgttcaagaaagcagcttccaatgactcagacccctcacccaaggtgaggattgaaatgagaattaagcaactagaggcctatgcttgcccttactgagagcattctgcaaagcaatacagacaaaaggaggtcacagcacaggagagatgaaacaaatgaggttggagaattgacacatggca

SEQ ID NO: 575046 - DNA, 607 bp, Homo sapiens
taaacataagcaatctgtcaacaattgaatgtcagtgtaatcctttcttttctggtctattttcatacattgtccttctcctcctcttccccagcgaattactccttctccccttgtgaaccagaaaactatgaagaatccttcataatttttaaaatttttaattaacagagtttcctaatagcaggagatatgaaatagacactatattaggggaaaatctcrtattaacagcacaaagtttagagtagataattaagaattaatgaattgcctataaaaacttccatagggattaactataccagagaaatgcagtagatacaatttaggagtgtgagttctttaattaattacaaagaaacttttattttacacaggggccacccctgagagggctttcccatgagctaggggagtgagtgttcaagaaagcagcttccaatgactcagacccctcacccaaggtgaggattgaaatgagaattaagcaactagaggcctatgcttgcccttactgagagcattctgcaaagcaatacagacaaaaggaggtcacagcacaggagagatgaaacaaatgaggttggagaattgacacatggca

SEQ ID NO: 575047 - DNA, 607 bp, Homo sapiens
taaacataagcaatctgtcaacaattgaatgtcagtgtaatcctttcttttctggtctattttcatacattgtccttctcctcctcttccccagcgaattactccttctccccttgtgaaccagaaaactatgaagaatccttcataatttttaaaatttttaattaacagagtttcctaatagcaggagatatgaaatagacactatattaggggaaaatctcgtattaacagcacaaagtttagagtagataattaagaattaatgaattgcctataaaaacttccatagggattaactataccagagaaatgcagtagatacaatttaggagtgtgagttctttaattaattacaaagaaacttttattttacacaggggccacccctgagagggctttcccatgagctaggggagtgagtgttcaagaaagcagcttccaatgactcagacccctcacccaaggtgaggattgaaatgagaattaagcaactagaggcctatgcttgcccttactgagagcattctgcaaagcaatacagacaaaaggaggtcacagcacrggagagatgaaacaaatgaggttggagaattgacacatggca

SEQ ID NO: 575048 - DNA, 566 bp, Homo sapiens
ctgatacctggaaagggatgcacagaaatggttaaaaaaaagatccaagggggatctttatggagcagtcacacattggctataaaaaaaaaataactggcagttacatagtgagcagcgagaactgcagctgcattccctcactcagcaatgagaacatctgacagcaatgtgcctgcctcccaggtagaagatgggaggccacctctctggaaaagcagccgttctgacagaaaaatccagaagtgctgaaggtttagggttcccaaaggatgaagctgaatcaacctatagtgaatgtacaaatagacaacacacacactcacacacacacacacacacacccatcttaaatataaacaatcgaggagcacaataaatttaaggaatatcttaaggaaatcaaagcaaacaaaatttaaaaataaacgtgtgaaaaatcaaagtaatgtttttaaataaaagaacactgcaattgctatcctcagaaaggcaagagaaaytattttacccatgaaataagaatcagagttatataaaaggagttgacataaaacaagaataat

SEQ ID NO: 575049 - DNA, 613 bp, Homo sapiens
attgtgataacccctatatcatccctctacttctacatttgctctcaagttctcatcaaaacaaacagygttgttaaatgtcagatgatggcactcatccactcaaaccctactatggttccctaattctatcagagtaaaagctaaagtactcaaagtcctatatgatcttccctctcccttacctctccatcatccatattctgtctctttcccccttcctcattccactctagtcacattggcttatttgcttttcctcaactaagtcaggcacactcccacctttgggtctttgaatggtgattttctgtccctgccatgctcttccccaaggtacctacctggccaacttcccttctctttttcaagtattcgctgaactatcattttctcaagtcttgtctagaccaccctatgtaaaattgtatctccttgagcaccccctagcttccttacctaagccagaatgggagcaccacaagggcaagaatctttgtgtttattactgattgatcccaagcacctaggacaatatctggcacttaatatattcttaacgaataaatgaatgaatgaatggcccaaagtcaaagtcatgcagatcattagg

SEQ ID NO: 575050 - DNA, 613 bp, Homo sapiens
attgtgataacccctatatcatccctctacttctacatttgctctcaagttctcatcaaaacaaacagcgttgttaaatgtcagatgatggcactcatccactcaaaccctactatggttccctaattctatcagagtaaaagctaaagtactcaaagtcctatatgatcttccctctcccttacctctccatcatccatattctgtctctttcccccttcctcattccactctagtcacattggcttatttgcttttcctcaactaagtcaggcacactcccacctttgggtctttgaatggtgattttctgtccctgccatgctcttccccaaggtacctacctggccaacttccctyctctttttcaagtattcgctgaactatcattttctcaagtcttgtctagaccaccctatgtaaaattgtatctccttgagcaccccctagcttccttacctaagccagaatgggagcaccacaagggcaagaatctttgtgtttattactgattgatcccaagcacctaggacaatatctggcacttaatatattcttaacgaataaatgaatgaatgaatggcccaaagtcaaagtcatgcagatcattagg

SEQ ID NO: 575051 - DNA, 613 bp, Homo sapiens
attgtgataacccctatatcatccctctacttctacatttgctctcaagttctcatcaaaacaaacagcgttgttaaatgtcagatgatggcactcatccactcaaaccctactatggttccctaattctatcagagtaaaagctaaagtactcaaagtcctatatgatcttccctctcccttacctctccatcatccatattctgtctctttcccccttcctcattccactctagtcacattggcttatttgcttttcctcaactaagtcaggcacactcccacctttgggtctttgaatggtgattttctgtccctgccatgctcttccccaaggtacctacctggccaacttcccttctctttttcaagtattcgctgaactatcattttctcaagtcttgtctagaccaccctatgtaaaattgtatctccttgagcaccccctagcttccttacctmagccagaatgggagcaccacaagggcaagaatctttgtgtttattactgattgatcccaagcacctaggacaatatctggcacttaatatattcttaacgaataaatgaatgaatgaatggcccaaagtcaaagtcatgcagatcattagg

SEQ ID NO: 575052 - DNA, 555 bp, Homo sapiens
cttcattctttcttccatctctatgtgtgaattttttaaaaagtcttaaccaataaaaggaattattcaagacttctctatttgcccaacacacatagatcatacacatatagcagggacccaatacataattactgaatgatcgaataaagagaacattactaataagttgtttctttccctttttttgttattaatgcttcaaacacagcaaacagcagataaaaatgatgatggattttattgaattatatttggtacatgctacatgctacatctattggagccagttctggcctttctagtttaagagggatacagggtacttggagtgagtacagagattaaaccaatgatatactggaaagtacaacgtattaatccagygtaagagaatagacaacagcaagaaacaactaaagagacacttactactcaacaaatgtacagaatccaagagcttagagatcatctgacctaataaccacctcattttacagaagaggtaactgaggctttcagaaccaaggtgactaaaggaaatgccaaggcatc

SEQ ID NO: 575053 - DNA, 579 bp, Homo sapiens
agtgagtacagagattaaaccaatgatatactggaaagtacaacgtattaatccagtgtaagagaatagacaacagcaagaaacaactaaagagacacttactactcaacaaatgtacagaatccaagagcttagagatcatctgacctaataaccacctcattttacagaagaggtaactgaggctttcagaaccaaggtgactawaggaaatgccaaggcatctgggatgcattctaggataccgcttttcaaactgtgggtcaacatctattagtgggttgtgaaattagtttgtaggtttggtcaatttttttaatgaacaaatgagaatagaacagaatagcaaagaaaaaatctgaatgcattttctataagggtaggtgttactgcataaaacttttgtttcagtttacacacacacacacacacacacacacacacacaaacatacatattgtgtcctgagtcaggatgtaaaatgcacctcatactatgaatcaagttttaaaaagtttgtaaatcacagatcaaggaagatgagggcagtgactgataatgcattgtgttcagagccca

SEQ ID NO: 575054 - DNA, 625 bp, Homo sapiens
agaataaaatacttaggaatacctttaccgaaagatgtgtaagtgttatactctaaaatttaaaatgcattaatgaaagaaagtaacaatgatctaaatttaggatctcaaagtggctggacagaaagtcaacagacaggggcaggagggaagggtctggagagttaccaaactactctcaggagacagtcaggcatctgaattacgcataccatttttgacaaatgcggtttgagatgtggtttgcatgcaagatgactaggtttagagtcatttaacagaattgttttacggattgaatatctgagtcctgctcaaaattgaaatgttgaagcccaatcccagcatgatggcattaggaggtgggaactttgggagataagcagtgaagggtgcaaraatatgctgccacttggtaaaaggattattttgagctaaattcacttaagaaaacagcagacgcaagaagcgtggcactctggcctccccctttttctacctaaaagtagaagataaaactctcatgggaaaaaatgtcctccctataccagaaggaaatctgtacaaatcttatgcaaataacccctccgagttaattttccaccattaactgccctagcccaag

SEQ ID NO: 575055 - DNA, 625 bp, Homo sapiens
agaataaaatacttaggaatacctttaccgaaagatgtgtaagtgttatactctaaaatttaaaatgcattaatgaaagaaagtaacaatgatctaaatttaggatctcaaagtggctggacagaaagtcaacagacaggggcaggagggaagggtctggagagttaccaaactactctcaggagacagtcaggcatctgaattacgcataccatttttgacaaatgcggtttgagatgtggtttgcatgcaagatgactaggtttagagtcatttaacagaattgttttacggattgaatatctgagtcctgctcaaaattgaaatgttgaagcccaatcccagcatgatggcattaggaggtgggaactttgggagataagcagtgaagggtgcaagaatatgctgccacttggtaaaaggattattttgagctaaattcacttaagaaaacagcagacgcaagaagcgtggcactctggcctccccctttttctacctaaaagtagaagataaaactcycatgggaaaaaatgtcctccctataccagaaggaaatctgtacaaatcttatgcaaataacccctccgagttaattttccaccattaactgccctagcccaag

SEQ ID NO: 575056 - DNA, 625 bp, Homo sapiens
agaataaaatacttaggaatacctttaccgaaagatgtgtaagtgttatactctaaaatttaaaatgcattaatgaaagaaagtaacaatgatctaaatttaggatctcaaagtggctggacagaaagtcaacagacaggggcaggagggaagggtctggagagttaccaaactactctcaggagacagtcaggcatctgaattacgcataccatttttgacaaatgcggtttgagatgtggtttgcatgcaagatgactaggtttagagtcatttaacagaattgttttacggattgaatatctgagtcctgctcaaaattgaaatgttgaagcccaatcccagcatgatggcattaggaggtgggaactttgggagataagcagtgaagggtgcaagaatatgctgccacttggtaaaaggattattttgagctaaattcacttaagaaaacagcagacgcaagaagcgtggcactctggcctccccctttttctacctaaaagtagaagataaaactctcatgggaaaaaatgtcctccctataccagaaggaaatctgtacaaatcttatkcaaataacccctccgagttaattttccaccattaactgccctagcccaag

SEQ ID NO: 575057 - DNA, 438 bp, Homo sapiens
agcacttagcactcttccagaaatattggaagcatttaaagatcaggacagttttgtactattgtgattattgttattgytattatttttcttgttgcatacagcaagtgctcagtaaatattgattggttcaataaacaaatgcagatgaagtaccaaaaagaaaacatggggccaggcgcagtggctcatgtctgtaatcccagcactttgggaggccaaggcaggcggatcacttgaggtcaggagtttgggaccagcctggccaacatggcgaaatcctgtctctactaaaaatgcaaaaattagccaggtgtggtggcaggcacctgtaaccccagctactagggaggctgaggcaggagaatcgcctgaacccaagaggtggaggttacagtgaaccaagatcgcactgcactccagcctgggtgacagggt

SEQ ID NO: 575058 - DNA, 566 bp, Homo sapiens
ttctcatggcactttgccacgtttcaggagatggaactgggaggcaacacaaaagctgtgggcctggaaaacatgcttctgatggttgtacagtctccctgcacccgctcagcccaggagtgagcctcttcagagctggtcacacttgttggggtcattggagggagtcattgaggactctacacatgagtctctgcacatggggatccctgcctggtgttacccgggaacactcacggacatgttcccttcagccagagtgatgcccttccaggccacaggctcctctgtyggacctgcctcagaacagcctgggctagggctgatgagcaatacatttccacgccttgcactgacctgttcccactgggtcgcagaggccgagcagctgagagcgtgtgcatggctgatgaccgggacactcagatagtagctgtgggggacagccctgctcaggtgtgccttccattctgtttgctttcaagtaaaatgatgacctcagcacaggaatcactggagaaaatgtctgtacacctcactacagtcactttactcacagggttctg

SEQ ID NO: 575059 - DNA, 587 bp, Homo sapiens
attccaagcaggaggcagccagaaagagggaaatctgatctttgcccatattattaagttaacatttttcyaccaacatttgtcttctcccctctaaaattcctcaactgactttaaggataaagaagcaaatctatcgttggcaaaccctagagtgggtgggccatgagtctgctactcactcaaatatcagcttcaagacaaaatataataaccccaaattagctcttcctcatgagcaataaattataaataagttgaagttcacagccagagaacttgagacaaccctgatacagccttaaaaaaaaaaaaatcacatctcaggttacaatataaaaggcctgtctggctttttactcaatattatagttgtcataatggcggtacatgttcagaaactacctcctagtgttttaggaaacatttcacgctactctaattcagagcatggccatctgaaaatgttctccctgccctggaaagaggcaggctgatgggggctttaatgccaactatttgcacttcttacacccatgaaaatatatgaacacccttacttctaagctaccttttgattattccta

SEQ ID NO: 575060 - DNA, 574 bp, Homo sapiens
gtattgtaaactggagtaaaggccatccttgttataaaagagcaaagaccttggctgaattgtgtccatgtgttaagactttatagaacacagaacttaagcgtgatgagctaggatgtctggcagaaaaaatatcttagcagcaaaacactcaggatgctgcatggctacttttaaccgcacgcagtgaaatgtgagaagaaagaaatgacttaaagacataaggtataattaaaaggggagaagaatgaaaaattttggaaaaatttgcagcctggccatgtaaagagtaaaaagatatctttaagaaagcaaaccaaggatatggccaagtgaccatttgccaaagagatgaccatgataggagggaatcaggagatattcaaaaagattataggagaaagatcctaaaggcatttcaaagatccttgaggctgcacctcccattacagacacagagctccaggagggaagaattgttttaggggatggccctaaggcaccccycatgggattgctgcccagagcctctttgggtctttgatccttgcattctggcataatgctccttggc

SEQ ID NO: 575061 - DNA, 560 bp, Homo sapiens
attgcagtcagccacactcttaaacaatgacctcaaattcctctttgccttcattgcagtgacaatgttgttacagctgactaatgtttttttctcagttggcatggctaaccaatattttctgagttaaatacatctctccaggtttccccaggtaggttctgggaaggaaactcttacccctgatttggaagaaaggtccctgggttcattttaaaataataaatatacaagtgtatattaattaaagaaaataaacaaatgacatcatctgtgggtttagaactcttctgttcagctgttggatccaaataggtttttatgatcctggatttacattcagattggtatagtgcctgtgactatggtagactttaacagagagaaaggagwtacattataatctgtatgcaataattcctttcccataggtggcaagaacatgcttttcttcctgaatttccttcacttgggtgtgaacgtaaaaataatcagttggaaagtgtatcagttatttattgatatttattgctgtgtgaaaaaccacccaaaatatagtc

SEQ ID NO: 575062 - DNA, 440 bp, Homo sapiens
cacagggtgaacaactctcttaattagtatgaatttttttctaacttggcccctaaaggcaagttgacacttcatttattactcaacagaagatgcagcacttaggatccactcttgaggatctayaacaagaagagctgggattgcagtggtctcaggatactggagcccaggtggattgttttctaagagaggggcagccctctccagtctgtcagccaagctccaagtccccctcactcttccctcctcatttccacaaagggcatctttcaataagagaaattctcataatcgaactttgctggaatattttcttcacttgatgcaagtccagggcatctccccaaagacccttgatcatgtcagaggtggctcagagctggtgaaaagaaatctgtgtttagtggtaggatacttattttattattttccattca

SEQ ID NO: 575063 - DNA, 596 bp, Homo sapiens
cttcacaatctccaaggatagaaagccatttgccaatattttcttatttttacagtttcagtttttatatttaaatctcttgtctacttggaatttaacccagtatatggagaaacaggtccgattttgttttttttccagttgctatctacttatcccaacaccccttgcagagaagttcattctcccaccaatttgcgatgccacctttctcatctacaagtctccacgtgcaastggggctatttctgggtcttctactttgctttgtcagtctgcctattcacatgccagtataacctgttttgataacagaggttttccagtatgtttggatgtctggtgggacttttttttcttattgcactttcttttcagagttttcttggctttttattcatccattcttccaaacaaatttgtctgccttccaagtggaatttttgccaattgctcaattttccaaaaacgaattgacacctgttcgacttcattgacgacccaagttggctgcttggtcacagagcctggaacatagtaggtgttcaaaaaatgtcaatagacgtgaagtgcctggagatctttggctggaggtt

SEQ ID NO: 575064 - DNA, 596 bp, Homo sapiens
cttcacaatctccaaggatagaaagccatttgccaatattttcttatttttacagtttcagtttttatatttaaatctcttgtctacttggaatttaacccagtatatggagaaacaggtccgattttgttttttttccagttgctatctacttatcccaacaccccttgcagagaagttcattctcccaccaatttgcgatgccacctttctcatctacaagtctccacgtgcaagtggggctatttctgggtcttctactttgctttgtcagtctgcctattcacatgccagtayaacctgttttgataacagaggttttccagtatgtttggatgtctggtgggacttttttttcttattgcactttcttttcagagttttcttggctttttattcatccattcttccaaacaaatttgtctgccttccaagtggaatttttgccaattgctcaattttccaaaaacgaattgacacctgttcgacttcattgacgacccaagttggctgcttggtcacagagcctggaacatagtaggtgttcaaaaaatgtcaatagacgtgaagtgcctggagatctttggctggaggtt

SEQ ID NO: 575065 - DNA, 596 bp, Homo sapiens
cttcacaatctccaaggatagaaagccatttgccaatattttcttatttttacagtttcagtttttatatttaaatctcttgtctacttggaatttaacccagtatatggagaaacaggtccgattttgttttttttccagttgctatctacttatcccaacaccccttgcagagaagttcattctcccaccaatttgcgatgccacctttctcatctacaagtctccacgtgcaagtggggctatttctgggtcttctactttgctttgtcagtctgcctattcacatgccagtataacctgttttgataacagaggttttccagtatgtttggatgtctggtgggacttttttttcttattgcactttcttttcagagttttcttggctttttattcatccattcttccaaacaaatttgtctgccttccaagtggaatttttgccaattgctcaattttccaaaaacraattgacacctgttcgacttcattgacgacccaagttggctgcttggtcacagagcctggaacatagtaggtgttcaaaaaatgtcaatagacgtgaagtgcctggagatctttggctggaggtt

SEQ ID NO: 575066 - DNA, 504 bp, Homo sapiens
tttttgccaattgctcaattttccaaaaacgaattgacacctgttcgacttcattgacgacccaagttggctgcttggtcacagagcctggaacatagtaggtgttcaaaaaatgtcaatagacgtgaagtgcctggagatctttggctggaggttagcataccatctcaacatcccacarcaaatgttaatcctagatgatgattctacaaagagtttaatcccaattacttcagtataactgaaaacaagactgattaataatacttaagaattttttaaaaatagaaaaataatacccttcacattggtgtgcctccaatgaggcagtttactagactttgagggactcttttcactcagtgctcttttaaatgttttgaatgtgtgttacatgcatggattgtttacatagtcactcaacaaatttcatgtcattcattaatccaagttactgcatctcagttaattcaggtgggaaatttctttctcgtgtactctatg

SEQ ID NO: 575067 - DNA, 504 bp, Homo sapiens
tttttgccaattgctcaattttccaaaaacgaattgacacctgttcgacttcattgacgacccaagttggctgcttggtcacagagcctggaacatagtaggtgttcaaaaaatgtcaatagacgtgaagtgcctggagatctttggctggaggttagcataccatctcaacatcccacagcaaatgttaatcctagatgatgattctacaaagagtttaatcccaattacttcagtataactgaaaacaagactgrttaataatacttaagaattttttaaaaatagaaaaataatacccttcacattggtgtgcctccaatgaggcagtttactagactttgagggactcttttcactcagtgctcttttaaatgttttgaatgtgtgttacatgcatggattgtttacatagtcactcaacaaatttcatgtcattcattaatccaagttactgcatctcagttaattcaggtgggaaatttctttctcgtgtactctatg

SEQ ID NO: 575068 - DNA, 504 bp, Homo sapiens
tttttgccaattgctcaattttccaaaaacgaattgacacctgttcgacttcattgacgacccaagttggctgcttggtcacagagcctggaacatagtaggtgttcaaaaaatgtcaatagacgtgaagtgcctggagatctttggctggaggttagcataccatctcaacatcccacagcaaatgttaatcctagatgatgattctacaaagagtttaatcccaattacttcagtataactgaaaacaagactgattaataatacttaagaattttttaaaaatagaaaaataatacccttcacattggtgtgcctccaatgaggcagtttactagactttgagggactcttttcactcagtgctcttttaaatgttttgaatgtgtgttacatgcatggattgtttacatagtcactcaacaaatktcatgtcattcattaatccaagttactgcatctcagttaattcaggtgggaaatttctttctcgtgtactctatg

SEQ ID NO: 575069 - DNA, 359 bp, Homo sapiens
ctctctttgtaaaaacaaacacgacccaggcatgttcactctttctttggaatgtatccatggtgctaaattagattttttgaataccctcacaactggccccaaggttgtgcatggctattgctgactctacaacaggggaattaaaggctaratgtattctgctgactccctggttctctgcttatccaaagggcactgggattcattttggaaaatcctagagattacacacaggctttcttccagggataagttaaagaatttaggaaacacccaggcttctgtcttaacacacttgaaaaaaaaaacaaaacatatcttataaggtgtcccagtgacccaaaataggtaaaaca

SEQ ID NO: 575070 - DNA, 541 bp, Homo sapiens
aaaacatatcttataaggtgtcccagtgacccaaaataggtaaaacacctcccaaggaagcacttttctgtaaaatctggttctttaacccctgtgcctcttctcattctcaaaactgcacaagaagcagcatgcccaaggttctagcccaaattgacattgcattaacactgtcaaaacattaatggaaagtgtcccaggaaggactagagagatttcttctaccccattgttgctgactctgacttcctggttccatcaagattccaaaggrgaggagaaacttgatgcttacctcggggaaatctctgagtataaaaccttaactgaacctaccgagatcaggaagagctcatgttcaaaagctgtcacccctctcccggacagacaggcttgcagggagccccagctctgtccacaggagccttggcctgtgacctgactctaggcttgggaccccctctccaagaggtagggagggcagacctcccaaagcacagggtttcatccagggctctttataatttctaaggctgccctc

SEQ ID NO: 575071 - DNA, 530 bp, Homo sapiens
aaaaagaatggattacataagcagatgcttgagatagctattgttcttttttttttttttttttttttttttttgagacagagtctcactctgggtgcaatctcagctcactgcaagctctgcctcccaggttcatgccattctcctgtctcagcctcccgagtagccagaactacaggcacctgccaccacgcccggctaattttgtgtattttttagtagagacggggtttcaccgtgttaggcaggatggtcttgatttcctgacctcgtgatccacctgcctcrgtctcccaaagtgctgggattacaggcgtgagccactgcgcctcgccaatagttattgttcttttgcaattatacaccatgtgtgccccaagaagcctatgcctctttagaagcaacaaaatgaaggcgatgtcaacatatccgaaagcaaagaggccacctggcaattagccagctaatttgaccaatgtaaataatgaactggcataacttacactctaaaaatagtttggaataactgc

SEQ ID NO: 575072 - DNA, 517 bp, Homo sapiens
gggaatagtaatccaaggtgccaaggtgaccttcaaaaatacagtcaaggctgactgcctgatctggacctgtcattcattttcatttgctcattcccccctcacctcttctttcaagagaaaactatatccattttcaagaactcttaataaatgatgatttgagaataaaggactagaaagaayggagtcatgtgatacactttaattaaaaaacaagtcattgcctcatcaaggttttgccttttactaccagctgccatggtgtttaagtacatataaattagagctcaagctgaagattccaagcctttaaaagaaaaaaagcagcatgcaagccaaatatttctttatcttgacacagaactctattgaatcagtttctacacagcaagtgctggaagagaggagaaagattattgaattcaatcaatttccataaggagtctggtgttgggagacagggcatcatctgcccaagttaaatctacaaatctggctttcaaacaagaaaatg

SEQ ID NO: 575073 - DNA, 493 bp, Homo sapiens
catctaattttgattgaatggactgccaaaaatatgccctacaaaaatgagtagaggcgaggcatggtggttcatgwctgtaatcccagagatatatatatctctgaaactcagagacagtgtcactctggatggtagcagtcattcatataggaacaacatgtgggagggggtgagatcaggcaggaaaagaaagaaaatgagaagagatgaacatcaagaatggaataccaaaattaaaggaagaaaagaaggcagaatggagatgtgagactgataaaattggaagttgaaagaagtagaggttttggtaaaataaaagaacaagaattatgagaataggactgtaagatctagatagttaaggacatgatcagaaggtcagataaatgagtttaagtcaacagggtaaccaaggcatggagagacgggcttcagccctataatctccatcatttccctcaccaaatcaacaattaacatacataaaaat

SEQ ID NO: 575074 - DNA, 491 bp, Homo sapiens
ccagttcagtcctcacatttccattgctcttacaccttaactggtgccttcccttctatcgccccatttagtcctcataccaccccagggaagcaggtcaattctagagatgaaaaagctgagtccagacaaggggaatacggaggttattggctaacctgtgaccaagcagaaattcagttctaggtgtttcaattctcctttccctccataactgccttttctgcttgaatcaccctgtcccatgcaagcatgaagatatgcatggggtttcgtggtgccacagagtttgggtctgtraataaagtgataaaaacaatgcttcccaattacctttgataatgctactctcatcaatgagtttgattaagctaatcctatatttggattccacctgacatccaggcttaatttgtcagtttggacaaaagggcattttcaaggcttaaagacttgtctaacacaaagcttagcgctagtgagttcaaaaa

SEQ ID NO: 575075 - DNA, 563 bp, Homo sapiens
taactgtgtgtttttttctttcctgctgcttaattttctttactttacaactttttaatatttatgtagcggtataaatattaaatagtatatttaagatakatatatatatatatatacacacacatacacacacactactcttaaaacccatagaaatagagttgatgtatatcaaagagaaagcaagtactgctatttttgatgagacatcaattacaaagatggacaagatcttagggatgatccactcatttcttttattcattgattcattcagtcagtcagtcaacaaacagctgagcacctatacctactatgcctggcactgtgttaggtgtgatccctgtgcatattttatgccatactcttggaaacttttgcattcatttaattcctgtaaccatccctatgtggtaggtactatcaccatcccaattaacaaatgaggaatctgtccaaggtcacacaactacaaagcaggatcctaaccaaggtaactaaccctagagctggacctcttaactgtgctgccacttgagtctcctggaggccaaggcagg

SEQ ID NO: 575076 - DNA, 472 bp, Homo sapiens
ctggcagagaagccaattagggaaatatacttaacacaactagagaggtaagttgcaccagacatctatactaaataagggaaycttgctttcataaatttgaatagaaaaacagaaagtaacacaagcaacagatagtttaaagaaaaacaaaatgaacaaaaacactcagatgaccaaagagaactgactttaaggaaattgacattattagaggactagaaaataacttaaaagttatgttagtattcctagaggattgagagagtattttatacacagcatgcagaggttaatataaagatgaacaaaatgaaagaaggaagagtttttggaaaattaggctgtgactattgatataaaaaatctactggataaatgaacaaaactatattaaacttggaatgtgaaatgagaggggtgaacattgaacacagatctaagtgtatataggaaaccagttgattattta

SEQ ID NO: 575077 - DNA, 631 bp, Homo sapiens
tgcagtgacaatagcattgtgtttctgggtcaaagttaaatactactaacatttcttttatttatggaggaaagaaaagacagcactgccatatgctttaatcatttacgtgagttgctcaacaaaaatttgaaaggccttcaggctcaagcagtgtttgctgctgagcattcaattgcaattgcatgcttcctaactgagctgaaaacagcctacaactaaatttccatttcaattttctaagcttgataacttagagttacatttggagtaattctatagcagggcaaaggagatggatattctagaaatactaataatttggcttgaaagtcaagttgaaattcacttaatgatatttgagaaacgtattttacctagatataggtgagacataaataacatgatgcctagtataattaaaacactgaatatattttctttgtagactatatgtacacagaaaagtaaggtagtaagtcagttaycctggttatttatgttaaataaggactttgcttggtttggactattggaacaatttctagttttgaatgcaaatataattctctattttctatttcatttttgaagtaactttttactaagaaaacaatgaaaccttaataga

SEQ ID NO: 575078 - DNA, 637 bp, Homo sapiens
aggattattttatattaaaattaagatgctttcttctgtttcgtctcttataattcttctttttgtgttttatctccatgccaattttacatggctgtgtgtgtggactcagagtgcctcttgaggaccagccaacttttttctctctgctgcatacctaagtattcagttccaaatattttaattggcatggggaagtaataaataaataaataaatctttcttagaacttaaatttaagtcatgttttaattctacatttttaccatgaattgaataaataaatatttaaatacattcatgaactaatggataaagaaaagtttatatattattaatacattgatttgattcaactaggacaatataaagacctgatttgtttgtatttaattagcaagccattattccagcattatagattgttatagcaatagccctcaatttaatcatggctgtttgtatccatgctattgagaagactaaaatccatttatacttaacttggtcacrtgactcgctttggacagcaagccctggggtaacaggtatatgtgatagaaggagggacttcaatgtgcttctgctttggaatataccttactttgctgtttctttgaaaactatgatcaccccc

SEQ ID NO: 575079 - DNA, 617 bp, Homo sapiens
gcaactgtgtctatgattgtgatgaattagtaaaacttacgtatgtaatggatccaaaacttgaatttactgttttatgtctctgttaattctatatgttagaaagcagcaatgatcagtatttgatctaaggtatgtcaaaatttttccttgactttttgccacttaactttcataatattagtcaagatggaaaggcaacttgaacaatttcttgtaatgaaagtaccatcatttatagaagtatctcttaggcattcacaactacctgaagtagtcatctctagaataactccctcatggtctatcactctctaacacagtgaaataaaataaggccagataaaaagaaatatttccttagggaaatatttccttagggaattgttgcaactgtgatttttttgaatagttgaatagcattaatcttaactataaacaaatgtagtatttaaaaataaattctcaatttgacatgctaaataaattccaaagtttggaaacttgttgccagtccmtcaatcacctttcttgagtgcctgctatgcagggagtgtcacacaagttcagtgaacatctatcacacaatttcatgacaatgaatgttaaaacttaac

SEQ ID NO: 575080 - DNA, 545 bp, Homo sapiens
aagcagaaagactgcaaaatgcaccttcatatgcccatcacccattcccaaacaccaccagcgtcacccacaacctttttactctctgcttcttggagtattttgakcaattcctgacatcatattgtttactccagaaatatttttgtatgcatctctaaaagatagaatctttaacatgaccacaatactaccatgatacctaaaacaaatatgattatttccttaatataatcagacatcttataaatgtgaaaatttcaaatgatctccctttgtttatttgtgtaaattatagtcgaagtctgagtttttaattttcttgttatgtatacatttctttctatttctattttttcccggtcactttatttgttgagaaaaccacaatgatcgttctgcagaatttctactagttggatttttctggtttcacttttgtggggtcagataatatgttcttatgttcatatataggataacataggaggtgctgtgttctttaatcaggaggaataacactggaggaatgactggttaatggt

SEQ ID NO: 575081 - DNA, 432 bp, Homo sapiens
ctagcctggccaacaaggtgaaaccctgtctctactaaaaatacaaaaattaaccgggcatggtggcacaggcctgtagtcccatgtactcaggagggtgaggcaggagaatcactygaattcagtgggtggaggttgcagtgagccgataccatgtcactgcactccagcttgggggacagaggaaaactttgtctcaaaaaaataaaataaaaataaaaataaaacccccagagtttcttcgttaatgaccaagaaaatgactctgtactttgaggtttacaatggtctttcccattcctatgtcattacagaattatttttaaaaatatgtcaagtaggaaataattattcaaatcatttttacaggagggaaacatgtttatggtgataaattgactccatcagtggaggtactcagactcaaatcca

SEQ ID NO: 575082 - DNA, 484 bp, Homo sapiens
aggatgtattcactgaagcctaccatgtatatgtaaccattgttagttatacagaaggcatttttatgttggactttgcccccttatctgtgcttgcaccttgatctttcaagctgttcctttgttagaaaaagaaattctaccgaggacttgtcccagctatctgcctaactggttcctttctctctcttctctcaagaccatgtcacccacagaacctagcatatttacccacagtctgtttacataaaatatttgttgacctttgctttataaggatcctgatcactgaaataacataagacttgctttgtggtccaatayagatccattttgaaaaaatattttacatgtccttgaaaagaacaggtatcctgaagttgtggggtacaacttttatatgcttactaatgttgagtctgtttgttttatcaaaaactgagaaatgtatttaaatatcccactatgatttatttataattct

SEQ ID NO: 575083 - DNA, 550 bp, Homo sapiens
gaaaacagtgtgacttcttaaagcactaaaaataaaattatctttccatacagaaatcccactactggatgtctatctaaaggaaaagaaatcattatattaaaaagatacctgcacttatatgtttatttcagcactcttaacaatagcaaagttagagaatgaacctaactgtctatcagtggatgactggataaagaaaatgtagtatatatatataccayggaatactacacaacctaaaaaagaatgaaatcatgctttttcagtaacatggatggaaatgaaggacattattttatgtaaaataactcggaaaattgactgctggatgttctcactcccaagtgggagctaagcagtgggtacacatgaacatacagaggggaatagtagatactggggactcataaagggggtaaggtagagggatgagagttgaaaaattacctgttgggtaaaatgttcattattcaggtgatgggcacaccaaaatcccaacttcaccactgtgcaatatattcatgtaacaaaactgcacatgtaccac

SEQ ID NO: 575084 - DNA, 588 bp, Homo sapiens
cttaactggacacttgcatggaagacccatcacggaggaagagggtggaagtcctctagccttggtaaggagaaggatggacsaggacctcctgtaagatggcaggaaagggagagtgtggacagctgagaaggaagccagagaacaccagatcccctctgcctttaagcctatgggaactgcagcctggcctggcagccacagcagtcacacccaatggggcagctgggccgggagcaggattgtcacactctgtgttgcccatccacagcgctggccttcagatggaggaagtggcagcaggctggctgcagtcacctgttgctggacaccatcccgggccccagctggggcttcgtgctcaggcactgcataggattcaactcccagagccaggagctgccctccccactcccctgatgtagccgatgatagtcctgactcacctgctcttggcctcccacttgtccctggctgtcatctccaactccacctccttgtggtgtgtccttcttcctgatctcaccttactgtcatagacttggcatttttctggagaagtaaagatgttgaacataaagatagggc

SEQ ID NO: 575085 - DNA, 513 bp, Homo sapiens
ttcgtctgcttatgacactggaaagagcccaggaagtaacagggttgatggtggcagcaccaaaggaaattgaaggaactctgttgagaagaggtgggagaggtgacagctgcctggcctgcctcgggaggaggctttcccagtcagatcaggatggtactgacagccccttctgcagagaggttgctcacagaaccacaattcttcatgagcaagaggagtccgagagccctcaaaattgcagcaacagcagagggtcctggctggggctgcagcagacacctcagcaggccacgagagctggaggtgtgcggatgtgggggccttggctttcctggctgagctctagcccttggagaggacagaggcccatccttgcactcctgaggtcacaatacactttgatcatcccctcaaaccaggtaccccctggaaggattcggcyggcgaccctctgtccaggggcagcttctccacctctttcctcctccaaggcaaggcgctttccccagg

SEQ ID NO: 575086 - DNA, 617 bp, Homo sapiens
taagtactagaggagggaaaataagctgtcatcctatagttttatacccagcaaaaatatcttaaaaaacaaaagtgaaataaagactttttcaggcatagaaaactgaaagaatttactagctgtagacctgcacttcaggaaatgttaaagtccttctggaacaaagacaattataacagacagaaatctggtcaatacaaagaaatgcagagcaccagaaacagttaatatgtgggtaaatataaaagtggtttttaaaaaatctctttaagagatcattgacagtttaaagaaaaaataataacaatgtatgatggggcctataacatatatgtagaagttataaatgataaaacatgaacctatgataaaagccaaggcagtgactactcatgtgggaagccaggtggtttgagctggtgatagggcagattcaggaattcctggaatggctgacaaggttctatttcatgtgggtattggttacaaatgtgttcaccttgtgataactcatgttaagccatacatttgtgttgttttataacacaaaatctttaagagcaattgaaagtgaaycatttcatttttgtgaactatatagatgtgtagaagaa

SEQ ID NO: 575087 - DNA, 507 bp, Homo sapiens
ctgagcacttccctcgtgccaagcaccgcactaagccctgggtatgtaacaactcattttcactccacccagtgaatagcacagcaccgttaccaggaagctggtggcgaacatataaaaaatggaaacatcagtttcacagtaagtgaaaaagagttgaaaacgaaattttatacatatatgaaatcataagcatatacatatatgtatatacaattctacacatattatatgtaaatatcaaaagtatatacatatattcaagcacatctgatacatcaagaaaatgtttaaattttctytttaaagaaaattttaaaaattctttttattctttttattatttttaaaattaccacccaggtaaaattgacttcttctggaatgtgtccagttctgtgaatgttaatgcatgtagagatttgtataaccaataccatgattaggatacataaaccacttacttataataagaattaaaatggtaaacttttgttaaaaatggga

SEQ ID NO: 575088 - DNA, 454 bp, Homo sapiens
agtaagggtaaggagggatgtctagagtatttgtaagcaaccaaagttaggtcgttatcagcttaaaatagcctattataagactctttatgctaccccatggtaaccacaaagaaagaaatacaaaagtgagaaagaaagaggaaacaaagctcaacaccacagaaaaaaaacaccaaagcacagaggtaaacaacaagaaaggaagaaaaatgaaggatctacaaaacaactggaaaacaattaacaaaatggcaggaataagtccttaccaatcaataataaccttgaatttagtcaatagctcacacmtgtgatcctaatgctttagaaggctgaagcaggaggattgcttgaggtcaggagctcaagagcagcctatgcaacatggcaagacatcatctcaaaaaaaaaaaaaaaatggagggggaggaggaggagagaaggagagcag

SEQ ID NO: 575089 - DNA, 543 bp, Homo sapiens
caataaaacaacaattatttaggcttagctgcacgttttaccaatttctatggatataatagtttcttgtatcccatgtctttttatttgctcaagtacattttctagcattaatttcagtgagagtttatggccaaagaaatattctaagtcctgcagtctgaacatgtttttatttkgtcataatacttaaatagttgattgcatatagaatttaggttcaaaattattttgtcttagaatattgaaattatttctacagtgtcttctttttaatatatttttgtaaataatttcaaacacaagaaatagctatagcagtgtaaagaactcctgtatatccttcatccagatttgtccctctttgtcttatttcccacatttgttttcttattttctttttcagttttttcaacttatctttttatcttttttcaattaaattttttttttcctgaatgatttgagagcaagttgtagacatctttctccctttacagctatgatactttggtgtgtattttctaaggacaagaatattca

SEQ ID NO: 575090 - DNA, 622 bp, Homo sapiens
cttatgctatactcatttgttttctcctcttcctcttgctttaaatatmaaataatcctaaatggcttttagcaaaaaacagcattttcctgctccacttttttcttgttccactgctcatctccaaaggtaagcactgtaaattcttagctgtttcttctgatatttatctacatacatctagaaataaataaaggaaggaaggaagggaagaaacaaagaagagaaaagaaaaagtaatgtaacactgtttcttgacttatcagtttgagacactattcctagtgatttattactgtgaaatgaggattaattctcttacactctttcttttcttcccacttccttttttcctatccccttgatatagttatatcatagtttttggttaaattaatatgattgtgatcatatagttattgcagcagagccatatagtatactatacttcctatcttgtccaatatttgtttttcctgaaaacaataattgccttttacccactttggcttaactatctttgtgctttttggcagatcctgttcacaacctcccaggccatgtaatgctggaggtaactgtgcctagtaatattgctacaatgctgccatacaactatgca

SEQ ID NO: 575091 - DNA, 614 bp, Homo sapiens
gctgagggtgtgggcagattcaggcaccattaacaaagatcctgtgcttggcaagctcacaggccagtggggagaagggaaaaaggaagtaacatttgttgcctgaggattaggtctgggtactatgccagcagcttgacatgcattatctcatttaatcttaaagccacagtctctggagggtaaagtgattagtccaaggtcatactgactaattacaggaaccctccaaagatggcgttttgcctcctataccaggtgtctctgtgggagccatctaggtctttcttgcattcactccctcactgcatatgtagatattgccacctgcttacatcccatcggtgactctctgttgctctctaaattccatgccatgcccccgtgtgatcccacctccctcttatctgccgctttccatgtctttaatctgctctagccrcactgtctcctttctgtccctgaaatagtcaagcttattcctgcctcaggatctttgcacctgctgttcctgaagcctgggaagcacttttcctacatcattgcatggcaaggtccttctcaatcttttcatctctgctcaaatttcacctcctcatggaggccatttctga

SEQ ID NO: 575092 - DNA, 433 bp, Homo sapiens
ggaaacacagtgagactccgtctctacccaccccaaaaaagaaagaaagaaagaaaaaaattagccgagtgtggtggcatgtgccaatggttccagttactcaggaggtaagcctgggaggtcraggctgcagtgagccatgttcatgctactgcactgtcatctgggtaacagagggacaccctgtttcaaaaaaattaaaaagagagagaggaggaaggcaccagactctttttagcagccagatctcatgtgaacttattactgtggggatggcaccaagccattcatgagggatccacctccatgagcaaaacatctcccactgggaccaccttgaacattgcaggtcttgtttcaacatgagatttggaagggacaaaatatcaagccataccaagggagtaggaacagacatggacatggggcaatg

SEQ ID NO: 575093 - DNA, 570 bp, Homo sapiens
cttagggctctgcccgctggtgagatcaggtttaggaccagagtcaatgctgtctctgccttctattgtcagtgcaatccaatgaatgtctgcacaatgtaatacacactacaaaccactttttatttatttgcacatgtaattcattatcttatttaatacaccaaatcagtggagcaagaattagtatcctcacattttaaataagttacttgtcccaggccacagaggtaggaagcaatggggtgggagtaaaatctgggtccctttgactctaagaggctggatcactcgccctccagattggtctctcggcctccagcaccacccacaagccagagacgggtttcatagaattaccaaccgcaccctgctgtgcctgtttaaatcctccaggagctctccattgcctacaggctcaartcccccttctcggcctgacattcaaggccttggtgatttggtccctgccttcccagcctcaagttcacttccaattcaccaccctcaagaccttgcgtctgctggtccaccatgctgaccacctgtgctgttttcatgcacaggtcc

SEQ ID NO: 575094 - DNA, 345 bp, Homo sapiens
caggtttaatcaagcaagggcttgatagaagtattcatcccacccccgccccgattaaatcaaaccacacgcacacaaatagaggctctggcacatcctgacagaatatagcctctgggatgtcaggaacccccaacctacggccattggcgtgtctgcaccggccaggaagcccaggcccccggctccttcctggatcacgcccctgccccgcccaagggtgaagaggggcggggccagccggcgccctccgagtgggccttacaccaggtcgggcctggccsggccccgcggcccagcggcgccggtgggacggggcctccgtcagggcagtgtcagtaacgg

SEQ ID NO: 575095 - DNA, 614 bp, Homo sapiens
gattgaggtaagtctatattttggcagacaagaactcttggtggcctctccattcagtgctagaatgttcctactatcacaccacttagttgatgtttgtgatttcaagtgctcaagtggtcagctcctctgataccactcctatgacactaaggggtcaccaggaatatttgtggccatgggcatatgagctccaagaaataaaagattcattaagggctgccatagagattttctggttcttttgtgacttgagctgaaattgtaagacctgtgtgtgtcatttcctttctgtaagtactctagtcctcccaggagcagcctcctgctccactgcctttggagctatcactactgccataagaaccaaggacagtagctatttgttcccgagacacttggtgcactatccacagtgacccatagcaataaagttaatttcaatacaactacctatgamaaaggaaagtgaaggatgtgtctaaaacaaccctggaaccccatctttgaggatctgttttgtacgaccactcctggacactagcgtatgagttatttttctgagataatttaagagaattgtttaagtagggtatgagatttctagggcttcc

SEQ ID NO: 575096 - DNA, 421 bp, Homo sapiens
ccatcccttctcccctatgatcatggattaacaattagctttcattagaaacaatggagaccagaaaccaataggatggcataatcaaagtgctggaaaaaaaataaaaaaactatcaagcaacaatcttatatccagcaaaactctctttcaaatatgaaggtgaaataaagacatttctaagtaaacaaaaactgagaagctttatttgctagcagacttcctttacaagaaatactaagggaagtaatacaggytgaaagcagtacaccccagacattaattcaaaaccacacgaataaacaaaaagcaccagtaaaggtaattatataataataaaaagatagtataaatacatattctcctttctgcccttaactaatttaaaaagcaattgtacgtaagcatggaattaccatat

SEQ ID NO: 575097 - DNA, 612 bp, Homo sapiens
aaattaagcaagacacttctaaataatccatatatcaaagtagacatcgcaaaggatattattaaatattttcaacagaataacatagaaattattatatatcaaaatgcgttagagaaagctaaagcaatatttagaaagaaatttattgctttaaatgcttatattagaagacagtatagtaatgaatttttaaagttctactagcaaactaggaaaagttactcaaagcaagtgaaagggaggaaatacaaaataagaactgaaattaataaaatagtaaaaacacaagagagaaaaaatgagtgaaatgaaaacctggttctcagaaaagataagaaaaattagtgaacttctgataaactgctggatcatggattagcaaaaaagcactagtaggccagtcaatatatttgagtaagttctatagattaagaatattattcaatattaattttctaattttgataattgtwtcaggtttaagatgttaatattttgggaagttggattaaaggtataaagaaactttgcactatttttggcaacatttttgtaaacctgaaattatttcaaaattagaactttttttaaacaagagaaatttctaga

SEQ ID NO: 575098 - DNA, 567 bp, Homo sapiens
tcatcagaaaaatatgcagctttacaaataagggatggctgtcatagagatattacaatgatagagagtatcaactctgggcccagacagcctgagctaagatccggctttcacatctactcctgtgtgtattcggtccatggtattgagcctttcaaggccttagttttcttatctttaaaatggagacaataatagcacttrtttcatggagctgtaggataagtaaattagttaatgcctgtaatgagttttataacagcatttgcataaaatttatcattactttaattagactaataaattctgttcccacagtgcaggaaaaaaatttcattatcttacttctgattatcaaatcagaagttttgagaaagtctggatgctaagttaccaacttaaaatgagctagttctattcatatcttgagataaaaccataatttaataatgtctaagaagagtttataaataatattatgcttcctttagatttctccttaaatcttgctttgtgtatatcttatcagtaaaatggtgtaaaagagttataataaagaatttacat

SEQ ID NO: 575099 - DNA, 567 bp, Homo sapiens
tcatcagaaaaatatgcagctttacaaataagggatggctgtcatagagatattacaatgatagagagtatcaactctgggcccagacagcctgagctaagatccggctttcacatctactcctgtgtgtattcggtccatggtattgagcctttcaaggccttagttttcttatctttaaaatggagacaataatagcacttatttcatggagctgtaggataagtaaattagttaatgcctgtaatgagttttataacagcatttgcataaaatttatcattactttaattagactaataaattctgttcccacagtgcaggaaaaaaatttcattatcttacttctgattatcaaatcagaagttttgagaaagtctggatgctaagttaccaacttaaaatgagctagttctattcatatcttgagayaaaaccataatttaataatgtctaagaagagtttataaataatattatgcttcctttagatttctccttaaatcttgctttgtgtatatcttatcagtaaaatggtgtaaaagagttataataaagaatttacat

SEQ ID NO: 575100 - DNA, 569 bp, Homo sapiens
ggtcaataactcactccaaaaatatgttttgcctccaaagctcacattgagggagacattcctgcgcatgatacaaatggttctgacattaaaaaaagtaaacaagtaagaaaaataaagatggaaaaattctgtggtcagttcacaagtgcttttttattgtttgaggcagggttaaagccttttataaagacaaggatatatgtgtggctagattggatatgacatctgactcgtctagctgcccttgcacagaattctggctgcccatattatgccagggagaaaacatgtgttgatgcttctaaacaatgacccagggtgggaccaaatgcagataatttaaagcatttttccagtgctgttttgtagatcaaacagagaaaaggtactcaaatccagttactaatggatttgagagataaatgcaaacattcaacattctccaatttttcatggttttgaggattttaatgttaacttgtctaaagaactgattaacaaaggttgtgtaatctcaaacagggactcctgccagcctcawtacatgtcattcaaggcctgtgttg

SEQ ID NO: 575101 - DNA, 547 bp, Homo sapiens
ttacaatggggttacatcttctatcaaatgtgtacggctttgtaaggttaaacaattataggttgaaccttcgtaagttggagagcatctgcacttggtacagatgagatgttcaataaatatttgttaaataaattaataccattaaaataatcatgtacataaaatttacacagaatccacaaagtaaggaatgtcaattgctggacactcatcttttaacctctggtatgacttcagacatttgaaacactctgaaaatatatacggattaaatatttgccccattgaacaacaaagagtaataggaggcaacagccacagttcctaaatcgtggtggtgtttttaccccaaacactttcctcccacaaaaacaaagcaatcacaacatctagttgaaaagagagaagtgcagtgaacattatcatctggcctaaagagctgtaaacatcatacagtgggaagggacattccccagaaagcacattcctcrgtctttgttaagtgcaggccgtgaatacatggggaactggaaaggaataaaca

SEQ ID NO: 575102 - DNA, 365 bp, Homo sapiens
ctgggccttgtcaagtctcacccacttgtttgtagggaaggraaaacaggggaaggaagtcagtcagcagggaagggatactggcaaaatttgtcgtgaaggtgatcagcaggcaaggctgtggggctagcctcccagaccagggaggctacacaggtagtcacagagtgggcaggctcattgtcgtgtgacaaaccagagcctcaagaaaacataccctgggctcccagggcagctgaaatgaggcttgtcatcttagaagaagaaggggaggtggggaaggaaagagaggagaaaaaaatgcagggcaagttcctcatatagtctgtcatataatctgtcagtggaaaatggaaaagctggtc

SEQ ID NO: 575103 - DNA, 570 bp, Homo sapiens
gtggagcaccaattcaagggttaggatgcaccatacctggaaagaaagctagcaaaaatgccaggcaacctatccttttgacaagagggcatttgactccaatgctcagacccgtccagtgcagctttccactgggagaggacagattatacagcctgctcagacaaatgctgggccttgtcaagtctcacccacttgtttgtagggaaggaaaaacaggggaaggaagtcagtcagcagggaagggatactggcaaaatttgtcgtgaaggtgatcagcaggcaaggctgtggggctagcctcccagaccagggaggctacacaggtastcacagagtgggcaggctcattgtcgtgtgacaaaccagagcctcaagaaaacataccctgggctcccagggcagctgaaatgaggcttgtcatcttagaagaagaaggggaggtggggaaggaaagagaggagaaaaaaatgcagggcaagttcctcatatagtctgtcatataatctgtcagtggaaaatggaaaagctggtccaagtctgagaaattactgcatctttgagcagatc

SEQ ID NO: 575104 - DNA, 600 bp, Homo sapiens
ctttttgcttggctgtcatactctcttgtctgccatcatgtaagacatgccttttcgccttctgccatgattgtggggcctcttcagctatgtggaaccgtgagtccactaaacatctttttcttgataaattacccagtcttggatatgtctttatcagcagtttgaaaacagaccaatacagtatatatagattttttaactccacaattgataattctttccattttctcagggcatatttcttctcaagaaggtacacccaagsagggcattcagctggaactgatttgtctggttcctcatgggacagcaccttgtccaccatactagagtcctggtggtggcccagctgtcctgaggtttgcacggccgtactcagtagaacacaccacagctgtggagtcccacatggagtatgagcacagttctgtccctagctgtcttctaaaccttaggcaaatgacttcaccattttctgcctccatctctgggtataaaatgagaagatagaatcataattggctttgctcatgggattggtatgaggcccaaatgagataataattatgaaattactttgaaagaataaaggtatta

SEQ ID NO: 575105 - DNA, 583 bp, Homo sapiens
catttttgcaagttcccaggtgatgccgatgctgagggaccaactttaagaaacactgttttaggacaacctacagaggggcccttatttctttttaaaaagtaaaactcgtgacattgctttttactcttgtaaaatcaagactgtctaaaatcagagatccaaaaatctggttaactgagggttctagtgtcttgagttttggtaaatggaggttttattttatccccaatagcagtctgaaagctaatgatacctaaataataacaataataataataataataataataataataataaaaggttgttccagctctttatctaaaacaaaaaccataaacattcaaattttagtaatgtgcaattacattaacaggaaaaaagaagaaaacagtttctttggatatgtagaatagatctgaaccatcatttatggagtataatcaaaaaataacttgcaggaaaaatttcacagaaagactttggacttccccaaaactgacagaatcttrtatgaagaaatctgagcagtgggggtcctcctgcagagtctgaatgggaattttggctttgctctcaa

SEQ ID NO: 575106 - DNA, 600 bp, Homo sapiens
ctttttgcttggctgtcatactctcttgtctgccatcatgtaagacatgccttttcgccttctgccatgattgtggggcctcttcagctatgtggaaccgtgagtccactaaacatctttttcttgataaattacccagtcttggatatgtctttatcagcagtttgaaaacagaccaatacagtatatatagattttttaactccacaattgataattctttccattttctcagggcatatttcttctcaagaaggtacacccaaggagggcattcagctggaactgatttgtctggttcctcatgggacagcaccttgtccaccatactagagtcctggtggtggcccagctgtcctgaggtttgcacggccgtactcagtagaacacaccacagctgtggagtcccacatggagtatgagcmcagttctgtccctagctgtcttctaaaccttaggcaaatgacttcaccattttctgcctccatctctgggtataaaatgagaagatagaatcataattggctttgctcatgggattggtatgaggcccaaatgagataataattatgaaattactttgaaagaataaaggtatta

SEQ ID NO: 575107 - DNA, 614 bp, Homo sapiens
ggtaggcctccagcaatgctatacaattgaaattttatttgaatgaacattgggcacagccacaaaggaaagaagagggcaaaataagccagaatgttccatgagtaataagcatggaagctggcgagggggtggcagaagtagcaatccgttctccctagaagatgaggctctctaggagtactgcatgtataagagcttgcattcttccagaggggcaacttctttgcccataaattcagcccactgagtctctgtgcagggttgggcagttgcgaatgaagtggtgtgagttgaggggagggaaacaggacagaagtcctattaatcaatcagtaaaccaactgatcaatcaacctgatttttgctaccatgaagatggccctggactcagaaaaaatgatgatggctttcaataaacttttctaagaaagtgtcatataaggccagggagaggagtaattgacaayataagaaactgtctgcagaaatcccttcttatcatcactctctacacacacacacacacacacacacacacacacacacacacacacaggcacaccccaataacaactaaattctccaatcatgggggcaatctcatgcagggt

SEQ ID NO: 575108 - DNA, 623 bp, Homo sapiens
tacatctttattgtgttgctcaatgtgtgcacatgtgcacatgtgtgcaggcactaatgtgtgttgcatgttttgcgtgcatgtgtgttgaatatgggcatgtaggtgtttgtatgtgtgttgtgtgtgtcttctgtgtgtctttatgtaagttgtgttatacaatacacatactacatgttgtgtgtctacttcgtgtgtgtatcttgtatgtgtgttatgtgtatacaaggaatgtgtgtgtgtgtgtgtgtgtgaacatgttgatatcattacgccaaatcagaactcagagtcacccaattcttgattacctgtcagagatgcagttgctttactgcatttgggyatctgacataatttttaatgtgttttcactttgctccatcctattcatgtttcacaggctttcaacagaaatgtggcagaggataaacctcttcatatagacagcacttaatcagtctgtgcctctcgctggcacacttttctctattgattttaaatttaaacaatgctctgagactgaacaatgcacctccacaaatacagctgacttgactgaaggaggtcaggaaagatggagatggcacattccaatcttgagatgagtggcccagctg

SEQ ID NO: 575109 - DNA, 621 bp, Homo sapiens
ttgtatgtgtgttatgtgtatacaaggaatgtgtgtgtgtgtgtgtgtgtgaacatgttgatatcattacgccaaatcagaactcagagtcacccaattcttgattacctgtcagagatgcagttgctttactgcatttgggtatctgacataatttttaatgtgttttcactttgctccatcctattcatgtttcwcaggctttcaacagaaatgtggcagaggataaacctcttcatatagacagcacttaatcagtctgtgcctctcgctggcacacttttctctattgattttaaatttaaacaatgctctgagactgaacaatgcacctccacaaatacagctgacttgactgaaggaggtcaggaaagatggagatggcacattccaatcttgagatgagtggcccagctgcaaagtgctctaaaaggagggattgctcaggccctctgcccacccctggggaagtaggggtgcctgcttgatttcaaaggttccctctcaggatcataagaaagatcacctcaactcagggtggatatggtggactcaaaagtttgcagctccagttcctagtgctattgccctgggaaacctgttccatctctctgggcctca

SEQ ID NO: 575110 - DNA, 621 bp, Homo sapiens
ttgtatgtgtgttatgtgtatacaaggaatgtgtgtgtgtgtgtgtgtgtgaacatgttgatatcattacgccaaatcagaactcagagtcacccaattcttgattacctgtcagagatgcagttgctttactgcatttgggtatctgacataatttttaatgtgttttcactttgctccatcctattcatgtttcacaggctttcaacagaaatgtggcagaggataaacctcttcatatagacagcacttaatcagtctgtgcctctcgctggcacacttttctctattgattttaaatttaaacaatgctctgagactgaacaatgcacctccacaaatacagctgacttgactgaaggaggtcaggaaagatggagatggcacattccaatcttgagatgagtggcccagctgcaaagtgctctaaaaggagggattgctcaggccctctgcccacccctggggaagtaggggtgcctgcttgatttcaaaggttccctctcaggatcataagaaagatcacctcaactcagggtggatatggtggactcaaaagtttgcagytccagttcctagtgctattgccctgggaaacctgttccatctctctgggcctca

SEQ ID NO: 575111 - DNA, 615 bp, Homo sapiens
cggtctggggcccacccttgagaaccatcaccctagattggaaaagacttaaaagccttaaccatcaaatgcaaagtataaactttgattaaatactggattaaaacaaaaagagttacaagagacaccattgggaaaattggggaaatgttactatggactgcacatattaggtaacaatggtgamttaacattaattttcttaggtatgataatggtattattgtttcacaggaaaatgcccttacgtataggagacccatgccgaagtattgagggatgaagtgtgatggtgtctgtaatttatttaaatgtctcatttaaaatggtatctatatgccaggtgcagtgactcatgcctgtaatccgagcactttgggaggccaaggcaggtggatcacctgaggtcaggaatttgagaccaacctggccaacatgaagaaactccatctttactaaaaatacaaaattagctgggcatggtggcacatgcctgtatttccagctacttgggaggctgagacaggagaatcgcttgagccggggaggcggaggttgcagtgagccgagaacgcaccactgcactccagcctgggcgacaagaatgaaacttca

SEQ ID NO: 575112 - DNA, 615 bp, Homo sapiens
cggtctggggcccacccttgagaaccatcaccctagattggaaaagacttaaaagccttaaccatcaaatgcaaagtataaactttgattaaatactggattaaaacaaaaagagttacaagagacaccattgggaaaattggggaaatgttactatggactgcacatattaggtaacaatggtgacttaacattaattttcttaggtatgataatggtattattgtttcacaggaaaatgcccttaygtataggagacccatgccgaagtattgagggatgaagtgtgatggtgtctgtaatttatttaaatgtctcatttaaaatggtatctatatgccaggtgcagtgactcatgcctgtaatccgagcactttgggaggccaaggcaggtggatcacctgaggtcaggaatttgagaccaacctggccaacatgaagaaactccatctttactaaaaatacaaaattagctgggcatggtggcacatgcctgtatttccagctacttgggaggctgagacaggagaatcgcttgagccggggaggcggaggttgcagtgagccgagaacgcaccactgcactccagcctgggcgacaagaatgaaacttca

SEQ ID NO: 575113 - DNA, 349 bp, Homo sapiens
gagtgtatctgatatgagatattaggactctggccttagtatgtgccactctggccctctgggctatctgctgcccacctgcctgcctgcagggttttaattttacattttgttctaattgccaaaaggtagggtaagctcgaaagtgcagagcacccccaccatgcaactggcaaatgggctgcacaggttccactggggccataccatgcacttatcaacaataaagatgayatttgtgttaatatctggctcctatatctttttttaattgttttttgactcctagagggaagagttattcaaaatcttaacaggagattcttgctggtaaatccttaagttggag

SEQ ID NO: 575114 - DNA, 564 bp, Homo sapiens
ttaacaggagattcttgctggtaaatccttaagttggagaacattgayatcataaatagaactgtggggaatgattataagttaatcacaggtaagatctcagaggtaatgcatgagttataaactatgcattgacccttgtatcagtctccccatgattctagtagggactgaactacaatggaaatgacttcttctgttagaggtaggagcttatgccaccatcttaaaataaaattgagtaaaacttaattgagaagttgtgaacttagttccaaaagtcaaatttcagaaatatacaatttctgggagtgtagttataaataaagggagacatatcatatgtaaagaaaatttgagtttggcagtaatctctaggtttacaaatgtgaatgccagtgagaactctaaacaggggcaattaattagaatcccttcctattctgccttcatggaactactcctagagttttgaaatgaggatgaacgtgacaccctgagtaggacacaggaaaaactggagcaggcccaaagagacaaagtggcatggtgaggggcagaacc

SEQ ID NO: 575115 - DNA, 564 bp, Homo sapiens
ttaacaggagattcttgctggtaaatccttaagttggagaacattgacatcataaatagaactgtggggaatgattataagtkaatcacaggtaagatctcagaggtaatgcatgagttataaactatgcattgacccttgtatcagtctccccatgattctagtagggactgaactacaatggaaatgacttcttctgttagaggtaggagcttatgccaccatcttaaaataaaattgagtaaaacttaattgagaagttgtgaacttagttccaaaagtcaaatttcagaaatatacaatttctgggagtgtagttataaataaagggagacatatcatatgtaaagaaaatttgagtttggcagtaatctctaggtttacaaatgtgaatgccagtgagaactctaaacaggggcaattaattagaatcccttcctattctgccttcatggaactactcctagagttttgaaatgaggatgaacgtgacaccctgagtaggacacaggaaaaactggagcaggcccaaagagacaaagtggcatggtgaggggcagaacc

SEQ ID NO: 575116 - DNA, 564 bp, Homo sapiens
ttaacaggagattcttgctggtaaatccttaagttggagaacattgacatcataaatagaactgtggggaatgattataagttaatcacaggtaagmtctcagaggtaatgcatgagttataaactatgcattgacccttgtatcagtctccccatgattctagtagggactgaactacaatggaaatgacttcttctgttagaggtaggagcttatgccaccatcttaaaataaaattgagtaaaacttaattgagaagttgtgaacttagttccaaaagtcaaatttcagaaatatacaatttctgggagtgtagttataaataaagggagacatatcatatgtaaagaaaatttgagtttggcagtaatctctaggtttacaaatgtgaatgccagtgagaactctaaacaggggcaattaattagaatcccttcctattctgccttcatggaactactcctagagttttgaaatgaggatgaacgtgacaccctgagtaggacacaggaaaaactggagcaggcccaaagagacaaagtggcatggtgaggggcagaacc

SEQ ID NO: 575117 - DNA, 564 bp, Homo sapiens
ttaacaggagattcttgctggtaaatccttaagttggagaacattgacatcataaatagaactgtggggaatgattataagttaatcacaggtaagatctcagaggtaatgcatgagttataaactatgcattgacccttgtatcaktctccccatgattctagtagggactgaactacaatggaaatgacttcttctgttagaggtaggagcttatgccaccatcttaaaataaaattgagtaaaacttaattgagaagttgtgaacttagttccaaaagtcaaatttcagaaatatacaatttctgggagtgtagttataaataaagggagacatatcatatgtaaagaaaatttgagtttggcagtaatctctaggtttacaaatgtgaatgccagtgagaactctaaacaggggcaattaattagaatcccttcctattctgccttcatggaactactcctagagttttgaaatgaggatgaacgtgacaccctgagtaggacacaggaaaaactggagcaggcccaaagagacaaagtggcatggtgaggggcagaacc

SEQ ID NO: 575118 - DNA, 598 bp, Homo sapiens
ggaaaaactggagcaggcccaaagagacaaagtggcatggtgaggggcagaaccatgtgatccaaggcacagtgctctatctcctggagaaaggaggcacaggaggaggagacacgatggccatctttaaatatccaaggggtggtcccatggcagagaaagctaccttactgtgtgtagctggaagagaaccaaatggtgaagagagrggagtgtttttttagcaattaggtctaattgaaatagaatatccccctccctgccacatgtaagttcttagttatgagtgtagtggagacagaattcatgtgttaggtaagagttgaacaagctgaagtatcatataggtgtccaggtctgatatctctgattttagaaattactaataagaaccttatccagaagagccttgaattattatgccagcctcattcctcctgtggattctcttctccttttgatttatgaattcactcatgagggctcaactactgcctttcacttgagcacttgagaaatgtttactgaacaattgaatagtagattctcaaatattcttgatgatggtgatgatatgctcaatagtatttgactagtg

SEQ ID NO: 575119 - DNA, 531 bp, Homo sapiens
ctactcctagagttttgaaatgaggatgaacgtgacaccctgagtaggacacaggaaaaactggagcaggcccaaagagacaaagtggcatggtgaggggcagaaccatgtgatccaaggcacagtgctctatctcctggagaaaggaggcacaggaggaggagacacgatggccatctttaaatatccaaggggtggtcccatggcagagaaagctaccttactgtgtgtagctggaagagaaccaaatggtgaagagaggggagtgtttttttagcaattaggtctaattgaaatagaatatccccctccctgccacatgtaagttcttagttatgagtgtagtggagacagaattcatgtgttaggtaagagttgaacaagctgaagtatcatataggtgtccaggtctgatatctctgattttagaaattactaataagaaccttatccagaagagccttgaattattatgccagcctcattcctyctgtggattctcttctccttttgatttatgaattcactcat

SEQ ID NO: 575120 - DNA, 471 bp, Homo sapiens
ttaagtgtttgctaatttctgatcatgagctcatatttgccttttatcaacctgtggaaatcttgacagcctaagcttatgaaactttcttttaggaaggatctgtgctacaaataagaaaccacttgattaaacttcaaggatccagatctaacaaaggagttttttattcatatcccccagtgtatggtgggtccaaggctttgtctctatatttcaatgtctgaatttggggaaaacacgtacttctttctctgatttcagcttggcatttttcttaagttttctcctgtttggtgatagctcctatttmtagctgacccagaaatgcactaacaataattatttatctagaaataagatctgtttaagaggatgggggctgggcatggtgcctcacggctgaaatcccaacactttgggaggccgaggcggcagattgcttgagtccaggagttcaagaccagcctg

SEQ ID NO: 575121 - DNA, 624 bp, Homo sapiens
gttttgatatttgaccattgacagttttcaggctgcactccttcacttttcccccagcctcacatctgggcaggctggtaagaaagccagtgtgctccctcgcttggcacaaggagggaagttcaaatmatgcaaaaattggcacacatgtgggaactctctccccaacactactccctaagcacaataaaaaaccaaaggcttttgctccttccttcactcaagccaaacaaactgacttggatgcctgccctgctctctccagaaagcctcatgatgtaatgaatattttcacaccttcctggtgcttttgtggcattgtccgtcttgacatctgaaccaattttgggagggggtgattgattccacttctctgctaagcaaccacctgacaactggccctttgatgaggatgatctaggtgatggccactatcacctggggagcttttgtcctttgcttttggtgggctaacaggctctgcttctggcaggcaagtagacactttggaaggctgcaggttagcatgtattttgagctgcatttgctgagtcctactgtgcctcttctatagacttaatcaacctaagttgaagtttcaatattggcatttagggacgagag

SEQ ID NO: 575122 - DNA, 639 bp, Homo sapiens
ctaacccaatgagtaataaattgaaataaaattaaatctttgacattgaaaatcagcttaaaaaaatggaataccacgaacctaaaatagaataatccatctctggttaaaatagttaatatgtcccaatacagattaaaaaaacaaggcctatagaaattaaggcccataatacaaggggtactatcttcctatttaatggtgattctaagggtcactattttttctttggttgctttgcttttggtatcattgctaagaagtttagcccaaggtcatgaagacttactcctatgttttcttctaaaaattttatcattttagctgttacatttagtctatgatccattttgagttaatttttgtatattgtataaggaaggggtgaaactttatttatgagtacaggcatattctgttgcctcatcatcatttgtcraaaaggttgttcttttcccattgaaatgtcttggcaccactgtcaaaaattaattgaccttaaatgtaaggctttatttctgaatttttaactttattacattgatctatacatttatcctcatactagtactatactttcttcataactgtttttgaagttttgaaattgggaagtgtgagtgtattagtccgttttca

SEQ ID NO: 575123 - DNA, 577 bp, Homo sapiens
taccctaggctagtccatcacaagccacctcacttaatgaaggactggaagctggtgccgtggtttcataccaggactgctggcagctcccaccttgtgacctgggattgcaaggtgatctgtgaaaagaggccctggaatatcatgagacatgctctgagggtaygcgtgctactgcataagtgctttggagaaggttaagtctgttcagtgtgttcagtattctcctcctcaatcacaaattctttcactgttttctttttcttcttccttgaagaaacagcaaaaggggaacaggttcttgtatgtattgtatgaagttttgtcacattaattcatttaataaacatgagtacctgtgatatgcctaatgctggactatgttctgggaatacagaagtaaaaaatactgtttatacaatcaacaagtcacagtctaatgagaaagacaaaaattaggtaaacaaataaaataaaggaccattagtgttattattgaggtttgcaagatgctataattggtattcctgaagaattggtggaatgtaacaaacccattaaaaagtggacaaaggac

SEQ ID NO: 575124 - DNA, 418 bp, Homo sapiens
gcaaaacaaaacaaaatataagaaatgaaaagaacctccatcgaaacctcacaatttatacaattttagcacaatagattatgcacttaaatgtaaagtataaaacactaaaacttccagaatataaaatccccatgatccaggactaggaaaagagttcttagagttgatagcaaaaaatacaattcatcagaggaaaatgtgacatactagagctcaggaaaatttttttaaaaatttgctatatgaaagacattgtgacattgttaagaaagrtacaaagacaaagaatattttctggccaaaataatgttagaagtcagtgacagaaaagtaactgtaaaaccccaaaatatttagaaacaaaatattaaatagagatatgagtccaaaatacttagagaatattttaaacaaa

SEQ ID NO: 575125 - DNA, 569 bp, Homo sapiens
aaacaaaatattaaatagagatatgagtccaaaatacttagagaatattttaaacaaattgcaaattaaaatacaacataccaaaattgtgggatgcaacaaaaattactcagagcaaaatttttaccattagaggtcatattagaaaaaaagaaagatctcaaatcaatgacttccatttccacatttataaacttgtaaaagaagaaattaaacactaagtaagcagtagagaaataataataaagaacaaaratccataatagtgagaacaacaaaaaagaaagatctatgaaaccaaagttggccttgagaaagactacaaacaccatgtaactttagccagactcagtcaggaaaaataagaaaatagataaattatcaatatcaggaatgaatgaggtgacatcatgctatggaaatttaagggataataaggggacattgtaaacaatttcatgtcaataattttaacaactaagaaaaaattgaaaatttttttaaattacaaaacattaacagtcatttaaaaaaaaaaaaaaagctatgtagcctgagtagtatcgtgt

SEQ ID NO: 575126 - DNA, 569 bp, Homo sapiens
aaacaaaatattaaatagagatatgagtccaaaatacttagagaatattttaaacaaattgcaaattaaaatacaacataccaaaattgtgggatgcaacaaaaattactcagagcaaaatttttaccattagaggtcatattagaaaaaaagaaagatctcaaatcaatgacttccatttccacatttataaacttgtaaaagaagaaattaaacactaagtaagcagtagagaaataataataaagaacaaagatccataatagtgagaacaacaaaaaagaaagatctatgaaaccaaagttggccttgagaaagactacaaacaccatgtaactttagccagactcagtcaggaaaaataagaaaatagataaattatcaatatcaggaatgaatgaggtgacatcatgctatggaaatttaagggataataaggggacattgtaaacaatttcatgtcaataattttaacaactaagaaaaaattgaaaattttttwaaattacaaaacattaacagtcatttaaaaaaaaaaaaaaagctatgtagcctgagtagtatcgtgt

SEQ ID NO: 575127 - DNA, 569 bp, Homo sapiens
aaacaaaatattaaatagagatatgagtccaaaatacttagagaatattttaaacaaattgcaaattaaaatacaacataccaaaattgtgggatgcaacaaaaattactcagagcaaaatttttaccattagaggtcatattagaaaaaaagaaagatctcaaatcaatgacttccatttccacatttataaacttgtaaaagaagaaattaaacactaagtaagcagtagagaaataataataaagaacaaagatccataatagtgagaacaacaaaaaagaaagatctatgaaaccaaagttggccttgagaaagactacaaacaccatgtaactttagccagactcagtcaggaaaaataagaaaatagataaattatcaatatcaggaatgaatgaggtgacatcatgctatggaaatttaagggataataaggggacattgtaaacaatttcatgtcaataattttaacaactaagaaaaaattgaaaatttttttaaattacaaaacaytaacagtcatttaaaaaaaaaaaaaaagctatgtagcctgagtagtatcgtgt

SEQ ID NO: 575128 - DNA, 543 bp, Homo sapiens
cagaacgtctagaaatatactcacatgtatacgtacataattgaataccgttttacaaagatgccaaggcaattcaataagcaaaggataatcttcttaaaaatgggatcatccctgattccaggccttggctctttgatggcatttctggacctaccctgagccagagtgggaacccattgccctgaagaatgggtcccargcctggcagcattcaccacaagctgacccaagagcccttgagtcttaagcgaacattggtggtaaactggcagtactcctcatgggcctgtggtaatggtgacaatagggagcggctcatctacccgtggaaagggaagggaagagtggaaacaactttgtttcatggtttgagtgccagcttaggtgcaataaataaagcatcaggtagatttctaaggtttttcactccaatctctgactcccagatggcatctctggacccatctgtgtcctagaggaacacgagtctggctggatttatacctgctgattgtagagccctggggccttgaacaatca

SEQ ID NO: 575129 - DNA, 458 bp, Homo sapiens
gttggtgaggatttggagcaactgcaactcttagacactgctggtagaaatgtaaaatggtacagttcctttagaaaatagtttagcagtttcttaaaaagttaaatgtaaatgtaccatgtgaaagcatgcatacactaatattcatggctgctttatttttaataaagttaaaaattggactgacataaatgcccatcaaaatgtgaagaaacaaactattgtatatctacacaatgaaatatttgtcagcaataatatttttaaatgaactattgatacacacatggttgaatctcaaaataattatactgaaagaagccagaaaaaayagtacatattgtattttttatataatagtctagaaaatgtgaaataatctataacaagataagtcatttagtgatttctcagaggcagaggcagacagggaaggagtaaggaatttcaaaggtcat

SEQ ID NO: 575130 - DNA, 472 bp, Homo sapiens
aaatccagatagatatgaagaaaggaagagtgttggggaaagaataaacaaaggtaaaataaaatattttttaaaaaattttaattgatctaaaagataactccttggttaatgtaataatagtagcactgtattcggtgataacactatatgaataagtgaaatgaatgacagcaatttcatagaggataagtgaaataattatgaatactctgttatgtggtacccacactatccataatgtggtatagtgctatttgaagtcaaacttagaatagctgtaaacrtgtattacaaactttaagtcaaccactacaaaaatttttaaagaaatatagttgatatgataaaagaggagagatatagaatcatataaaatgctcagtcaaaaatagggcaggcagaaaaagagggggaaaagaaacaacgaacaagttcaataagtggaaaagttacaaacatggtagatgtt

SEQ ID NO: 575131 - DNA, 472 bp, Homo sapiens
aaatccagatagatatgaagaaaggaagagtgttggggaaagaataaacaaaggtaaaataaaatattttttaaaaaattttaattgatctaaaagataactccttggttaatgtaataatagtagcactgtattcggtgataacactatatgaataagtgaaatgaatgacagcaatttcatagaggataagtgaaataattatgaatactctgttatgtggtacccacactatccataatgtggtatagtgctatttgaagtcaaacttagaatagctgtaaacgtgtattacaaactttaagtcaaccactacaaaaatttttaaagaaatatagttgatatgataaaagaggagagatatagaatcatataaaatgctcagtcaaaaatagggcaggcagaaaaagagggggaaaagaaacaacgaacaagttcartaagtggaaaagttacaaacatggtagatgtt

SEQ ID NO: 575132 - DNA, 644 bp, Homo sapiens
tggggccctgcctggcagccttctctgatttggagctgccagtaacaaagagttctgccttttacccatcagagtgtcattgtctgtatactaccatcaaatgagtttttaaatgttgtaaaacatagctaatatttcttaaatagataattaaaaacactcatcattaagggagcaatgataaattgtgctacattaaaattaagaacttctgttcatcaaaatacaccattaagggaatgaaaaatgcaaactacaatgtgggaaggaaaaactgcaattcataatctgatgcagaacttgaaactaggacataataagataattcaattttaaaaaatgaacaaagactgaaaatccatttcacaatagaggaaatttaaatggtcaagaaatgtatgaaagagtgttcaacttcatcagccaasagggaaaatgcaaatgagaactatatgatgagctaccacttcatatggaacattatgccaaaaatgagcaaggctcataatacccagtattagtgagcatgtggagaaaccgaaaattctcatatgctgctgaattggtattgaacaacatgctgtatggaacaactgctgaattgaactgaataatgtgagctggtacaaccactttaaaaaact

SEQ ID NO: 575133 - DNA, 445 bp, Homo sapiens
ctacaaataagtgcttctgaattctaaattgatccaaaaatataaattagaatatcccttctaacctccctaaatgcctcaatttctttttcatcctattattcataccattgagtcgctgtcccaatggcaggacttactgtttctcaatacatatgattacctttaaggtattcttcgaacttactgggaaattatttttcgctgggttattcatagagtcaaacctaagttgaagtccttttgaaagaggacacctctatgttgagttaaacatgctccaaaatgttacaactcccatattacaggaaatccacagactatctaaactccatgcaagttatttccattgaagaagaaatctgtcaaaccatcaaattggttgtyttatttcatctagataaaactgaccaaagggaggcaaggaaatgtttgggaagagtga

SEQ ID NO: 575134 - DNA, 658 bp, Homo sapiens
agttttatgaaaaactgtgaatagggccaatgtcctaatttgtcaaaaatgttaaactaatattgcaattctataaaataaattattgacagattttataacataaaaatgtgtatttttatatatctgtagcattataagcaaaattaaggaaaataagctaggagataatattttaaaatataattaaatattttattcctttattataggaagagcttttacgagttctactgaacaacaacaaaaaatccagtagaaatgttggacaaaagatgtgattatacaaaactagaaatgcaagtaaacataaaaagctcaaacttacttaaaaacttaaaatgaaatattcgtaaataaaactattactgagggcctataaaattttgggttaaaatgaaatggtaatacttaataaatgttagggcacaatgatgctatctttcttacatctttctttttagaagtaacttatttcaatgtttctggaaagcaatttgataatttttatattactacaaaaatatggtagctaccctttggctcaacaattttttagaacacaaaaatgcagtcaaagatgtatataaaagactgaaagyaattcttcatagccttgtttatatgaaggaaaactgaaaacagcctaaatatttaa

SEQ ID NO: 575135 - DNA, 638 bp, Homo sapiens
gtcttcaaaatccttaaactgcctgtatgcccccataattccctaaataataatgaatgctgggtacagtagggggtaggggaaccttggactctgctccagctcagtagccagggtccattcagatttgtcagcccccttcccctctgatttactcctggatagcagtaccatttcttgacacatgtactgatgtggaaaagatttttggaaggtatgaagggagttcaccaaaggtgataagttttatttggggcctgtttgtgtattcaygtggagagagttagcattcttggttctagagaaaaagatttaggaattttcaacatatgatagtcatagaacccaagaacttaccatccaatggaaatattttccctctgcagtgacaccattctttcataaaattattcacaatttagcaactatgaacaggaataaaacctctaaccaatattccaaagaggtcagctgtgcctaaaatgcatgttggcagaatgtagtcacattcccagattttaggaagccaggaatccaggaaggagtcttcctctttctgtatagcaacttaagcttatttgaaggtggttgttcactccctcctggagtgcccttagctgcagacaaagagagtggga

SEQ ID NO: 575136 - DNA, 690 bp, Homo sapiens
atggcactggaagtattttggatttcacattttttgggattttagaatatttgtattatacttaccagctgagcatcccagatctgaaaatcaaaaatccaaaatgctccagtgagcattttttttgagtgtcacattggtgtccaacaagtttcagatttttgagtatttaggatatcagattctcagattggggtgcttaacctgtatgtgcattgtgtcacatagtttattatttttttttgtagtgagaatgctcaaaatatactcttagtaattttcaagaatacaacatattgttataatctatagtcaccctgttgtacaataggtttcttgaacttatttctcctatttaattgaaattttgtatcctttgaccaatatcttcccaacttacttatactcccagcagtccscagtaaccaccattctcctctctgcttcaatgagtttaacttttttaggatccacatataagtgagatcatgtggtatttgtctttctttgccaggcatattttactaaacataatctccaggttcatccatgttgttgcaaatgacaagatgtcctttattaaggctaaatagtagttcattgtgtacaagtacaccacactttcttaatccattcattcattgatggaaccgtagactgattccatactttggttattgtgaataattg

SEQ ID NO: 575137 - DNA, 690 bp, Homo sapiens
atggcactggaagtattttggatttcacattttttgggattttagaatatttgtattatacttaccagctgagcatcccagatctgaaaatcaaaaatccaaaatgctccagtgagcattttttttgagtgtcacattggtgtccaacaagtttcagatttttgagtatttaggatatcagattctcagattggggtgcttaacctgtatgtgcattgtgtcacatagtttattatttttttttgtagtgagaatgctcaaaatatactcttagtaattttcaagaatacaacatattgttataatctatagtcaccctgttgtacaataggtttcttgaacttatttctcctatttaattgaaattttgtatcctttgaccaatatcttcccaacttacttatactcccagcagtcccyagtaaccaccattctcctctctgcttcaatgagtttaacttttttaggatccacatataagtgagatcatgtggtatttgtctttctttgccaggcatattttactaaacataatctccaggttcatccatgttgttgcaaatgacaagatgtcctttattaaggctaaatagtagttcattgtgtacaagtacaccacactttcttaatccattcattcattgatggaaccgtagactgattccatactttggttattgtgaataattg

SEQ ID NO: 575138 - DNA, 623 bp, Homo sapiens
actactattcctacagtgctactgttattattaattttaaaaacatacaatgtcattatcaaccttgatctgctctgcttttgtattttagtaattgattggatgagaatgtgcccaggcatgctttaatcactggaagggcaccagggtttaatcttccaaaggggtttttcccattgttatttcctgaaacatgcttgccattactcaagtggcatacaaaataaaattcaaatcaaaacagcaaaagagatgtgatccctctcttttgtgccttcttttaggcttaattctcakaagtagaacatatctaagaagagtaggcttttgagttccaggcatactacttctaaactcttcacttaaagctagcacattcacctgaccttgaaaaggtgaatagatacacactgctgagattaaataaggcaccacagaagaataactacaggaggagcaagtaagtgcaataccctcttgtatgaagtgtgaccaacctgaattaaaccatatttctagtcctccctcagctccaaacttttcagagcttttgctcaatgactccaccccattgtatccttggctgactctcataattgcctcattattatattttctatata

SEQ ID NO: 575139 - DNA, 470 bp, Homo sapiens
agttaagggctttagcatcctaccatgggctgtggtttttccccctgaacctatgggcatgttttgattgaagatgatggctggaagctgccaygtttgaagggctagagaaagagcctgggtttcctgtgtcagatgatacaaactagaaactagaaacgctacatggtagggaggcagtgggggacagaagaaaagacatcattattctttgtctcttcttttccctgggggaaatgttggcatccaaatattcaacagtaggttgacatgtggaaagtggcctagccaaaggatctgtggtgatcgggagtcataaatcagatatgagagggagagaccatatggtgcagaaagaaagtgacgatgcgattctttcagctatagccactcacgtgcactctcttacccagtagagagaggggcccctttccactgtttcttttctacttccccagtgaacctgcagg

SEQ ID NO: 575140 - DNA, 571 bp, Homo sapiens
gaactgtttgggccttgattagctcatgcggacttctagctaaagacaactctatcagctgctcagtggaaagacactgacgtccccctccccccagctccctccctctgttcttctagtaatgcagaaaatattaatgtaatggcagatgtggcatagattgtcatttcaggaagaaaaccaagccataaccaaytccactgattgcattctaattataatgtgacctcctgttgctttgcatagaggcagtattcatttcagtacaccactgtaaaacttgcctagtcaacgaccctcaaaggggcaattgtaagatttaagcttggatttttttgctcataccaaagtcctttattctgccaagcctctgctgattgggccagaaagaatgcatttgattatatagactaaacttattgggaacagaacctctgtgctttgaaatgcttttcattcaaattacattcagacattcaatcaacattgattatgatatggattggcaacagggaatgccttgggtttttggtctggcttgaaagtttgctgagtttcgtaccagataaca

SEQ ID NO: 575141 - DNA, 592 bp, Homo sapiens
gcttgtgtttttgaggggcctttgcctgcatctagacctctctgtctctggaaaaatcctggtgggatcagttttcgaagtagttggctcttggcagactcgcagacatactaaagtttttgttttgacttgaaggtcctcttccggcccttctgaataactttaacctaaaagtcaggctagaattcccacaagaagagagttgccagggcatcctcattccaagctataaaatcactggagatagctccattttctttatccaatcacatgccatgagctgtcatttgtgtacagatgtctctcaaatatagatttccagccttcatagcattcctgaaatttagcattgctaagtatatggtcaccttgaatagtattctaggatctcgaattcagtacgttctctttttycccccaaaacaatggcaaccagcctctcctctgttctctctttctcttaactgctcctgtagttccagttactagagttcaaaaccttggaacttttattttctcccttgtctttacttcccacatagaactagttgccaagtcctgtgaattataccacttgaaaatatctgttctt

SEQ ID NO: 575142 - DNA, 450 bp, Homo sapiens
gtccttataatatctgttatctggtgttcatacccttgtgagatctcctccccttatgtgtggatgggacctgtgatttgcttgtaaccagcagattatcgaaaaaagtaatgggatgtcactttcatgattaagtgacataggattgtgacttctgccttagtagaaaacttttttcctsctgatcttgatgaagtaagaagctatgttggagaggcccacacggcagcagcagagggtggcctctggccaacagccagtaaggaactatggccctctacccaagaccccacaagaaactgaatcctgtcaacaatcttttgagcttggaagcttccccagttaagcctcagatgagaccccagccctggtctgtaccttgataacagtcttgtgagatgcctaaaacagaggacacagctaagctgtatccagattcctgacccacag

SEQ ID NO: 575143 - DNA, 582 bp, Homo sapiens
ctttcatgattaagtgacataggattgtgacttctgccttagtagaaaacttttttcctgctgatcttgatgaagtaagaagctatgttggagaggcccacacggcagcagcagagggtggcctctggccarcagccagtaaggaactatggccctctacccaagaccccacaagaaactgaatcctgtcaacaatcttttgagcttggaagcttccccagttaagcctcagatgagaccccagccctggtctgtaccttgataacagtcttgtgagatgcctaaaacagaggacacagctaagctgtatccagattcctgacccacagaaagtgtgagacaacaaatatgtattattttaagctgttagatttgtggtaatttgttacctaatattagacagctgtatcctagagcagctagattactgcctgacaatatcagtcttttgctcagaaatactcagtgtcttcatgattctttgtctttggccttgaactccctattcaagctgttttccaattctccttcctgagcacaattacctctgtactgttcatatttctggctttctgcctttta

SEQ ID NO: 575144 - DNA, 602 bp, Homo sapiens
cattatatgcttacctgttgagcatccccagtctgaaaatccaaaatgctcatttgagcatttcctttgagggtcatgttggtacataaaacattttgggtttcggagcattttggattttggattttcagcttagggatactcaacctgtgctaggctgcaaattatatgaaggaggcttcttctgattcatctttccatgcccttgagcttccaatataatgacttaatggatggtatgctctcagtggatgagactcaatggatggtatgctccartgactcaatggatggtatgttcttgttcatgaagagcaagccagtgtgcccacaggacagcaaaacagaagtggtttgtggaactattcgtttatttacttgcttattcttttattccttcctttaccgcatacctggcattgtcctaggggctgatgtggactcatgggcatcatgcttagaaagggaccttgttcttggggttttatgtttaagcatcaccatcttcttgagactcttaatcattttatttttgaatctgtgttttctgagtgaagtcccagaaggtagtggggtatatgctaggggctcagagaatttgc

SEQ ID NO: 575145 - DNA, 611 bp, Homo sapiens
ttttcatttgtactggaccctggaaattatgtagctggccctgactaggggtatagtgggaaaccaaaggggcagggatacagctgtggcagcagaggtggggtcgggggaaacagcaaacaacagacaataaacaagatgatttcagaaagtcataagtactatgactttctgagaatcaaatgaggtgatatgctggtgagtccctgagtatggtgcaggaagcatgttaccttaaagaaagatgatgagggaaccgtygctgagaaggtggcatttgagtggacatctgcaggaggtaaagaggttaggccgttccaggaatatggggcagtttctaggcagaataatgtgctaggtcaaaatccttggggctggaacaagcttgaaatagccaagagctagacacaaaagccagtgctgcagtagcctagagactgtggaagagaggaggcttggggcatttactaaggtaagatgaagctgatcctttattttattttattgttctttttttagaattaggttcttgctgtgtcacccaggctagagtgcagtggtgggatcatggctcactgcagcctcaaactcctggatcaagcaatcctccc

SEQ ID NO: 575146 - DNA, 666 bp, Homo sapiens
ctcccttcctacagactgttcctttaaaaatttggggctttaactgagaagaaaattaagtaattttgttattttttccttcataaagctaaaattattaatcttcagagataagtactgttcagtgcataatgagttcgaattgttgataattataattttgaagagtttcagcttgctgtcagccaagtaattaaaggggtgggaccagggttctattttgttcatgatggttatgcttctggtaagaactctctctgtgtggcaaaaatgccctcattctagtcacatggtgcagtgaaagggttaattaaatcaagtaaagtaatccactgggttgtgaagagttctcttttcctagtttcccccctggccttccatctcttccttaagatcttcccattgtcttagcaaagctggacaccctcaatggtgcccgctctccactagtgaaacagatgcaggatgcctgggtcctgcctgagcccagggaagaggctcarttcctttccctctttcgcaactgcccccttcacccaattgcccatgagtcaccttaaaaaaaaatgtcttgcatatactagcactggactaaaaaaattgaaccaaaagaaaagaggaagagaaaatggaaaactaatgattcaagaaatcacatagcacgag

SEQ ID NO: 575147 - DNA, 553 bp, Homo sapiens
acttctaagttcttctcaaccttgagatttgatgaattagaataacgaacctttgtctcgttatctcatgcaactcacaacaaccctgtaaaatagattttatgatcactgtcagttttataggtaagtaaaaagagayacaggaggggttaagaaatatgcacaagatttcatagccaaagggtgaccacatgagagccaaaactgtctgctatccttaaatcctaggttatttcttttgcattactttgtgttgcttatatatagttgaactcaataaatgacttcatataggtagggcaatttcttcatttaactacacttaataggagaccaaattagaacatttgttttgaattaaaatatgatctttaagacattcctattaagaagggcagtatgttaaacatagagttttagattatcagagctggaccttgtacaaggagataataactctcaatacaattatgtcattttctgccatattacagatgagagagaacacagttttaaaatcatagccaagaacgcaagtttccctactcctccc

SEQ ID NO: 575148 - DNA, 510 bp, Homo sapiens
ttcagataaattcctcactatttttcaagtgctccagtttatatgattccactttcttggccaaaattctgcttatggcatagtgttgcccattgtgggatctcaaagcacattcattatcatgtgctgacggctgttctgcaggagtggaaaatggaggtagagagragtgaatgcaacggtgccagcagtgggggatggagccacgcccctgacagggggcacagtctctgaactcagcaccaggctgggaagctttgccggggcctccctgtgctcttttggggcaggccactttggagacataacaaatataaccagggtagagctctgccagaaagcaacagcggggacagtgatggaaaacagatggaggcgctggccttcacttggtgagaaatccactgagggaatggagaatgtttgcaaaatctccgagtgctattgggacacctcttagtgcatttacaaggcgccagcctctgtttgccaatggtttagtttggtttt

SEQ ID NO: 575149 - DNA, 480 bp, Homo sapiens
gtggctccatgtgtctctgcctttgtggtaacttggcttctttgctggagggatcagttgagcatgtcttcaatacattggtctggggaccttctggttctctaaagctgacagatttctgctcctttttggacttcctaaggttccatttaagttttacagttaagggttgacataaagacatcagtycagagtctgaatcttctcctgccttgtttaagacctgctacaagggctttctgtccagaagagctttagttccatttggggaaaggtagataaagctgggtgctgtcatttttttttgagaagtagcttagtatggacacaagagctgtactctgagaataaggagtcttggattctagctcctgggtttgtttgtgtgacctggaatatgttctgtcccatacgttctaggcttcagtttcttccataaaaagtaggagttggactaaatggtatctaacaccagtttcc

SEQ ID NO: 575150 - DNA, 589 bp, Homo sapiens
ctttatgaattatcatgagctgtcaccacccagacaaaaaaaaaaatactggcaatggcccctgccccccacaaactctctcatatcgcaccctaggcactacttcttcctccataaaggtagccaacattcagacatcatattctatggattagttttgattacttttaaattttctataaatggaagagtgaagtatgtatatttggggatttttgttgttgttgttcaatgttaaacagtattccaaaatatwggagttcaatgtattagtctttttccttatggttagtatttttgaagtcctgtctaagcaacatttgtctactcaaaggtcatgacggtattatcctgtgttatcctttagaagtgttgtattttacattcacatttagaactacagtacacctaacatttttatatggtgtgtagtaagggggtcagtaattattttttcataaggatatctgaaaagacctgacattcctcactgcttttttcataaatcaattgtcttcatatatgtgaagttgtcttggactctctattctgtcccattagtattcttgtctcttctgggtcaatgccc

SEQ ID NO: 575151 - DNA, 589 bp, Homo sapiens
ctttatgaattatcatgagctgtcaccacccagacaaaaaaaaaaatactggcaatggcccctgccccccacaaactctctcatatcgcaccctaggcactacttcttcctccataaaggtagccaacattcagacatcatattctatggattagttttgattacttttaaattttctataaatggaagagtgaagtatgtatatttggggatttttgttgttgttgttcaatgttaaacagtattccaaaatattggagttcaatgtattagtctttttccttatggttagtatttttgaagtcctgtctaagcaacatttgtctactcaaaggtcatgacggtattatcctgtgttatcctttagaagtgttgtattttacattcacatttagaactacagtacacctaacatttttatatggtgtgtagtaagggggtcagtaattattttttcataaggatatmtgaaaagacctgacattcctcactgcttttttcataaatcaattgtcttcatatatgtgaagttgtcttggactctctattctgtcccattagtattcttgtctcttctgggtcaatgccc

SEQ ID NO: 575152 - DNA, 618 bp, Homo sapiens
tatttctccaacctgtacagagagattgtgccttgactaaaaagcgccagcaagtttatgatgggtggttgagtcaggagtagagttttaatcttctaaaccttaacccatctctctttctattgaccatacacttttctccccattagcatctcagcttttagaaatggacattttgtgaacctccccattgcattgcatctcagttgttgtatttgagrtgctggaacgtggagatgcaatgcagtgaactcaacaatccaaaatagccaatccaaaattttggtgtctaaagagttaccatttccactataacagatcgccatcaaatttacttaatgtcaatatcacattatgtacactttaatttccaactcagaaaaaaaggtctagatctgtttgtggctttattaccaatgtcaccattatttttgagccattagtataaggagttcagatgtttgagttcctagagtattaaataagagagaatttagacaaccttaattttttttctttttttttcttttttaaccattgtcatgagacagactcaagttcaaatcccaactcagtcatttattgattgtgtggacttggccaagttgcttaacctct

SEQ ID NO: 575153 - DNA, 552 bp, Homo sapiens
tgttaggagttgggtttacagaggtaattaagatacagacccttcttattcttaagtttctcatgaaacacagcctggattatccttccctcccacccygccacgtttctgccccataaactagaccattctctggtaatctacttagttttttagataaactaagaataatctatatgacatagtccttcccagtacttaaggaagggaaagtatcattgaatatatcacttgcaaaggagcttagagattatcggcccaagcacatctctttgtgaatgagaacactgaggctctggaggagatgaagtgacttctccaggccacacaggaaggcattggcagaactataacttggccttgccaagatgtggcctttcagtccttcccaatgttctcaccccaagtttctctttcatgaggccccagaagctgcttagattcagacaggccactagaggctgatgcagtcatctgaggccatggcatgttacctctcagagcagaagggagaggcttccctctgtggaggggactgagaaggctacccat

SEQ ID NO: 575154 - DNA, 552 bp, Homo sapiens
tgttaggagttgggtttacagaggtaattaagatacagacccttcttattcttaagtttctcatgaaacacagcctggattatccttccctcccaccctgccacgtttctgccccataarctagaccattctctggtaatctacttagttttttagataaactaagaataatctatatgacatagtccttcccagtacttaaggaagggaaagtatcattgaatatatcacttgcaaaggagcttagagattatcggcccaagcacatctctttgtgaatgagaacactgaggctctggaggagatgaagtgacttctccaggccacacaggaaggcattggcagaactataacttggccttgccaagatgtggcctttcagtccttcccaatgttctcaccccaagtttctctttcatgaggccccagaagctgcttagattcagacaggccactagaggctgatgcagtcatctgaggccatggcatgttacctctcagagcagaagggagaggcttccctctgtggaggggactgagaaggctacccat

SEQ ID NO: 575155 - DNA, 581 bp, Homo sapiens
gggtggaaaatgaaaccaggcttgtgttgccctcctaggatggctgtgatgacccaggccacttggggttccacatgagccctgtggaatgtgggctgggccacctgcaggtcaggctgttcatgctgttgccctcaccttctctacgggtttcaaagtgaacccttgtgcagggaggtgtggcactccctgtgcctttgcttctcaagctgctgagtgacagtgacaagatgctggctttggagcaggcactacaggttcctatgyggagagcatcggtgctcagggaagggaaatccacccctgtgctcttcacacccagacagatgctcacaggttccagggatatacagggacatttctaaatctgtcttggacgtccattcactttatctttagccatggaatgctgacaagtattcagtacggttgagtgaccttctataggtcagagcaggctgtgttctgattgagtttagaaaactcataactctggccaagccttcaattggtcaggtggatggggctttgttaggggagactgcagccagagccagtgtcgcccaccttccttctccctc

SEQ ID NO: 575156 - DNA, 578 bp, Homo sapiens
aagcttcctctgagccagtccttcgccaagtggctttacctgtttattttatttggtcctcataacaaccataaggtaggttgtatcactgattttcagatgaggaaactgaagagcagggaagctagtgacttatcgcaagtcactcacctagtcagcggcaactctctgttattgatggggcttcacttacccttagtgtgaaacagaagtgtccttgagatcacatatgcccaaagacattatcaaaacacagacgtgtggtgatgcaggaagcctgagaacccttggcatctgtgcttttcacatgtagaaggaagaatctcattgcttggacatgaggggatataagcagcgggtcagggcccagcatcacactgaatagagctccaggaggctcacaggaccctcatcagaggctctctgtgtgttttatggttgattgagctttatgaccccaaagaatccgttatttgttttctttatagcaggcctcaaacactgggctttgsttattctttaaacttacaatactcattgcatgacagaattatttttcatttctctctttctttcag

SEQ ID NO: 575157 - DNA, 602 bp, Homo sapiens
atttttcctttgacactctgattctcttttacagagtctgttttacagagtttttgaggatagcaaacagatgagttctaaatcttgcttttgtctcatgtaaaaataaaatttcaaatatatcctcctcatctgagtcaacatggaagagctcctattctagatgatattgttgtctttttttgtagaatccatagtggcagatgtatacatatgtttttctatgctcatttttgaatagggattgttgtgctctaagaccaacaagcaggttctgtggcatgttccttgcttctrtgtcactctaatttggtaggattctactcttgaagtttgaagtgatgtacttaatttgggatgtctaggaagcattcttctgtgtgtttctgatttgcatttttttttttttgagacagagtctcgctctatcgcccaggctggagtgcagtggtgtgatctcggctcactgcaagctctgcctcccaggttcatgccattctcctgcctaagcctcccaagtagctgggactacaggtgcctgccaccatgcctggctaatttttttgttatattttcagtacagacggggtttcaccgtgttt

SEQ ID NO: 575158 - DNA, 437 bp, Homo sapiens
tgtggggtccagaacacttaactctcttttaaatgaaacacctaatcactcacctgtttctgctgccctcagaattttagaaaatcactgaaatggaatgaaattaaaacttacctactccaactcctttaacaggcagatggtgtgaaatttaagatgggaactgaatgaaaaaaaaaaagatatccatcaggtaaagatgagaacagaggatgcagatggctagaaagctggtacaaagatgtgaagtagagggtctaaaagaaagccaggaatagttgacgtatagtgggctagcaagaaaatggaaarcagtgtccaggaagaagatatttttatgttggggtaaggagtttggatttaattaaagtgttattggaaggccctgggggaggatggtttaaaaagttaagtaacctaatatgatcagttaacag

SEQ ID NO: 575159 - DNA, 554 bp, Homo sapiens
aagggaatgtcccaagggatatatcctgttgttactctggctgtgtggcagagtcgggtagtaaggaatctagaagggccacatcaacttgtataggcccagtgattccaactgtatgcaccacagtgaagaaaaggtattctatgctggccaaccctgctagtatttctcctcttcctccttaggggctgggttgttgggcttgggaaagggtatgaatatccctcagagaacatccccttgcatagcatctctacccgaaaatagtcgttcggtctccattttgttcctggtgtcatctaaaataaggaacaacaaatagccagattcaatttcagcattatggtttgagcaagggcctggcttctagagtggggtgtgttgagatsgttttcccactatttttatttaactcaccaaatatattctgtaattgggcatgacccagcaaaatgttccactctgaagttttatcatggaggccaaagagcatgttcaatgtctgccaagttctcaaaggaaatagtagtgggagggcaggccctgagctggag

SEQ ID NO: 575160 - DNA, 544 bp, Homo sapiens
aactttgaaaatatattaagaagattcggcatttgatgcacagatacaaataaggccattttcctcagcctgcaagcccagtctgagactttgcaacctttctctcttctgattgtgaattccaagtgtcaagacaaaatagcactaagaaatcagtaaaatgtgacggtttttctcaagcgtctactaagagcctagccagatgcacatttcttattccttttggtaaatagattcagatttggtatgattcaatgaactaaaaaatatcccctgctcaaagcttgtctatgcctgctaattgcatgaagcttaacagatcytccacacacggcaccaaataagggctggctggaaatcaaaacctccttgccaagcactttggattttccaaaggaactgtaatgttcctggagatgtttattaatggaaatggggaactttgtggaccagggtgaagtcccagagattgatagcctgttactagtgtttattatttttgactgcaggttttgaaagcttttcctcctatcctccctaaaag

SEQ ID NO: 575161 - DNA, 594 bp, Homo sapiens
attatgggaggctctgccctctgagaagagaagtgctgtcttaagaaatttccttgatactcaaagggtgttttacacagaatcacctrggcttttgttaagaatgtggactcaggccgggtacaggggcacacacctataattccagaactttgggaggccgaggcgggcaggtcctttgagtccaggagtccaaggctagcctgggcaacatagagaaaccccatctctacgaaaaatacaaaaatcagccaggtgtgatggcatgcacctgtagtcccagctacttggtgtggcttgaactcccttgaaccagggaggtcaaggctgcagtgaactgcaattgtgccagagtgaggaccacagagggaactctgtctcaaaaaaaaaaaaaaaaaccacacacacacacacaaaaacaacaacaaccaaaaaaaccagaatgtgaacaacaaccaccaaaaaaaccagaatgtgaactcaaacactcagacaataccctagaccttctgaatcagaatctgcattttttttttcaggagtcccaggcaatttgtatacacttaaatgtttgaggagaaagatagaagagtc

SEQ ID NO: 575162 - DNA, 621 bp, Homo sapiens
atgtctacccccacggtatcaactgtacttggcatatattagtccaacctaatcacctgattcatttaatgttcgaaacatttcatctggagtttcattacaattgcacaaacgactacttggaagtttatgacaccgactctgagacatcccttggaaggtaaggttatgtttgtttgtttgtttaacaataaaacttcactgatttcctgcttcagtgaaggatcttaaaattgaccacgttgtgttatgaaaaccaggtgagatcctcatgcttcttaatgaccatttctacataactactctgtagttgtggccttgtaggcattaagttttgacatctgtatatattcatgaagtcaaaaccaaaattaaaataatgcatatatccactacccacaaaactttcttcctttccgttataattccttgcttttgttcctcacccccacccacaggaaaccacaaatctactttctatctctgtagattygtttgcatatcatctaaatggaatcatactatacgtactgaatgtttttctgactttcctcaattagcataatttttgttgagcttcttggatccgaagatttgtagttttatcaaattgaaacattc

SEQ ID NO: 575163 - DNA, 619 bp, Homo sapiens
tattgctgtctccttgggcttcacttctttgaattcttgagtgtgtatgggacatactttatatgcttctcttttcagagattacagtcctttgctgtttgttctcaatgcctgaaaatgataaaaactaaaacaaacaaacaataattccttactattatcaatcattaatcattgttcattttttcttaagtgagagcaagtttattaagacagtaaagaaataaaagaatggctactccataagcagagcagtggcatggactgcttgactgagtatacttacagttattttgtgattatttgctaaacaaggagtgaattattcatcagttttctgggtaagaggtgggcaattcctggaactgagggttcctcttctttttagaccatgtggggtaacttcctgatgttaccatggcatttgtaaactgtcatggcactggtaggagtgtcttttagcatgctaatgcactataattagcatatagtgagcagtgaggacgaccagaggtcactttcctcaccatcttggttttggtggtgtttgactgccttctytactgcatcctgttttatcaacaaggtctttgcgacctgtatcttgtgccgacctcct

SEQ ID NO: 575164 - DNA, 649 bp, Homo sapiens
tccagtgaccaaaattggtttcttaagaaattatagggtgcacacaatttttcatgctgttgtagttttatctgtctggtatgtttggccccaaagcacactgaatattagatcaggatttggagcaagtcacttgaactctctaggccacagttttctcatctgtaaaattaaggaattggatttggtaatcttcgagagatgacttctggctttaatcatctatgaacataattttaatttggtgcatgaataaactggctgtatcttagataacatataatacaggcagggcctcctgaaaatgtggaaatctttgtaatgatatgcaaagtaagacatacctttgtaaaacaattctattaccatcctagcttgtaagrcaatattttgtgcagaaagaacccagagcagttaaaataattgggcagggaggatattagattttaattctaaaagttttcagaaagataagatacacgtaaaataaaaatgagtcaggaaaagagatagaagcaaactggacaggaaaggaaactataaagaaagagagaagaaaaagcaagcaataaaagtgaaggggagacgatgttttcatagaaactcaaaagattctccagctggcttccctgtgtgataatcattactt

SEQ ID NO: 575165 - DNA, 649 bp, Homo sapiens
tccagtgaccaaaattggtttcttaagaaattatagggtgcacacaatttttcatgctgttgtagttttatctgtctggtatgtttggccccaaagcacactgaatattagatcaggatttggagcaagtcacttgaactctctaggccacagttttctcatctgtaaaattaaggaattggatttggtaatcttcgagagatgacttctggctttaatcatctatgaacataattttaatttggtgcatgaataaactggctgtatcttagataacatataatacaggcagggcctcctgaaaatgtggaaatctttgtaatgatatgcaaagtaagacatacctttgtaaaacaattctattaccatcctagcttgtaaggcaatattttgtgcagaaagaacccagagcagttaaaataattgggcagggaggwtattagattttaattctaaaagttttcagaaagataagatacacgtaaaataaaaatgagtcaggaaaagagatagaagcaaactggacaggaaaggaaactataaagaaagagagaagaaaaagcaagcaataaaagtgaaggggagacgatgttttcatagaaactcaaaagattctccagctggcttccctgtgtgataatcattactt

SEQ ID NO: 575166 - DNA, 456 bp, Homo sapiens
atgatgaaaccccgtctctactaaaaatacaaaaattagctgggttttgtggtgcatacctgtagtcccagctactcgggaggctaaggcaggagaatcacttgaaccccggaggcggaggctgcagtgagctgagatcgtgccactgcactccagcctggcaactgagcaagactccatctaaaaaaaaaaaaatggagcagtaatacacagcctccatcctctttcacagaacccacagcagtagtctttatatcgccaaagcaccaatgtttttgatgcatgaattgttaatagatgcatagctgaataaatgaatttttgtcatctctgctcctgcaatgctcagtgctttggtggaaaatctcagaggacaccatygggaatgtgctgtactgagttcactccctggcattgttattgatatacaatcttcgtgttgtgagccacatgagc

SEQ ID NO: 575167 - DNA, 527 bp, Homo sapiens
tacattggaataatataatgtacactgcaagattgcaatgtgtgaggcaaatgaaaagctattagtcattagtctggtacactgatctttcactgaattgcaactctctcagcatattaaatactcttctaagtttctatagtttgccagatgttttagttatatgagattaaatttaatacrtatttctccctcaaatggagttaaacgattcacagaagaaactaagatgaagttcaattgctcacaccaatgcgttacacttatttcagtttgtttcaagaatttgaaggcccactctaggcactgaacagcgagtatacatacttactctgccagtattcacacttactctgctggtattcacacttactctgccagtatacacacttactctgccggtattcacacttactctgccggtattcagccttgaagccacgtccttgctgaccttcatctgtcctcagttttataaacatgctgtctccactagaacgaataagagggggtttctcatccccaca

SEQ ID NO: 575168 - DNA, 581 bp, Homo sapiens
atccccctggttgcaagaagaatctccatttggaatctggaaaggctgttcaaaatggacagcaatggtcaggccactttggaccaggacgtgccaagaacagttgaggttggatgggtaagtctctggatacttgggggacgtgatgatccctctgtctgcatgcaaatatccaccgcagccttcccacaaagaaacaaaggtcggttatttaaatagcattggcaactggatttttatgctttcttagttttcttggggggttttcaaagtggaggcaataaaaatgcttgaaaataaagccagagtgcaggaaatgattatcataacaagcatgtattgagcacatgctattggctactcagtttgtggtggtcattgagatctgggatacagaggtaagtaaacaagacaaattacctgctttcataaagatttctttatagmtggggaagacatacaataaacaaatacatgatatgtgagatggtgataaattctataaagaaaaatggatgagaggagggagaagggtactttattgttagagttaagttagaaaagccacgtcattggagtaa

SEQ ID NO: 575169 - DNA, 410 bp, Homo sapiens
tgatttgttgatggttaagtgtgagacaaacagaaaagtcaaaaataacatcaagattttgacttaaataatgagaaaaatgtactttccatttgctgagattatgaggagtgtagaattggggggtggtggcatggaaaagggtgggaataaagtgttcaactttcaaaggtgaaatttttttttctatctatctatctatctatctatctatctatctartctaattgggatacaagtggtttttcgttacatggatgaattgcatactggtgaagtctatattttagtgcactggttccctgactagtatacattacacctaatatgtagttttttatccctcataccccacccatcctccccacttctgagtctccaaagtccattataccactcacaggttaaat

SEQ ID NO: 575170 - DNA, 410 bp, Homo sapiens
tgatttgttgatggttaagtgtgagacaaacagaaaagtcaaaaataacatcaagattttgacttaaataatgagaaaaatgtactttccatttgctgagattatgaggagtgtagaattggggggtggtggcatggaaaagggtgggaataaagtgttcaactttcaaaggtgaaatttttttttctatctatctatctatctatctatctatctatctagtctaattgggatacaagtggtttttcgttacatggatgaattgcatactggtgaagtctatattttagtgcrctggttccctgactagtatacattacacctaatatgtagttttttatccctcataccccacccatcctccccacttctgagtctccaaagtccattataccactcacaggttaaat

SEQ ID NO: 575171 - DNA, 512 bp, Homo sapiens
atgtctccctgtttcatccatgttgtcacaaatgacaggatttccttttctttttaaggataaataatatcccatttatgtctgtgtgtgtgtttttgtgtatttatatattgcacwttttctttatccatttacctgttgatgagcacttagattgattccatatcttggctatggtgaatgtatgaatgtattgtgaataatgctgcaatgaacatgaaagtgcagatagctcttccagatatttatttaattttctgtggatatataaccagaagtgagattgctgaatcatgtggtagctctgtgtttaattttttgaggaacctccatattgttttaaatatggctgtaccagtatactttcaacaagggttcccttttctccacatctcatcaatacttgttgtcttttatcttctcgataatggccattctaacaagtatgaggtggcatcttattgtggttttgatttgcatttccatgatgattagtgatgttgagcattttc

SEQ ID NO: 575172 - DNA, 634 bp, Homo sapiens
ctgaagaactgagatgttttctcagtaggaacaatgagactcatggaactaatttgtttcattttttactttggcaggaaaatttttatttgaacaacctgtatagctatgtaaatttcatatcttacacatctaaaatgttacctatctcacttatttctaatgtctgtattactacagtctggatttttattatttagtgtttctrtcatttgatttacagtagcatttctcatagaaatctaagccactacagattctttgttaaataaatgtgggtattaatgaagagcaggttcttccagtcactagtcagcaacgttagggggccgatgtggtataatgaggatggtagtggggtcagcatcagaaagcctggctcagtccctcacttgctccattcttggaacagtggctcgatcactacagacatttgaattttttcatttattaaatgaatgttttaactatatgatagtattaagaaaccttctcaaatgaaaattatgtcacacttaaccattttaatatgcaaagtgatctggtttgctgaaacacacagaggttggcagaagttctggaattctttacaatttcacatacagaaattaatatcatcaaagtgaaaaagatg

SEQ ID NO: 575173 - DNA, 608 bp, Homo sapiens
ggattgtgttgaactgggttaggttcctggaataaagtaatcattattactgagaggagaggtatcagccgaagctcctttgcctacccattagtaaaagattaaaatayggaggaggagaaaaggctcttatattcaaatgccgtttgtacgtaggtgcatcaaaaagtgttgctcttcatttgtagactgacaagataatggagaagattgagttcccaggttgtcctgtattttttatcaccataaatctcagccccttgcagcagtgtgaaaaagacaatacgcatttccaagtccattagagaggaatagagtcaatgcaattattcataaaggatagaaggatgtggtgtcaaaaaggggctctgcaagtaaaagtcattagtaattcagcaataatggatttgaaacctttgggaatgactggaagatctgtctctctctggaaaatttctgcaaaatggtcatttaaatgttgacagaaaagtgagttatcttgaaattaattttcaataaattccatcaagttaaaattagaggctttaaaaaattcctacacattcatttctggagaccatatggtagaaagtgtcaaccactctgac

SEQ ID NO: 575174 - DNA, 608 bp, Homo sapiens
ggattgtgttgaactgggttaggttcctggaataaagtaatcattattactgagaggagaggtatcagccgaagctcctttgcctacccattagtaaaagattaaaatatggaggaggagaaaaggctcttatattcaaatgccgtttgtacgtaggtgcatcaaaaagtgttgctcttcatttgtagactgacaagataatggagaagattgagttcccaggttgtcctgtattttttatcaccataaatctcagccccttgcagcagtgtgaaaaagacaatacgcatttccaagtccattagagaggratagagtcaatgcaattattcataaaggatagaaggatgtggtgtcaaaaaggggctctgcaagtaaaagtcattagtaattcagcaataatggatttgaaacctttgggaatgactggaagatctgtctctctctggaaaatttctgcaaaatggtcatttaaatgttgacagaaaagtgagttatcttgaaattaattttcaataaattccatcaagttaaaattagaggctttaaaaaattcctacacattcatttctggagaccatatggtagaaagtgtcaaccactctgac

SEQ ID NO: 575175 - DNA, 621 bp, Homo sapiens
tgtgacgttgactacaagaggtgtctcatcttccatagggaggaaggtcttgtgaattacccaattccatacctggctctccgatcacgagactaaaacatgaagccgagcatcatgattttctcagatacgcaagaatgtaactataattttcagggaaatttggggccctttctgttaaagccttcatggtgattctctggttctaaagaactatcagtacctctgaatggttcatcctctcaggctttgcagaacactagaactgaatttcagtgagcggttccatgaactcctctgaattcttctgaaaagttygcacaaaaaatcataaaactggctttggaagttttaatttcataaaccagaatggtggaatgttttgtagccagaaggggattaaagttagttcacctaacttcttattttagttcatttgtcagatgaccgtataaccttggacaattctttatctggatctttcagttcctacttcagtaagatgtcctatctatttctctaaactttgggggtagaatcaaggaaataaatgataaaaagaagcttgaagtgttaaaaaaaataatgcaaatgcaaggtttttctggaacaaagttttaa

SEQ ID NO: 575176 - DNA, 540 bp, Homo sapiens
atgtcttcattttttaaagctatctctaaaaaatgaaatatttatgaaaaagaattaaaaaaagaatgttggtatttcaaatactttggtggtttagaggggggttgactttgtcctttactgactccattgatgagtaaaagcagtccacccaaaattttagaaagagtggagaagagaaaagaaattcyacagagatgtgggagaatgatcctaaggacatttactttgcatgtgaataggtgtacttttaagaatcctagatcttctctttgtgtggttttaggtgccttggttgccaggcaaacatatccttcaaatgaagattaaggtaccattgctgagtgtgtatctttcacagatactgtggttttgaaagacttacttttgctcagtaagagagttccataagcactcattaaagaatagattttaactgcaaaagataagaatgatattgacccagtgtagcatatctttctttttttttaacacaaggaacacacattaacatgttaattcttagatttatatatctct

SEQ ID NO: 575177 - DNA, 540 bp, Homo sapiens
atgtcttcattttttaaagctatctctaaaaaatgaaatatttatgaaaaagaattaaaaaaagaatgttggtatttcaaatactttggtggtttagaggggggttgactttgtcctttactgactccattgatgagtaaaagcagtccacccaaaattttagaaagagtggagaagagaaaagaaattctacagagatgtgggagaatgatcctaaggacatttactttgcatgtgaataggtgtacttttaagaatcctagatcttctctttgtgtggttttaggtgccttggttgccaggcaaacatatccttcaaatgaagattaaggtaccattgctgagtgtgtatctttcacagatactgtggttttgaaagacttacttttgctcagtaagagagttccataagcactcattaaagaatagattttaactgcaaaagataagaatgatattgacccagtgtagcatatctttctttttttttaacacaagkaacacacattaacatgttaattcttagatttatatatctct

SEQ ID NO: 575178 - DNA, 570 bp, Homo sapiens
tttttcaaatattgcattgccacttttttcctctttcttctccttctgagactcaaattacacatatgctgaaggttttgactgtttctaatagttcttatggttttatattcttgccttctttttttgctttgattcyatttggttattttgttttggaaagtctgtaagtactgttgaaatgttcttcaactattttgtcaaccttttcctctaagttttatcataattattttggagtcattgtttggtagcctcagtatctggaatgtttctggctttgctgagattgcctgttttatttagttattgggttttggttttttttattactacttcctcacaggcctagtcagtttttattgtgagcaggacattatacgtgatatgttgcaggggttctggattatattatcttcctctcagaagggttgggtttttttctagtaggcacttatgttcctggcagatcactttcattcaatcaaggcttgaatttacaggggacctatttcaaattttccatgaatcctggtggattgccatatttcctagaatatgaatcttact

SEQ ID NO: 575179 - DNA, 604 bp, Homo sapiens
ggtggggggctgggggagggaaagcattaggagaaatacctaatgtaaatgacaagttgatgagtgtagcaaaccaacatggcacatgtatacctatgtaacaaacctgcacgttgtgcacatgtaccctagaacataaagaataatacaatgaaaaaaagaatttctattaaaaacaaagtaatggagaatagtgtgaaaactgcatacaacaaagctcaatctcaaagactgaaatcaacaaggaaaagctgcttaccaccacttgggaagggccgggggtgggcagtytctgtgttcaaagtgattttagttcaaaaaatgaattgatgttagaagggcacgcttttcctgaggctgttactggtgggctgctcagtgtcactagggtattttgagtccaagtgccacctcctgtggagtaacgtgttctggttcccagaatagccaacccggcaaaaggaagacagcaaacagagccctttgactctgaaacatttgtgcttttttaggaaagcaaggactctaaagatctgggagtctggggagttgtttcttttttttctatttgttgtgctaagatgaaatctggagaaatgtcgca

SEQ ID NO: 575180 - DNA, 604 bp, Homo sapiens
ggtggggggctgggggagggaaagcattaggagaaatacctaatgtaaatgacaagttgatgagtgtagcaaaccaacatggcacatgtatacctatgtaacaaacctgcacgttgtgcacatgtaccctagaacataaagaataatacaatgaaaaaaagaatttctattaaaaacaaagtaatggagaatagtgtgaaaactgcatacaacaaagctcaatctcaaagactgaaatcaacaaggaaaagctgcttaccaccacttgggaagggccgggggtgggcagtctctgtgttcaaagtgattttagttcaaaaaatgaattgatgttagaagggcacgcttttcctgaggctgttactggtgggctgctcagtgtcactagggtattttgagtccaagtgccacctcctgtggagtaacgtgttctggttcccagaakagccaacccggcaaaaggaagacagcaaacagagccctttgactctgaaacatttgtgcttttttaggaaagcaaggactctaaagatctgggagtctggggagttgtttcttttttttctatttgttgtgctaagatgaaatctggagaaatgtcgca

SEQ ID NO: 575181 - DNA, 575 bp, Homo sapiens
aactaatattaacatttgaatgtatggccttccaaacaagtattatacacattttttaaaaaggcataattctggacatgtgttataacctgcattttctactgaacttctgtgttcaccttaccttttgttaataaataagacaataatttaccccttggcctttcccagtgtggcagtggattttgcctgtgaaatagaaacagcctgaaagaattcaaaatccagctycatccaacttaaacttgaatattaagcagtgcaaatgttgcaagaaggaattatctttaaaacaaccagggactggtttcgtggaagatgatttttccacagaccggggagcggggggtttgagatgaaacgattccacctcaaatcatcagacattagttagattctcacaagaagtgcgcaacccttgtatgcacagttcacaatagggttcacgctcctatgagaatctaatgctgctgttaatatttattgaatgcttattctatgccagacactatgccagaaacgatacaaatgttatttggttaaatgcctgcaatgaccctgtgtgacagcaccac

SEQ ID NO: 575182 - DNA, 575 bp, Homo sapiens
aactaatattaacatttgaatgtatggccttccaaacaagtattatacacattttttaaaaaggcataattctggacatgtgttataacctgcattttctactgaacttctgtgttcaccttaccttttgttaataaataagacaataatttaccccttggcctttcccagtgtggcagtggattttgcctgtgaaatagaaacagcctgaaagaattcaaaatccagcttcatccracttaaacttgaatattaagcagtgcaaatgttgcaagaaggaattatctttaaaacaaccagggactggtttcgtggaagatgatttttccacagaccggggagcggggggtttgagatgaaacgattccacctcaaatcatcagacattagttagattctcacaagaagtgcgcaacccttgtatgcacagttcacaatagggttcacgctcctatgagaatctaatgctgctgttaatatttattgaatgcttattctatgccagacactatgccagaaacgatacaaatgttatttggttaaatgcctgcaatgaccctgtgtgacagcaccac

SEQ ID NO: 575183 - DNA, 618 bp, Homo sapiens
cttgtcaaactttccagtaattcctaaagggaaattttaaatactctggaaagcaatctttattttatccactagttcctttttcctttttggagttcctgcttactgtaaatttagcggaatggccaaattttcacaatcaggtaatgctaccgcaatgtgcaaaacttttcacctgatgtagcccctcctcctcttctttctgaataaatttgcctatttgcatgtaaaaaagttcaagccaccgtatttattttaaaaaattgtgacatgacgggaagagcatttggtctggaattatttatttccaggcctgtcttttactgacacaactkccccaagtcttgattatgtcaagtgtaaaattctgatagtaactgcctacaacatcgtggttttgtgaacagtaagattcagttttgaaaagctagtcaaatgtaaagtaacgttgttcaccagagaacacacaaactttgcaccatttctctacacttggcaaagtaacccaaccatctgaaatctgcctcctctccttaagcccagcagaaaagcatcaggagcaaaatgctgtggattgcagctaatgtttaggatgcttcctattaaaaaataataata

SEQ ID NO: 575184 - DNA, 554 bp, Homo sapiens
gtctgcagtttacttttcacttccctacctgacagcgcatcctgcattctttcctrcacggagcatctgcactgaactgagggatgagggtgagaggtaattcagaaactcccacagctcggctccatccctctccaggtagaagcgccacgtggagagccacacgaactctaagcgttcccgctcttcagcccctcgcgggaaaacggatcagggtgttaatgggtcctgattacctgcactagcgtcatctgcgagccgagggccaagagtatcttctcggtcttggtggggtacgggttgtcacggtgcttgtaaagccactgcttgaggggtcgcgccatgtcttgcagggcctgccgcttgtgcctcaccttcccgccattctgccgggcgctgggacatggggagaggaggcggccctggtgagcgacgcgtttgcccgcccggacgctccacgccccggccaagcccgggccccgcatccaaactgcgcattcctgccttgcgcccctgctttgcgcgcgcccagagtgtttgggagaggcaggaag

SEQ ID NO: 575185 - DNA, 554 bp, Homo sapiens
gtctgcagtttacttttcacttccctacctgacagcgcatcctgcattctttcctgmacggagcatctgcactgaactgagggatgagggtgagaggtaattcagaaactcccacagctcggctccatccctctccaggtagaagcgccacgtggagagccacacgaactctaagcgttcccgctcttcagcccctcgcgggaaaacggatcagggtgttaatgggtcctgattacctgcactagcgtcatctgcgagccgagggccaagagtatcttctcggtcttggtggggtacgggttgtcacggtgcttgtaaagccactgcttgaggggtcgcgccatgtcttgcagggcctgccgcttgtgcctcaccttcccgccattctgccgggcgctgggacatggggagaggaggcggccctggtgagcgacgcgtttgcccgcccggacgctccacgccccggccaagcccgggccccgcatccaaactgcgcattcctgccttgcgcccctgctttgcgcgcgcccagagtgtttgggagaggcaggaag

SEQ ID NO: 575186 - DNA, 541 bp, Homo sapiens
cggggaccctttcagaggctgtaaaggtgtcagaagcccaaggcaggaggcagcttggtcggcgcacctcccgggccactgctgccactgtcggggagagccagcagctcacctctggggtcgcggaggccctgagcctctgcctgccgcgcacsggcgtcaggagcaagtccgcgcggccgcggagccgcagagttacagccccaaggcgcgcggcggacttcgcccgccccatctcctcgcctcgcgcctcgggacagctcccgtttcctccgagcggcctcagcttcgctgccagcgccccctttgcccgtccagccgcggcatgggctgctactccactaacacacgcgcgcgcgcatacacacacacacacacacacacacacacacacaccctttgcctcgccaagcgcccacactcgccaacgcccccgccccgcccttcggccaccgcagcagaggccacgcgtgacatttaggaccacgcgtgaccaccgcgatcaaacgacggctacggtctgtgttcgtagggaagtgaa

SEQ ID NO: 575187 - DNA, 530 bp, Homo sapiens
ttggtcttatttcgtgttggaagttggtatttctttggccttttcctgctcaattcacttaatggtctccatcttcctttccaaaacatttgcagtcagttattaattttcgctcaagagaattaactcagttaaaagaaatcatctactgttgtagccagtaaacccacccgtctctctctcttctctctctctctctctctcwcacacacacacacacacacacacacacacacacacacacacacacacacacacacacactctgcaagttgggtatgctgccaccaggtggcgtagtactttaactttgctgttaaaaaccagaagttctaaaaccctggtcccgatcacctttgtcaaaatgaactgagataattgtttaaaacataaattctcatttcctgtcccagacctactcaataaaatctctgaggataagactgaggaaatgtttgtttgtttgtttgtttgttgaacagtttctcaggtgaatctgagtcacaactggttttcagaatttctgatac

SEQ ID NO: 575188 - DNA, 584 bp, Homo sapiens
caattttccctactaccaatcaccttttcccacgctttagaccacgttgcttttctaacccataaatatccctaagcctcatcttcaaggaggtggatttgagacctgctctcccacctcctcgtttggctgccttgtgaataaactctcttttgcaaaacatgtgtcacagtgattgatttagtgtgtttgggcagaagggagctggaccaggttgataccaaatctactcagagtttactaatttagcacttcccttcttcctgctcttatgctcctaatgattttccatgtcatttaatgtcccrtaatcaatcttttcctcattgaactagctagaatggattccgtttgcaccaattaagccctaactgttacaagacccacatgtgggacaattataaatcgtatcttgataaaaagaaaacgaaaatggtagcaatatgtgggaacatcttggtaacttgcttaaatgatctccttcatcctgtaccaggctaaatgccactgttgtgcaggccctgcttcttagcattttgtagaagctgctggatttcataaattagctgaacttggccaaagat

SEQ ID NO: 575189 - DNA, 584 bp, Homo sapiens
caattttccctactaccaatcaccttttcccacgctttagaccacgttgcttttctaacccataaatatccctaagcctcatcttcaaggaggtggatttgagacctgctctcccacctcctcgtttggctgccttgtgaataaactctcttttgcaaaacatgtgtcacagtgattgatttagtgtgtttgggcagaagggagctggaccaggttgataccaaatctactcagagtttactaatttagcacttcccttcttcctgctcttatgctcctaatgattttccatgtcatttaatgtcccgtaatcaatcttttcctcattgaactagctagaatggattccgtttgcaccaattaagccctaactgttacaagacccacatgtgggacaattataaatcktatcttgataaaaagaaaacgaaaatggtagcaatatgtgggaacatcttggtaacttgcttaaatgatctccttcatcctgtaccaggctaaatgccactgttgtgcaggccctgcttcttagcattttgtagaagctgctggatttcataaattagctgaacttggccaaagat

SEQ ID NO: 575190 - DNA, 567 bp, Homo sapiens
tccttccgccccgtggtgaagaccttcactatttttatttaaaaggacactttttgacataaaggcaaattgattctcaagctagaagagtcttctgaaagtaattctagtatgtaagtgtaaatgcgtattttaaggatgaaatattctgccagttcccctcaagaccccaatgtatagtatattttcttgtgtgtaatataggggactctaatttgaggtcactgaagatactttggtatcaagagaaaagatgggttgttaggggtcagtgtcacatcaggtcckgtctcaagcaagacctggagtagaacaagacgttaacccacttggatctcagttctattgattgcttattatgtgtattttctgcacttgcacatacttaatggtttttaaaattgcggtgataaagtacttgcatttctggccagaatgaatttgactcatatataatcattatcaaatgttcctatcttgactagctgctttgtgaagaaaaaaaaattaattcccattccatgaaatgttgagcaaggagagaaatacattttactttttcaaaca

SEQ ID NO: 575191 - DNA, 423 bp, Homo sapiens
taacagacttgctgtccctttcaaaggagcagctctccccactaataaggagcctgtaacccttgttccatgcaattgctgtactttcctttatcatagttttggcctccatggctctcaggagaattgctgcaggcagacgcttgctttgccctggacactgtgttatgttgctggagtccctctcctctctacagagatgttcagtgttctctcctgggattctaagaccaaaatgccaccggcctgtgctacagagaaggcttggtcctaatggcattctctccagcctcaaatgctcacagtggcactccgggagaaaggatctgaagtaagacgaaggagggatgaaataaattttagactgaargttgttactgaagatgagggtgctacgtggctgatcctaatcttctagaatga

SEQ ID NO: 575192 - DNA, 501 bp, Homo sapiens
ctcctctaggagatgatttacaagtctcagagtccagctctggttgagctcagttttacggagttggagaaaagctgtaaaataagcttaaatcagcccatccagcatttgaaagggcaaaaaagaaaaggtggcaggcagggagaaaaggggaggcgggagaaggaggagtggttccaaaatctgcttaatttcttcctttcctctttgtctttgttcccttggctctcatctcttacactaagtctgcaagtagagcaagagcgggtgaatggccaaaatggtagccatctctgctgttctggttttaaagccgctagacttaggcrgccattttcccttggatcatggatgtccaaagtcatattctattagctcagcagcacatgcataacaataaccatgaacccagaaatgtgctgtggaattttctccagctctcttaacgagctttgcaaagttcctctgtcaaggagagtggggaatgcgtaatttcaaaca

SEQ ID NO: 575193 - DNA, 602 bp, Homo sapiens
cttgctgccgttgccagatctccccaccgagactccccttcctcttcaaaacaccagtgatgcccagaagtgccctgaagtcaccttttataattagactttctgactkctatccccagggcagtggatttaagaaacgagggctgggaaatgtgtttttgatgaccataaccaaggctccgtttatatggcctggcagcctcaatggagtgcactgtgcttctgaccccctcgctgggggcgtcaaggtctcctgggctggcacacagacgcccagggcagaagaaagaaaggcaaaaaggaattttactgaggacttttctcacatttatctgtctttgctcttgatctgcttgggcaggggctgctgggatcctaagcgcagtcttccactcccctgggtctcctccctgccccagacccctccccttaaccagacaaggttacttgggcctactgtggctggatggccactctatcgtctcactagacatccttgaattcctctttctcagaccatcccagggcccgttccctccagaaacacccaaaacaagaatgagaagctttgcacagaaacccggagctgcagtcacagaacg

SEQ ID NO: 575194 - DNA, 602 bp, Homo sapiens
cttgctgccgttgccagatctccccaccgagactccccttcctcttcaaaacaccagtgatgcccagaagtgccctgaagtcaccttttataattagactttctgacttctatccccagggcagtggatttaagaarcgagggctgggaaatgtgtttttgatgaccataaccaaggctccgtttatatggcctggcagcctcaatggagtgcactgtgcttctgaccccctcgctgggggcgtcaaggtctcctgggctggcacacagacgcccagggcagaagaaagaaaggcaaaaaggaattttactgaggacttttctcacatttatctgtctttgctcttgatctgcttgggcaggggctgctgggatcctaagcgcagtcttccactcccctgggtctcctccctgccccagacccctccccttaaccagacaaggttacttgggcctactgtggctggatggccactctatcgtctcactagacatccttgaattcctctttctcagaccatcccagggcccgttccctccagaaacacccaaaacaagaatgagaagctttgcacagaaacccggagctgcagtcacagaacg

SEQ ID NO: 575195 - DNA, 602 bp, Homo sapiens
cttgctgccgttgccagatctccccaccgagactccccttcctcttcaaaacaccagtgatgcccagaagtgccctgaagtcaccttttataattagactttctgacttctatccccagggcagtggatttaagaaaygagggctgggaaatgtgtttttgatgaccataaccaaggctccgtttatatggcctggcagcctcaatggagtgcactgtgcttctgaccccctcgctgggggcgtcaaggtctcctgggctggcacacagacgcccagggcagaagaaagaaaggcaaaaaggaattttactgaggacttttctcacatttatctgtctttgctcttgatctgcttgggcaggggctgctgggatcctaagcgcagtcttccactcccctgggtctcctccctgccccagacccctccccttaaccagacaaggttacttgggcctactgtggctggatggccactctatcgtctcactagacatccttgaattcctctttctcagaccatcccagggcccgttccctccagaaacacccaaaacaagaatgagaagctttgcacagaaacccggagctgcagtcacagaacg

SEQ ID NO: 575196 - DNA, 545 bp, Homo sapiens
caactgcccctggggaccatgcccagaatgatgtccccccccaaactcttctgaatgctcccaggattgagggtttgtttgcatcttagagggaatctaatacggtctcatttcatagcccacctcaatttaaactccggggcttcacagcctttgtttatctatagaatatttacctaactgtgggcttatttagtttttggaggaaagcgtctgtagcacttccatttccttgctgccgttgccagatctccccaccgagactccccttcctcttcaaaacaccagtgatgcccagaagtgccctgaagtcaccttttataattagactttctgacttctatccccagggcagtggatttaagaaacgagggctgggaaatgtgtttttgatgaccataaccaaggctccgtttatatggyctggcagcctcaatggagtgcactgtgcttctgaccccctcgctgggggcgtcaaggtctcctgggctggcacacagacgcccagggcagaagaaagaaaggcaaaaaggaattttactgag

SEQ ID NO: 575197 - DNA, 555 bp, Homo sapiens
cctggctttagaatcccattcgaagacagcaatgggaatgtctgggcttcttggatctgtgagtttagagcttttttcaggttcctttttggagcagagttgatgattagggacagagcgctcttttgaccactccagagctgtatccaagccaggacagctggtgtggggcaccacgggatcccatgcttatggccctgcccgtctccttcacctggccaatctagaagcagaggttgrtatggaaacttctaggaaaaaagaaaacaggtcagttgatccaacaaaaatctaccttggttcatgcttatcagtctacctgcttcttgtcctttatgggaaatgatacctgttttataagaaaaagtgaaggatgaacacagttgttcatgcctgtaatcccagcacccaagagcaggaggattgcttgaggctaggagttcaagaccagtctgggcaacataccgagaccccatttctattaaaaaaaaaaaaagagttttaaaaattagctgagcacggcggtgggcgcctgtagtttcggctactggggag

SEQ ID NO: 575198 - DNA, 581 bp, Homo sapiens
gctagctagattttcttctgctgggaggctcagggagaraaccagatacctagcttacttcttagccaaaataaatcaccaatggatacaagatttaaatatacaaaaataaatcataaaactgatagtagaaaacatggatgaatctttttacaatcttggcactaactatatgccaggtagcattgtaagtactttatatataataactaatttaatcctcacagcactaagaagtagatattattatcaaccgtcttttacagaagaggaaactgagacatagatgggttaagtgttttgtgcaagttaatagagctagtaagcacaagagaagtgacctgaacctaagcagtctggttccagagtgtatgctctgaactaccacatgacactgcttctatgatgaccagatagatgcagtagcatgctatgtaccctaaatatacacacagatgaagcttagccttctgcatttcaaaatatgataagtgaagttagaaaaccctaacaaagtgggaaaacatagcatatattacagacaaggtactaaattttctttaatatatgaagaactcata

SEQ ID NO: 575199 - DNA, 602 bp, Homo sapiens
ggaagcactttttctttccatctcctttccagatcgccctggtgtggcagcctctaggcatctaggaagcrcttttcttaagcccacctgtggccactgggatcattttttttacaagtgtctattacttagggtaaagactaagttcctttagcaaggaagcccccaaatacagtgacttaaataaggggtatttgtctcccctgcaatgagagctgagtagtccaagtcataggtcagcaaacacaacccctcgccggcaaaatgcagctcatggccttttccaatttctcaggtaagaatagcttttacatctttaactggttggaaataaaaaataaaagcagcaacactattgtatgtgtatgtctcttctcatgctgctaataaagacatatctgagactgggtaatttataaaggaaagaggtttaatgaactcacagttccacatggatggggaggcctcacaatcatggcagaaggagaatgaggagcaaaaggacgtcttacatggtggcagccaagaaagcttgtgcaggggagctcccctttataaaaccatcagatctcatgagacttattcactatcactgctatcac

SEQ ID NO: 575200 - DNA, 654 bp, Homo sapiens
atcatttcactttcttttttttttttttttttttactgattatcaacacaattcattggcctatccactctttccctactgacgtgaaaagccactttcgtcatttatggaagtatatttaattctacrctgttataacaacttctatgttccagcagtaaagccccagacttttaatttctgtgactgtatgattaattttaacatcttatatgatattagattggtgcgaaagtaattgcagtttttgccattaaaagtaatgaaagtaacacatctactttcatgtctaccagaatggctaaaaataaagtataaacattaccaagtggtggtatggatttggagcaactagagctctcaaatactgctggtgggaatgtaaattagaacagatgtttctaaactctttggcagtgtctattaaagctaaacatatgtactgtatactctatgacccaatattaaccctcctggctttccctctagtaacaatgagtatttactttcaccaaaagacatgtgcatgaatatgatagctaaaaatcagaaaacaaccagaatgtttatcaccagtgaagaatttattttttaaaatgttagtatattcatgaaatggagcaccataaagcaatgaaaataataaactactgc

SEQ ID NO: 575201 - DNA, 534 bp, Homo sapiens
agatgtcaattgcactcagaaaatattttgacattctaattaaattttcttgaacactctcccaaatgcagtgagaaactcagaggagatgaacccacgaggagaggttgaggtattgtttataagctccccaggcaatgtgcagaatgtcgagaaccaacagcctggttgacttgactcacctgggtcctgctgaaagccaacagcttgactgccaaaaacacagcactatgttgcagtcagaaaaaaagaatgagacattttaatgtgggctggtcagttcccttaaaaagaaatcaatgaatcttctgctagagaataatgctgactgttagtattctgagacccaagtgaagggacaggaccagaggtctcactattgaagatgtcaactttcatttgatctgcctattttcaatatggcactatattaggctatttttttattactataaataaatacctgagactgggtaacttgtaagaaaataggtttaattggcttgcarttgggcaggctatacaggaagaatt

SEQ ID NO: 575202 - DNA, 605 bp, Homo sapiens
tcacttttctgcttctgctgtgcgccaagttcaggctgctaaaaatggggagaagtagtgacacagcagtatggggtcaaggaaggatccaggagactaactgcttggtgtaaggcctttcggccaacctttccaactcccaccacattctacactcttgtcttcataacctgacatctagaatctgtgagcttttctggggctatgtgtagaaactggcttacctcttattagtttctttgctcataggcttagatttcaactttctctctaaagttagtcaccatttacctgcttccaaaatattggtaatatatcttgtttgccaagccttctaggtgtgtcttttttaaaaagaccatatagcctattttaaatctcagtttgagtctttgccatttttttcttttttctttagtacaatttacataaggtgaacaaatcttaaatgtataattaaatgaagttttacatattcatacacrtgtgtatccaactctcaagtcaaattatagaacatttccagcaccctagcaggctcccatctaacaccgtattgtagattgggttctcttggaagcagattctgagactgttttgtgtcc

SEQ ID NO: 575203 - DNA, 605 bp, Homo sapiens
tcacttttctgcttctgctgtgcgccaagttcaggctgctaaaaatggggagaagtagtgacacagcagtatggggtcaaggaaggatccaggagactaactgcttggtgtaaggcctttcggccaacctttccaactcccaccacattctacactcttgtcttcataacctgacatctagaatctgtgagcttttctggggctatgtgtagaaactggcttacctcttattagtttctttgctcataggcttagatttcaactttctctctaaagttagtcaccatttacctgcttccaaaatattggtaatatatcttgtttgccaagccttctaggtgtgtcttttttaaaaagaccatatagcctattttaaatctcagtttgagtctttgccatttttttcttttttctttagtacaatttacataaggtgaacaaatcttaaatgtataattaaatgaagttttacatattcatacacaygtgtatccaactctcaagtcaaattatagaacatttccagcaccctagcaggctcccatctaacaccgtattgtagattgggttctcttggaagcagattctgagactgttttgtgtcc

SEQ ID NO: 575204 - DNA, 512 bp, Homo sapiens
aaaggcaagaacaagtataatacacagaaaagtttttgcaaggccatttcatggaaatttaagtacaaaagaatggcatgttcatatgatttaaatgwatttaaatgccaaacgaccatacatactgtgttactgatgtcacatatggttataagtaaataagacacctataaataaaaaagaaaacatatttgttttagtcactaaaagttactgatttagagaaatggccaatgaatgtaatacttctgggggattaaaagcaattttctgctttttctcatcttttctactctttgttatatcttttgatgactgttatggtttggctgtgtccccacccaaatctcatcttgaattgtagctcccacaattcccatgtgcagtgagagggacctggtgggaggtaattgaatcatggggacaggtcttttccatactgttctcatggtagtgaataagtctcatgaaatctgatgatttcacaaggggtttccccttttgcttggctc

SEQ ID NO: 575205 - DNA, 512 bp, Homo sapiens
aaaggcaagaacaagtataatacacagaaaagtttttgcaaggccatttcatggaaatttaagtacaaaagaatggcatgttcatatgatttaaatgaatttaaatgccaaacgaccatacatactgtgttactgatgtcacatatggttataagtaaataagacacctataaataaaaaagaaaacatatttgttttagtcactaaaagttactgatttagagaaatggccaatgaatgtaatacttctgggggattaaaagcaattttctgctttttctyatcttttctactctttgttatatcttttgatgactgttatggtttggctgtgtccccacccaaatctcatcttgaattgtagctcccacaattcccatgtgcagtgagagggacctggtgggaggtaattgaatcatggggacaggtcttttccatactgttctcatggtagtgaataagtctcatgaaatctgatgatttcacaaggggtttccccttttgcttggctc

SEQ ID NO: 575206 - DNA, 562 bp, Homo sapiens
gctgtaaaaaaaagaatgtgaatactctccatgtgctattatggaaacatctctagcatacattattaaatttaaaatctcaaagtaaagggatatatatctgttttttttgtttgtttgttttatacagagtgagtcttactctgtcacccaagctggagtgcagtggcacggtcatacctcagtgcagactcaaacttctgggctcaagcgatcctactgcctcagcctcctgagtagctgggactacaggtgtgcaccaccatgcctggctgatttttaaattttttgtggagacaaagtctcactatggtgcccaggctggtcttgaactcatggccccaagcaatcctatcacttcggcctcccagagttctgagaatacaagtgtaagccaccatgtccagccatatgctacctttttaaaaaaggtaaaacaaagtaattttttattgttagtatctggacagagtaccaactgtggctatcactaytgttttttctggctatgagataaatacactagtcatcatagtccaaatcaaagacaaataattctagc

SEQ ID NO: 575207 - DNA, 446 bp, Homo sapiens
acatctccaatattccccttgagaaaatgaagtaacaaaatccattagacacttaaagctaatagatattctttaatgtggctccaggtctctttgtcttggcatgttgtggtgttttggcacaaaggaccatcagaaaagccatttttgtctttgaagatgatagattctgcacacttaatccattaatctgagctgatgggcttttgcccagagttaaaatattttctccttacataatggttttcatattaaatcatcgaataacactaatttttctggtgactgcatttaattccattttctagatgtagaaaattaaagtgaragaggaggttaactttttctttctttttttttttttaacaaggacttccatagtgcttggtatatgtgctcaagctctcttctaagtgttttataaaatatgaactcgtgtggtccac

SEQ ID NO: 575208 - DNA, 610 bp, Homo sapiens
cacaaataattacagaaggcttactatgtgcatgacatttctggaatctgtttctagtttggtgaatagatgaattgcatcattgcatttttctgtaattgtctcatgggtataacatgtcttgtctctccaaatagatgtataatgttctggagaaaagaggtagtatcttaaatttatttcaattatatttaaagatatctgtaacttttagtttttctatgaatcacgctattttgccttagccagtgaaaggagtgccaaagttaacaatattgtatttatacgttgataactttttatacctttttctcttcaatagaggagataaaatgtacatataaacaactgtcatacaatatagaaaagactgagtgctgggtaaaatgcagaggggattcagaaaatggtagaattactttttgttcttaactcattaactcattaaagttaagtacaagtaatagaaagcattatgttagcttaaacataaaaaaaaaggatatgcgttmaaaaatatactcatagaattcaaggacaattgggcattacaggacacctgaagcaggaaccggtaaactgaagaagtccttccattttggtacaactg

SEQ ID NO: 575209 - DNA, 406 bp, Homo sapiens
tatacatgaaaagttagttaatcccctgtgacatttaaatcatttaaatgttcccccatttttatctgttagaagggtagtgtattacttttttaaaaaattagaaggccattgcattttcattataagaagagtttcrtaagaattggattttacactgtactatgtgtggttgctgtgtgaagatttaaggttagttaagatttaaggttagtctgaattatatcccattgagtaaagaaagttacaaaaatgttttggagttggattctagtaaatatgaatgatctaggggaagttgcaggctgtactctgtgtgtgaaaggagcaaagaaggacaaaaacactcttgctggagacagtactggtcaacagagggaggttagtacctagtataaaggaaatt

SEQ ID NO: 575210 - DNA, 519 bp, Homo sapiens
agcaaacctttctggaaaatcacctaatgtgtaactattataatatggttaaaaaaaagactatgagtatataaaacttaaaagagatatgactcctatacatgaaaagttagttaatcccctgtgacatttaaatcatttaaatgttcccccatttttatctgttagaagggtagtgtattacttttttaaaaaattagaaggccattgcattttcattataagaagagtttcataagaattggattttacactgtactatgtgtggttgctgtgtgaagatttaaggttagttaagatttaaggttagtctgaattatatcccrttgagtaaagaaagttacaaaaatgttttggagttggattctagtaaatatgaatgatctaggggaagttgcaggctgtactctgtgtgtgaaaggagcaaagaaggacaaaaacactcttgctggagacagtactggtcaacagagggaggttagtacctagtataaaggaaattaacattgctgtagggga

SEQ ID NO: 575211 - DNA, 620 bp, Homo sapiens
tcagaccttgatttgtttttttgttttgttttgtttttactattgctattttttaattgtctaaatgagagattagcaaactatggtctaacacagcttgccacttatttttgtagaatccacaagctaacattaatttttagtttttaatggttaggggagaaaaagaatgatatttaatgacatatgaaagttatgttaatggtaaattttagtatttatagatgaggttttattggtacacagccatgtttactactgtctattgctaatctgtgctataatggcaaagttaagtaattgcaacagagaccacatggcctgcaaagataaaatatggtatggttctttacagaaaaattgtttttctgatctggmctaaattgaagaaaatcagaagaaaatgtgaagaatgcagattcttaaatattaaaattaacagtgttgtgtctgtaagtgttacattatgattagcaaaaaaaaaattaagaaaatatccttttggaatttaaaaactattatacaactccacaaagatatccctccagtcactgacaaacaagtgaagttctgacatatttcttgattgcttcactttcttttaaatgaaaatattaacc

SEQ ID NO: 575212 - DNA, 576 bp, Homo sapiens
tacactaaggaaaatgagaaaggaattaaaacactttcctacaaaaatcaataaaacacaaaaaaagagaaatgcaggaaataaggaacaaaaaaactataaggaatatagaaaataaatacaaaatgaagaagttaactcttcctattagcaattgctttaaatataaatgaattaaaatctccagtcaaaagacagattagaagaatgaatttwaaaaaaaagtgatccaaccatttgctgtctacaagatactcactttagctccaacaccacagataggttgaaagtgaaaggatgagaaaagatattccacacaaatagtaaccgaaagaactctggggtggcaatgccaacatcagacaaaatacactttaaatttaagaaggttgcaaaagacaaagaagacattaagtttacaaaagacaaagaagactttacaagagacattaatatgtaatgtttgctttgtctcttgtaacctttttaaatttaaagtgtattaattttactattatatattaataaaaatttcaatatagcaaaaagacagaaatacttatacacctaataaca

SEQ ID NO: 575213 - DNA, 476 bp, Homo sapiens
tccgtctccattataggattctacaaccaagccctttgtctagactttgcaatacctcaccttagagaaarcagaatgttacaggaggctggaaaacaagacaacctgtaccattgttagcagtggtgaatcggtgcggatcttcagccacctcaattcttgcctcctcaaaagggagaatgcgactgaggggcataaggcagagggagagaccaagacaggttttagagcagaagtgaaagtttattaaaaagctttagaataggaacaaaaggaagaaaagtatacttggaagagggccaagcaggtgacgagagttcaaggacatgtttggacctttgacttgggatcttatacattggcatacttctggggtcttgcatcccttctttcctgattcttcctttggggtgggatgtctacatgcacagtggcctgccaacacttgggaggtgagcgtgcagtgtgtttactgg

SEQ ID NO: 575214 - DNA, 539 bp, Homo sapiens
atttctgaaatatctcaaaagatgcccacttgttaaattgactgacccattttgtgggtaaaagtactcccctcttttgtaggacacacttaaacacattgctctggaagaagttttgagtcagaaaaggacagttaccccacagacatgggtctatttaaagaataaaagcaagatggttcaggccactgggatggcccttgtagactcagtctcagtcgcytgggagggtcactgtagtttttgaggttctcgcaatagagagagcctgtgtccaggcttctcggtcattgatggccttgggtgcgggggcgtgcaaagagagcagctatttagcaagagcatgttttgttctggaacattatgaggaaaacagcacttaaaaccaatcaaattagcatcaataaaagtcacagatttttcatcaaaattgagatgcatatggatattattgctattgattaactggttactctttttacaaccataggtgaggccaattcatttttgtcttttcctagttttacattcctcctact

SEQ ID NO: 575215 - DNA, 359 bp, Homo sapiens
gaatgaactcaacaaaagtctattctggtgcaatacatcttctaattgcagattgtccgccccagtaaacgtctattgtttgggaaatggggtaaggaggakgcacacttctttgctagttaatggcctagcatcaactccagctgaattttggaggtagaagagtgagtctgtgtgcttctgcactgtacgcatgcatgcatgtcagtttagtgggtggcatgtctacttataagctgatgtgcagacagtatgcatgggtattggtcatgtgtgcagaccctcaaggtaaacatgtgtggcatttgttggatgtacgtgtgatttctttctgtatccacatatgtgtatatccatgt

SEQ ID NO: 575216 - DNA, 541 bp, Homo sapiens
gctgcttcagctccagccatggttaaaaggagccaaggtacagctcaggccattgcttcagagggtacaagccccaagccttgacagcttccatgtggtgttggtcctgtgggtgcacagaagacaagaattgagatttgggaacctcctcctagatgtatggaaatgcctagatgtccaggcagaggtgtgctgcagggacagagccctcatggagaacctctgctcaggcagtgcagaagggaagtgtgaggttagaccccccacacaaagtttccaatggggcactgcctagtggagctgtgagaagaggaccacgatcctccagaccccagacccctccagaatggtcgatccacttacagcttgcatcgtgcacctggaaaagccacagacactcaatgccagccattaaagcagccaggaggatagctgtacctgcaaagccacagtgrtggagctgcccaaggctgtgggagctcacttcttgcaacagcataacctggatgtgagacatggagtcaaagtagatcattttgga

SEQ ID NO: 575217 - DNA, 543 bp, Homo sapiens
ccatgagaataggtgtctgagctctcttgtcgagctctgtatcactagaatctgaaggaatacctggctcataacagtcctcagaaaccacatacgggttgaatgactgaatgattgagccaatccatctatccatcttggtgtctccatctctttgctcatcttcctgcctgacccctcagactgacacttggttcaggctgtgtgtagggtcttggcttccctctatcttgggcttctgtggcccgatgttctgtggcgtaaggtctgtcatccccactccttgcttcaggctcagctccaagattctcaggctgggcttaaagggggacctcaaacacaggaagcaacagaagactatttacaccccctctctgctgaggggagggaagtcctaatgccctcctggctgatatctggctggtccaggcgagtcacttgcaagggagmtgggatggtgactctagggtagggtggcggaggggcctgagcctgcaagtgggaggagagagggatctcaagaacagcatggctcatcaagaa

SEQ ID NO: 575218 - DNA, 637 bp, Homo sapiens
taacatgtgacttactttggaagtaagtatggaaaaatggaaagttaatattcttgtgcaccctgtaacctgccaagcctrtgtattttcttcatttagaattggggcaaaatcaagagacagtctataaaataattgaccaatactcatcaaaattgccaagatcatgaaagacaacgaaagaatgcaaagtggtcacatattggaagacaataaaaagatatgctgacaaaatgccacgtggcatcttggattggattttgaagcaggaaaaggacactagtggaaaaataaataaaattctaatgagatcaatagtttagttaataatgttataccactgttaatttcccggttttgattattgtactacgggaagctaggtaagagtatacatgaggtcaggggtggtggctcatgcctgtaatcccagcactttgggaggctgaggcaggcagatcacaagatcaggagatcaagaccatcctggctaacatggtgaaaccccgtctctactaaaaatacagaaaaattagctgggtgcagtggcatccgcctgtagtcccagctacccaggaagttgaggcaggagaatagcttgaatctgggaggcggaggttgcagtgagccaagatcc

SEQ ID NO: 575219 - DNA, 637 bp, Homo sapiens
taacatgtgacttactttggaagtaagtatggaaaaatggaaagttaatattcttgtgcaccctgtaacctgccaagcctatgtattttcttcatttagaattggggcaaaatcaagagacagtctataaaataattgaccaatactcatcaaaattgccaagatcatgaaagacaacgaaagaatgcaaagtggtcacatattggaagacaataaaaagatatgctgacaaaatgccacgtggcatcttggattggattttgaagcaggaaaaggacactagtggaaaaataaataaaattctaatgagatcwatagtttagttaataatgttataccactgttaatttcccggttttgattattgtactacgggaagctaggtaagagtatacatgaggtcaggggtggtggctcatgcctgtaatcccagcactttgggaggctgaggcaggcagatcacaagatcaggagatcaagaccatcctggctaacatggtgaaaccccgtctctactaaaaatacagaaaaattagctgggtgcagtggcatccgcctgtagtcccagctacccaggaagttgaggcaggagaatagcttgaatctgggaggcggaggttgcagtgagccaagatcc

SEQ ID NO: 575220 - DNA, 528 bp, Homo sapiens
tggccaacatggtgaaaccctgtgtctcaaaaaaaataataataataaaataaattagctggatgtggtggcaggcgcctgcaatcccagctgctcgggagctgcggcacgagaatcacttgaacctgggaggcagcaattgcagtgagccgagatcatgccattgcactccaacctgagcaacagagtgagactctgttttaaaaataaataaataataaaagagaggcaattctattattgggtaaatcaataactcttatctatagggaggtacactagaacaaggataaagttgtgattgacaaagaagcaggagtcactcgttgtgactgaaaaaggagtatttagtattttatgaatgacaccatgaccttgtttttgtytgtgcttttaaaaatatggtcttgttttgtctcattttatcagagtaaccttgatctcatttatctctgagtaaccttgtctgaggttgatattctgtgagattgtttatatctcataggtgaataacatggcctagctgtg

SEQ ID NO: 575221 - DNA, 586 bp, Homo sapiens
gatctacaaaatggagcaattccttcacatgataccttctgatttgaayagtcacttagctttgccgttctccccacattgactatcttcttggtaaccacaagtctcagagttactttcataattgtattatgcaaatgagctttccacttgtccgggcaccatcttgtctgctgcttactgcacgtgtggctgacaaagagagaagggaagatggagccactattttgaacacgattggcacaaactaccagcatctatatctgcagcctgactttacaggctgctcttgttagaaaatgatttggggactgcttgtcattaaaagggaaaaccttaccaaggactctagcactcattatctgcctaagtgatttcttcttaagtcctatatcactatgatggataacaataaccaaaggaatgaatattttgctttttccttattagtttgcatttccttatgcatccagtgaaccaactcccccagagttgcatccatctctaaattccactggtaaattttacctttagtaactgaatgcagcacagctgctgcttcataccgtaggtgagccagcggcca

SEQ ID NO: 575222 - DNA, 586 bp, Homo sapiens
gatctacaaaatggagcaattccttcacatgataccttctgatttgaatagtcacttagctttgccgttctccccacattgactatcttcttggtaaccacaagtctcagagttactttcataattgtattatgcaaatgagctttccacttgtccgggcaccatcttgtctgctgcttactgcacgtgtggctgacaaagagagaagggaagatggagccactattttgaacacgattggcacaaactaccagcatctatatctgcagcctgactttacaggctgctcttgttagaaaatgatttggggactgcttgtcattaaragggaaaaccttaccaaggactctagcactcattatctgcctaagtgatttcttcttaagtcctatatcactatgatggataacaataaccaaaggaatgaatattttgctttttccttattagtttgcatttccttatgcatccagtgaaccaactcccccagagttgcatccatctctaaattccactggtaaattttacctttagtaactgaatgcagcacagctgctgcttcataccgtaggtgagccagcggcca

SEQ ID NO: 575223 - DNA, 586 bp, Homo sapiens
gatctacaaaatggagcaattccttcacatgataccttctgatttgaatagtcacttagctttgccgttctccccacattgactatcttcttggtaaccacaagtctcagagttactttcataattgtattatgcaaatgagctttccacttgtccgggcaccatcttgtctgctgcttactgcacgtgtggctgacaaagagagaagggaagatggagccactattttgaacacgattggcacaaactaccagcatctatatctgcagcctgactttacaggctgctcttgttagaaaatgatttggggactgcttgtcattaaaagggaaaaccttaccraggactctagcactcattatctgcctaagtgatttcttcttaagtcctatatcactatgatggataacaataaccaaaggaatgaatattttgctttttccttattagtttgcatttccttatgcatccagtgaaccaactcccccagagttgcatccatctctaaattccactggtaaattttacctttagtaactgaatgcagcacagctgctgcttcataccgtaggtgagccagcggcca

SEQ ID NO: 575224 - DNA, 586 bp, Homo sapiens
gatctacaaaatggagcaattccttcacatgataccttctgatttgaatagtcacttagctttgccgttctccccacattgactatcttcttggtaaccacaagtctcagagttactttcataattgtattatgcaaatgagctttccacttgtccgggcaccatcttgtctgctgcttactgcacgtgtggctgacaaagagagaagggaagatggagccactattttgaacacgattggcacaaactaccagcatctatatctgcagcctgactttacaggctgctcttgttagaaaatgatttggggactgcttgtcattaaaagggaaaaccttaccaaggactcyagcactcattatctgcctaagtgatttcttcttaagtcctatatcactatgatggataacaataaccaaaggaatgaatattttgctttttccttattagtttgcatttccttatgcatccagtgaaccaactcccccagagttgcatccatctctaaattccactggtaaattttacctttagtaactgaatgcagcacagctgctgcttcataccgtaggtgagccagcggcca

SEQ ID NO: 575225 - DNA, 536 bp, Homo sapiens
ccaaatattacatgttctcatttataagtgagccgagatcgtgccactgcactccagcctgggcgaaaaagtgagactctgtttcaaaaaaaaaaaaaaaaaaaaaaaamcttcctattgactatgtgatgggatcaataaaacccaaactaaaaaaataacttccctatctaactatgtgatgggatcaataaagcccaaacttcagcaccacacaatatgccctcataacaaacctgcacatgtacccccgagtctaaataaatatggaaattaaaaatactactaataaataaataataattgaagccacatggtggcttatgcttataatcccagcaatttcaaaggccaaaatgggaaaattactgcttgaggccaggagttcgagactagcctaggaaatatagtgacagcctgtgtataacaaaaaaaaaatctgaaaattagccagttgtagtggtggacacctgtagtccccactactcaggaggctgaggcagcaaaatcccttgaacccaggagtttgaggctgc

SEQ ID NO: 575226 - DNA, 605 bp, Homo sapiens
gagaaaacattttgcttagctctatgacatgaacttatttaacaaaaagtagtgttcctccagggcatgaatgaataaacatggattgccaattcatattccactaccatttgaaaatttgagaatggacaaaagtgttggacataacagatgttaattaatctgacacgtattgtgtaataaaacaaaatttctaattctcaagtattaacttttaaaatgagttacaaaaaaactagatccttattatagaattgataccttgcaaactgtttgaaatggatttatttctgtaatgacaagcatttctatcattttagaatattttataaaaataacattattctgttgataaatgactacattattctgttgacaaaaattaacagagttaatttktaatcgatgtgtgccttacaaaaataaaattaaagcaatcactcacggtagcattgatcgcttaaaataaagctgtagaggatctttatttttatatttacatttgattaaaaaataaaaatccattccctagatgccacacttttgcttttaaaccagagtgatatattgattcaagtgatgagaaattagtcttctgtcaaccc

SEQ ID NO: 575227 - DNA, 590 bp, Homo sapiens
tgaccccttgtgcttcccgggtgaggtgatgcctcgccctgcttcggctccgcatggtgcgctgcgcccactgtcctgcacccactgtctggtactccccagtgagatgaacccggtacctcagttggaaatgcagaaatcacccatcttctgtgttgctcacactggtagctgtagactggagctgtacttatttggccatcttggctccacyccaatatctttatcctaaaggataatttcctcagatgtagaattttcagttatcttcattcagaacttgaaaaatgctgtgctgtttcttttttggtgtttattgttttagttggaaaattctttgtcattcaaattggtgctctcaagtaaacaatgcgtcatttgtgtctgttgccttcaagattttttcttgtttttagcttacaaagtttaattgtgtgtcttctcatggatttatttgggtttatgctatttgggattcactcaacacacacagagaaacaaacacacacacatgtacatttacagatttccttaaaaagaaagatacagctcaagaatatagagtttatagacattgtaggtttaagttt

SEQ ID NO: 575228 - DNA, 590 bp, Homo sapiens
tgaccccttgtgcttcccgggtgaggtgatgcctcgccctgcttcggctccgcatggtgcgctgcgcccactgtcctgcacccactgtctggtactccccagtgagatgaacccggtacctcagttggaaatgcagaaatcacccatcttctgtgttgctcacactggtagctgtagactggagctgtacttatttggccatcttggctccaccccaatatctttatcctaaaggataatttcctcagatgtagaattttcagttatcttyattcagaacttgaaaaatgctgtgctgtttcttttttggtgtttattgttttagttggaaaattctttgtcattcaaattggtgctctcaagtaaacaatgcgtcatttgtgtctgttgccttcaagattttttcttgtttttagcttacaaagtttaattgtgtgtcttctcatggatttatttgggtttatgctatttgggattcactcaacacacacagagaaacaaacacacacacatgtacatttacagatttccttaaaaagaaagatacagctcaagaatatagagtttatagacattgtaggtttaagttt

SEQ ID NO: 575229 - DNA, 624 bp, Homo sapiens
ctcaatttcgtatttgcaactratatcagtaagctgggagaggtccccaaatgccagtagtgttactggggaatccttgctcccagaggtcccaagatggtggcaggccgcttcgaagatggcggcaggccaatttcaagacggtggcaggcctcgtgttctctgacctggggttcttggcctcagggattccaaggaatggaatcttgggccatgtggtgagtgttatagctctgttagaagctgtgggtcatggaagagaaccatggaacccagtgactagtgttcagctcgattaggacgaacctgggcacttagccatgcaggaacaatggcaagccgctagcccgatcaggagtggcaatgggcgcctcactggatcaggagcacagcggacaccctgccggttctggagggatggaagtcagcggcaggtctgcgatggcggcaaacagcagtggtggactgcaagcaaaagctcagctccagccataacaaacacggaccaaagagagtgcagttgcaagatttaatagagtgaagacagagctctggtacagacggaggggacccaaagagggtagctgttgctggcttgaatgcctggatttatatcccaatcat

SEQ ID NO: 575230 - DNA, 429 bp, Homo sapiens
  misc_feature 79: n = A,T,C or G
ttcaccacctgctaactctagtggtcttgagccttgaataaacatmagcagcagtcaggcagtagcagtcacaggtctntgggtgtaacccccgtacctggggtggtctaaaaggcaataggtttggagatcattctgtcaaaccatctgcttaaacatgatggtggccatggttagaccaaggaattacatgagcattggcccactggaacacttcacttgtgaagtcagttctttaattgcaaacaatgctgtggggaattccacgaaaatggataaggcattctgtaactgtacagatggtagttttggcagaaacattgcatgcagagactccaaatacatatttgactgtctattccagtaagaataaaacatttccccttccatgatggaagtgttccaatgtaatcaacctgccaagaggta

SEQ ID NO: 575231 - DNA, 405 bp, Homo sapiens
ttcccaataatatttgagcttatttttgtatagggtgtaarctaaggacctaattctatttttctgtatgtgtatatccagttttgccaatgccgtatattgaagagactgtccttttcctatgatgtatttttggcgtctttgtcaaaaatcaattgatggctaggtgttggtggctcattcctgtaatcccagcgctttgggaggctgaggtgggaggattgcttgaggccaggtgtttgaaccagcataggccatttgatgaggacccatctctacacacacaaaaaaaaattagttgggtctggtgctgtgggcctatagttgtacctacttgtgaggctgaggcaggagaatcacttgagcctagggattcaagcctgcagtgaataaagaaaatgtcat

SEQ ID NO: 575232 - DNA, 405 bp, Homo sapiens
ttcccaataatatttgagcttatttttgtatagggtgtaagctaaggacctaattctatttttctgtatgtgtatatccagttttgccaatgccgtatattgaagagactgtccttttcctatgatgtatttttggcgtctttgtcaaaaatcaattgatggctaggtgttggtggctcattcctgtaatcccagcgctttgggaggctgaggtgggaggattgcttgaggccaggtgtttgaaccagcataggccatttgatgaggacccatctctacacacacamaaaaaaattagttgggtctggtgctgtgggcctatagttgtacctacttgtgaggctgaggcaggagaatcacttgagcctagggattcaagcctgcagtgaataaagaaaatgtcat

SEQ ID NO: 575233 - DNA, 405 bp, Homo sapiens
ttcccaataatatttgagcttatttttgtatagggtgtaagctaaggacctaattctatttttctgtatgtgtatatccagttttgccaatgccgtatattgaagagactgtccttttcctatgatgtatttttggcgtctttgtcaaaaatcaattgatggctaggtgttggtggctcattcctgtaatcccagcgctttgggaggctgaggtgggaggattgcttgaggccaggtgtttgaaccagcataggccatttgatgaggacccatctctacacacacaaaaaaaaattagttgggtctggtgctgtgggcctatagttgtasctacttgtgaggctgaggcaggagaatcacttgagcctagggattcaagcctgcagtgaataaagaaaatgtcat

SEQ ID NO: 575234 - DNA, 470 bp, Homo sapiens
  misc_feature 1, 2, 3, 4, 5, 6, 7, 8, 9, 10, 11, 12, 13, 14, 15: n = A,T,C or G
nnnnnnnnnnnnnnngactctaaagatccctgtgtcttcttctgcgctgatacactggggcatgtcctgtggccttcagactctgggacttaaaccatcagctccctgttctcaggccactgaactcagacaaattacaccactggtttttctgggtccttggcttgcaggtggcagattgtagacttctcagcctccataattgggtgagccaattcccatgataaattccctcttatctatctatccatcygtctgtctgtctgtctgtctgtctgtctgtctgtctatctatctatctatctatctatctatctatctatctatctatctatctacctacctacctacctacctacctacctacctacctacctatctatcctattgtttttttttcctctggagaaccctgacgaatacagggtgaataggaactatcttgtaatactcaagtgagagtatattcc

SEQ ID NO: 575235 - DNA, 452 bp, Homo sapiens
atacactggggcatgtcctgtggccttcagactctgggacttaaaccatcagctccctgttctcaggccactgaactcagacaaattacaccactggtttttctgggtccttggcttgcaggtggcagattgtagacttctcagcctccataattgggtgagccaattcccatgataaattccctcttatctatctatccatctgtctgtctgtctgtctgtctgtctgtctgtctgtctrtctatctatctatctatctatctatctatctatctatctatctatctacctacctacctacctacctacctacctacctacctacctatctatcctattgtttttttttcctctggagaaccctgacgaatacagggtgaataggaactatcttgtaatactcaagtgagagtatattcctagatacagacatacttctgaaggagaattc

SEQ ID NO: 575236 - DNA, 470 bp, Homo sapiens
  misc_feature 1, 2, 3, 4, 5, 6, 7, 8, 9, 10, 11, 12, 13, 14, 15: n = A,T,C or G
nnnnnnnnnnnnnnngactctaaagatccctgtgtcttcttctgcgctgatacactggggcatgtcctgtggccttcagactctgggacttaaaccatcagctccctgttctcaggccactgaactcagacaaattacaccactggtttttctgggtccttggcttgcaggtggcagattgtagacttctcagcctccataattgggtgagccaattcccatgataaattccctcttatctatctatccatctgtctgtctgtctgtctgtctgtctgtctgtctgtctatctwtctatctatctatctatctatctatctatctatctatctatctacctacctacctacctacctacctacctacctacctacctatctatcctattgtttttttttcctctggagaaccctgacgaatacagggtgaataggaactatcttgtaatactcaagtgagagtatattcc

SEQ ID NO: 575237 - DNA, 470 bp, Homo sapiens
  misc_feature 1, 2, 3, 4, 5, 6, 7, 8, 9, 10, 11, 12, 13, 14, 15: n = A,T,C or G
nnnnnnnnnnnnnnngactctaaagatccctgtgtcttcttctgcgctgatacactggggcatgtcctgtggccttcagactctgggacttaaaccatcagctccctgttctcaggccactgaactcagacaaattacaccactggtttttctgggtccttggcttgcaggtggcagattgtagacttctcagcctccataattgggtgagccaattcccatgataaattccctcttatctatctatccatctgtctgtctgtctgtctgtctgtctgtctgtctgtctatctatctatctatctatctatctatctatctatctatctatctatctacctacctacctacctacctacctacctacctacctacctatctatcctattgtttttttttcctctggagaaccctgacgaatacagggtgaataggaactatcytgtaatactcaagtgagagtatattcc

SEQ ID NO: 575238 - DNA, 628 bp, Homo sapiens
cctgtagtcccagctactcgggaagctgaggcaggagaatggcgtgaaccccggggggcggagcctgcagtgagccgagatcgcgccactgcactccagcctgggcaacagcgagacaatgtctcaaaaaaaaaaaaaaaaaaaaaaaaaaaaacctaccccatttgaaaaaacttattcactatcacaaaaacagcatgggaaaaacctgcccccatgattaaattacctcccactgggtccctcggacaacacgtggcaatttaaaatgaaatttggatgaracacagtgaaactatatccgcttgtttttggaaactcagtgccccttacttataatgtcaaaagttactgatgaattcttttatctctgaagttactggtaaaatttatcagaagacttggtcttgcccttttagttgtatttatttgttttttgagtgtttaccgttgatgatgaattagctccaagcattcaggatgagcctgtgccttagttttatataacagttcttattgcaatgtcaaaacagtgatagtcatcaaaaatgtttcctctgatagcacgttattcaagtacttcacctcttaactaatgtgataatgtagtaaataaaatatctatttt

SEQ ID NO: 575239 - DNA, 628 bp, Homo sapiens
cctgtagtcccagctactcgggaagctgaggcaggagaatggcgtgaaccccggggggcggagcctgcagtgagccgagatcgcgccactgcactccagcctgggcaacagcgagacaatgtctcaaaaaaaaaaaaaaaaaaaaaaaaaaaaacctaccccatttgaaaaaacttattcactatcacaaaaacagcatgggaaaaacctgcccccatgattaaattacctcccactgggtccctcggacaacacgtggcaatttaaaatgaaatttggatgaaacacagtgaaactatatcckcttgtttttggaaactcagtgccccttacttataatgtcaaaagttactgatgaattcttttatctctgaagttactggtaaaatttatcagaagacttggtcttgcccttttagttgtatttatttgttttttgagtgtttaccgttgatgatgaattagctccaagcattcaggatgagcctgtgccttagttttatataacagttcttattgcaatgtcaaaacagtgatagtcatcaaaaatgtttcctctgatagcacgttattcaagtacttcacctcttaactaatgtgataatgtagtaaataaaatatctatttt

SEQ ID NO: 575240 - DNA, 533 bp, Homo sapiens
ctcacttcagcctccaccttctgggttcaagcgactctcctgcctcagcttcctgagtggctgggaataygctctcgtgaccattcccggctattttttctattttttttcttttttttttttttttttagtagggatggggtctcaccatgttggccaggctggcctgaaactcctggcctcaggtgatctgctcgcctcagccacccgaagtgctggattacaggtgtgagccactgtgcctggtatttatcttttgccatttattagtttagtctttctttatgttaatgtaaaactatggatatttattttatacctcgtgttattatccaataattatttattttctttttcaaattatttccgctttggccattggaagctctctcagttggctctgaagttcattcagaatctgccattcatttccttaattattcatttcagtaaacctgttcagcagcgtcagtattgttaaacagtacccagtgggaaacaactttaacaagtagagtatgtagtgtcccatt

SEQ ID NO: 575241 - DNA, 599 bp, Homo sapiens
ttataaaacatctgtgtgtatatagggaaaattagaaagtcactgtacatggacaaagaaaagcagaggctcagaaaagacctgagaagaccttaagtttacacttcaggctgatctttgatataaaaacagcctacaacaattaaagcaaaagaaaaacaaaaaccagcacactctggtgaagagggaagaatctgattactagagttaccacattattagtgcagagttttggttaccaacaacaaacaaaatcacaaggcatacaaataaatgggaaaaatgtggttcattcaaataaaaatcaaacaaacagaaactttccctaaaaaagaycaaagggcagacctactagacaatctttttaaaaaactgtctaaaagatgttcaaagagctaaatgaagatttggagaaagtaatgacaatgatggatgaataaaatggaaatatcaacaaagaaaaatattctgtaatagaaaggtacaataactaaaatgaaaaagtcactagagggattcaaagcagaaatgaacaagtggagggcaaaatcattgaacctgaagatggaactattgaaatcatttatactgaggagcag

SEQ ID NO: 575242 - DNA, 599 bp, Homo sapiens
ttataaaacatctgtgtgtatatagggaaaattagaaagtcactgtacatggacaaagaaaagcagaggctcagaaaagacctgagaagaccttaagtttacacttcaggctgatctttgatataaaaacagcctacaacaattaaagcaaaagaaaaacaaaaaccagcacactctggtgaagagggaagaatctgattactagagttaccacattattagtgcagagttttggttaccaacaacaaacaaaatcacaaggcatacaaataaatgggaaaaatgtggttcattcaaataaaaatcaaacaaacagaaactttccctaaaaaagaccaaagggcagacctactrgacaatctttttaaaaaactgtctaaaagatgttcaaagagctaaatgaagatttggagaaagtaatgacaatgatggatgaataaaatggaaatatcaacaaagaaaaatattctgtaatagaaaggtacaataactaaaatgaaaaagtcactagagggattcaaagcagaaatgaacaagtggagggcaaaatcattgaacctgaagatggaactattgaaatcatttatactgaggagcag

SEQ ID NO: 575243 - DNA, 612 bp, Homo sapiens
atgacacatggggattgtgggagctacaattcaagatgagatttgggtggggacacagccaaaccacatcaagtggcatacccttcaggccatggaaactatccatgaagccatgggtgttgactggagcagggatggctttatgacagaggtgttcccagtggaaggctcacactgtttattcatgcttccaaaccatgttttatatakatagatagatagatagatagatagatagatagatagatagatagatagatagatatagatagatagatagatagatatacatacacacacattataggtgatataccacctataatgaatgataagatgttgccagtcttctaacttagagtttcctggcaggtttaaaatgaacatctcaggttacatggtcaaatgttgtttcatgatcaggcattcagttgatgtgtgtccagggcaaaactaagagctgtttctcaaaaggaaaagagtttttaggtaaaggatcatggctttgctctaaaatcctagggtcttccttgtaattctctgattgtgtcttaccaccagttttgacagcttcctaatccactagaaacactcccagcaattgagtccact

SEQ ID NO: 575244 - DNA, 636 bp, Homo sapiens
ccactgatcagctaggaccaataaagactgtcccctgtagctatttctctagactcacatgaacactcaaaatggtgaacaaaagcagttatctgtctgcaagtaacatggaggaaatatctactgggtaaatgtccagctgtgtctttcacagagagggaaaatatttatatgcttatcgtatggttcatgagtaataaaaaattctaaaacattggattagagacacaaagcagcagtaagaatctatcaatggttatctagcattttttaatgttctgaaagaattaatgtctttctttgcaattaaatgacaaagccttagttctttaaacaaatkcaaaaaacaaaacacagatcaaagagggccttgaaacaagaagtgagcatgccaggaaaatgtgatgaaataaagagtatgtaacatacagaggacgtgtacagcaaagatattattgccttatgtgttttaccaaagaattaataccaggtccaccaggagaataaactgcatattaatgtcagaatgtaggtgtgagggtctctatgaaagaaattacagtaaaatatatgcattgctctcatggcagagaatagtatggagaacagtgagtgtgcatatgtgtgtgtgtgtgt

SEQ ID NO: 575245 - DNA, 557 bp, Homo sapiens
atcacaaggtcaagagttcgataccagcctggccaacatggtgaaaccccgtctctactaaaaatacaaaaattagctgggcaaggtggcacatgcttgtagtcccaactastagggaggctgaggcaggaggatggtttgaacctgggaggtggatgttgcagtgggccaagatcgtgctgctgcactccagtctgggcgacacggtgagactccctctaaaataattaataataataataataataattaataaatctaaaagaagtagtagaggagaaattaagaatttagaaacttgttgcttgaggtggctttggattctttttctccaccctttaatgtttttaaaatgttactctcacttcacattgatttctagttggcaggggcttctgtacataacttccaaagtgatatttaagaggaataaatgcaaagatctgcacagtttccaaaaacaaattgcaaaatacaggttggagaagatatggttttatagctgtatatatgttaaagacttaaaaaagatttgggggtaatttttgcttgttttt

SEQ ID NO: 575246 - DNA, 575 bp, Homo sapiens
ggtgccatcttggctcactgcaaccattgctggctgggttcaagcaattctcgtgcctcagacttcgcagtagctgagattacaggtgtgtgccaccacgcctagctaatttttgtatttttagtagagatggggttttatttactgtgttgaccaggctggtctcgaactcctggccttaagtgatccaccygtctcagcctcccaaagtgctgggatcacaggtgtgagccaccgtgcctggcatgttttttcttaaatttgacactgtattttttatttccaggaatttgtaccgaggaaataatcaaaattgtctaatattatatgcaaaatgttcattatagcattatatctgagagcaaaacataagtcaattgcaatgttaatcaataggttaaaaaaaggtggttcattcataggataaaacactatatagtcattaaaatgatatatccaaagattatcttattatgcagaacggtgctcatggtgcagattaaatgttaaaagcaggctataacattctacatagggtaagaaacaattttctaaaaatgtacatatgtgcatag

SEQ ID NO: 575247 - DNA, 673 bp, Homo sapiens
ggtaacttcaaaccaaaatcatacaacagatacacaaaaagtaaaaagcaagaaactaaatcatataaccaaagagtatcaccttcactaaaaggaagacggaaaggaaagaaagaaggaagagaagaccacgaaactagcagaaaacaaatcacttacttatcaataataacattgaatgtaaatggattaaactctccaatcaaaagacatagatgagctgaatggatttttaaaaaacaagatcaatgatctgttatccataataaacacacttcacccataaagacacacacagactgaaaataaagggatagaaaaagatactccatgccaatggaaaccaaaaaagagcagtaaaccaataraataactatacttatatcagacaaaacagatttcaagacaaaaattatcagaagagacaaagaaggtcactgtataatgataaaagggtcacttcagcaagaggatataaccattttaaatatacatgcacccaatactgaagcacccagctatataaagcaaatattattagagctaaagagacaaatagaccccaatacaataataactggagacttcaacaccccactttcagcattgaacatatcttccagacagaaaatcaacaaagaaacattggacttaatcagcactacagaccaaa

SEQ ID NO: 575248 - DNA, 673 bp, Homo sapiens
ggtaacttcaaaccaaaatcatacaacagatacacaaaaagtaaaaagcaagaaactaaatcatataaccaaagagtatcaccttcactaaaaggaagacggaaaggaaagaaagaaggaagagaagaccacgaaactagcagaaaacaaatcacttacttatcaataataacattgaatgtaaatggattaaactctccaatcaaaagacatagatgagctgaatggatttttaaaaaacaagatcaatgatctgttatccataataaacacacttcacccataaagacacacacagactgaaaataaagggatagaaaaagatactccatgccaatggaaaccaaaaaagagcagtaaaccaatagaataactatacttatatcagacaaaacagatttcaagacaaaaattatcagaagagacaaagaaggtcactgtataatgataaaagggtcacttcagcaagaggatataaccattttaaatatacatgcacccaatactgaagcacccagctatataaarcaaatattattagagctaaagagacaaatagaccccaatacaataataactggagacttcaacaccccactttcagcattgaacatatcttccagacagaaaatcaacaaagaaacattggacttaatcagcactacagaccaaa

SEQ ID NO: 575249 - DNA, 577 bp, Homo sapiens
ttttaaggcagggaggcagaggctacaggcaaagtcataaatcaktacacagaggctatacattggtttgacctaaaaaggcagtttatcttgaagtgggagcttacaggtagattcagaaactttctgatttgcaactggttaaggaagcagagctttgtttacagacttgggatcagcagaaaagaattttcactctgttctatgggtgtgagttcttccaggcccctcaggaataaatttagagcaaaggatggcagtcagatgtcagtcctcggtcaccctttatctgaggtccagatccaggtatgttggtgtaagcctcaaagagtctcctagcactttgagggacataaagggaattaggaacatgactacaaggcttagaaattcttctcataagacagtatggaatcactcactagagttttggaattacagtttggaattagtttggaattagaaaatggatggcatttttcatttggtagtagcctggattcctgaaaaattagggtcatatgtcaagatattatctttagtgtctataaggaaccaaacattttgggactgtaac

SEQ ID NO: 575250 - DNA, 561 bp, Homo sapiens
aaattgtaatgtatgccttcacacgggcatgtgtgtgtgtgtgtgtgtgtgtgtgtgtaaagagacagaggaggaagggggtgagagagagagggaagcagagagactagagagagagagaggtgtcagatcctgtaccagatattataaaaacartgaataaagggaaaaagtttcaatcttcctgtctttcagtgattaaagcctaattatgcagaaatgagattctttgcagcaattttctttagctatctttccatacacacacatttctatcataacctcagcaattttgtctaagtctacagtcagtgctccatttcatgaatttgtatttatttgttaatctcatgaatttgtctttatttgttaatctcaggaattttttgctaggggcgtaagtcaatacttttgcatttaagtctagataatctgagcaagtattagaataaatactttaatgtctaataatatgttcaggtgttgacctcatacaaatagcattgaatacataatttggctttcaatcattggaacactatcggtatggaattattttct

SEQ ID NO: 575251 - DNA, 561 bp, Homo sapiens
aaattgtaatgtatgccttcacacgggcatgtgtgtgtgtgtgtgtgtgtgtgtgtgtaaagagacagaggaggaagggggtgagagagagagggaagcagagagactagagagagagagaggtgtcagatcctgtaccagatattataaaaacaatgaataaagggaaaaagtttcaatcttcctgtctttcagtgattaaagcctaattatgcagaaatgagattctttgcagcaattttctttagctatctttccatacacacacatttctatcataacctcagcaattttgtctragtctacagtcagtgctccatttcatgaatttgtatttatttgttaatctcatgaatttgtctttatttgttaatctcaggaattttttgctaggggcgtaagtcaatacttttgcatttaagtctagataatctgagcaagtattagaataaatactttaatgtctaataatatgttcaggtgttgacctcatacaaatagcattgaatacataatttggctttcaatcattggaacactatcggtatggaattattttct

SEQ ID NO: 575252 - DNA, 561 bp, Homo sapiens
aaattgtaatgtatgccttcacacgggcatgtgtgtgtgtgtgtgtgtgtgtgtgtgtaaagagacagaggaggaagggggtgagagagagagggaagcagagagactagagagagagagaggtgtcagatcctgtaccagatattataaaaacaatgaataaagggaaaaagtttcaatcttcctgtctttcagtgattaaagcctaattatgcagaaatgagattctttgcagcaattttctttagctatctttccatacacacacatttctatcataacctcagcaattttgtctaagtctacagtcagtgctccatttcatgaatytgtatttatttgttaatctcatgaatttgtctttatttgttaatctcaggaattttttgctaggggcgtaagtcaatacttttgcatttaagtctagataatctgagcaagtattagaataaatactttaatgtctaataatatgttcaggtgttgacctcatacaaatagcattgaatacataatttggctttcaatcattggaacactatcggtatggaattattttct

SEQ ID NO: 575253 - DNA, 615 bp, Homo sapiens
acacaagtgactataaactctgagctgaaactcattatgtattttgatttttgttcctagtgcaagtggtaaattccttctgccttatgcacataataattagtgtcattatctgctgctttatcataatactatatacaccaaaatgtaaattagcagcccagccctttagaaatgatggagtggatgactgaagtgcaatttactgattaaaagtttcattttctatatctcactgatgaatgcagcccwttgcttccctgagatgtcaaatcctgaaggatatcatgttgggctggaacattctaagaatggagattatgtgaatggatatggcaacgtaattattgtgccttttttgccaacactttgtatggaaatttaagtaaaagtttaaaaaagccataaagaagaaaaacctgtttgtcaattttaataaagttaagggtatgaggtattaatatcacaccgacacaataaaaagtcataagtctaagactgcaaaacctaaaagtcatataggatattctttcattgaacatttaaagatgtatatatacatacatatcccatatatgtgtgggatatgtgatatatatatatattgaaatatat

SEQ ID NO: 575254 - DNA, 595 bp, Homo sapiens
tcaaaacaaaagtgaaaggagtccttgtccggcaatcatgaagtaatatgtacaagactagccctctagcaaaacaaacaaacaaaatacaaactagaaaagtagaaaaaaatatttaattcaactgtagtcagacatttaaaaagaatgtattgtgttccctaagagataggaaacaaaagttgaaacacaaattctccttgaatttctgcctggagacactttccagacgtaatacagcaacagaaaaacaaagaagattgtgatagtcttattggtctgacacaacatgtcacggactttgggaatgttgatgtttctggaacagtcgggggagaataaacgagaggttggaaatttttttwaaaaagtttcagacttcatatagagataaagattttcgtacccagggtaaggctccatacatctgatcaagatataactacaaaagaaaagcaactagccagcaattgtaaccttagcaactaatagatcttactcaggttagtgagaaattgaaaatctatcagccagagtggatcaaccttattgaatactcaaagtgtcagaaaagcttttacttagatgtagggct

SEQ ID NO: 575255 - DNA, 387 bp, Homo sapiens
tatgcagcaaacctagaccaagaagcttaagattattaagcattcagcagccacacaagaaaagccagtgtgacttgccaagttactagctgacagtgagaaaaaawtttaatgtataacagggtgggggaatgagtaccagttggagccctgggggcatttgcagcctgggcctataattcatcctactaactttcctcttctgactttcctctcaggaagaaaggcctgcagatacaatagaaaagccttcacacaaatctgctggagaagtagatccgggtgaaacagcaggaaaactgtcgtaaaaatgcatatctcagatctcctactagtagggtcataagcaacccatgactccagctgctgaggtctaaatctgtcact

SEQ ID NO: 575256 - DNA, 501 bp, Homo sapiens
gaaaactgcaaaacactggttaaagaaactgaagaggacagaaacaaatggaaattcatcccaggctcatggaacctgtattagtctgttttcacagtgctataaagaaatacccaagactgggtaatttagagagaaaagagttttaattgacttacaattctgcatgtctggggaggcctcaggaaacttataatcatggcagaaggtgaagagaaagcaagtaccttcttcacatgacagcaggagggaggagagagagcgaagggagaagacatgcttataaaactgtgagaactgmttcactatcatgagaactgcattggggaaaccgcccccatgatcccctggtccctccctcaacatgtagggattatggggattacaattcaagatgagatttgggtggggacagagccaaaccatatcagaaccaaagaatgaataccctaaaatgacaatactgcccaaacaaatctgcagactcaatgcaatatttat

SEQ ID NO: 575257 - DNA, 625 bp, Homo sapiens
tgctgagaaaaatgtagctcataatgttaatctatttaattgagcttacagtaataattgaaaatacatgactaygttatgtttctgtctctaggtccacttaggagggtaacaatctcttgatccatttactataatttagtaagaaagtaatttaaaagtttgcacagaacagttgtcctggatgtattcacccattctaaaggaagttgaaaggaacacctagctgaacctgtgtttattagaatacagcgagtaaaactacagcttttgtcaatgtgcactgtggcttttgccttctagcaaggaaaaggatcagtattccagatgaacaccatggatcatcaagtcaaaccccttgtcaacaaaataaattcaaatgaaagcttatgtgacttttggaaaaagtagaaaatattctgaaagctgcaaaagacatacaatctaaatcaagatgatacatagttccatatttagcaaattcatttcattctaaatttacactttactgactgtaaaatacatcagacaccagaaaattgcacatcttatttaataaaccaaagaaaaacaaacacacataatttctagaagaatatatacatcatggacacgtcagaagata

SEQ ID NO: 575258 - DNA, 625 bp, Homo sapiens
tgctgagaaaaatgtagctcataatgttaatctatttaattgagcttacagtaataattgaaaatacatgactatgttatgtttctgtctctaggtccacttaggagggtaacaatctcttgatccrtttactataatttagtaagaaagtaatttaaaagtttgcacagaacagttgtcctggatgtattcacccattctaaaggaagttgaaaggaacacctagctgaacctgtgtttattagaatacagcgagtaaaactacagcttttgtcaatgtgcactgtggcttttgccttctagcaaggaaaaggatcagtattccagatgaacaccatggatcatcaagtcaaaccccttgtcaacaaaataaattcaaatgaaagcttatgtgacttttggaaaaagtagaaaatattctgaaagctgcaaaagacatacaatctaaatcaagatgatacatagttccatatttagcaaattcatttcattctaaatttacactttactgactgtaaaatacatcagacaccagaaaattgcacatcttatttaataaaccaaagaaaaacaaacacacataatttctagaagaatatatacatcatggacacgtcagaagata

SEQ ID NO: 575259 - DNA, 502 bp, Homo sapiens
ggtctccgccttccagggaacaggaattttaggrttcatgccagagttagctctaaaaattatcttgaataggtaaaagccttttcaagctcaaaattaactactctagactccttctgggaagggaaatgaagactgcccagtgctgtagctcagtagctaaacttttgccttttcacagtggccatccaggtacaattcaactactggcttaaggaatgagtcttttctggtttgatatctgtgtgacctttacaattggttgattctcttcccctcctcgaactctcttgaattttcctttctctgagcacctgggaggttacctttggtaaagttcaaaagccagtaatattggctgcttggcatggcgaaagtcaggtaataggagatttaaaaggattttttaaagagaactatggttaaaagtcagcttaattaaaagtggatatccaagctatacaaatatttaaaaggcctttatgtcttttttccccttctt

SEQ ID NO: 575260 - DNA, 502 bp, Homo sapiens
atagcaaacacatggaatcaacccaaatgctcaccaatggtagacttctgatatatatacaccgtggaatatwatgcatccataaaaagaatgatattatgtcctttgcaggaccatggatggagctggaggccattatcctaagtaaactaactcaggtacagaaaaccaaatactacatgttctcacttataagtgggagctaaatgatgagaacacagggacacaaagagtggagcaacaaacacaaaggcctacttgagaatggagtttgggaggagtgacagaattaaaaaaaaaattactgttgagtactagtattagcacctgggtgactaaaaaacccgtacaacaaacccccgtgatatgagtttacctatataacaaacctgcacatgtactcctgaacctaagataaaagttaaaaaaaactttaaaaaatgtgctatttagaaaatatgtgttatttagaaaaataccaagcaacttcaaaaaaatgaaa

SEQ ID NO: 575261 - DNA, 550 bp, Homo sapiens
  misc_feature 513, 514, 515, 516, 517, 518, 519, 520, 521, 522, 523, 524,525, 526, 527, 528, 529, 530, 531, 532, 533, 534, 535, 536,537, 538, 539, 540, 541, 542, 543, 544, 545, 546, 547, 548,549, 550: n = A,T,C or G
taaatcaacaagaaaaaacaaatagccccgttaaaaatgagcaaaggacatgaacagacacttttcaaaagaagacatacaaatggccaacaaacatatgaaaccatgctcagcatcactaatgactggagaaatgcaaaccaaaacctcaatgagataccgtctcacaccagactggctattaataaaaagtcaaaaaacagcagatgctggcaaggctgtagagaaaagagaatgaccatacactgttggtgggaatgagarttagtccagcggctgtggaaagtagtctgaatatttcccaaataactagaaacagagctgtcattcaaccagcaatcctcttactgggtatatatatccaaaataaaataactcattctatcaaaaagacacatgcagttacatgtttattgctgcactgtttacaacaccaaagacatggcatcaacacagatgcccatcaacggtacactggataaaggaaagggggtatatatacaacacggaatnnnnnnnnnnnnnnnnnnnnnnnnnnnnnnnnnnnnnn

SEQ ID NO: 575262 - DNA, 279 bp, Homo sapiens
gtaacaaacctgcacgttgtgcacatgtaccctaaaatgtaaagtataataatagtaataaaaactttgccaatagacaatagaaaacaagaaacgtttcatatgacttgaacaataaaaattaacatttttacagtctgccaaatgttaaraatatggaaggcagtctgtatgggaaaaagagccaccttaagagatttggtcattcaatgtaagtggaattcctaaactatcatagcagatcacactgtcaaccatcagatattcttaattactcac

SEQ ID NO: 575263 - DNA, 469 bp, Homo sapiens
taaatgaatactagcttattcaatcaatatattaaagcatgaagagaagcttggtcccttttctcccaatgggcagagcactgttaatttgttcaagtaaaaaaaattatacttaataacccatactcaattatttacttttattaaagcactttttgctcatcattgtaaagtatgcgcttttaaaatacttcaggaaaaattaagactgtgttatatatatatagcatgattctatttctgacatatataaatagattataattatttaaggatacataakggcctgttaactatagttgcttctagggagtagaactggtgattgagaagaaatttctgaaagacttcattttatattttttatgcatttgaattttctactgtgtgcacatatttcttttgaaataaaaattggttttaaaatattttaagaaaatattttataggagaaaaaatagctagtatt

SEQ ID NO: 575264 - DNA, 590 bp, Homo sapiens
catttttgttattcttcttcagaatgaaggattaaactgaagattaaaagaaaatttccacgaagttttgattatgacagcattgtggagcacrtactgggtttgaagctgctttagtattaccttcaatgaatcctgagaaatgcagtgataatgcttagcatattatatatatatatatatatttctttttctttttatattttagataagagtgcccaggagtggaatctggaaatagagtctacatttgatgttgtcagctcaaagccagttggtggtcaagtgatcatagccatccctaagttgcaaacacaacagacatacagcattgaacttcaacctgggaaaaggattgttgagctatttgtgaacattagcaaggtaaatgatggtacttcctgagaagcactggatgaaaagcaatacctgtgctaaagaaatgattagaaaggagggactaagtatgaaagaaaattctactttctctgcttatatttgtcattttcttctctattttagtctctcatatattttctgtgagtatgagctaaagaatgattttcccaaactttaagattaagaaaata

SEQ ID NO: 575265 - DNA, 590 bp, Homo sapiens
catttttgttattcttcttcagaatgaaggattaaactgaagattaaaagaaaatttccacgaagttttgattatgacagcattgtggagcacgtactgggtttgaagctgctttagtmttaccttcaatgaatcctgagaaatgcagtgataatgcttagcatattatatatatatatatatatttctttttctttttatattttagataagagtgcccaggagtggaatctggaaatagagtctacatttgatgttgtcagctcaaagccagttggtggtcaagtgatcatagccatccctaagttgcaaacacaacagacatacagcattgaacttcaacctgggaaaaggattgttgagctatttgtgaacattagcaaggtaaatgatggtacttcctgagaagcactggatgaaaagcaatacctgtgctaaagaaatgattagaaaggagggactaagtatgaaagaaaattctactttctctgcttatatttgtcattttcttctctattttagtctctcatatattttctgtgagtatgagctaaagaatgattttcccaaactttaagattaagaaaata

SEQ ID NO: 575266 - DNA, 444 bp, Homo sapiens
ttacagtaagctaaggttaatttattattgaagaaacaaaaaatatttttcataaatttaatataccctaagtctacagtgtttatgggcgacaggtatccaaaatatacaaagaacacttaaaactaagccataagaaaatgaacaaaaaaatctcaacagacacctcactaaagaagatatacaggtggcaaataattatataaaaataagcatacaycataagagaaattgcaaatgaaaacaaaatgagataccactacatacctattagaatggccattatcccaaaggctgtcaacagcaaatgctggtgaggatgtggaggaacagaaactgtcattcattgctggtgggaatgccaaatgataaagccacttcggaagacagtttggcacttctttacaaaacctaagcatactcttagcacatgtgatcattagt

SEQ ID NO: 575267 - DNA, 510 bp, Homo sapiens
gcacaattttttactggtttcttggctttcctcttcacagtctctaggagctcatggtgtattaaagacattagccctttgtgacatatgttgcaaatatttttatctgcttggtatttgctttttacttcactggtttcctttgccatacaaaaactatttttaaaatagatgtagaatgtattaatctttccttttgcctctaaattttatatattctagtgagaaatatattcactccagattataaatatatgcactcaaatgttgctgtagtttttacggtttaacytttattttttatatcttggtccattcgtaatttaagatgtaagacatgaggcactcaggcagtttcatctctttccaaacagctatgcagtgttccaccatcactcatttaaaagcccatcttcttcctgctgactggagatatagctttttgtcatatgtgaaatttttataaataagtccttccttccttctctctctctctctttccctttcttt

SEQ ID NO: 575268 - DNA, 421 bp, Homo sapiens
ttctagacatgttatctaaaacctggytcatctgtccttccacacagggcctaggggatgccaaattccaggggccagaaagagcttgggataaaaagaaacttcaaggggacggctttgacctgggctgagtctgcctgtgccatccaactggagtctcaagtcctgaggcaggacgtccagatgccccagtgcagggtcctcctgatcaacacctgctcccctgtactcattagcaacctcacccaccctactctcaaagcacacttggctctcgtatccaggagctctgcatctgtagattcagcaacagcagatggaaaatattcagaaaataaattggacggttatgtttctattgaacatgtgcagagtttgttcttgtcattattccctaaagaatccagtatcacgaccattt

SEQ ID NO: 575269 - DNA, 427 bp, Homo sapiens
tgttatctaaaacctggctcatctgtccttccacacagggcctaggggatgccaaattccagggkccagaaagagcttgggataaaaagaaacttcaaggggacggctttgacctgggctgagtctgcctgtgccatccaactggagtctcaagtcctgaggcaggacgtccagatgccccagtgcagggtcctcctgatcaacacctgctcccctgtactcattagcaacctcacccaccctactctcaaagcacacttggctctcgtatccaggagctctgcatctgtagattcagcaacagcagatggaaaatattcagaaaataaattggacggttatgtttctattgaacatgtgcagagtttgttcttgtcattattccctaaagaatccagtatcacgaccatttatgtagcatctgcat

SEQ ID NO: 575270 - DNA, 388 bp, Homo sapiens
catatccagaatcttatttatttatttatttatttatttgagacagggtctcactctgtcccccagtctggagtgcagtggcatgatcttggttcactgaagcctcgacagcctgggctcaagcaatcctcccacctcagcttcctgagtagctgggattacagstgtgcaccaccgtgcccggttaatttttcaaaattttttgtagagatggggttttgccatgtttcccaggctggtctcaaactcctgggctgaagtaatcttggcctcccaaagtgccgggattacaggtgtgagccaccacatctggcaactatatccaaccattatctcctacctcctgtttcttaaaggtctggaatcagagtatctttgagaacatctg

SEQ ID NO: 575271 - DNA, 501 bp, Homo sapiens
gagcttttgaaccaagactatggggttttctagatataaaatcatgttttctgcaaacagggataatttgacttcccttctttctgtttgaatgccctgtatttatttctatttaaatgacacatgttttctaaatggcacttaaatttatttaaaaataaaaataaatctcttttgaaaaactaacaattcgataggtatataaaagtactttcatacaagataaaatgttgaaaatattaggccaacatttttgagtataygtccttgatataattttagtgctatttacaagaaacaagcaaaaactaccttataaaaaattcacattgaataaaagctcatacataatttgaatacaattaaattcaaattattatcatcaacaatattacctctaaaagtgtttttttcttgttactttggtgggcttgtgtgttatttttcacacacttctctgttattttatgagaaaaaataagaaaaaataggaaacaacat

SEQ ID NO: 575272 - DNA, 606 bp, Homo sapiens
cattagttctatgggacaattgactgagtttcaaaatcacataaaattagcaaaatatataatataataaaacagagtatgtcaggagtttacaccttcattatattatagatatcaaaacaactaaagaactcaacaataagttagtaactatcttttaagacaaaattaaacaaatgcagtaaaatagcttgctgaagttttcacagtatctcacaactagtgagaggtttcatgttcctgatctttcttcctgtcagaaatagggacacacttatacagcacactttaccccatagagccttacaggatttttatctgatgttctgccaggcgtataaaactggtttgaactttagtttcattaatattcaccttgctttagtttttctgaaaagattctaggaaaccttaattatgctgaatagtattaaacttgaggtagagaacaaggtttctaggataaattaaagatggaaaactgtaagttaaactaacttcaatttttatattttgtttcagagtttattgaagctttaataatttaatatttgttgaatcttcaaaggtattaatgaaccrcagaattgtgttctactttgagaa

SEQ ID NO: 575273 - DNA, 556 bp, Homo sapiens
  misc_feature 530, 531, 532, 533, 534, 535, 536, 537, 538, 539, 540, 541,542, 543, 544, 545, 546, 547, 548, 549, 550, 551, 552, 553,554, 555, 556: n = A,T,C or G
tgtcctcaccatagtcagtgatcttcctgagatctggtcatttaaaagtgtgtggcacctcctccctctctctctttctcttgctcctgttcttgccaggaagacagttgctcctgtcacaagtaaaatctccctgatgccttcccagaacctgatgccgccatgcttcctgtacagcctgcaaaccctgaaccaattaaacctcttttctttatcaattacccagtgtcaaatatttctttatagcaatgtgataatggactaatacataccctcacaaggaaaagttatgtcctgcttttaggcacacaggagaaggtggagagctttttctcaattgcctttaacttaaataattcttatgccaaagcagcatattttggagtggcatattcttttccccttcaaatggaaaaaatgagttgcttaacaatagttaaaaatgtcagagtcattcttagccatgtggaaacctaaagagtcctagttcataagagttgtttcstgctcttctgagtatattacatgcnnnnnnnnnnnnnnnnnnnnnnnnnnn

SEQ ID NO: 575274 - DNA, 445 bp, Homo sapiens
ataaaaaggacccaaacaaacaaaaaagaagaaaataaagactgttgaagagaaacaaagaagttatcattgactttgtctgagtcacagaagagaagctacattgggtttgctgaatgagaacacatttattttaagtagaagaaggagaagatgagttgaatcactaagagatcacttagaaatttaaagatgagtgttgaaatttaaatttaaaaaatctcacaagagaggtgagaagataaaggaaatctgattagaacaaaatggcaaagggatggaaaataagattggagggtctgtccagctcccgcaggaccattggctgaatcgtgtaagttccagaaagagatcagagaaaatggagagaaaacaaccactgaagaaagcagggaagacgatggcccttgaaaagctgmaggatatgtcacatgatgggagaaaa

SEQ ID NO: 575275 - DNA, 605 bp, Homo sapiens
gggtatccatgtttttttaaatttaatttttattttattttatttatttatttatttattgagacagagtctcgctctgtcgccaggctagagtgcagtggcgtgatctcagctcactgcaacmtctgcctcccgggttcaagtgattctcctgcctcaacctcctgagtagctgggactataggcatgtaccaccatgcccagctaatttttgtatttttaatagagacggggtttcaccatgttggccaggctggtctccatctcttgacctcgtgatctgcccgcctcggcctccaaaagtgctgggattacaggagtgagccactgtgcccggcctccatggtttaattaaaagaagttcttgttctcagtctattggggtcaaagaaaattactcttccgtataccatctccttttagtcaccatgcacatttagtcaatcccctttatagcagaagagacatctccagccttcttaagagaactccttcaggaatcccttcattccatgattcttggactcctgattctactttgcatcatggtacctggactgtatgacctggtttcctggactctcctttagctatgataacccaag

SEQ ID NO: 575276 - DNA, 605 bp, Homo sapiens
gggtatccatgtttttttaaatttaatttttattttattttatttatttatttatttattgagacagagtctcgctctgtcgccaggctagagtgcagtggcgtgatctcagctcactgcaacctctgcctcccgggttcaagtgattctcctgcctcaacctcctgagtagctgggactataggcatgtrccaccatgcccagctaatttttgtatttttaatagagacggggtttcaccatgttggccaggctggtctccatctcttgacctcgtgatctgcccgcctcggcctccaaaagtgctgggattacaggagtgagccactgtgcccggcctccatggtttaattaaaagaagttcttgttctcagtctattggggtcaaagaaaattactcttccgtataccatctccttttagtcaccatgcacatttagtcaatcccctttatagcagaagagacatctccagccttcttaagagaactccttcaggaatcccttcattccatgattcttggactcctgattctactttgcatcatggtacctggactgtatgacctggtttcctggactctcctttagctatgataacccaag

SEQ ID NO: 575277 - DNA, 605 bp, Homo sapiens
gggtatccatgtttttttaaatttaatttttattttattttatttatttatttatttattgagacagagtctcgctctgtcgccaggctagagtgcagtggcgtgatctcagctcactgcaacctctgcctcccgggttcaagtgattctcctgcctcaacctcctgagtagctgggactataggcatgtaccaccatgcccagctaatttttgtatttttaatagagacggggtttcaccatgttggccaggctggtctccatctcttgacctcgtgatctgcccgcctcggcctccaaaagtgctgggattacaggagtgagccactgtgcccggcctccatggtttaattaaaagaagttcttgttctcagtctattggggtcaaagaaaattactcttccrtataccatctccttttagtcaccatgcacatttagtcaatcccctttatagcagaagagacatctccagccttcttaagagaactccttcaggaatcccttcattccatgattcttggactcctgattctactttgcatcatggtacctggactgtatgacctggtttcctggactctcctttagctatgataacccaag

SEQ ID NO: 575278 - DNA, 398 bp, Homo sapiens
gtgatccacccgccttggcctcccaaagtgctaggattacaggcrtgagccactgagccgagccaagacatctttcatctgtgtgtgtgtggtgtgtgtgtgtgtatgctatagggtagggaaatgttttggagatatgttggttttccactaatataaaaaagaaatcaagttcagatctgagcttccacaagcaggtggatagagacagcccattttgagactcagaacacctgtaagactcctgtgacttcttagggaccataagaaatggaattgtcctatctggcttcctgactgccttgtaactcctctgtagagataaggcacatttccaagtcctaatttatttcacataccttgctctctgacctaaaaaatcttcaaaacattaataa

SEQ ID NO: 575279 - DNA, 564 bp, Homo sapiens
tgagtggatgattgcaagaggtgtggaggtaagctcaacacatgaaagaactggaagaaggaggaattaaatataacatctggtgctggaacatctagtaaaatctgacagcgttaatgaagaaaaacacaagaagaaagaacaagttgctaaaaaaggggaggaagaagtcagttctgtgacacagaataaaaaatttttatgggaattatcgctgaaacattgctaaatgtgaatatgcttgagcactggatgatttgcatagacagagyagcctctttttcccagaggtaggttctcctgctgggtatggacagacaaactggctggccctcagcttgcatggaaaaatttgagccaagatggtcacagaagtcaccatcctgctcacatctggattccgatggaagcagtcaattagtgaaaaaaaaattgggacataaattattcaaatgtttggcaagcaaaagaacaggttgtttctccttataaactctgtgttagagccgtgtgaaaacagatcacccataaagaatgctttctgaggattctgggggtgtcttt

SEQ ID NO: 575280 - DNA, 579 bp, Homo sapiens
actgcctgtttttgtaaatgcaattttattggcacgtagccagacccatgtgtttattaattgcttggggctgcttctgtgctacagagatcatatgtcttccaaagcctaaaatatttattatctgctcctttaaagaaaaggtttgccaaatctgagcaaagacaataaccatacacagactgttaaaccaacttccacaatcatgtaaggtcaaatccctaaatgtgcatgtgcatatatatgtatgtacattcacgtgtgtgtgtatatatgtatgtacattcacgtgtgtatatatgtatattatatatacatgaatgtttgtatgcatgcatatatgtatatgtttgtgaatatacatatatttatcagtttcatttctctgatcaaaccttgattatcacccaatctctactccattaatatttggaaaccaagaaaactgaatgcctccttctctgttgccacagtrttttgctattagagcacttgccatattgaattataatcggtttgtatctctatttgtgtctcttttactaaataatgaaatcttagaagtgccctttctccaat

SEQ ID NO: 575281 - DNA, 551 bp, Homo sapiens
cttctttgcactcttcaggattttggtttatgtttcactttctcaggcaggcctggttatcaagactgggttagcttacttgttttactttctcatagtacctgtacctttcactttttaggataattactttattaattaaacaattaaattcagatcaatgaggtcagacactttgcctatttaactactttattctcacaatttgctagatgatcactcaaacttggaaggaaaacagtatattagttcattttcatgctggtgataaagcacacccaagactgggtaatttatgatgaaaaagaggcttaatagactcacagctccatgtggctggggcagccccactatcatggcagaaggtgaaaggcatgtcttacacggcagcagacaaaasagaatgagagccaagcaaaagaggtttccccttataaaaccaccagatcttgtgagacttattcactactacaagaatagtacgggagaaaccacccctataattcaattattacccaccagatacctcccccacaacacatgggaattat

SEQ ID NO: 575282 - DNA, 553 bp, Homo sapiens
gagcacagtgccagttgtcagtggatctaccattctggggtctgaaggatggtggcctttttctcacagctaccctaggcagtgccacagtgaggactctgtgcagggtcttcagtcccccatttcccttccgcactgcctcagcagaggttctccatgaggccccacacttgcagcaaacttctgcctagacawccaggcattttcatacatcctctaatatctaggtggaggttcccaaacctcaattcttgacttctgtgcacctgcaggctcaatattatatggaagctgccaaggcttggggcttgcttacagcctcagaagccacagtccaagatgtaccttggccccttttagccatggctagagagctgggaagcagggcactaagtttttaggctgcatataacaggggggcccccatgaaaccattttttccttctaggcctgtagccctgaggggctgctgcaaaggtctctgacatgccctggagacattttccccattgtcttggtgattaatatttgactcttcattaattatgcaaat

SEQ ID NO: 575283 - DNA, 592 bp, Homo sapiens
aatggtggtacaaatgttagatgaatacacccactccaaatgggagaaattggccaaaatgaaggggctaaaggcctcttggaagtccaaaatacagggggcagtcaaatcttaacattccaaaatgatgtcctttgactcccagtctcacactcaggtcacactgatgcaaaaggtagatccccatggtcttgggcagctttgctcttgtggctttgtagggtacggccaccctcctggctgcttaaaagctataaatgggctggcgttgagtgtctgtggcttttctgggagcacagtgccagttgtcagtggatctaccattctggggtctgaaggatggtggcctttttctcacagctaccctaggcagtgccacagtgaggactctgtgcagggtcttcagtcccccatttcccttccgcactgcctcagcagaggttctccatgaggccccacacttgcagcaaacttctgcctagacaaccaggcattttcatacatcctctaatatctaggtggaggttcccaaacctcaattcttgacttctgtgcacctgcagkctcaatattatatggaagctgccaaggc

SEQ ID NO: 575284 - DNA, 534 bp, Homo sapiens
ctagctttgaatggcacccagaacaagagaaggctctgtaacaagtccaagatgctgtgcaagctgctctgcaacttccattatatgattcagcagatccaatggtgcttgaagtgctattggcaaatagtgactctatttggaatctttggcaggtccctgtaggtgaatcacaaagtagtctttaggattttgaagcaaagccctgccttcctctgcagataacttctcttcccttgagaaatagttgtgttttytttgtgtgtttttgttgttgttgttgttgttgttttgtttttgagacagagtctcacactgtcacccaggctagagtgcagtgacgtgacctcagctcactgaaacctccgcctccctggttcaagcaattctccttgcctcagcctcccaagtagctgggattacatgtgcccaccaccacacctggtaaattattttgtatttttagcagagatggtgtttcactatgttgaccaggctgatcttgaactcctaacttcgtgatccacccgcgtc

SEQ ID NO: 575285 - DNA, 534 bp, Homo sapiens
ctagctttgaatggcacccagaacaagagaaggctctgtaacaagtccaagatgctgtgcaagctgctctgcaacttccattatatgattcagcagatccaatggtgcttgaagtgctattggcaaatagtgactctatttggaatctttggcaggtccctgtaggtgaatcacaaagtagtctttaggattttgaagcaaagccctgccttcctctgcagataacttctcttcccttgagaaatagttgtgttttctttgtgtgtttttgttgttgttgttgttgttgttttgtttytgagacagagtctcacactgtcacccaggctagagtgcagtgacgtgacctcagctcactgaaacctccgcctccctggttcaagcaattctccttgcctcagcctcccaagtagctgggattacatgtgcccaccaccacacctggtaaattattttgtatttttagcagagatggtgtttcactatgttgaccaggctgatcttgaactcctaacttcgtgatccacccgcgtc

SEQ ID NO: 575286 - DNA, 573 bp, Homo sapiens
ttgaggaatttccatactgttttccacagtggttatactggtttacatttctaccagcagtgtaaaattgttccctttttaacacatccacacaaatatctcttattttttgatttttaaattatggccattcttgtaggagtaaagtggcatcacactgtggctttgatttgtatttccctgatcataagtgatgttgagcatttttcatgtttgttgtccatttgtatatcttcttttgagaattgtctattcatgtccgtagcccactctttgatgagattaattgttttattcttgctgatttgaattctggatattagtcctttttcaaaygcatagtttgtgaagattttctcctactctgtgggttgtctgtttactctgtggattatttcttttgttatgcagaagccttttagtttaattaattcccaattatttatctttgtttttgttgcatttgcttttgtgttcttagtcatgaagtctctgactaagccagcgtctagaaggttttctccaatgttatcttctagaatttttatggttttaggtcttagatttaagtct

SEQ ID NO: 575287 - DNA, 522 bp, Homo sapiens
tacatcttcttttgagaagtgtttgttcatgacatttgcccgttttttaattggattgtttcttacttgttgattgctttaagttccttgtagattttggatattagaactttatcagatgcataatttgtaaatattttctccrattctttgggcaacgtgtgtactccatttatgatttcttttttgcgcaaaagctctttagctgattaagtccctgtattagtcccttctcacactgctataaacaatggcccaagactggttaattcatagaggaaagaggtttaattgacttacggttaaaaggcctcaggaagcttacaatcatgtcagaaggtgaaggggaagcaaggcacttttttcacaagatggcaggaaggagagtgaatgcaggaggaactaccaaacacttataaaaccatcagatctcatgagaactcactcaccatcatgagaacagcatgggggaaactgcccccatgatccaattacctccagctggtctctcccttgacacgt

SEQ ID NO: 575288 - DNA, 522 bp, Homo sapiens
tacatcttcttttgagaagtgtttgttcatgacatttgcccgttttttaattggattgtttcttacttgttgattgctttaagttccttgtagattttggatattagaactttatcagatgcataatttgtaaatattttctccgattctttgggcaacgtgtgtactccatttatgatttcttttttgcgcaaaagctctttagctgattaagtccctgtattagtcccttctcacactgctataaacaatggcccaagactggttaattcatagaggaaagaggtttaattgacttacggttaaaaggcctcaggaagcttacaatcatgtcagaaggtgaagggraagcaaggcacttttttcacaagatggcaggaaggagagtgaatgcaggaggaactaccaaacacttataaaaccatcagatctcatgagaactcactcaccatcatgagaacagcatgggggaaactgcccccatgatccaattacctccagctggtctctcccttgacacgt

SEQ ID NO: 575289 - DNA, 522 bp, Homo sapiens
tacatcttcttttgagaagtgtttgttcatgacatttgcccgttttttaattggattgtttcttacttgttgattgctttaagttccttgtagattttggatattagaactttatcagatgcataatttgtaaatattttctccgattctttgggcaacgtgtgtactccatttatgatttcttttttgcgcaaaagctctttagctgattaagtccctgtattagtcccttctcacactgctataaacaatggcccaagactggttaattcatagaggaaagaggtttaattgacttacggttaaaaggcctcaggaagcttacaatcatgtcagaaggtgaaggggaagcaaggcacttttttcacaagatggcaggaaggagagtgaatgcaggaggaactaccaaacacttataaaaccatcagatcycatgagaactcactcaccatcatgagaacagcatgggggaaactgcccccatgatccaattacctccagctggtctctcccttgacacgt

SEQ ID NO: 575290 - DNA, 379 bp, Homo sapiens
ctgatggaaatccaccctcagggatttgcactaaatggaccccytcaattgcaggggaaagccattcatagtgaggtgctcactagaggctcaatgctaaaagcatgcccatgggcaacgccaggataggcagctagccacggcacactgcaggagccacgccctagagaggatgagcaccctgcaggctgcctgccaggcaagcaccagaaccagaatacaaaatccatgcttcctgcaatgtctctaccaccctctactgacaaagtttaatgtcatggcagccagcaaagaaaagataaataaatgaaaggcccagattcatttccacaaagcagacaaaagggatatatttggagctgatcggcaataaatcaat

SEQ ID NO: 575291 - DNA, 598 bp, Homo sapiens
caccaactgaaacaagacactatacattgacaaagagttttaaaggtagccattaaaaacaatttatttcattaaatataacactaagtctgataaggctaatattgaaagaccaatttttaaacgtgttttcttaaactaaaatgagttttcattgagaataaagatcagaagaaaatatattatatttcccagagattgcactgaaagatttgggggataaaatgamagagtagtttgtaaggagaaggattggcaagagtaaaaatgcatttctgcatcctggggagtccaactaatattccctggtcattattccaccaatttcctgagagtgtctaatttgtccctcataaccaacctctcctgaccgcagtatgagacacgtatcatcaccattcctatcttaccacatctatggaaactgaagcacaggtccaggatagtgcagcaaaccatgaccgatgggcagactggggaattgaattcaaaccatccgtctccagagcccatcatctatcaggctgagatgtgtcacaaggccagggtcccagaagagaacaaagcaattacttctggaggactgaggcagtgcccg

SEQ ID NO: 575292 - DNA, 611 bp, Homo sapiens
attggcagctacgtaagtatcttattattttactctgagaataaaaaatatatttttctcaatttaactccaaaggtctcagcagagtctgtgtaacaatttatttttaaactggctatgtgtgtcactcttttctctgaaaacaatgacacaaacatgcacatatatgactttgaaaataatttaaaacttaggtccaccccraatcatttcactctgtcaaatgtctctttccctttccctaaacaaatacctttggaaaatcaattagttccttgagcttcagttgtgttatattttataaaaacactgtcatacactgaattattactcagacatcttccaggtctaaagttctagaaggcagagttgcaaatcatgcaaaacacttaggcaggcatcaggcttcaaaaaacaggaaggaaaagtttatttgtagatccattactgcttccttccttcctttcttcccctctcccttcttttctcccttcgtccttccttcttccatcattcgcttcttctcattttctctctaggactccctgagtagctaaacaaaggagaaaaattcccacataagatgaatttttaaaatgtccgtcattgag

SEQ ID NO: 575293 - DNA, 588 bp, Homo sapiens
tattagaaaaatgaataaaatcaaacatatgctaaagaattgtattagtcaaagtcttgacagaatacagaaggcacagctagccttaattaaagaggggtaggcatggttatacgaaccaatatagaatgttgagacaccaaggaaataacaataggaaaacattattacaacaaggactaaagtgacaatacaaggaaagagggttataaaagccaataaaagctcaaactatttaaggagaccctcctgacctcctactacctcttctcttacgtgctgccaaaatctttattggctgatgccaactggaaggcagaggttaagtgaaactggggagatactgtctaaataagttaatatttcttgccccatttcaagtcacagagcaggacaaactcatgtaggatggagaatgaagcaggggagaaactgaagaataaatattataataatagagaataaaagggattaaaattgaggaagatattttgttccaaattctatgatcctcaagtggactaatatttgttttttatgtgatttttttwaaattggctttatttttctagagaagtattggcttca

SEQ ID NO: 575294 - DNA, 589 bp, Homo sapiens
atatattatttggtttacattgttatttaagggcattttgcaaatgtcatctcaagaaaaagaagtgaaggatagactggaggtaaaaccggaaaggatgagaaaccaaacaaggctgggttattaaattgtttactctaataaacaatattgcttgttcctttggcaccttgtgagaagccttargaaatgtgcctcagaacttttgactcagggagagaaaagttggaaatgtttatttattggtccttattgttcattgctcaataatggcattgtacatttttgggtggggtacatgtgtgagcacagagtgggttcccatgggcatctcatactataatccataggatcccaggagcaaagagtaacacaggtggtgcaggcctgagtcaaggctgagggcacctgggcagaatggttgaagcctatgcaggactgatgatgacaataatagctggagtggccaacaaacatctgaaaaaatactcatcatccctagtcatcagagaaatgcaaatcaaaaccacaataaaatctcatctcacaccagtcggaatggctattattaaaacgtcaaaaaataaca

SEQ ID NO: 575295 - DNA, 541 bp, Homo sapiens
tcaccctgggtgcccatcaacagtggattggataaagaaagtgtggtacatatacaccatggaatactgtatcaccataaaaaggagcaaaatcaggtcgcttacaacaacatggatgaagctggaagccattatcctaagggaattaatgcagaaacagaaaatcaaatatcacatgttgtcacttataagtaggaactaaaacttgggtacacatggatgtgaagataggaacaacagacacgaggggctctgaaaacagggagagaaggagggggacaagggctgcaagacttcctgttgttactatgttcactgtctcagtgatgggatcaataaacagtcaaacctcagcattgcagtatacccgtgtagcaaacctgcacakgtatcccctgaatctaaaataaaaaataaaatttacaaaagtggggcacaagaggcgcctaacataaatgctgtgtgctctttaacatagaaggagacttgtttagaaaagcgaaaggggcaattttataaatgctgcaaaacattgttttca

SEQ ID NO: 575296 - DNA, 455 bp, Homo sapiens
ggtatttcttgaaagaaatttctaaacagcaaagcattcaagatgtgacttggatgctgttaaaggtattcagttttataaggggaacagagcataaaagtttgaaaaaattgcagcctgacagtgtgatagaaaagaaaaacccattttctgaggagaaattcaagcgggctgcagaaacttgtataagcaataaggagycaaatgttagtccccaagacagtagtgaaaatgtctccaggccatgtcagagattcttcacagcagctcctcccatcacagaccctgaagcctatgaggaaaaagtggtttcatgggccaggcccaggttcgctgtgctatgtgcagcccagagatttggtgccctgtgtcccagctgctccatccatggctgaaaggggccaacgtagagctcagtccatggcttcagagggtgcaaacctcaagccttggca

SEQ ID NO: 575297 - DNA, 545 bp, Homo sapiens
tttagtttttctgtctccttcttaatttattgtgttcttcctttgagatttgatgatatcttatagtggtatgctttgactcttctctctttatattttgtttatctattacagttattgtgtttatcatgaagtttatttaaaacattttacagatataayagtctattttaagttgataacaacttcaatcacatacaaaaactgtacttttacttctttccaaccacacacacactttctgacattgatgtcacaatttacatcttgtatattgtgcatccattaataaattattagttatactttttaatactttgatatttaaattgtatagtagagttaataatttatgcataaccattagagtattagagtattctgtaattgaaagaaaaatacctttaccaatgtgttatttcctttcatatgtttttatgctataaatctgtatcctttcattttagtcggagaaagcccctttagcatttcttataaggaaggtctagtcatgataaactctcttacttttcatctgtttagga

SEQ ID NO: 575298 - DNA, 545 bp, Homo sapiens
tttagtttttctgtctccttcttaatttattgtgttcttcctttgagatttgatgatatcttatagtggtatgctttgactcttctctctttatattttgtttatctattacagttattgtgtttatcatgaagtttatttaaaacattttacagatataacagtctattttaagttgataacaacttcaatcacatacaaaaactgtacttttacttctttccaaccacacacacactttctgacattgatgtcacaatttacatcttgtatattgtgcatccattaataaattattagttatactttttaatactttgatatttaaattgtatagtagagttaataatttatgcataaccattagagtattagagtattctgtaattgaaagaaaaatacctttaccaatgtgttatttcctttcatatgtttttatgctataaatctgtatcctttcattttagtckgagaaagcccctttagcatttcttataaggaaggtctagtcatgataaactctcttacttttcatctgtttagga

SEQ ID NO: 575299 - DNA, 527 bp, Homo sapiens
gtaccaagggttttggtgctaaaccattcatgagaaatccactcccataatccagtcaccttccaccaggccccatttccaacaatggaaattacaattcaacatgagatttgggcggggacacasactcaaactatattagtcccctattttaatactgtcaccatggtaattaaatttcaacaagagttttggagaggacattcaaaccatagcaaatgcttattggaagataccaataaaataaattataaaaacccagacaagaataaaaagtactatcaacttaatatggaaagtcttatcagtaatcaaatacatctgttaaatgtcctaaaagaaaataccgcaggccaggtgcagtggctcacacctgtaatctcagcactttgggaggccgaggtgggtggatcacctgaggtcaggagttcaagaccagcctggccaatacggtgaaaccctgtctctactaaaaatacaaaaattatttgggcatggtgacgggcgcctgtaatccaagctaccat

SEQ ID NO: 575300 - DNA, 527 bp, Homo sapiens
gtaccaagggttttggtgctaaaccattcatgagaaatccactcccataatccagtcaccttccaccaggccccatttccaacaatggaaattacaattcaacatgagatttgggcggggacacacactcaaactatattagtcccctattttaatactgtcaccatggtaattaaatttcaacaagagttttggagaggacattcaaaccatagcaaatgcttmttggaagataccaataaaataaattataaaaacccagacaagaataaaaagtactatcaacttaatatggaaagtcttatcagtaatcaaatacatctgttaaatgtcctaaaagaaaataccgcaggccaggtgcagtggctcacacctgtaatctcagcactttgggaggccgaggtgggtggatcacctgaggtcaggagttcaagaccagcctggccaatacggtgaaaccctgtctctactaaaaatacaaaaattatttgggcatggtgacgggcgcctgtaatccaagctaccat

SEQ ID NO: 575301 - DNA, 640 bp, Homo sapiens
gagtcaatgaaacctctctcctttataaattacccagtcttgggtagtatctttatagtagtgtgaaaatggactaatacacttgacaatgctcacatacttccagcagaccctgggcaacttcagccccatggccctttctcctcagaccaaccttaaacctggactttacttatgaactcagcctctctgtaaatcgcaactgcctttaaagtctaacacattctattgcttaacagttggttatgtgatgacataaagaaaaccatattttagtttttatcatggattgggtccggatcgcatagcaattccccttggatttttatttcctgtgacctgagtaaggcaagcagagacatgctagtttgacatgtcaacttgtgagcagccaccagcagcccagggcttgagggatcctgaaagatcttccttggagaccatttggaatgacacaatttcagggttggarggaaccttaaaatgatcacctagttcaaccaaatacccttttaactggtgaatgtcatttactgtttatttgttggatggacattcagccagtctggtgtccttccttaattgttccactgaaactgcttttgattggttcaccaatgactttctggacaaacactgg

SEQ ID NO: 575302 - DNA, 559 bp, Homo sapiens
aactatttttcaagcccttggcttctgtgacacactttgtttcctgttttcctcttagatctttgatcaatggttttcgatcagggacaattttacccacaaaggcatttgggagtatctggaggcatttttgattgtcaaaacagggaggagagtgcttctagtgagcasaggccagtgctgttgctaaacaaatgccaaggacagccctctgagacaaaggattatgcgggcccaaatatcaattgtgctgagatttagaaacctgatctttgatcaccccttctcttttcttcttcatgttataattttttaaattttggaattacccaagtttccttaacctttcactttcctctcctgatgcattttctgtggtgcacaccatccagttccatgtctttgactcctacctatacccatgtcttcagctttgacatttctcttggactccaaccaagtagaaacaactaccaagtagatatttctgcctttatatcctgcagacacagtgtaataggccattcttgcactactataaagaaataccagagactgg

SEQ ID NO: 575303 - DNA, 229 bp, Homo sapiens
aataaaaagggctttgaacaagagaagagaaaatttgatctccctggatttataatcagacaattaaaaaaaatttttactttaattctgggatatatgtgctgaatatgcaggtttgtcacataggtatacatgtgcctatggtggtttgctgcatctatcaacatgtcatgtaggttttaagccccacatgcattakgtatttgccctaatgctctccctcccctta

SEQ ID NO: 575304 - DNA, 530 bp, Homo sapiens
taacttccaaagtctcctggagttcacagctttgattgatttgtacatgggtgctaaattaagagagataaaaactgagagacaatctctcctagagagatacacatagtgttggcataagtactatgaaaaaaattaaaagctgtgtgagtggataggagggaattggggaatgatgtgtgggacactctagataacaaagacttctccatggggatgaaattagcaaagggacctgaatgaagtaaaagactaaacacagcaaatgatttacaaaatatgtgggaccagcagccaggcaccgtggctcacgactgtaatcccagcactttaggaggccaaggtggtcagatcatttgaggtcaggagtttgagaccagcctagccaacatggtgaaacaccatctctactgaaaatacaaaaattagccaggcatggtggcacatgcctgtaatcccagctactcgggaggctgagrcaggagaatcacttgaactcaggaggtggaggttgcggtgaggtaagatct

SEQ ID NO: 575305 - DNA, 530 bp, Homo sapiens
taacttccaaagtctcctggagttcacagctttgattgatttgtacatgggtgctaaattaagagagataaaaactgagagacaatctctcctagagagatacacatagtgttggcataagtactatgaaaaaaattaaaagctgtgtgagtggataggagggaattggggaatgatgtgtgggacactctagataacaaagacttctccatggggatgaaattagcaaagggacctgaatgaagtaaaagactaaacacagcaaatgatttacaaaatatgtgggaccagcagccaggcaccgtggctcacgactgtaatcccagcactttaggaggccaaggtggtcagatcatttgaggtcaggagtttgagaccagcctagccaacatggtgaaacaccatctctactgaaaatacaaaaattagccaggcatggtggcacatgcctgtaatcccagctactcgggaggctgagacaggagaatcacttgaactcrggaggtggaggttgcggtgaggtaagatct

SEQ ID NO: 575306 - DNA, 354 bp, Homo sapiens
tgtatttaatgatctaagaaactgtacagttaaagatttcaaggatcagaattgagactttttattcttattacgttttttgaaaatctgaggacatagaaaaattgccattttactgaaaaattataactatactcaatttcattgggggaagaattataggtaaacttattgcagtacaaataagtggctaaaattacctccattatgaaattattttcccacatttatctatttttaaaaccaagtatatttctcatgttaatgaaattgcaaatcaaaacatgttctacamaggagaaaaatgtgttgattctggagtgtgtgtgtgtgtgtgtgagagagagagaaaga

SEQ ID NO: 575307 - DNA, 554 bp, Homo sapiens
gggctagggtaattttaaaaagaaggtccacaaattctttgatatttttcccctataagaggtgcagcttatttacattctcttaagtgtgggctatacttagtgccttgcttctcatgaatagcctatggtagaagtgatagatgtcacttccaaggttaggttataaaatgactgtggcttctctcttgatgtgctgtctctctctgtcgagtggattgcttgctgcatgagaagcaggcagtgatcagcccgtgtgaatggaagtcccyagctggcagccagtgggaaacagaagatgtcttttatgtgatagccacgagagtgcctctaatctcatcagtgatatccccccacctttgcctcatgctattcgttagaaatgaattaataggtctaggccacattcaaggggaggtgtttatacaagattgtgtattacaagaagtggggatcactgtggggggggtcatcttagtggataccataaggaccaatttagcttcaaagatgtattttaaggatgagaccacattttttcctctgtagatggc

SEQ ID NO: 575308 - DNA, 500 bp, Homo sapiens
ctcctgggttcatgccattctcctgcctcagcctcccaagtagccgggactacaggcgttggccaccacaaccagctaattttttgkgtttttagtaaaaacgggatttcaccgtgttaggcaggaaggtctggatctcctgaccttgtgatttgcccgcctcgacctccctgtcaagcttttataggtaggaaaagcagccttagtatagatattggaaaataaaggagagaaattgactgactaatagcaatttaataaataaataaagctgcctttaagagtctatcaattatttactctttcatcaactatatattgagtttgacgatggaagttacaacaatgaaagatccattttttctgctttcaaaatattgaatctactacttacttcccccaaatcctcactcaggtaagagagtagttttcttctttcttttttgttgcataccttattattattcctactgaaccagtagtaacacaatatacgaaat

SEQ ID NO: 575309 - DNA, 500 bp, Homo sapiens
ctcctgggttcatgccattctcctgcctcagcctcccaagtagccgggactacaggcgttggccaccacaaccagctaattttttgggtttttagtaraaacgggatttcaccgtgttaggcaggaaggtctggatctcctgaccttgtgatttgcccgcctcgacctccctgtcaagcttttataggtaggaaaagcagccttagtatagatattggaaaataaaggagagaaattgactgactaatagcaatttaataaataaataaagctgcctttaagagtctatcaattatttactctttcatcaactatatattgagtttgacgatggaagttacaacaatgaaagatccattttttctgctttcaaaatattgaatctactacttacttcccccaaatcctcactcaggtaagagagtagttttcttctttcttttttgttgcataccttattattattcctactgaaccagtagtaacacaatatacgaaat

SEQ ID NO: 575310 - DNA, 500 bp, Homo sapiens
ctcctgggttcatgccattctcctgcctcagcctcccaagtagccgggactacaggcgttggccaccacaaccagctaattttttgggtttttagtaaaracgggatttcaccgtgttaggcaggaaggtctggatctcctgaccttgtgatttgcccgcctcgacctccctgtcaagcttttataggtaggaaaagcagccttagtatagatattggaaaataaaggagagaaattgactgactaatagcaatttaataaataaataaagctgcctttaagagtctatcaattatttactctttcatcaactatatattgagtttgacgatggaagttacaacaatgaaagatccattttttctgctttcaaaatattgaatctactacttacttcccccaaatcctcactcaggtaagagagtagttttcttctttcttttttgttgcataccttattattattcctactgaaccagtagtaacacaatatacgaaat

SEQ ID NO: 575311 - DNA, 606 bp, Homo sapiens
ctcacagctaacattatactscataataaaaccttttcttctaaatctggaacaagacaaggatgtccactctcgtcagttctactcaacctagtgctgaaagtcttagccagagcaattacggaaggaaaagcaataaaagtcatccaaatcagaaataaagaagtaaaattatttctgtttgaaaattacatagtattatatctagaaaataaaaacttcaccagaaaactattaatatcaaaaaatgaattcagtaaagttgcaaggtacaaaatcgacatatgtaagtcattctaccaaaaagacacatgaacttgcatgttcattgccatgctattcacaatagcaaagacatggactaaacctaaatgtctatcagtgttgaactggataaagaaaatgtggtacatatacaccatagaatgctatgcagccacaaatagaaggaaataatatcctttgcatgatagatgtcctttgcaacaacatagatgcagctagaagtcataatcctaagcaaattaatttaggaacagaaaaccaaatactgcatgttctctcttataagtgggagctaaaatattgaacacacatggacataac

SEQ ID NO: 575312 - DNA, 413 bp, Homo sapiens
caccccaatttctcagcttcctctagtttttatttccttctctaggcagcctaaaaacaaagcccyatcctttcaatctttctcttgcttaacactctcaattccattcttcctcattcttctatatacccacttggcaaaatcccaatcctggtgaacccggctacccaccttctctaacctataactgatgctgatgaaggtagaccagacacaaattgttatcactgttcttttaagatttccagccttaactccaatccttctagttggccctagtcaacatgttctccctttcccctagtaatacaatttcaaaccttcttcttgaaccgaaaggaggggtctacatttgtcattttacctttcttacctcttttctcaccttaattcactccaatatctttcagtct

SEQ ID NO: 575313 - DNA, 560 bp, Homo sapiens
tttttctagcctacactctaaattacatcctagatcttgtcatcaattagaatcgctccatttctgaaatcttaaactacaatttaaattgtacaatgtctgagtacaatcttcttatcaatgtgtgcttttaattgcatcaaagtcactaagccccttgattcttctacttcaccccaatttctcagcttcctctagtttttatttccttctctaggcagcctaaaaacaaagccctatcctttcaatctttctcttgcttaacactctcaattccattcttcctcattcttctatatacccacttggcaaaatcccaatcctggtgaacccggctacccaccttctctaacctatamctgatgctgatgaaggtagaccagacacaaattgttatcactgttcttttaagatttccagccttaactccaatccttctagttggccctagtcaacatgttctccctttcccctagtaatacaatttcaaaccttcttcttgaaccgaaaggaggggtctacatttgtcattttacctttcttacctcttttctcacctt

SEQ ID NO: 575314 - DNA, 413 bp, Homo sapiens
caccccaatttctcagcttcctctagtttttatttccttctctaggcagcctaaaaacaaagccctatcctttcaatctttctcttgcttaacactctcaattccattcttcctcattcttctatatacccacttggcaaaatcccaatcctggtgaacccggctacccaccttctctaacctataactgatgctgatgaaggtagaccagacacaaattgttatcactgttcttttaagatttccagccttaactccaatccttctagttggccctagtcaacatgttctccctttcccctagtaatacaatttcaaaccttcttcttgaaccgaaaggaggggtctacatttgtcattttacctttctyacctcttttctcaccttaattcactccaatatctttcagtct

SEQ ID NO: 575315 - DNA, 510 bp, Homo sapiens
caatgggtctctccaggctctgcctcttgtactctcttgtgccatcctctctcagcctgttcttggtctttgtccacaatagttgtagtggtcattattggttggctactcagtattcattctctaccattttcccacccctttcatgatggttcctgatggaactgcaacaccattcagacattcgcttatttccaagcagtgagaggaagctgatcccacccccagctccagaggtgaaattgatcagtctaagggaaacttattcactccctttgccaaaagaccaattctggccaatgaggatttagaagtctaaggaggaaacccaggctggagtacagtggtgccatcatggctcactgcagcctcgacctccsgggctcaagtgactctccagcctcagcctcccaagcagctggggccacaggtatgcattaccatgcctggctaatttttaaatttttttgtagagatgaggtctccctatgttgcccaggctggtctcaa

SEQ ID NO: 575316 - DNA, 570 bp, Homo sapiens
aggtacattgctccaatttctacctcttcctttatacaggtatcttccccttgtgtctctgttttctcttcttgtacggacaacagtcactggattaagtcccaccctaatccactatgacctcattagaactaattatatctgcaaagaccctatttccaaacaagcttacatcctaaagttctgggaagacatgcattttatggggacattatttgatccactacaacatgtccaatctttggtcaaattaatactagaacaaaaattctatgcttttcctagtctctgttggatgaggtatattcattacttgtatttctaaaatggatacaggtcacagagatgactggaattgtgaaatctcaaatctttgaccagctgcccatcactggcagagttccaaggaatctaggcaaaagggacagacacctagtaaaagaacactscttatgactacttgggaatttggccctaaaccccactgcctgtccccacccacccttgttctagagatttgggctgaaccacttggcctgtgttctacatacctgaatgaaagcaagaaaa

SEQ ID NO: 575317 - DNA, 594 bp, Homo sapiens
ccctttgtttcggcccatccctttgtttcccataaggaatacttctagttaatccataatctatagaaacaatgtttatcactggcttgctgtcagtaastatgtgggtaaatctctgttccggcctctcagctctgaaggctgtgagttccctgatttcccactccacatgctatatttctgtgtgtgtgtctttaattcttctagtgcccctgggttagggtgtccccgactgagctggtcttggcaatgcataaaaagtggtctaataaattccactcccttcactgctatagtccttatggctgcagcgcatatgtctttctaaagcctctagaatatttgctacttcctgtgcatcgggtccaattagcatgatattattaatatgatagatcacagttatagtctgtagaatgtcaagatagccaagatctctgcagactatattgtgacagagagcaagagtgttaataaaaacctggggtaaaatggcaaatatgtactgcctttctttctatgtataaatgaactcctttggtccttactgatggaaattaagaaagagcaaactcaccagatcaatagcagcat

SEQ ID NO: 575318 - DNA, 594 bp, Homo sapiens
ccctttgtttcggcccatccctttgtttcccataaggaatacttctagttaatccataatctatagaaacaatgtttatcactggcttgctgtcagtaactatgtgggtaaatctctgttccggcctctcagctctgaaggctgtgagttccctgatttcccactccacatgctatatttctgtgtgtgtgtctttaattcttctagtgcccctgggttagggtgtccccgactgagctggtcttggcaatgcataaaaagtggtctaataaattccactcccttcactgctatagtccttatggctgcagcgcatatgtctttctaaagcctctagaatatttgctacttcctgtgcatcgggtccaattagcatgatattattaatatgatagatcacagttatagtctgtagaatgtcaagatagccaagatctctgcagactatattgtgacagagagcaagagtgttaataaaaacctggggtaaaatggcaaatatgtactgcctttctttctatgtataaatgaactcctttggtccttactgrtggaaattaagaaagagcaaactcaccagatcaatagcagcat

SEQ ID NO: 575319 - DNA, 588 bp, Homo sapiens
ttgtataaataatttatcttgtgtgtatatatattttttaccatgttacacttgagatactttcttttgacaggagagcacttttggtgtaaacccctattttttgagtgtggatattttcccctaacgttttctttctttggaactaagcattctcaaatgtgttcccaggggaatctggaaatgttggtgcatatccatttggcagtttggagatttgttagagtgtgggaaaattcagaggttattttcaggttatgacatctgaatatttctttgcaggtccaaagcacagtttatttttaatactgtaaagataccatagtcttgatcctcattttgagaagaaaatgctgccatctttaaagaaatatagcttcacataaaatcctgagttacaaaagtgaagacctaaaattcagatgaaatataacagtctgctaatgtttcaaattgcctgctggtttattatgttttcccttacttaggcaagtaaagttaagarctattgaagttcacggccatgagggcacatccatggatatcataaagcagcccttttacattttctctctctgcgaatccagc

SEQ ID NO: 575320 - DNA, 494 bp, Homo sapiens
tgaattctgaggggttatgggcattcagaccatcgtgggattggtgggaggaggaagaatgtgccataggtaggaatgagaagaagttagctgaattgtcaacaaaasttgaacagctgcatatggactatcaagacagcagcaaccccaggatctcagccttacagcagagctgcacctacctgccagctccttccacatcaagtgcatggggttagcacgtcgatgtctggggacagagcaggagagctgagagagattgttcctgtggagaagcagggcaggtgaactgagatagaactctccaaagccctctgagccttcaccaatctttaagccttcaccatcctgtctgcagcaggctgagacgggaccaaagaaatcttttcagggcactgctatactctcccaagtgcaccacagcaaccctcaggggctgggacaagatgaaaggtctgagagagagaggtgtttgaaggcatgaacatccaggg

SEQ ID NO: 575321 - DNA, 430 bp, Homo sapiens
atttgctgtaatcctctcttgtgctctctcacagggtctttctcatgatcagcaacacacatttgcagagagctttgatccatactcctctgcccccaaccctgaaaagcatcaagccragaagccaggaagctagggggtcatgaatttattgctaattgtataattctggtcaccaagaggaaattttctgaatccaataggattagggcagagtttctcaacatcagcactattgctattgttggggactgtcctgttcattataggatgttcagagcacccactagatgccagtagcagcctcccccatgtgtaacagtcaacagtgtttccctccaaatattgccaaatggccctggggtagaggagtagggagggggcaaaattgcccctggttgagaaccaaccagggtttagagatacaaac

SEQ ID NO: 575322 - DNA, 633 bp, Homo sapiens
tactagttttgtgatttaaacaatttagttaatttatctgaatttgtaagatgtgttattattaacaccaattgagaaaagaaaaactttggattgtctatataatctttataactcttggtcataatttttgattgtcatatgcatttaaaaatttattgtggcaaccttatgtggtagtgaatggaaaaatcccgaaagtatagaaatctcatttcagttttgcaagttaacattctctcgcatgtgaaataatgctgaagrtgcaaaatcagcactggaaagtgtgtaaaccaaattatatgagcaagaatattagaaaattagtgtgcaacattaggggttttaatttaatatcagaactgaaaaattatggggaagaatgtaaagagacaggcgtagtaatcactttaaagttgattatgggcgatgtttgaccctatattccttacattatttttaaaaatcaaactcattatctacagatattaaacttaaaagtcaaaattggttggttctgaagcttaaaaattccaatgctagaattcataatgttatagaaaattataataaactcatcttagagatcttattatcttcattttctatataaggaaaccgacaactagaaaa

SEQ ID NO: 575323 - DNA, 633 bp, Homo sapiens
tactagttttgtgatttaaacaatttagttaatttatctgaatttgtaagatgtgttattattaacaccaattgagaaaagaaaaactttggattgtctatataatctttataactcttggtcataatttttgattgtcatatgcatttaaaaatttattgtggcaaccttatgtggtagtgaatggaaaaatcccgaaagtatagaaatctcatttcagttttgcaagttaacattctctcgcatgtgaaataatgctgaagatgcaaaatcagcactggaaagtgtgtaaaccaaattatatgagcaagaatattagaaaattagtgtgcaacattaggggttttaatttaatatcagaactgaaaaattatggggaagaatgtaaagagacaggcgtagtaatcactttaaagttgattatgggcgatgtttgaccctatattccttacattatttttaaaaatcaaactcattatctacagatattaaacttaaaagtcaaaattrgttggttctgaagcttaaaaattccaatgctagaattcataatgttatagaaaattataataaactcatcttagagatcttattatcttcattttctatataaggaaaccgacaactagaaaa

SEQ ID NO: 575324 - DNA, 633 bp, Homo sapiens
tactagttttgtgatttaaacaatttagttaatttatctgaatttgtaagatgtgttattattaacaccaattgagaaaagaaaaactttggattgtctatataatctttataactcttggtcataatttttgattgtcatatgcatttaaaaatttattgtggcaaccttatgtggtagtgaatggaaaaatcccgaaagtatagaaatctcatttcagttttgcaagttaacattctctcgcatgtgaaataatgctgaagatgcaaaatcagcactggaaagtgtgtaaaccaaattatatgagcaagaatattagaaaattagtgtgcaacattaggggttttaatttaatatcagaactgaaaaattatggggaagaatgtaaagagacaggcgtagtaatcactttaaagttgattatgggcgatgtttgaccctatattccttacattatttttaaaaatcaaactcattatctacagatattaaacttaaaagtcaaaattgrttggttctgaagcttaaaaattccaatgctagaattcataatgttatagaaaattataataaactcatcttagagatcttattatcttcattttctatataaggaaaccgacaactagaaaa

SEQ ID NO: 575325 - DNA, 392 bp, Homo sapiens
ggccacagtttctgctggaattacagctaaaaacataaaatacagcaatgtaaagctttccttttgagaacaggatggtgggaaatatttctactttataaatgtagcatagtttggaagcaggtgcacaatatttargctatttctcattcagattttttttattgtttttagttatgtacagtgctcaatttctgcaattaaggattacttcaaatagggatttagatttattgtgaacatttcatttccacaaatataatagttcatgtttgcctaagcatgtttcataattgagatgaaaagcatttttaaatctcataactagaatcaacaagcaaacataactgaaatataaaacatatgatttaaaaagagaataagaaaatgaa

SEQ ID NO: 575326 - DNA, 559 bp, Homo sapiens
ttccaggtacacagtgcaagctgttggtgaatctaccattctggggtctggaggacattggccctcttctcacagctctgctaggcactgccacagtggagactctgtgtaggggctccaaccccacatttcccttccccactgccctagtagagtttcttgatgagatccctgcccttgcagcaaaattctgcctggacatccaggcatttccacacatcctctaaaatctaggtggagggtcccaaacctccattcttgacttctgtgtacccacaagtgtaacaccacatgtaacccactaaggtttgggacttgtaccctctgaagcaatggactgagctatacttggccccttttagccatagytggagctgaaacagctgggatgcagggcactattttggaggctgcataaagcaggatggccctaagtctggaccataaaaccattttactctcctaggcctccaggcctttgatgggaggggctgccatgaagctctctgacaggccctggggacattttccccactgtcttgctgattagcatttggct

SEQ ID NO: 575327 - DNA, 477 bp, Homo sapiens
caacaaaaaccccaaaagtctatactgtgtatattatrtttttttctgatctgataaccaagatggctgctaagtgacttaacaggcagctaacatacacagagtggatatgctggacaaagggatggcatggtatggtgcaagatttcagcatgtttgtcagaatggtgcaacacttaaaatgtattcattgtttctggaattttccatttaatattttcagaccacagttgaccatgagtaactgaaactgcagaaagcaaaacctcaaataaggcaggactaccatgatggtggggctgcagagtgttatacaatgttaatgtgaaaagcgggtactgatttttcccttgaaagaattgtcacttgccctagggtcagggcatggaagtggagtggtacagggggacagtaaggcagagaggacgaagggtgattctgggacatttggcatagactggaaacttcagctccctg

SEQ ID NO: 575328 - DNA, 466 bp, Homo sapiens
tctatcagttgttccatttttttgtatactcaacattccttccttctgggaactctcttccctctcaatgtatttctggtggggttgaaaatgatgtggctctgcctttcttgctgagtgattggctgaaggatggacatgtgattctagaggagccaatcacagtctttgagtttgctttggtcactggtgggtaaagagcaacactattctctgagattgctgcctgtgggtaaggttgagcctgggctgctggtggctgtctttgatgccatgctgaaagagcctcttgaggatgaaacccccatgttggaaaatggaaagaaacattagaaagagagatttttcttgacatatttcaacctctgtatctatctgaccattcttaaattcagctctttggtctgactgattacttccttaggataagaacttccrttatggtgcaagctagttatggtgcaag

SEQ ID NO: 575329 - DNA, 380 bp, Homo sapiens
ttttgtacttttagtagagatggagtttcactatgttggccaggcaggtcttgaactcctgatctcagatgatctacgcacctcrgcctcccaaagtgctgggattacaggcgtgagccactatgcccagtctagcttgatgaacttttaattagttgtatatacttgtgtaaccatcactcataccatgacatagaactttcttacctttccagaagcttctcttgggtaccttcctggtcaaaaatgtctccaggaggtgtgctactattctgatacttaccaccatcaattaattttgacttttcttcaatttcatacaagtggaattatatagtattttcatttttgtgtctgatttctttcttcaacataatgtc

SEQ ID NO: 575330 - DNA, 500 bp, Homo sapiens
ggcaagacattgatgatggtcttacacaggacaggccttctcctgctctaaaagatttcagattttgatgaaagcaaccttacagtatgctctacattccttacaagacataggacctatcagtgaacatcagcttcatacctgttctatatagagatttatgctaagctcttggaggtgagcagaacagaatatatttcatttgtatcataccctaagtttacaaagatttgcatctatgtcctcttattttacactctttcatttttcaacaggtatttattgtgtttattacatgtcagtagtatactatgagttagatataattggtaaattaataaataaaataaatattgactctacctctctggggtttacgttctcatgaaagataaraaataagagttaggtatggactcccttttgaagatgagaaaattcatgctcaaataacacgtaagtcacccatgaagaaaaatgacacttgcagggatcaatac

SEQ ID NO: 575331 - DNA, 500 bp, Homo sapiens
acagatgaatgattagatagatagatagatagatagatagatagatagatagatagatagatagatgatagatagacatmgatgatagacacatagacagatactagatagatacatacatacatgtatgtatctatccatttattcattcattcttcatttcacaaatgaagatgctgagagagtaaggaaagttaaataagtaagtctgaaaagtcaatgaatccagaatcatgtggtccaaagactttgcaatgcctttagcgttgaggaacccagtgtgacagaggtgatgagtggccagtcttgaacatgggatccaggctgtctcctctcaagatgcagcactagcggtatccatgaggctttccttctcagcagagaattcaatccaactacatcactaaaatcagctagaaatagtccatttgtaaaaagtcatctcagcataatgggtgagagggggaaatccctaatacaagccagagcaggtgcaggaa

SEQ ID NO: 575332 - DNA, 500 bp, Homo sapiens
acagatgaatgattagatagatagatagatagatagatagatagatagatagatagatagatagatgatagatagacatcgatgatagacacatagacagatactagatagatacatacatacatgtatgtatctatccatttattcattcattcttcatttcacaaatgaagatgctgagagagtaaggaaagttaaataagtaagtctgaaaagtcaatgaatccagaatcatgtggtccaaagactttgcaatgcctttagcgttgaggaacccagtgtgacagaggtgatgagtggccagtcttgaacatgggatccaggctgtctcctctcaagatgcagcactagyggtatccatgaggctttccttctcagcagagaattcaatccaactacatcactaaaatcagctagaaatagtccatttgtaaaaagtcatctcagcataatgggtgagagggggaaatccctaatacaagccagagcaggtgcaggaa

SEQ ID NO: 575333 - DNA, 611 bp, Homo sapiens
tggtttatatttttaaaaactattctcgtctattttgtttttcttttacataaaatctacctacaggtacactagggcttgtattcttatatatagatcatttctgtaatgctttatcttttctaatttttgtacttttggcaactttcatttattctttaaatattatttacaactttatagatatttttactctacctatcaaggattcaattctaaaatgatatttttgttttcccttaattttcttttttgtaaacttttattttaggttaatggttacatgtacattaatgtacacgtacattataggagtccctaatcaagaggtcctcccattgaacagaagcaggaattaagacctgcatggaaaacaatctggccactttccatggggtggttgcactgtgctggggrttgcatcagtttctaataactgtataccctccagagcttgagggcagcagtggccaggactgtgggaaagcaaaaatggcagcccggtagggagtggtggctcacacctgtaatcccagcactttgggaggccgaggcaggcagatcacttgaggtcaggaggttgagaccagcctagccaacatggcaaaacc

SEQ ID NO: 575334 - DNA, 611 bp, Homo sapiens
tggtttatatttttaaaaactattctcgtctattttgtttttcttttacataaaatctacctacaggtacactagggcttgtattcttatatatagatcatttctgtaatgctttatcttttctaatttttgtacttttggcaactttcatttattctttaaatattatttacaactttatagatatttttactctacctatcaaggattcaattctaaaatgatatttttgttttcccttaattttcttttttgtaaacttttattttaggttaatggttacatgtacattaatgtacacgtacattataggagtccctaatcaagaggtcctcccattgaacagaagcaggaattaagacctgcatggaaaacaatctggccactttccatggggtggttgcactgtgctgggggttgcatcagtttctaataactgtataccctccasagcttgagggcagcagtggccaggactgtgggaaagcaaaaatggcagcccggtagggagtggtggctcacacctgtaatcccagcactttgggaggccgaggcaggcagatcacttgaggtcaggaggttgagaccagcctagccaacatggcaaaacc

SEQ ID NO: 575335 - DNA, 531 bp, Homo sapiens
gcctttttccatacctacactttcaatctgtcaatgtccttaaaagcaaggtaaatttttgtaagcagcatatactttgtcttctcttttttatgcattcagtcactttatttttatattggagaacccaatccattcacattcctgttaactattgacaggtaatgacttactactaatatttcattaattattttctggttgctttgttttttacttcttttcttgttgtgttcctttgtggtttgatatttatctgtatgctttgaattctttttacttttagtttgtgcatttactaaagactttgctttttcgttaccacgaggtttataaaaaatatcttataatagtckgttttaacctaacaacaagttaactttgattgcatacaactcaacacttttactccttttccaacaatttatgtttacgatggcagaatttacattttgtaatatatatttcttgacaatttattttagctatagttattaatcactttgtcttttaactgtcttattaatgata

SEQ ID NO: 575336 - DNA, 567 bp, Homo sapiens
gtatgtgtgtatatatatagagtcatacatatatacaatttttaggtttaagtctgtactattgatcaattgttatgaacacrtgggattggctgcccattaccattttcctttagaatagccaatctccctattcaaatattagtgcaggatcttacatcctgtttcaacttatcatcctcacaggttaataaccaggttatgataggaaattcctaaatcttcattcttctggattcagtggtttggtctatatgtcacctgacaaactatatcagtgagtttcttagtaacatttgggcctcatttataaagagtttcaagtcaatctaaataattgctgtaatattagagttatcatctttactaatttaaatcaatgtgcaaaaaattcagataaagtaagataggttgatcttaacaatcaaagaggagaaacaaagaaaagaatgagaccctagatgatttactttcttgttccttctaatctagtgtccaagatgtgtgcatctttctggagttatctttcatctagtgtgtggattctgtgagtaaaagcattatcca

SEQ ID NO: 575337 - DNA, 488 bp, Homo sapiens
gaattcgccattaccaaaccaccactacaagatctgctataaggagctcaaaatcttgaaacaaacacataaaaacagaacctctttaaagcataaatcacacaggacctataaaacagaaatacaagctaaaaagcagaaacaaaaaacatacaaataaaacmaagtacacaggcaacaaagagcatgatgaaagcaacggtacctcacatttcaatactaacgttgaatgtaaatgacctaaatgttccacttaaaatttacagaaccgcacaatggataagaagttagcaaccaactatctgcgaagagactctcctagcacataaggactcacataaaggaaaagggaggaaaaaggcatttcatgcaaaaggacaccaaaagtgagcaggggtagctattgttatatcagacaaaacaaactttaaagcagcagtggtcaaaagagacaaagagggacagtatataatgataaaaggccttgt

SEQ ID NO: 575338 - DNA, 586 bp, Homo sapiens
aagtgtttgtaagagttacagtttttgagacatggcaagagtcaataaattattatctattttctaaaaacaaataaactactgccgctattttttaaaaaaacattacttatttgtttgactatttctgtaattaccttaaataaatcatgtatattttaaagtacacttaaaatgtcttccatgcaatcttaaaatgaatttaccattcaattgataaaatggccaagattgatgacttggcttgacagattatatctagaaatcattacatgcccttttatagctctgtagctttgtgcaaggcatttatattgtaaaactgccttttctaatacctaaactaaagataataatgtctacttccagcactattgatgagttcaattagataatgtatctaaaatctctaccacagagtctaggagtttatgggacattgataattgacagttttttcttattatgtgatatggtttggctctgtgtcactactcaaatctcatgtttagttgtgatcctgagtgtttgaggtagggcctggtgggaggtgattgaatcgtggrggcagatttcccccttgctg

SEQ ID NO: 575339 - DNA, 544 bp, Homo sapiens
actgtgtaaatagttgttatactgtattgtttagggaataatgacaaaaaaaagtctgtacctgtttaatacagatgcaaacatctttttcccctaaatattttcagttcttggttggytgaatcctcgaatatggaatccacagaaggctaactatacttaaatgacctagcccactgccttaaactcagtgtctgctcaaaagagaacagctattactattttttaaattcagattgtatatgtgcatgtccttcttcagtaatgtacttttaaaaatcatcagtatattctgtttcagtgctctatttattatttacatcttttaaaaagttactgaatttaaattatctgtttattatgtaaagtgttctacaatggacttttctcaggtttgaacttgttctggaagctgtgcgtcaccgtaatgaggcttgtaattcttgataactatgacttggctagtgaatgggcagccaaatacatctgtaatcgcatcattcagttcaaacctggacaggacagatattttacactgggttta

SEQ ID NO: 575340 - DNA, 626 bp, Homo sapiens
ggccttgtagaatgacttagagaaaactccctccatctgaatttttgggaacagtttcaagaggattagtattatttcttttttgtacatttggtagaattcgactgtgaattcatgtggtccaggccttttctttgttgacagactctttattgctgattcaattttgtcacttatcattggttgagggccaaagccagatggagctggactgggcaagcttacactcaggactcccagtcaygagtgcatgcactggccatgacaggttggggagaaacagtcctcaggcctctggtggaattcttgggtaaagtgtagtcaccactgcactgaggtccttccatgggaagggtgggaccagtcccagtggccttagccttggccagtgagtaagagacttgcttccttcttacagcccccagtccagacaggtgtcatagccaacccaactgttgcccctcagttcatgctcatggcccataggagtctccacttagctcaacactaagccttcatggcaactctcatcctgctcaagtaggaggagcagtacctgcttcctgcactggtggctgcagcccatgccacactagcttcttagtcttggttgttagggccagccc

SEQ ID NO: 575341 - DNA, 643 bp, Homo sapiens
ctttaatgacttgacaaaaccaggaaagattcttctgtggttgctaactgcaattagcagtaggaatcaataggaatttccatccatagtttcttagcatctctctggtgatctgtcacatgttgtagaggctgtgagttgctcaatagatatattggcaacaatttgccatatacctgacagttatgcatacatatttgtgttaagttaaataatgmatggcttgatgtatggatgaatcataactattataaatactgcatactcagaatccaatattttagttgatgtctattaatctaagtataatgcaaaattgtgacattcatcactgcagtcctctgatataaaaatggagactcagagaagcaaattgatttgtgcagtcacacacttagtatgtgaaagaacctagtctgaagcatcaattctctcactcgctcagttttctttgattactctgtttcttcaaaaatattatgtatggctgcccagaactctggtgttatgaatgtacctatttaggaacactaaatgatgtttacttgtatccctctaccccaaatattttcagctgaatagagctgccaataaaccaaaagaaaaatatgtcattattttctacctctgctgacagagaaac

SEQ ID NO: 575342 - DNA, 643 bp, Homo sapiens
ctttaatgacttgacaaaaccaggaaagattcttctgtggttgctaactgcaattagcagtaggaatcaataggaatttccatccatagtttcttagcatctctctggtgatctgtcacatgttgtagaggctgtgagttgctcaatagatatattggcaacaatttgccatatacctgacagttatgcatacatatttgtgttaagttaaataatgcatggyttgatgtatggatgaatcataactattataaatactgcatactcagaatccaatattttagttgatgtctattaatctaagtataatgcaaaattgtgacattcatcactgcagtcctctgatataaaaatggagactcagagaagcaaattgatttgtgcagtcacacacttagtatgtgaaagaacctagtctgaagcatcaattctctcactcgctcagttttctttgattactctgtttcttcaaaaatattatgtatggctgcccagaactctggtgttatgaatgtacctatttaggaacactaaatgatgtttacttgtatccctctaccccaaatattttcagctgaatagagctgccaataaaccaaaagaaaaatatgtcattattttctacctctgctgacagagaaac

SEQ ID NO: 575343 - DNA, 585 bp, Homo sapiens
cccctaaaatgaaatgtgatttgtatagatatcagcttcaaagtaattccccatgctctttttgctacctttttgctgcttttgaacctcacttataaagtctcttaagccaaaatggtttgtagaccataatcagaaacttaaatttaattctaaacattaagaaataccaattcaaaagttttttgtcagagtagtgatatgatctgatttatacttttackagttctcttaggcttctctatcaagactgtattgtgaggggaaaagagtaataagtaggcattccagttaaaagaccatcacgcaagagttctggaataacaaaataagtcagctccaacataagcacaaaaaacacttgcccaaaaaatggtcaaaatcaactttttttacattctagaaattaccaaaggcttgcaacattacaaggagcatttttttgaagaaaaatagctgagtcttcataacgacagccagttttgtggcatgttaattttctctatttgcatcccccttgccacagctctgcaatatccttcaaaataatcagtcttgcaacaacagtagctgtaaaactcaaca

SEQ ID NO: 575344 - DNA, 462 bp, Homo sapiens
atttttcatattatgcaatttaaaatatctagttttccacaaaaatattgtggcatacaaagaaagagaaaagtatggcctatgtataagcaaaaatacattcactagaagatatgcctgaagaagctcggatgttggttcactagacagagacttttaatgagttagatatacatctgtatgtgtgtacacatatataaacatatttttcaagtactaataaaaaccatgtctaaagaattaaagatatgtataagaacaatgtcataataaggaaaatcaataaaatatagaaattatttaaaaaaacaaacaaaaattctggagttgaaaagcataatraaattttgaaattttattttgaaatgaaaatttactagtggggctcaacagaagagttgagctggtggaagaaagaaatagcaaactagtatctattttactagaaatagaaagataggt

SEQ ID NO: 575345 - DNA, 631 bp, Homo sapiens
acatgttgctatggtttgaatgtttgtcccctccaaaactcatgttgaaagttgtttgccttgtggcagtgttgaaaaatggtacctttgggaggtaatagggccatgagctctttcttctcttgagtgggattaataccattataaaagggcaagtttggccccttattgtttccttacctcccactttgtcatgtggggacccagtattcctttcttccagaggacccagcaaaaaggcttttaccaaatgtcagctcttggattttggacttcccaaactcctgaactgtgaaaatataaatttctgggttttgtaaattacccagttgtggtttatcagcacaaaatggactaagatacatgagaaaataaatccatgtcatatgccatattaatgaaagaaaaaaaaagcacatgaccattttaatagagaattggacaaattcaacaactctttatgataaaaaatctcagccagagtaggaagacaaagaaacttcytaaatttgataaagggtgcctattaaacatgctcagctaatatcatatttaatgttgaaagtctgaaatatttcttcataaaatcaggaacaagcatgccaactctcaacaattttattaaacattg

SEQ ID NO: 575346 - DNA, 575 bp, Homo sapiens
tagaaaaactaataaaaggagctctaaatattgaaacaaattcttgaaatacaccaaaatagaaccccttaaagcataaatctcacaggacctatacaacaaaaacacaatgaaaaacaaacaaataagatattaaggcaaaaaatagcatgataaatagatgaatagaatagtacctctcatctcagtactaacattgaatgtaaatgatccaaatgctccacttaaaggatacagaatggcagaatggataagaattcaccartgaagtatgtgctgtcttcaagagcctcacctaacacataagaacacacataaacttaaggtaaaggggtggaaaaagatgttccatgcaaatagaaaccaaaaacgagtaggaatagctattcttgtatcagacaaaagaaactttaaggcaacagcagttaaaaaagacaaagagggacattatatgatgacaaaagcacttgtccacaggaaaatatcaccatcctaaatatttatgcacctatcactggagctcccaaatttataaaacaattaatactagacctaagaaatgagatagacagcac

SEQ ID NO: 575347 - DNA, 622 bp, Homo sapiens
tcagttcactatttcttttctttgtcttctccattctgctgtggatcccatccattgggttttttatttaaattgtttggtttttcaaaactaaaatttacatttggttcttctttgtgtattccatttctatgctgggaatttatagttcttttttgatagcttttttctctgttttaaatgtgcttttaattgctttttgaagcattttttataacagctgtcttaaaattatatatataaacatatatatttcttatattatctttacttagagatttgtgttttattatcttgcaaattttaaataaccactgggcttttatttgagcattttttagcattgatttcttggactttcttggacttcataagccaatcacagtgggattttcagattccagacagagraataagaaagaaggcagaagaaaacatttttaaaattaaaaattagaataaattaattttaattgaaaaataattttttcagttctaaaaaacatttttttttcttatattctctattatagaagtgattctgttgttcaataatttctttgagctattaacatttttttaaattttaatgatattgttattacatatattgacaactttt

SEQ ID NO: 575348 - DNA, 622 bp, Homo sapiens
tcagttcactatttcttttctttgtcttctccattctgctgtggatcccatccattgggttttttatttaaattgtttggtttttcaaaactaaaatttacatttggttcttctttgtgtattccatttctatgctgggaatttatagttcttttttgatagcttttttctctgttttaaatgtgcttttaattgctttttgaagcattttttataacagctgtcttaaaattatatatataaacatatatatttcttatattatctttacttagagatttgtgttttattatcttgcaaattttaaataaccactgggcttttatttgagcattttttagcattgatttcttggactttcttggacttcataagccaatcacagtgggattttcagattccagacagaggaataagaaagaaggcagaagaaaacatttttaaaattaaaaattagaataaattaattttaattgaaaaataattttttcagttctaaaaaacattkttttttcttatattctctattatagaagtgattctgttgttcaataatttctttgagctattaacatttttttaaattttaatgatattgttattacatatattgacaactttt

SEQ ID NO: 575349 - DNA, 512 bp, Homo sapiens
tctgtgggcatgggggcatagtcagctcaatttaaacactgctacactttgttgatattgttatttaaattaattacaggtttgaagtacaataaaggcatggattaattccctttcccttaatattggtgaaattatattaaagcaaatgtttatttaaactatattaaaccacgttttcagtatttcttatgtgttccatccatgatgtgctctatcctaaaattaaatggtgcctgggtgcagtggctcatgcctgtcaatccagcactttaagaggccaaggcaggaaggagtttatcaattgagcccaggagtttgagaccagcctggacaacacagtgagactttgtctttaaaaaatatttttaaattagccaggcgtggtggtatgcacctgtagtcccagctactcaagaggctgaggtgggagcatcacttgaggaattcgaggctgcagtgagctatgatcaygccactgcactccagagtgggagacagagcaagattcc

SEQ ID NO: 575350 - DNA, 615 bp, Homo sapiens
taataatattctttattattarcaagacacaagagaatacacataggcgattcaatgaaatcaggaatataattcattatctgaatgagaaattcaacagagagatataataaaaaagaacagaaatcttatagctagtgaatttaatcaataaaataaagtttaaaaatacaatagaaagcttcaatagcagactagagcaaacaaaggaaagattctgtgaacttgaagataggtcatttgtgacttggtctgacttagaggaaacaaaagaaaaaggaatgaaaaagagtgaagatattctttgggacttatgggatatcattaagcaaataaatatttgcattatgagattttcaggacaagagattaaaaaagggacaaaaatgcttatttaataaaatagtggctgacaatttcccattttgggagagatatggacattcagattcacttagctccaaggtccccaaacatatataacccaaagaggttctctcaaaggcacattatagtaaaactgtcaaaacttaaagacaaagaattttaaaagcagcaagagaaaacatcaagtcacatacaagggaatctccattagaatatatcagtagattt

SEQ ID NO: 575351 - DNA, 494 bp, Homo sapiens
caaactggtatccctgcaattatctgaacagaatttttaagtagtcacattgacttttttttttttaaagttagttttaagctatttgataacatatggatctacttcactaaagttttatttttgtgtgtaattctttaatccatctggagatattttggttgtttttcaatcagatagccagttaaaccagaaagaaaaatcttaccaaaaagtttccacttagaaaatttaatagccaaaaaawctaatatatgcaagaatgagcaaaaacatattgataaaagatacatcatatttttattgaaatatttcataatgaaatgtttcacatggttaaagaactacaaattcattcaatgtaaataaaaacttcatgggaaatgtataatatatgagggattatttgatatctgaaaaaattagatagaaaataaagcttaaaaacttctagaaggtaatccagtagaatatttatcagcttaggctaacaa

SEQ ID NO: 575352 - DNA, 576 bp, Homo sapiens
ccgagatcacgtcattgcgctccagcctcggcaacagagtgagtttctgtctcaagaaaaaaaaaaaatgcccttgtattcaaccrttaagggggcaaccaagaacttggcatcaggacccctctctttgctgagagctttcctttcactaaataaattctactacacttactctttgagtgtccatgtgcctacttcttcagaacttaggcctagctgggctaaggagcaaaaaaccctgcatcatatctcaaactcaacctttaagtttttgtcccactagtctccttaacattttgcaatacattaaaattgcttcaaggttttttcaaaatgtgtttttggtaattctgctaatttatgctgtttaaaacatcctggctgaatgatttcaaataaattttataacatctatttccatttttttccactcagtacatatgaatccactgtttaatccaaatttaaagtaacaatcattaaagtaaattaaaatggagtccaggcctgaagaatttctgagcagacaaaagcagttaggcatcataagtgatctaaaccttgattgatctacag

SEQ ID NO: 575353 - DNA, 576 bp, Homo sapiens
ccgagatcacgtcattgcgctccagcctcggcaacagagtgagtttctgtctcaagaaaaaaaaaaaatgcccttgtattcaaccattaagggggcaaccaagaacttggcatcaggacccctctctttgctgagagctttcctttcactaaataaattctactacacttactctttgagtgtccatgtgcctacttcttcagaacttaggcctagctgggctaaggagcaaaaaaccctgcatcatatctcaaactcaacctttaagtttttgtccyactagtctccttaacattttgcaatacattaaaattgcttcaaggttttttcaaaatgtgtttttggtaattctgctaatttatgctgtttaaaacatcctggctgaatgatttcaaataaattttataacatctatttccatttttttccactcagtacatatgaatccactgtttaatccaaatttaaagtaacaatcattaaagtaaattaaaatggagtccaggcctgaagaatttctgagcagacaaaagcagttaggcatcataagtgatctaaaccttgattgatctacag

SEQ ID NO: 575354 - DNA, 576 bp, Homo sapiens
ccgagatcacgtcattgcgctccagcctcggcaacagagtgagtttctgtctcaagaaaaaaaaaaaatgcccttgtattcaaccattaagggggcaaccaagaacttggcatcaggacccctctctttgctgagagctttcctttcactaaataaattctactacacttactctttgagtgtccatgtgcctacttcttcagaacttaggcctagctgggctaaggagcaaaaaaccctgcatcatatctcaaactcaacctttaagtttttgtcccactagtctccttmacattttgcaatacattaaaattgcttcaaggttttttcaaaatgtgtttttggtaattctgctaatttatgctgtttaaaacatcctggctgaatgatttcaaataaattttataacatctatttccatttttttccactcagtacatatgaatccactgtttaatccaaatttaaagtaacaatcattaaagtaaattaaaatggagtccaggcctgaagaatttctgagcagacaaaagcagttaggcatcataagtgatctaaaccttgattgatctacag

SEQ ID NO: 575355 - DNA, 576 bp, Homo sapiens
ccgagatcacgtcattgcgctccagcctcggcaacagagtgagtttctgtctcaagaaaaaaaaaaaatgcccttgtattcaaccattaagggggcaaccaagaacttggcatcaggacccctctctttgctgagagctttcctttcactaaataaattctactacacttactctttgagtgtccatgtgcctacttcttcagaacttaggcctagctgggctaaggagcaaaaaaccctgcatcatatctcaaactcaacctttaagtttttgtcccactagtctccttaacattttgcaatacattaaaattgcttcaaggttttttcaaaatgtgtttttggtaattctgctaatttatgctgtttaaaacatcctggctgaatgatttcaaataaattttataacatctatttccatttttttccactcagtacatatgaatccactgtttaatccaaatttaaagtaacaatcattaaagtaaattaaaatggagtccaggcctgaagaatttctgagcagacaaaascagttaggcatcataagtgatctaaaccttgattgatctacag

SEQ ID NO: 575356 - DNA, 516 bp, Homo sapiens
tgagtagaaaatcttattttgaggaagccctatttatataattttttcctttacggctacattttctgtttgttttgtctgaaatatttttgactccctaaagatgcaatattttgcctccctaagatgcaggattgttctcttatatgctttatagtattagtttttatatttatgtttcatatttatgtttatgagcatctcaaattggattcatcacaaatttgtaaatgatatgggataaacattgacgttaggctaagcatgatgactcacayttgcaaccccagtgcattaggagactgaagaaggaggatttcttgagcccaggagtttgaggctgcagtgagctatgattgcaccactccagcctgggcaacagaaaaagttagaaataaaaaaatcatttgattttcataaatttatctagttgtttcagatttgttgtaaaaatatgtattttctattgtcctttgtcttcatagaaaatcagttcatcatctatattaaacacga

SEQ ID NO: 575357 - DNA, 516 bp, Homo sapiens
tgagtagaaaatcttattttgaggaagccctatttatataattttttcctttacggctacattttctgtttgttttgtctgaaatatttttgactccctaaagatgcaatattttgcctccctaagatgcaggattgttctcttatatgctttatagtattagtttttatatttatgtttcatatttatgtttatgagcatctcaaattggattcatcacaaatttgtaaatgatatgggataaacattgacgttaggctaagcatgatgactcacacttgyaaccccagtgcattaggagactgaagaaggaggatttcttgagcccaggagtttgaggctgcagtgagctatgattgcaccactccagcctgggcaacagaaaaagttagaaataaaaaaatcatttgattttcataaatttatctagttgtttcagatttgttgtaaaaatatgtattttctattgtcctttgtcttcatagaaaatcagttcatcatctatattaaacacga

SEQ ID NO: 575358 - DNA, 516 bp, Homo sapiens
tgagtagaaaatcttattttgaggaagccctatttatataattttttcctttacggctacattttctgtttgttttgtctgaaatatttttgactccctaaagatgcaatattttgcctccctaagatgcaggattgttctcttatatgctttatagtattagtttttatatttatgtttcatatttatgtttatgagcatctcaaattggattcatcacaaatttgtaaatgatatgggataaacattgacgttaggctaagcatgatgactcacacttgcaaccccagtgcattaggagactgaagaaggaggatttcttgagcccaggagtttgaggctgcagtgagctatgattgcaccactccagcctgggcaacagaaaaagttagaaataaaaaaatcatttgattttcataaatttatctagttgtttcagatttgttgtaaaaatatgtrttttctattgtcctttgtcttcatagaaaatcagttcatcatctatattaaacacga

SEQ ID NO: 575359 - DNA, 454 bp, Homo sapiens
tgatgatggtgatgtcttggatagtgattgcaatggactgcatggctgttgccaccctgtgcctgaaacttataggtggaaatcctaacccttaatatgatggtattaggaggtggcactttcaggaggtggttacatcatgaggttggagcccttctaaatggaactagttcccttatataakggacccaagagagttctctcactctctgacatgtgaggatacaagaagaaaatggtagtctgcaacttagaagagagatatcactgaaacctggtcactctggtaccatggtctcagacttctagcctttagaactgtgaaaaaattgatttttgttgtttctaagccacctagtctataggtctttgtgatagcagccagaattgactaacacagtaatagtagcaatggcgatagaaagagtgaatgcatctgatatatactttgacg

SEQ ID NO: 575360 - DNA, 454 bp, Homo sapiens
tgatgatggtgatgtcttggatagtgattgcaatggactgcatggctgttgccaccctgtgcctgaaacttataggtggaaatcctaacccttaatatgatggtattaggaggtggcactttcaggaggtggttacatcatgaggttggagcccttctaaatggaactagttcccttatataagrgacccaagagagttctctcactctctgacatgtgaggatacaagaagaaaatggtagtctgcaacttagaagagagatatcactgaaacctggtcactctggtaccatggtctcagacttctagcctttagaactgtgaaaaaattgatttttgttgtttctaagccacctagtctataggtctttgtgatagcagccagaattgactaacacagtaatagtagcaatggcgatagaaagagtgaatgcatctgatatatactttgacg

SEQ ID NO: 575361 - DNA, 454 bp, Homo sapiens
tgatgatggtgatgtcttggatagtgattgcaatggactgcatggctgttgccaccctgtgcctgaaacttataggtggaaatcctaacccttaatatgatggtattaggaggtggcactttcaggaggtggttacatcatgaggttggagcccttctaaatggaactagttcccttatataagggacccaagagagttctctcactctctgacatgtgaggatacaagaagaaaatggtagtctgcaacttagaagagagatatcactgaaacctggtcactctggtaccatggtctcagacttctagcctttagaactgtgaaaaaattgatttttgttgtttctaagccacctagtctataggtctttgtgatagcagycagaattgactaacacagtaatagtagcaatggcgatagaaagagtgaatgcatctgatatatactttgacg

SEQ ID NO: 575362 - DNA, 198 bp, Homo sapiens
aaccactgggcagtaagagacagtaacaaatcacagcagatactgyttccttagagcaattaaattacatcagaaaaactaagctgagtgataacaaaacaatttctaaacgtcaggagcctaaatcaattcattcataagttgctcatttcacatgtccatggtgttgcttatgactctactcatgggtcattttca

SEQ ID NO: 575363 - DNA, 198 bp, Homo sapiens
aaccactgggcagtaagagacagtaacaaatcacagcagatactgcttccttagagcaattaaattacatcagaaaaactaagctgagtgataacaaaacaatttctaaaygtcaggagcctaaatcaattcattcataagttgctcatttcacatgtccatggtgttgcttatgactctactcatgggtcattttca

SEQ ID NO: 575364 - DNA, 198 bp, Homo sapiens
aaccactgggcagtaagagacagtaacaaatcacagcagatactgcttccttagagcaattaaattacatcagaaaaactaagctgagtgataacaaaacaatttctaaacgtcaggagcctawatcaattcattcataagttgctcatttcacatgtccatggtgttgcttatgactctactcatgggtcattttca

SEQ ID NO: 575365 - DNA, 198 bp, Homo sapiens
aaccactgggcagtaagagacagtaacaaatcacagcagatactgcttccttagagcaattaaattacatcagaaaaactaagctgagtgataacaaaacaatttctaaacgtcaggagcctaaatcaattcattcataagttgctcatttcacatgtccatggtgttgcttatgaytctactcatgggtcattttca

SEQ ID NO: 575366 - DNA, 572 bp, Homo sapiens
tgtgaaaaggcttaaagcagtatatttaaccactgcctaccagagtagtacatagagaagcaaacctaatctataagcaacaatgagagcatgctacagataacttttaatattgtaaatatatatgatacrgatgataaaatctttatgaaataatctataggagaggtgaaatgggtctctgccaggagaatgcaaaggcagtaaaaaattaaaaaccaaaatattgagaattattttgaggaaagtgttagtagaatttaataatacatttaatagaaacataagattaaaaatgcaaagatgaattcaaagttgcttacattcaaaaataactcattaaatgtacagtattttaagcacacttttgatctatgaagagtataaatatgaataagacatagttctttatgctagacatagagaatattttttgtacagaaataaaatctagagtatgtaatattaggggaaagaaaatgcctcatagatgtcaataaaccttgttccctctatttttttttactcatttcatttcctgtaataattgtggtaacagtaatactgaaaca

SEQ ID NO: 575367 - DNA, 572 bp, Homo sapiens
tgtgaaaaggcttaaagcagtatatttaaccactgcctaccagagtagtacatagagaagcaaacctaatctataagcaacaatgagagcatgctacagataacttttaatattgtaaatatatatgatacggatgataaaatctttatgaaataatctataggagaggtgaaatgggtctctgccaggagaatgcaaaggcagtaaaaaattaaaaaccaaaatattgagaattattttgaggaaagtgttagtagaatttaataatacatttaatagaaacataagattaaaaatgcaaagatgaattcaaagttgcttacattcaaaaataactcattaaatgtacagtattttaagcacacttttgatctatgaagagtataaatatgaataagacatagttctttakgctagacatagagaatattttttgtacagaaataaaatctagagtatgtaatattaggggaaagaaaatgcctcatagatgtcaataaaccttgttccctctatttttttttactcatttcatttcctgtaataattgtggtaacagtaatactgaaaca

SEQ ID NO: 575368 - DNA, 414 bp, Homo sapiens
agctgagtgttcaaataaggcaagtgccaagccgtaatcaatccagctgtttctgtacctcacttctgatttctatacgtcactttactttgtattgtctataaattcattctgaccatgagacaccgctggagtctctctgaatctgctgtgattgtgggggctttccaatttatgaatcattcattactcrattaaactgtaaatttattttggctgaaggtgtttttttttttttttttttagcagtcctcaccataatgatccatacacgtaagtgtctaatataatctttctagctttcttttttggttgtgtttagtcatactgttgctgattcagctttgtacaaaatgtcggagcaaaatgactatcaataatatagagatctgcaaggattcccacacaggtgaa

SEQ ID NO: 575369 - DNA, 348 bp, Homo sapiens
ttactcaattaaactgtaaatttattttggctgaaggtgtttttttttttttttttttagcagtcctcaccataatgatccatacacgtaagtgtctaatataatctttctagctttcttttttggttgtgtttagtcatactgttgctgattcagctttgtayaaaatgtcggagcaaaatgactatcaataatatagagatctgcaaggattcccacacaggtgaaatatgcatggtggaaagaggcaattcttaaggcaaagagccaagcatgtaccaaacaccaatgcccttgcacaccaaaactaaagattctacaatttgccaaagataagaatgtaccttt

SEQ ID NO: 575370 - DNA, 414 bp, Homo sapiens
agctgagtgttcaaataaggcaagtgccaagccgtaatcaatccagctgtttctgtacctcacttctgatttctatacgtcactttactttgtattgtctataaattcattctgaccatgagacaccgctggagtctctctgaatctgctgtgattgtgggggctttccaatttatgaatcattcattactcaattaaactgtaaatttattttggctgaaggtgtttttttttttttttttttagcagtcctcaccataatgatccatacacgtaagtgtctaatataatctttctagctttcttttttggttgtgtttagtcatactgttgctgattcagctttgtacaaaatgtcrgagcaaaatgactatcaataatatagagatctgcaaggattcccacacaggtgaa

SEQ ID NO: 575371 - DNA, 348 bp, Homo sapiens
ttactcaattaaactgtaaatttattttggctgaaggtgtttttttttttttttttttagcagtcctcaccataatgatccatacacgtaagtgtctaatataatctttctagctttcttttttggttgtgtttagtcatactgttgctgattcagctttgtacaaaatgtcggagcaaaatgactatcaataatatagagatctgcaagrattcccacacaggtgaaatatgcatggtggaaagaggcaattcttaaggcaaagagccaagcatgtaccaaacaccaatgcccttgcacaccaaaactaaagattctacaatttgccaaagataagaatgtaccttt

SEQ ID NO: 575372 - DNA, 348 bp, Homo sapiens
ttactcaattaaactgtaaatttattttggctgaaggtgtttttttttttttttttttagcagtcctcaccataatgatccatacacgtaagtgtctaatataatctttctagctttcttttttggttgtgtttagtcatactgttgctgattcagctttgtacaaaatgtcggagcaaaatgactatcaataatatagagatctgcaaggattcccacacaggtgaaatatgcatggtggaaagaggcaattcttaaggcaaagagccaagcatgtaccaaacaccaatgcccttgcayaccaaaactaaagattctacaatttgccaaagataagaatgtaccttt

SEQ ID NO: 575373 - DNA, 348 bp, Homo sapiens
ttactcaattaaactgtaaatttattttggctgaaggtgtttttttttttttttttttagcagtcctcaccataatgatccatacacgtaagtgtctaatataatctttctagctttcttttttggttgtgtttagtcatactgttgctgattcagctttgtacaaaatgtcggagcaaaatgactatcaataatatagagatctgcaaggattcccacacaggtgaaatatgcatggtggaaagaggcaattcttaaggcaaagagccaagcatgtaccaaacaccaatgcccttgcacaccaaarctaaagattctacaatttgccaaagataagaatgtaccttt

SEQ ID NO: 575374 - DNA, 487 bp, Homo sapiens
tgactatcaataatatagagatctgcaaggattcccacacaggtgaaatatgcatggtggaaagaggcaattcttaaggcaaagagccaagcatgtaccaaacaccaatgcccttgcacaccaaaactaaagattctacaatttgccaaagataagaatgtacctttcacracagcaaggacctcatatattgtcttattatatatccctaaaatctagcacagtgttgaataagaggaagtagaaataattttgagaaggaattaaacatgtatttgtagaagtcaagtcttacccattgaaaaaatatctcccccatatttgtaattcattaaattgtttggaagggaaaagaaactaaagggaatactccatagagaaagttgtttcagaaattatgcaaatttattctaataactaagaaatagtgaaaatgtattagaaaggttaggtagaggcacatttcagatttagactaaggtgcaaa

SEQ ID NO: 575375 - DNA, 360 bp, Homo sapiens
ttatatatccctaaaatctagcacagtgttgaataagaggaagtagaaataattttgagaaggaattaaacatgtatttgtagaagtcaagtcttacccattgaaaaaatatctcccccatatttgtaattcattaaattgtttggaagggaaaagaaactaaagggaatactccatagagaaagttgtttcagaaattatgyaaatttattctaataactaagaaatagtgaaaatgtattagaaaggttaggtagaggcacatttcagatttagactaaggtgcaaatggctttctacttaatgatagagaaaagcgtaaataaaagtacattgtatacatgaaatggttttgtttga

SEQ ID NO: 575376 - DNA, 360 bp, Homo sapiens
ttatatatccctaaaatctagcacagtgttgaataagaggaagtagaaataattttgagaaggaattaaacatgtatttgtagaagtcaagtcttacccattgaaaaaatatctcccccatatttgtaattcattaaattgtttggaagggaaaagaaactaaagggaatactccatagagaaagttgtttcagaaattatgcaaatttattctaataactaagaaatagtgaaaatgtattagaaaggttaggtagaggcacatttcagatttagactaaggtgcaaatggctttctacttaatgatagagaaaagcrtaaataaaagtacattgtatacatgaaatggttttgtttga

SEQ ID NO: 575377 - DNA, 503 bp, Homo sapiens
cttgaattttcatcactagcatgtttcctacatacataaacatagtsagtagtgagtatattcacatataaagtaacaaagaattatagcaaacccccacatccaatcgggaaaaatgttttaactctgtatattcattaaattgttcacaaactgacatcttttagcatataatatggtttcctttagcttgttaaagagaatgaactcatgactaaaacataagaacacccaatgaagctcaactgaatcaattcaactatgaaaaataaaatgactagtgatcatctctttattattattgaaagaataacttacaagtaaaaacattcaatttttgaaaacagctttatatttattgaatttatgcatataatgttagttgcatttcaaaataaaatggctgccttaaaagtgatgcaaaattacatatttatacattctctgaattaagcaggattaattgaaaagtggttatgaaggcatgactgcaaggtacaaat

SEQ ID NO: 575378 - DNA, 503 bp, Homo sapiens
cttgaattttcatcactagcatgtttcctacatacataaacatagtcagtagtgagtatattcacatataaagtaacaaagaattatagcaaacccccacatccaatcgggaaaaatgttktaactctgtatattcattaaattgttcacaaactgacatcttttagcatataatatggtttcctttagcttgttaaagagaatgaactcatgactaaaacataagaacacccaatgaagctcaactgaatcaattcaactatgaaaaataaaatgactagtgatcatctctttattattattgaaagaataacttacaagtaaaaacattcaatttttgaaaacagctttatatttattgaatttatgcatataatgttagttgcatttcaaaataaaatggctgccttaaaagtgatgcaaaattacatatttatacattctctgaattaagcaggattaattgaaaagtggttatgaaggcatgactgcaaggtacaaat

SEQ ID NO: 575379 - DNA, 520 bp, Homo sapiens
cagagcacctacttgtagctcttgatagcagaatcatcagtcaactgaaaagatattttaagacctccaagaataagtagataatttctcttctgtattttgttaatgaaagaaaaccagggtaataactgcttgaattttcatcactagcatgtttcctacatacataaacatagtcagtagtgagtatattcacatataaagtaacaaagaattatagcaaacccccacatccaatcgggaaaaatgttttaactctgtatattcattaaattgttcacaaactgacatcttttagcatataatatggtttcctttagcttgttaaagagaatgractcatgactaaaacataagaacacccaatgaagctcaactgaatcaattcaactatgaaaaataaaatgactagtgatcatctctttattattattgaaagaataacttacaagtaaaaacattcaatttttgaaaacagctttatatttattgaatttatgcatataatgttagttgcatt

SEQ ID NO: 575380 - DNA, 413 bp, Homo sapiens
atacaaataaaaactaagtgcagacaaaatataatcaacagtgattttttaaccattgacaagaagctgaggatgctgatccttgataaaagaaaaaataaaatctgacttatcccaagctttctctcagtttccagaagacacagtgaaaggatratccaaagaaagtataactctccctgtatattgagaaattggagattggggcttagaaaggaaaatttagctacaattgcagagctaaatagaagagagagagcatttgcacagagatggtgatatggtatggctttgtccccacccacatctcatcttgaattcccatgtgttgtgggagggaccaggtgggagataattgaatcatggtggcatgccatcccattctcatgatagtgagtaagtcccacaagatc

SEQ ID NO: 575381 - DNA, 539 bp, Homo sapiens
catgggggcaggtctttcccatgctgttctcataatagtgaatgggtctcacaagatctartggtgttaaaaacaggattgtctctgcacaagctctttttttgcctgctgccacccacataagatgtgtcttgctcctttttgccatgattgtgagtcctccccagccatgcggaactgtatgtccaataaacctttttcttttgtaagttgtctggtcggtgggtatgtctttatcagcagagttaaaatggactaatacaatcactctatcaaatgagataatatttattcctttaccactgacaactctctctcggctcttctattcaatcatgttactgatagatgctttgctttttgttgtttgttgtttaacctgatgtgttgatagcttattttatgaatttctgttcttcttttaattttacaacaattttactatttctccttacatgtgtataagtcatacggagactccttctcatctaccctgaccccagaatattaaaacttttcagagtttctggattaattcc

SEQ ID NO: 575382 - DNA, 492 bp, Homo sapiens
tttttgcctgctgccacccacataagatgtgtcttgctcctttttgccatgattgtgagtcctccccagccatgcggaactgtatgtccaataaacctttttcttttgtaagttgtctggtcggtgggtatgtctttatcagcagagttaaaatggactaatacaatcactctatcaaatgagataatatttattcctttaccactgacaactctctctcggctcttctattcaatcatgttactgatagatgctttgctttttgttgtttgttgtttaacctgatgtgttgatagcttattttatgaatttctgttcttcttttaattttacaacaattttactatttctccttacatgtgtataagtcatayggagactccttctcatctaccctgaccccagaatattaaaacttttcagagtttctggattaattccattatatggacatgatttcttgagataggaaaaactgatttgattgtgaca

SEQ ID NO: 575383 - DNA, 503 bp, Homo sapiens
tttttgcctgctgccacccacataagatgtgtcttgctcctttttgccatgattgtgagtcctccccagccatgcggaactgtatgtccaataaacctttttcttttgtaagttgtctggtcggtgggtatgtctttatcagcagagttaaaatggactaatacaatcactctatcaaatgagataatatttattcctttaccactgacaactctctctcggctcttctattcaatcatgttactgatagatgctttgctttttgttgtttgttgtttaacctgatgtgttgatagcttattttatgaatttctgttcttcttttaattttacaacaattttactatttctccttacatgtgtataagtcatacggagactccttctcatctaccctgaccccagaatattaaaacttttcagagtttcwggattaattccattatatggacatgatttcttgagataggaaaaactgatttgattgtgacattagacttatc

SEQ ID NO: 575384 - DNA, 538 bp, Homo sapiens
aggattgtctctgcacaagctctttttttgcctgctgccacccacataagatgtgtcttgctcctttttgccatgattgtgagtcctccccagccatgcggaactgtatgtccaataaacctttttcttttgtaagttgtctggtcggtgggtatgtctttatcagcagagttaaaatggactaatacaatcactctatcaaatgagataatatttattcctttaccactgacaactctctctcggctcttctattcaatcatgttactgatagatgctttgctttttgttgtttgttgtttaacctgatgtgttgatagcttattttatgaatttctgttcttcttttaattttacaacaattttactatttctccttacatgtgtataagtcatacggagactccttctcatctaccctgaccccagaatattaaaacttttcagagtttctggattaattccattatatggacatgattycttgagataggaaaaactgatttgattgtgacattagacttatcggaatctaaga

SEQ ID NO: 575385 - DNA, 537 bp, Homo sapiens
aggattgtctctgcacaagctctttttttgcctgctgccacccacataagatgtgtcttgctcctttttgccatgattgtgagtcctccccagccatgcggaactgtatgtccaataaacctttttcttttgtaagttgtctggtcggtgggtatgtctttatcagcagagttaaaatggactaatacaatcactctatcaaatgagataatatttattcctttaccactgacaactctctctcggctcttctattcaatcatgttactgatagatgctttgctttttgttgtttgttgtttaacctgatgtgttgatagcttattttatgaatttctgttcttcttttaattttacaacaattttactatttctccttacatgtgtataagtcatacggagactccttctcatctaccctgaccccagaatattaaaacttttcagagtttctggattaattccattatatggacatgatttcttgagataggaaaaactgattkgattgtgacattagacttatcggaatctaag

SEQ ID NO: 575386 - DNA, 622 bp, Homo sapiens
taattcaaacagaagacaacatatatatatatatatatatttttcacctaggattagtaaatcaagaaaattgtattacaattttattggatggtgagttctataatatactaagtataaaaaaataagtaaaagacttgacrtataccataataaaatatttaataagcacatatctagtaagtacatagaaatatataaataaaaacagctttattcaataagtatttgtgactattatatatcttatctcatttatcttcacattatttttgtaggataaatatcactaatttgatgtgttggttgcaaaaagggtaatgtcactaaaagaagtcagatagcctgattaaggttttacattcattcattaagtgacagatatataatgagaacacaatttctcttattatatcaaactacctgctaaacaacaaaaggagtttgatgatttaattacatatactttatcttaattcccaaagtgtattaatatggaagggcattctttgttggtatttgatgaggttagaattaagaatttaaaacttattggtataaacgtatacctaatttaaatcatttaagttatgatatgttaagctgactaatacatgcttga

SEQ ID NO: 575387 - DNA, 622 bp, Homo sapiens
taattcaaacagaagacaacatatatatatatatatatatttttcacctaggattagtaaatcaagaaaattgtattacaattttattggatggtgagttctataatatactaagtataaaaaaataagtaaaagacttgacatataccataataaaatatttaataagcacatatctagtaagtacatagaaatatataaataaaaacagctttattcaataagtatttgtgactattatatatcttatctcatttatcttcacattatttttgtaggataaatatyactaatttgatgtgttggttgcaaaaagggtaatgtcactaaaagaagtcagatagcctgattaaggttttacattcattcattaagtgacagatatataatgagaacacaatttctcttattatatcaaactacctgctaaacaacaaaaggagtttgatgatttaattacatatactttatcttaattcccaaagtgtattaatatggaagggcattctttgttggtatttgatgaggttagaattaagaatttaaaacttattggtataaacgtatacctaatttaaatcatttaagttatgatatgttaagctgactaatacatgcttga

SEQ ID NO: 575388 - DNA, 443 bp, Homo sapiens
ggagctgggtcttccttaaccaagggagagaaaaggctatcttgggaattggggtcctggcctaataagaaaaaaaaaaaaaaaaaaaaaaacctctcataaaagttaactccttacaaagtggagaaaagaaaaaaaaataaaataaaccagcttaagtgcaggggggggaagatgcctggaggagaaaccttttatttttatgcaaatgagttcctccaatagggagagaacattttaattgctgtctcctcctttctggctcagccaggggaggaaagacactgtgggtgcatggggagagggaagagtgagcaggaaatgctggccacctagscaagtggggcccttgggttatgtgccccagccgggaggggagggaggttgggagatgccgctctcccatttgtctcacatgtgtacctgtggccattggaggttgg

SEQ ID NO: 575389 - DNA, 342 bp, Homo sapiens
ttcttgcctcaatttattccagaatgacattctacatttattcaataagtactcaaagggatgtgttatgtgcatggcattcaactaaccattagttggacaagacaaactaagtaaaggatatctttcttgccttcttaaagtttgcagtttaattatcttgatatttcaaggctcattctcttacattttcactaattttccatattttttctaagtctctgaaaagttttgatagtgaattccatcmcttttatattagctaagctctcattggctttctaactcaatttatcacatggatattgactttcaaccatgttttctttttttttttctttt

SEQ ID NO: 575390 - DNA, 342 bp, Homo sapiens
ttcttgcctcaatttattccagaatgacattctacatttattcaataagtactcaaagggatgtgttatgtgcatggcattcaactaaccattagttggacaagacaaactaagtaaaggatatctttcttgccttcttaaagtttgcagtttaattatcttgatatttcaaggctcattctcttacattttcactaattttccatattttttctaagtctctgaaaagttttgatagtgaattccatcccytttatattagctaagctctcattggctttctaactcaatttatcacatggatattgactttcaaccatgttttctttttttttttctttt

SEQ ID NO: 575391 - DNA, 570 bp, Homo sapiens
ggtctagcagtgtttctggagtttttggtactatacctttttcaagataaagtaaaaaaatttatggataatttagttgttccctgtgtagattccagtgccaaattcctttcttagacactgtttctagtacaacatgttaatatgtaacccctgcttcacttacggatttttagagatctatcccaggttacttaattcaactccaatacatacttttcttttaaatgcagygaataaagggtgagttacttagtcactccggttttatttaatcctactgtcatctgacaatatgggactgatactatttcctatttctagatgggggctagaaatatactgtaatatttattcttgatatatgtgtgttactttaacgggaatacatatgctataaatagtccccttggatctcacaagttagacagtcctacccacaatgccctgctgaagagttgtagcagatcaccctgttcctccttaacctctctgtgtctcatatgctcacctgtaaaatagtaatcatagtaacacctaacttgtgatgatgtagagaggattaaaaaa

SEQ ID NO: 575392 - DNA, 658 bp, Homo sapiens
ctattcagaacatatgcattcaatatctatcactctatcaagatgtgagatatggggtatgtgattgattctgttggaaaagcacagtcatataatgatgaaagtgtgataatacctctgtgactcgagagtgtcacaagtgtacacgagcatgtggcacagagtgttagatctgatagtctctttgaggaggaggagtaatggcgctatagtgattttttgaatatttcccctagtatttttagtgatttcacaaatcgttckaatgccttaaaggactaccactctggtaatatcactcatagcaatgttcttgtgaggatgtaggcttaatgaaaagtcctgtaatgcttgcacacatggaaagctgaccagtattagataaaacaaaattgttatagttgggaattattactataggtattttcctcatcattttgcaacatttataattttttcttaatgaaatatgttgatttttcagtgtttttatagtaaaattgtattacatttaaaaaattaatagagaactattctgttgaagacaatgaatgcatattatgcttaacatgttaatatgtgtttcacattatttatagattttgtctactgcattgaaatttgctagaatgctgcatatgtagagcttaatgtaatc

SEQ ID NO: 575393 - DNA, 658 bp, Homo sapiens
ctattcagaacatatgcattcaatatctatcactctatcaagatgtgagatatggggtatgtgattgattctgttggaaaagcacagtcatataatgatgaaagtgtgataatacctctgtgactcgagagtgtcacaagtgtacacgagcatgtggcacagagtgttagatctgatagtctctttgaggaggaggagtaatggcgctatagtgattttttgaatatttcccctagtatttttagtgatttcacaaatcgttctaatgccttaaaggactaccactctggtaatatcactcatagcaatgttcttgtgaggatgtaggcttaatgaaaagtcctgtaatgcttgcacacatggaaagctgaccagtattagataaaacaaaattgttatagttgggaattrttactataggtattttcctcatcattttgcaacatttataattttttcttaatgaaatatgttgatttttcagtgtttttatagtaaaattgtattacatttaaaaaattaatagagaactattctgttgaagacaatgaatgcatattatgcttaacatgttaatatgtgtttcacattatttatagattttgtctactgcattgaaatttgctagaatgctgcatatgtagagcttaatgtaatc

SEQ ID NO: 575394 - DNA, 658 bp, Homo sapiens
ctattcagaacatatgcattcaatatctatcactctatcaagatgtgagatatggggtatgtgattgattctgttggaaaagcacagtcatataatgatgaaagtgtgataatacctctgtgactcgagagtgtcacaagtgtacacgagcatgtggcacagagtgttagatctgatagtctctttgaggaggaggagtaatggcgctatagtgattttttgaatatttcccctagtatttttagtgatttcacaaatcgttctaatgccttaaaggactaccactctggtaatatcactcatagcaatgttcttgtgaggatgtaggcttaatgaaaagtcctgtaatgcttgcacacatggaaagctgaccagtattagataaaacaaaattgttatagttgggaattattactataggtattttcmtcatcattttgcaacatttataattttttcttaatgaaatatgttgatttttcagtgtttttatagtaaaattgtattacatttaaaaaattaatagagaactattctgttgaagacaatgaatgcatattatgcttaacatgttaatatgtgtttcacattatttatagattttgtctactgcattgaaatttgctagaatgctgcatatgtagagcttaatgtaatc

SEQ ID NO: 575395 - DNA, 658 bp, Homo sapiens
ctattcagaacatatgcattcaatatctatcactctatcaagatgtgagatatggggtatgtgattgattctgttggaaaagcacagtcatataatgatgaaagtgtgataatacctctgtgactcgagagtgtcacaagtgtacacgagcatgtggcacagagtgttagatctgatagtctctttgaggaggaggagtaatggcgctatagtgattttttgaatatttcccctagtatttttagtgatttcacaaatcgttctaatgccttaaaggactaccactctggtaatatcactcatagcaatgttcttgtgaggatgtaggcttaatgaaaagtcctgtaatgcttgcacacatggaaagctgaccagtattagataaaacaaaattgttatagttgggaattattactataggtattttcctcatcattttgcaacatttatawttttttcttaatgaaatatgttgatttttcagtgtttttatagtaaaattgtattacatttaaaaaattaatagagaactattctgttgaagacaatgaatgcatattatgcttaacatgttaatatgtgtttcacattatttatagattttgtctactgcattgaaatttgctagaatgctgcatatgtagagcttaatgtaatc

SEQ ID NO: 575396 - DNA, 358 bp, Homo sapiens
ataggcaccaccttacatgactgatgcccagtaaaagccctggagaccaaaacttaaatgagcttctctgattgacaacacttcaatatgctgtcaaatattgttgctgggagaattacgtgtgttcttgtgggattccrctgggagaggacacctgaaagcttgtacctgatatctacatttctccccatgggctttttttctttgttgattttaatctgtatcttttcattgtagtaaactgtaactatgaatgtaacatgttttctaagacctgtgaatcattgtagttaatctttgagcctaagggtggtcataaggagccccaacacactaataaattactttcataaagaat

SEQ ID NO: 575397 - DNA, 358 bp, Homo sapiens
ataggcaccaccttacatgactgatgcccagtaaaagccctggagaccaaaacttaaatgagcttctctgattgacaacacttcaatatgctgtcaaatattgttgctgggagaattacgtgtgttcttgtgggattccgctgggagaggacacctgaaagcttgtacctgatatctacatttctccccatgggctttttttctttgttgattttaatctgtatcttttcattgtagtaaactgtaactatgaatgtaacatgttttctaagacctgtgaatcattrtagttaatctttgagcctaagggtggtcataaggagccccaacacactaataaattactttcataaagaat

SEQ ID NO: 575398 - DNA, 577 bp, Homo sapiens
ataattgggattagtaagtgtgcaaagatagaactggtgatgaaagagtgagactggaattaggaattaatytgtaacattaatgttgcaggttgggtcctggttatgagactgagcggatgctcattctttggagctataactctgaccagtgccacattaacagatttggaaaatatgagattaactatgaaggtacagaaaataaaggtgttaaaattatttctatattttagatctaattgttaataatatagtatatacacatacatactatattatatatatattacatatatataataacatatatatgcaaaaagctatggtaaatagaaaacattagctgggcatggtggcttatgcctataatcccagcactttgggaggtggaggcaggaggatacttgagcccaggggtctgagactagcctgggtaatatggcaagaccatgtctctacaaaaagtaaagaaaagtagctgggcctggtggcacacacctgtcatcaaagctactctggaggctgaagtgtgaggatcacttgaattcaagaggtcgaggctgtagggagctgt

SEQ ID NO: 575399 - DNA, 577 bp, Homo sapiens
ataattgggattagtaagtgtgcaaagatagaactggtgatgaaagagtgagactggaattaggaattaatctgtaacattaatgttgcaggttgggtcctggttatgagactgagcggatgctcattctttggagctataactctgaccagtgccacattaacagatttggaaaatatgagattaactatgaaggtacagaaaataaaggtgttaaaattatttctatattttagatctaattgttaataatatagtatatacacatacatactatattatatatatattacatatatataataacatatatatgcaaaaagctatggtaaatagaaaacattagctgggcatggtggcttatgcctataatcccagcactttgggaggtggaggcaggaggatacttgagcccaggggtctgagactagcctgggtaatatggcaagaccatgtctctacaaaaagtaaagaaaagtagctgggcctggtggcacacacctgtcatcaaagctactctggaggctgaagtgtgaggawcacttgaattcaagaggtcgaggctgtagggagctgt

SEQ ID NO: 575400 - DNA, 565 bp, Homo sapiens
gcaaatgaaggaagccacttccatccttaactgtgaaaaatgaataggggaaggtggtgcattctgggtcccatgattccagactgaccattggccctatttgagtgcagctgctgttaggcagaaactctggactccaaactctcagtaaaacttctgaagacactgctgttgctattgcagctgtcagcaccattgattcagctgagaagcagcccagaatttcacactgacacccacgctgttggttgtgttttttgaaccagattgaaattaatatctattgtatggttcaattgctatgaagttcaatgtcaagcaaatgtaatttataaagataaaagtaagaacagtggttgcctatagtaatgattggaggttcacaatagagactcctggattctagtaatactcaattcatattcatgtaggttgtgatgacattctaaaaatgtttaaagctatatgctyaagatctgtgtctttcacatgtgcatatcatatttcatattccaattaataaatcagtaaaaaaagttccagttcaggatacaatactgtagaa

SEQ ID NO: 575401 - DNA, 475 bp, Homo sapiens
acaaacaaacaaacaaacaaacaaaaaacacaaaaattaacggggcattgtggcagttgcttctaatcccagctacttggttggctgaggcaggagaatccgttggacccaggaggcagaggttgcagtgagccaagatcacaccactgcactgcagcctgggtaacagagcaaggttttgtctctcaaaaaaaaaaaaaaaaaaaaaaaaagccaattagggkggaaacacttagaaaagggtgttcataggttgtcaccatcttgaagcaattgttggacactattttaaaaatgttttacttctaagtgaaatgttgcattttattttactagaagattcttatgtagtttaagtacattttacagtattgtcaaagagcatgagcaaaatatttaggaaagatgagaccatatttttattattagtgacattgccccaaaaaaatcaggtagatgaatttgtattaagttt

SEQ ID NO: 575402 - DNA, 584 bp, Homo sapiens
atctaattataaaaggagatggtttgtactgagaatacacctgataagtaaagcaactgtgcattttacttagaaaccaaatctataaacttggaccaccaccacattcaatgaaaatgaaaggacccagtctctccccacttaacccatatatgattattttatctttgaaattatacacaaagcatgatactgagcaaaatcttcaatctgagtctgatttgacaattcaatgctttttgtgggttcacataggcactgtgagcasgattgtcttttatacccacacatcaaaacagagaatgttttctttttctacctgtgctccttttcaaaaggagataatggaaaaatatgagaatttgttctcaggatagttggctgtacatttttggtatgaggtagtggaatctttgaggcacgctaagggaaataagtcttaccattgaaatctgggggccatatactatagtctgggagtacacgtctagggagtacatggacaaagggaaattgggtgaaaatcccattggctgactcctgctagcatacctgtaaaagctaaccttttaataggttagttt

SEQ ID NO: 575403 - DNA, 584 bp, Homo sapiens
atctaattataaaaggagatggtttgtactgagaatacacctgataagtaaagcaactgtgcattttacttagaaaccaaatctataaacttggaccaccaccacattcaatgaaaatgaaaggacccagtctctccccacttaacccatatatgattattttatctttgaaattatacacaaagcatgatactgagcaaaatcttcaatctgagtctgatttgacaattcaatgctttttgtgggttcacataggcactgtgagcacgattgtcttttatacccacacatcaaaacagagaatgttttctttttctacctgtgctccttttcaaaaggagataatggaaaaatatgagaatttgttctcaggatagttggctgtacatttttggtatgaggtagtggaatctttgaggcacgctaagggaaataagtcttaccattgaaatctgggggccatakactatagtctgggagtacacgtctagggagtacatggacaaagggaaattgggtgaaaatcccattggctgactcctgctagcatacctgtaaaagctaaccttttaataggttagttt

SEQ ID NO: 575404 - DNA, 548 bp, Homo sapiens
gaggatattttaaatttccacatgtacatttaagagtttgatacaaccctattatctatattttctctttcctatacttagtaattttcactgtagaagactcacttataaaagtgtatattattattatatttggatgataaactaaaattttgaaatatttagaagcattgttatgaactcattaaaattatcagaatcacttcatataaaatgatatttaatattktcttatacataaataaattagtgacattaattgttttatacttttaatttaatttgattatgaaaactttctatgtgtttttgaatttgtgtaaccttagacagattgctaagcccatttcatcatgcattaatagaataggattagataatctctaagggtccttttggctctaagattatatgattgtaattaatggcactgcagatcttgtagagggacattaaaatggacccatacctgaagttacttttcaattgaattagtacttagggagttgagacagtagaaacaaggaaggcaaaacagtctttcataa

SEQ ID NO: 575405 - DNA, 548 bp, Homo sapiens
gaggatattttaaatttccacatgtacatttaagagtttgatacaaccctattatctatattttctctttcctatacttagtaattttcactgtagaagactcacttataaaagtgtatattattattatatttggatgataaactaaaattttgaaatatttagaagcattgttatgaactcattaaaattatcagaatcacttcatataaaatgatatttaatattttcttatacataaataaattagtgacattaattgttttatacttttaatttaatttgattatgaaaactttctatgtgtttttgaatttgtgtaaccttagacagattgctaagcccatttcatcatgcattaatagaataggattagataatctctaagggyccttttggctctaagattatatgattgtaattaatggcactgcagatcttgtagagggacattaaaatggacccatacctgaagttacttttcaattgaattagtacttagggagttgagacagtagaaacaaggaaggcaaaacagtctttcataa

SEQ ID NO: 575406 - DNA, 548 bp, Homo sapiens
gaggatattttaaatttccacatgtacatttaagagtttgatacaaccctattatctatattttctctttcctatacttagtaattttcactgtagaagactcacttataaaagtgtatattattattatatttggatgataaactaaaattttgaaatatttagaagcattgttatgaactcattaaaattatcagaatcacttcatataaaatgatatttaatattttcttatacataaataaattagtgacattaattgttttatacttttaatttaatttgattatgaaaactttctatgtgtttttgaatttgtgtaaccttagacagattgctaagcccatttcatcatgcattaatagaataggattagataatctctaagggtccttttggctctaagattatatgattrtaattaatggcactgcagatcttgtagagggacattaaaatggacccatacctgaagttacttttcaattgaattagtacttagggagttgagacagtagaaacaaggaaggcaaaacagtctttcataa

SEQ ID NO: 575407 - DNA, 548 bp, Homo sapiens
gaggatattttaaatttccacatgtacatttaagagtttgatacaaccctattatctatattttctctttcctatacttagtaattttcactgtagaagactcacttataaaagtgtatattattattatatttggatgataaactaaaattttgaaatatttagaagcattgttatgaactcattaaaattatcagaatcacttcatataaaatgatatttaatattttcttatacataaataaattagtgacattaattgttttatacttttaatttaatttgattatgaaaactttctatgtgtttttgaatttgtgtaaccttagacagattgctaagcccatttcatcatgcattaatagaataggattagataatctctaagggtccttttggctctaagattatatgattgtaattaatggcactgcagatcttgtagagggacattaaaatggacccatacctgaagtwacttttcaattgaattagtacttagggagttgagacagtagaaacaaggaaggcaaaacagtctttcataa

SEQ ID NO: 575408 - DNA, 588 bp, Homo sapiens
cctttgcttcctgggttcaagcgattctcctgcctcagcctcccgagtagctgggactacaggtctgtgccaccacrcccagctaatttttgtatttttagtagagacggggtttcaccatgttggccaggctggtcttgaacccctgacctcaagtgatccacccaccttagcctcccaaagttctgggattacaggtgtgaaccacaacgcctggccgaaacatatagcttcttatatttaatgtttaatatttcttacatttaaccttgactacgaccatccatattttaaaagccctgataatccccaaagaaaaaaacacttcttaagtatgattatagagttgctggaaattatctgaacataaacctctccccactcccttatttttcccaagcaatgttatctgaaactgatgaaactttttatttgaaatcttgttctttccagaactattgatctactatatggataccccagatgtatcacaaaggcagagaagaaagtaaagctcctctgcagatttaatgcataggttggggttttagttttaatttagtaacaacagcaggattagtctactta

SEQ ID NO: 575409 - DNA, 582 bp, Homo sapiens
acttgactggacaaggtctcctattgcccacagtgtctattctggcactacaaaaatagttgggatccatgaccaaaggaacttgctctccaggtacaaaatagatgatatattttttttcactagcacacattttaaaaataaatgtatatatttgtggaatacaatgtgatgttttgatatatttgtatacagggtggtatgattaatcaaacaaattaacatacccatcactttgtatgcttttcatttttttgtggtgagaacatttaaaagatattcttctagcaaaatacacaatacatttttattaagtataatcaccatgctgtgcaatagacctcaataatttatttttcctgtctatctgaaattttgtaccatttggtcaatatttccccaacctttgataactactattctactctccagttctataagtttgacttttttcaattacacacataagtgggataaaccatacakttggtaaagggttaatatccaaactaaggaactcatacaactcaatagcaaggaaaataatccaattaagaaattagcaaaggtttaaatagacat

SEQ ID NO: 575410 - DNA, 585 bp, Homo sapiens
cccaggtgaaaacaccaacccaggttcatagcttttctgaaataaatgattttcagtttcttatgttcctcttgttaatttcaagagttctgaattttatrttgttgctactattttggctgcttttatgaaattcatttagcaaggtcttcagtctgccattgcagaagttttgtttcctccacaaaattttttatttattaaaataactacatgaaaattacataagtattatgtaatatttcttatattaaaactattaattatcctacatactagtacatgcttacttaatggttgaagaaagtatctctatagatagaagtaagcagaagagaggttcatgtaaacatgagctttttactgcaaaaatatactgaccattataaaactaaatatgtaaataatgatagacacatatatctacaataaataacacaaagtatacctaataaaaatataaagatatatagacatttcaaagttttaaatacctttttcacaaattaaaagatgcatgtttttcacattttaatatcttcaaaataggatgcatgttaaagttctttgcagtcaaaacttact

SEQ ID NO: 575411 - DNA, 585 bp, Homo sapiens
cccaggtgaaaacaccaacccaggttcatagcttttctgaaataaatgattttcagtttcttatgttcctcttgttaatttcaagagttctgaattttatgttgttgctactattttggctgcttttatgaaattcatttagcaaggtcttcagtctgccattgcagaagttttgtttcctccacaaaattttttatttattaaaataactacatgaaaattacataagtattatgtaatatttcttatattaaaactattaattatcctacatactagtacatgcttayttaatggttgaagaaagtatctctatagatagaagtaagcagaagagaggttcatgtaaacatgagctttttactgcaaaaatatactgaccattataaaactaaatatgtaaataatgatagacacatatatctacaataaataacacaaagtatacctaataaaaatataaagatatatagacatttcaaagttttaaatacctttttcacaaattaaaagatgcatgtttttcacattttaatatcttcaaaataggatgcatgttaaagttctttgcagtcaaaacttact

SEQ ID NO: 575412 - DNA, 585 bp, Homo sapiens
cccaggtgaaaacaccaacccaggttcatagcttttctgaaataaatgattttcagtttcttatgttcctcttgttaatttcaagagttctgaattttatgttgttgctactattttggctgcttttatgaaattcatttagcaaggtcttcagtctgccattgcagaagttttgtttcctccacaaaattttttatttattaaaataactacatgaaaattacataagtattatgtaatatttcttatattaaaactattaattatcctacatactagtacatgcttacttaatggttgaagaaagtatctctatagatagaagtaagcagaagagaggttcatgtaaacatgagctttttactgcaaaaatatactgaccattataaaactaaatatgtaaataatgatagacacatatatctacaataaataacacaragtatacctaataaaaatataaagatatatagacatttcaaagttttaaatacctttttcacaaattaaaagatgcatgtttttcacattttaatatcttcaaaataggatgcatgttaaagttctttgcagtcaaaacttact

SEQ ID NO: 575413 - DNA, 585 bp, Homo sapiens
cccaggtgaaaacaccaacccaggttcatagcttttctgaaataaatgattttcagtttcttatgttcctcttgttaatttcaagagttctgaattttatgttgttgctactattttggctgcttttatgaaattcatttagcaaggtcttcagtctgccattgcagaagttttgtttcctccacaaaattttttatttattaaaataactacatgaaaattacataagtattatgtaatatttcttatattaaaactattaattatcctacatactagtacatgcttacttaatggttgaagaaagtatctctatagatagaagtaagcagaagagaggttcatgtaaacatgagctttttactgcaaaaatatactgaccattataaaactaaatatgtaaataatgatagacacatatatctacaataaataacacaaagtatacctaataaaaatataaagatatatagacatttcaaagttttaaatayctttttcacaaattaaaagatgcatgtttttcacattttaatatcttcaaaataggatgcatgttaaagttctttgcagtcaaaacttact

SEQ ID NO: 575414 - DNA, 605 bp, Homo sapiens
gcaaaaaacaaagaaacaaacaaaaaacattgataagtgggacttaatgaaactaaaccgcttctgcacacagaagaaactattgagtaaacagacaacctacagaatgggataaaatatttacaaactttgtacttaacaaaggtctaatatctagaatctataagaaacttaaacaatcaacatgaagaaatgaacgatcccattaaaaatgggcaaaggacatgaacagatacttctcaaaagaagacacacgtgtggccagcaatcatatgaaacaatgctcaacattactaatcattagggaaatgcaaatcaaaaccacaataagttatcatctcacaccagtcagaatggctattgttaaaaagccaaaaaataaccgatgctggtgaggttgtagagaaaatggaatgcttatactctgctggtaggaatgtaaattagttcagaccctgtggaaagcattttggagagttcttaaataacttaaaatatagctccatttaatccrgtagtctgattactggctatattcccaaagcaatacaaatcactctgccataaagacatatgcatatttatgttcattgcagcaatattaa

SEQ ID NO: 575415 - DNA, 524 bp, Homo sapiens
ggatgatcttcaaggatgttatgttatacgaaataagccagacacagaaagacaaatattgcatgttctaactcatgcagaagctaaaaaagttgatctcacagaagtagaaagtagagtaakgcttactagagacttagaagggtagggaggatgaaggtaatagctcagcattgattacccaacataaaattatagcaaggtagaggaaatgagttctaatattctgtagcataataggagtactataattaacaacaacttactgtatattttctaatagttaaaaaagataattttgaatgtttccattgaaatatttttgaggtgatggatatgctaattaccctgatttgattattacacattgtatacatttattgaaatcacagtgtaccccataaatatatatgattattatgtgtcaataaaaattataataaaagccaaagaaagaaagaacagagtaagagtgagccatgtaattgagggagaacatggaaaaagatgtaggtggggaaaga

SEQ ID NO: 575416 - DNA, 524 bp, Homo sapiens
ggatgatcttcaaggatgttatgttatacgaaataagccagacacagaaagacaaatattgcatgttctaactcatgcagaagctaaaaaagttgatctcacagaagtagaaagtagagtaatgcttactagagacttagaagggtagggaggatgaaggtaatagctcagcattgattacccaacataaaattatagcaaggtagaggaaatgagttctaatattctgtagcataataggagtactataattaacaacaacttactgtatattttctaatagttaaaaaagataattttgaatgtttccattgaaatatttttgaggtgatggatatgctaattaccctgatttgattattacacattgtatacatttattgaaatcacagtgtaccccataaatatatatgattattatgtgtcaataaaaattataataaaagccaaagaaagaaagaacagagtaagagtgagccatgtaattgagggagaacatggaaaaaratgtaggtggggaaaga

SEQ ID NO: 575417 - DNA, 590 bp, Homo sapiens
ttattagcattagctaaatgccagacattatgctagccagtgaaaacacagttcagtaaaaggtagacctttattttgaaggaggtcacataataataacactgccataatgtgtcatactgaatataacagcacagtacaaagaaagtacaaaaaggaaaaataaatgtattcacattccctattcttgatcaatttcagatagaaggccttaatttacaatggtgttatttcctctagtgcttgacgtaaagttgacagagcttggtagaagagaatagtgtttttaatcagttttctcattttaagaccatttcctcaaaatatcacttaattcactatgctctagtcttttcgattaactttaaaagcgtgctaatccacatgaagcaactcctcgcccctatccttgactgggattttgtgctatttygtactaattggaggagaacctcatgtgtgctccaactgcatctcctttaggatcagatgtttttcctggtcattctaattactggagaaaatcctatttcaaaaaccaaagaaatctggaaccctaacacagtgccttcccactcctacccacttat

SEQ ID NO: 575418 - DNA, 478 bp, Homo sapiens
gataatcatcattccgggcagaagatccattaaatctctagtcatatgcatgaaattattagaggtatatgtatactgaaaaaatgaatttagtgctgaattttcatttgcctttcctatatatagtcctctgtattaatgtcagcaatcagattaaaactgaaaatttgacttcctctgcttcctctaataaaatctcatttttaattccttattagagaattatttcagcamtgaaggataatcatattttaaataaaaaactgtctcttatcagaaagccttattgctttaaatcattcttaaagatgcatttgaatgccttgttcaccagcgagaataggtactacaaggaaattcagaagaccaacaagtgggtcgggcacagtggctcacatctgtaatcccaacactttgggaggccaaggcggatggatcacctgaggtcaggagttcaataccagcctggccaacatgg

SEQ ID NO: 575419 - DNA, 617 bp, Homo sapiens
ctttgttctcattagtttcaaagaatttctttatttctgctttaatttcattatttcccagaagtaattcaggagcaggttatttaacttccatatagttgtatgattttgattgatcttagtattgattactatttttattgcatcatagtttgagagtgtggtggtatgatttcatgtttttaatgttttctgagaattgttttatggctgattatgtggtcaattttacattatgtgtcatgtgcagatgagaagaatgtatattctgttgyttgggggtggagagttctgtagatgtctgctaggtccaaatggtcaagggttgagttccagtcctgaatatctttgttagttttctgccttgatgacctgtctcatagtgtcagtgggtgttgaagtctctcactattattgtggggttagtttcttcataggcctctaagaacttattttataaaatttgggtgctcctgtgttgggtgcatatatatttagaatgggtaatcttcttgtcgaattgaactctttatgattatggaatgccctgctgtcttttttgatcattgttggtttaatgtcttttttgtctgaaattaaaatagcattccatttgc

SEQ ID NO: 575420 - DNA, 610 bp, Homo sapiens
agtgagggaaagtgaggtgccacacacgcttaaacagccagattttgcaggaagtcactctctatcacaaggatagcaccaagggcatggtactaaagcactcatgagaaatctacccccatgatccaatcacctcccaccaggccctacctccaatactgacaattagaattcaacatgagatttgggcagggacacatgtccaaactatgtcagtctatgttctgactgtttgaccaactgaccatttccccattgttctccctctttttgggcttccacataccctgagacacagcaatattgaaattaacccaatcataatcctacaatggcttctaggagttcaagtgaaaggacgagtagtacatatcacatttgattttattttgttttgtgtttgtttgttaggttgtttgttttttgagatggagtctcgctgtgacaaccaggctggagtgcaatggcacaaactctgcttactgcaacctccacttyctgggttcaagcatttctcctgcctctgcctccgtagtagctgggataacaggtatttaccaccacacctagctaatgtttgtatttgtagtagatacagaatttcaccatg

SEQ ID NO: 575421 - DNA, 555 bp, Homo sapiens
gtgtgttgttttaagccattgagtttgtggcagtttgttacagcagctatacaattatctctgagagctaattgtgacgtacttggtactaagttttccgggtgaagatccagaaatcctaccactcaccattccttcctttacattgactggaaagtttatactcctaagggttaattgccagattacacaatcaagggaatgcctgatatcctataatttaggagaaaaatttaagctctggcaggcaattagggcttcacagccaagttggggctcttgctccttttatcttgccactgccaagctaaatccagaggggtctgctttaaagcagaaggcggagcttgggtgtgctgatggcatggacaggagcagcagagwctgtaaaggagacaaggagaattttcctaatttatagctatgtcattagtaaacagtgattgatttacatattactttccaaaacttgttcccccaattgcttccttttgtcacatttctttggctactgatgccttcactgtcatgttaagaaataggggagagagtaag

SEQ ID NO: 575422 - DNA, 607 bp, Homo sapiens
aacaccatttgtacctctaaggctactgaaattttaaaaaaattatataaaactargcaaagtagttttttgatgtattcattttctgctttttatggctatttttacctgtcatttctgaaatgtgtatttggcttgctccttttctcttgaaataggcagtatttttttttaattttgtagatttttaaaagaattctttttggatatatttatttattctactttttttgttttctagtttattaaatttgctattatctttacagaaaaaatctttatatctattgatatttgttattttgcatgcttatctttctttgtggtaagtttgattaatttacatttatttctatttttaataaaggtatttaatagacattttcactttatagatcttttagccatattccacacacctggatatactttgtttccacaatcattaattttgagaaagtgcccaattttgtttttttaaataaactttgtcctgagttatttaatagacaacccccctctttttttttttcagggtctcacccagttaccctggctggagtgcagtggcacaatcgtggctcattgaagcctcgaccttgtgggc

SEQ ID NO: 575423 - DNA, 315 bp, Homo sapiens
atgggtttgccaagtaagactatttataaagcttgctgtatttgtaccttcgtgagagggacaataatttttccaggatcatatccaagtgatttaacaatccragttctcccaattcctatcatagtagcgatttgatctaaataaggagttagagtctgtgaattagtatgtggaagaaaaagccactctactaaatcctgttcttggacaataacaccagtaggtgaatgctgagttgaaaaaattagcaaatctagagtcttctctggatctattctatttatttgagctttatggacttgcttctcaatc

SEQ ID NO: 575424 - DNA, 315 bp, Homo sapiens
atgggtttgccaagtaagactatttataaagcttgctgtatttgtaccttcgtgagagggacaataatttttccaggatcatatccaagtgatttaacaatccgagttctcccaatycctatcatagtagcgatttgatctaaataaggagttagagtctgtgaattagtatgtggaagaaaaagccactctactaaatcctgttcttggacaataacaccagtaggtgaatgctgagttgaaaaaattagcaaatctagagtcttctctggatctattctatttatttgagctttatggacttgcttctcaatc

SEQ ID NO: 575425 - DNA, 315 bp, Homo sapiens
atgggtttgccaagtaagactatttataaagcttgctgtatttgtaccttcgtgagagggacaataatttttccaggatcatatccaagtgatttaacaatccgagttctcccaattcctatcatagtagcgatttgatctaaataaggagttagagtctgtgaattagtatgtggaakaaaaagccactctactaaatcctgttcttggacaataacaccagtaggtgaatgctgagttgaaaaaattagcaaatctagagtcttctctggatctattctatttatttgagctttatggacttgcttctcaatc

SEQ ID NO: 575426 - DNA, 589 bp, Homo sapiens
tacatagcttataagcagcagacctggggcttgaaatcaactgtgtttggatacaaagctggtactcattcccatgggttaatcagcctgctcccttcaacctgcaactgattgggatgcaatcaactattttaacaagtgagaccttgtgtagtatttcactgggaaggcaacttcaaatactgcaaacagtgaacaatccaactaactgtgacttcgttaataccgacgagtgttatatcattaggagacycaagatcagcagattcagagctgcttccacaaccccacaatctcatgagatatgcaaaatctctctggctttctgctgtaccatgttgagcatgttagtgaagtgtctcttcgtgactgtaaggtggtgttacaatttccaaggtcaagagaagagacaacagggaaaacatgaaagggcagggtggtggttagctctatggggatgtcactcatttatttcattatggaaaattattcttgtaaataatgtcataagtcattgatttatgaaataatttcagtgcaagcgcatctagaaaagtaaatatttcacaaaaagaaatgggacaattat

SEQ ID NO: 575427 - DNA, 579 bp, Homo sapiens
ctgcttccacaaccccacaatctcatgagatatgcaaaatctctctggctttctgctgtaccatgttgagcatgttagtgaagtgtctcttcgtgactgtaaggtggtgttacaatttccaaggtcaagagaagagacaacagggaaaacatgaaagggcagggtggtggttagctctatggggatgtcactcatttatttcattatggaaaattattcttgtaaataatgtcataagtcattgatttatgaaataatttcagtgcaagcgcatctagaaaagtaaatatttcacaaaaagaaatgggacaattataatttgtttttccctataatgatgttgtttcacaagggtgggcacatggcctcctgtataaaatcaggattttataaaatgagaaagagatgtataatgattgataggaatatgctatgtktgttatatggcaagaaatagataggaaccccttactttgtgttccctatctcccagctcaggtgttcctcgagtccctgaagacagagagaagtgctccctctctctaatatgtgggctgagagtattttaaatggctggag

SEQ ID NO: 575428 - DNA, 579 bp, Homo sapiens
ctgcttccacaaccccacaatctcatgagatatgcaaaatctctctggctttctgctgtaccatgttgagcatgttagtgaagtgtctcttcgtgactgtaaggtggtgttacaatttccaaggtcaagagaagagacaacagggaaaacatgaaagggcagggtggtggttagctctatggggatgtcactcatttatttcattatggaaaattattcttgtaaataatgtcataagtcattgatttatgaaataatttcagtgcaagcgcatctagaaaagtaaatatttcacaaaaagaaatgggacaattataatttgtttttccctataatgatgttgtttcacaagggtgggcacatggcctcctgtataaaatcaggattttataaaatgagaaagagatgtataatgattgataggaatatgctatgtgtgttatatggcaagaaatagataggaaccccttactttstgttccctatctcccagctcaggtgttcctcgagtccctgaagacagagagaagtgctccctctctctaatatgtgggctgagagtattttaaatggctggag

SEQ ID NO: 575429 - DNA, 579 bp, Homo sapiens
ctgcttccacaaccccacaatctcatgagatatgcaaaatctctctggctttctgctgtaccatgttgagcatgttagtgaagtgtctcttcgtgactgtaaggtggtgttacaatttccaaggtcaagagaagagacaacagggaaaacatgaaagggcagggtggtggttagctctatggggatgtcactcatttatttcattatggaaaattattcttgtaaataatgtcataagtcattgatttatgaaataatttcagtgcaagcgcatctagaaaagtaaatatttcacaaaaagaaatgggacaattataatttgtttttccctataatgatgttgtttcacaagggtgggcacatggcctcctgtataaaatcaggattttataaaatgagaaagagatgtataatgattgataggaatatgctatgtgtgttatatggcaagaaatagataggaaccccttactttgtgttccctatctcccagytcaggtgttcctcgagtccctgaagacagagagaagtgctccctctctctaatatgtgggctgagagtattttaaatggctggag

SEQ ID NO: 575430 - DNA, 657 bp, Homo sapiens
tagctgaaataattgcagggctcacttcatttgttttctatctctcaggagatattgccttatgttgtctgatatctactgttttacaaattattgtgtcatgtgttttgtctagttttttagtttctgcagcagaactaatatagtcagatataaaattgataggtattttataattataaagactgtaattcatcattagttctgagctttcagctaaccatagcagcaatggaaatagaacaaatcgcatagcttgcattattctccacagaaaggaatgtttctacaatcccaaattctaaaagaaaccatgacttggaggaagcggkgtgcttgaaaaccacatattttttttaccagcattacaaaattcccaatataagtgccatactttgttcctcattttctgcgcatgtgtttttctcatttaataatcaccactcactactaacatccaatatcttcaaagctagtagaaaatgctgtaaaaattttaagaatatgacttattatatactcggattatacattcttctttcccacctgctgctcctaaatatttcatgtgtatatgctattaataatgatatttattcaatttccaagtacttattgctaacatatttaaatacacttgaattttgtatgtgaatc

SEQ ID NO: 575431 - DNA, 616 bp, Homo sapiens
cacttctcccctcccaccttcctcctctctcagtaatcggtgatatggggaagggtattacattttccataaaaacctccaaaacatccattcatcactttctgggcttgggattgttctggaatggtaaatagttgagaagatgacagatcactgatgaaagagattattacttgtaggacaaggtcaatgactcaggaaggggaatgactttagagagtaaggtgcacagacctattatgagttgcactaagaagtttatagtcatacagtatttgtttttatggtaaattgcttgttttttgtatgaatgaagtttcattatgagaaacttctcattaagaaacacattagtttggtattgattacttccatgaattcttatcatctgcttctgttttatcacagttgtcagattcttatgacctggatggcaatttcttgtcataccttgtagtacattgcattttgggatagatgtaaatgaataaactgagaccacctcataatttagaaarcaatcttactctgagtcagcatgtgtactgcataccattaaaaatgaatgtgaaaaaaagaaaatgactgtggttcaataatttatgaaaatgttatg

SEQ ID NO: 575432 - DNA, 445 bp, Homo sapiens
atgcctcacaatcatggcagaaggtgaatgaggagcaaagtcatgtcttacatggtggcaggccagaagcttgtgtaggggaactcccctttataaaaccatcagatcttgtgagacttactractatcatgagaacagtatggggaagatctacccaccatgattcaattacctaccactgtgtccctcccacaacacttgtgaattatgggagctaccattcaagatgagttttcggtggggacacagccaaaccatatcactaggcttcccagcttatgagataatatgctttcctccaattgctactcctttgtttcatttcaaattgttcaaaacctaaatggaaggagaggtgcaatttgagggccattaaaacccaaaacacaaatactcttcacctaattttatctcagcagtatttgtatctccatttttgcctct

SEQ ID NO: 575433 - DNA, 576 bp, Homo sapiens
gatcacttaagccaggaggcagaagttgcaatgagccaagatcatgccactgcactccagccttggcaacagagagattctgtctcaaataaataaattaaattaaaaataaagtttacacaagattgtatattctttcattcaaagctgaatgactcttccccaaatcttatatattacattctgcatttatttatttctcaactgcatattctttagagacttggtctttcattctccagaaaggtagaagaaattattttttcagtattatatttaaattgctcatcaaaagttttctgttgaatttgaatcatggtagctataattaactgatgaaagtttaaatacatatttaaatgatttctgtccacagaattgttgatgtcyatgagtcagtactagtatttaatgacaaaaactactaaatgtcacaatttaattttttcaggccaataatgtgaaaatgattataattactgcaataaatatctgtagattaagctacattacaagtaaagcaattcgaatatttgaagagtaagacaacatcaagcactaataaatctcccttct

SEQ ID NO: 575434 - DNA, 532 bp, Homo sapiens
  misc_feature 332: n = A,T,C or G
acatcacacactggggcctgttggggggtrgggatggtgggggagggttagcattaggataaatacctagtgtagatgatggcttgatatgtgcagcaaaccaccatggcatatgtatccctatgtaacaaacctgcacgttctgcacatgtgtcccagaacttgaagtatatttagaaaatgcttaatgtggtgttgagtctcaaataaaatgacaccttcaaaactgattttgaagatcaatgaataagaattgctcttatttaaaaatatttaagtttatacaattttggagctggaaggaagtgcaatatttttagggatatatgatntattttcttagagcagttataagggtgcagtgaagttgagcagaaagtggatcattcccacatttttcatgaccccactctagcgcggactcctaaaggatcaacgtcctgccccagcgtggtccatttgctccaatgcatgaaccacacgaaccatccttatcacccaaagttcataattaacattaagggttcacatc

SEQ ID NO: 575435 - DNA, 482 bp, Homo sapiens
tttaaagcccacgtggaggttgcagtcagctgagatggcaccattgcactctaaactccargctgggcaacaagagagaaactctgtctccaataaaagaatgggaggaaagtgattacaataaccaaatttcatttaaatgccttgattttcttgggctgcatcttattgattggacaactcagtcagtgccttttgttttttccatcaataactgaagattcctgaggcttaaactggaaaacaggttacttaataatagagggcaccagacagattctgctcagttttcctttatttctgattgtttctttacaaccatccatgcaagagtaactccctcatgtattctcaagcctgaattccactctagacattcagattcccattttcgaatctacaggacacaggtccccaaagtcccatcgaatccatggcaacatttcccccaagtccggcccctgcttgatcagctttccttt

SEQ ID NO: 575436 - DNA, 482 bp, Homo sapiens
tttaaagcccacgtggaggttgcagtcagctgagatggcaccattgcactctaaactccaasctgggcaacaagagagaaactctgtctccaataaaagaatgggaggaaagtgattacaataaccaaatttcatttaaatgccttgattttcttgggctgcatcttattgattggacaactcagtcagtgccttttgttttttccatcaataactgaagattcctgaggcttaaactggaaaacaggttacttaataatagagggcaccagacagattctgctcagttttcctttatttctgattgtttctttacaaccatccatgcaagagtaactccctcatgtattctcaagcctgaattccactctagacattcagattcccattttcgaatctacaggacacaggtccccaaagtcccatcgaatccatggcaacatttcccccaagtccggcccctgcttgatcagctttccttt

SEQ ID NO: 575437 - DNA, 384 bp, Homo sapiens
gaggaactgagtggtgaactgggtaacaatctccttcttctgctctggggaaacgtagcgagagacatccatgtgggagagaacgagcttctgaagattcctcatgtggcccaggtatggggtaaactgtgtcaggatgggcagtacccacttgcaattcacttccacctcctggatacagtctaggttcaccattttcaggatgcttctgatattgcggaagggcattcccaaaattttcagcttcttacagcacaggtgtagtaaatctttcctctgcttgacccatagaaggaggyaggtgaggtattcatccagagtcctgttcttgagccaaagttctacgaacacagtcaagggctgccgtcctctcatccttggaca

SEQ ID NO: 575438 - DNA, 400 bp, Homo sapiens
gcattcccaaaattttcagcttcttacagcacaggtgtagtaaatctttcctctgcttgacccatagaaggaggtaggtgaggtattcatccagagtcctgttcttgagccaaagttctacgaacacagtcaagggctgccgtcctctcatccttggacagtcctgcactggttttttgttcctcttggcattgaggaagcacccatgggccatagcttcagaccaaaccatccagaagttctcacagacatcctgtaaatccagcacttgragtttccacctcctgtggcaaaatagaggtgagactgagaatttaagaactcatttctgaacttaaactccacatcctggatagcagctcctcccctccctgcttgttgtccctctctctgacttttc

SEQ ID NO: 575439 - DNA, 400 bp, Homo sapiens
gcattcccaaaattttcagcttcttacagcacaggtgtagtaaatctttcctctgcttgacccatagaaggaggtaggtgaggtattcatccagagtcctgttcttgagccaaagttctacgaacacagtcaagggctgccgtcctctcatccttggacagtcctgcactggttttttgttcctcttggcattgaggaagcacccatgggccatagcttcagaccaaaccatccagaagttctcacagacatcctgtaaatccagcacttggagtttccacctcctgtggcaaaatagaggtgagactgagaatttaagaactcatttctgaacttaaactccacatcctggatagcagctcctcccctccctgcttsttgtccctctctctgacttttc

SEQ ID NO: 575440 - DNA, 369 bp, Homo sapiens
gattacaggaacccaccaccatgcccagctaatttttgtatttgtagtagagttggggtttaccatgttggacaggctggcctccaactcttgacctcagcctcccaatgtgctgggattacattgtgagccaccgtgcccggcccagttctcacttttcmtggtgcctttcagtgccattagaggagaggttcctgttacctccatggaccttgcgtggtgagcagtgctttccctgaggagctggtgaatggccaagtcctctcggcttcctcaccaccaccatcccccttgggcctcctcacttcacatgacccagctgttccttcagttggacacctgggccctccccaccagcccacctgggcc

SEQ ID NO: 575441 - DNA, 328 bp, Homo sapiens
aagcttggtccctcagcaggctccgccctgcaagctccaggagtctgggtggagtccggatgctcatcttcatgaatctgcagggaaaacttccagaggacaaacccagagaaaaggcatcactctcaggccaagcccatgcaatctcatcttctcctatggccaaactcactgctctggcaatggtgaaagagtcctcagtttactccaattctactctgtactcagtggccattaagccagcattctgcctctgctgcatcagcatgagcgtctccgaagcagtgaggaagcagggccaccackagcccttcctttctatccagtg

SEQ ID NO: 575442 - DNA, 572 bp, Homo sapiens
aagcatgacagaatataaaggttcccaaggggttcttgaggcacctggggagagcaagaaattagttatgggcaatggtgccagttagaggaggggggtgggaaatcatctcaatggtaaacttgaagtgggcattgagtaattctgcaccttactaccacacaggtgttrtagtaacctgcaatggggaagcctgtttcactcaaacacaagtttgttcccatcatcagatgatggtctgcgtgcaaggtgctgcctgatgaagacccagatcattcaggggcagctccattttaggctcagtcctttcagccttgcttgtgtgattagttcaaggccacaaaatctttaaagcctctttacttcatctttcaggagacaacctcagctctgggccagaggagcccagtgggagaagtgcacaaagaactcaactgagcaaggtctagggacatctgctaggaccacctgcctgcaaagattccctgacatgcccgtgtctgcaaaccacctatcactttataccactctcctgcctactccctcacctctgtccaagaagcatgcttttc

SEQ ID NO: 575443 - DNA, 572 bp, Homo sapiens
aagcatgacagaatataaaggttcccaaggggttcttgaggcacctggggagagcaagaaattagttatgggcaatggtgccagttagaggaggggggtgggaaatcatctcaatggtaaacttgaagtgggcattgagtaattctgcaccttactaccacacaggtgttgtagtaacctgcaatggggaagcctgtttcacycaaacacaagtttgttcccatcatcagatgatggtctgcgtgcaaggtgctgcctgatgaagacccagatcattcaggggcagctccattttaggctcagtcctttcagccttgcttgtgtgattagttcaaggccacaaaatctttaaagcctctttacttcatctttcaggagacaacctcagctctgggccagaggagcccagtgggagaagtgcacaaagaactcaactgagcaaggtctagggacatctgctaggaccacctgcctgcaaagattccctgacatgcccgtgtctgcaaaccacctatcactttataccactctcctgcctactccctcacctctgtccaagaagcatgcttttc

SEQ ID NO: 575444 - DNA, 572 bp, Homo sapiens
aagcatgacagaatataaaggttcccaaggggttcttgaggcacctggggagagcaagaaattagttatgggcaatggtgccagttagaggaggggggtgggaaatcatctcaatggtaaacttgaagtgggcattgagtaattctgcaccttactaccacacaggtgttgtagtaacctgcaatggggaagcctgtttcactcaaacacaagtttgttcccatcatcagatgatggtctgygtgcaaggtgctgcctgatgaagacccagatcattcaggggcagctccattttaggctcagtcctttcagccttgcttgtgtgattagttcaaggccacaaaatctttaaagcctctttacttcatctttcaggagacaacctcagctctgggccagaggagcccagtgggagaagtgcacaaagaactcaactgagcaaggtctagggacatctgctaggaccacctgcctgcaaagattccctgacatgcccgtgtctgcaaaccacctatcactttataccactctcctgcctactccctcacctctgtccaagaagcatgcttttc

SEQ ID NO: 575445 - DNA, 572 bp, Homo sapiens
aagcatgacagaatataaaggttcccaaggggttcttgaggcacctggggagagcaagaaattagttatgggcaatggtgccagttagaggaggggggtgggaaatcatctcaatggtaaacttgaagtgggcattgagtaattctgcaccttactaccacacaggtgttgtagtaacctgcaatggggaagcctgtttcactcaaacacaagtttgttcccatcatcagatgatggtctgcgtgcaaggtgctgcctgatgaagacccagatcattcaggggcagctccattttaggctcagtcctttcagccttgcttgtgtgattrgttcaaggccacaaaatctttaaagcctctttacttcatctttcaggagacaacctcagctctgggccagaggagcccagtgggagaagtgcacaaagaactcaactgagcaaggtctagggacatctgctaggaccacctgcctgcaaagattccctgacatgcccgtgtctgcaaaccacctatcactttataccactctcctgcctactccctcacctctgtccaagaagcatgcttttc

SEQ ID NO: 575446 - DNA, 480 bp, Homo sapiens
cctcagtggaccctgtatggtgagcagtcctttyccagaggatctgggcaatggtcaaggtctctcatgggcaccatcagaagcctctgagccaccctagctccccaaccccaccactcctcctgagccagctgtcccttccctggatgcctggacccttcccacgaggccacctgagtcacctcacctggggcgaagcttctgggccagcaggtgtatcaagtcccttcagcacagcttgcaaggtctccagatgaggtgtcttcatcagggatcccagagggaggcggaggaagggccaggcctgcaccatcagcttcagggcctcaaaatgtctcatgctggaggcctccatgaacatcagagggaagacctccctgggcagctcgtccaggatgaagatggtcaagaactggttcctcagcaggctctggcctgccagctccaggagtctggatggggactggaggctcattctga

SEQ ID NO: 575447 - DNA, 478 bp, Homo sapiens
cctcagtggaccctgtatggtgagcagtccttttccagaggatctgggcaatggtcaaggtctctcatgggcaccatcagaagcctctgagccaccctagctccccaaccccaccactcctcctgagccagctgtcccttccctggatgcctggacccttcccacgaggccacctgagtcacctcacctggggcgaagcttctgggccagcaggtgtatcaagtcccttcagcacagcttgcaaggtctccagatgaggtgtcttcatcagggatcccagagggaggcggaggaagggccaggcctgcaccatcagcttcagggcctcaaaatgtctcmtgctggaggcctccatgaacatcagagggaagacctccctgggcagctcgtccaggatgaagatggtcaagaactggttcctcagcaggctctggcctgccagctccaggagtctggatggggactggaggctcattct

SEQ ID NO: 575448 - DNA, 478 bp, Homo sapiens
cctcagtggaccctgtatggtgagcagtccttttccagaggatctgggcaatggtcaaggtctctcatgggcaccatcagaagcctctgagccaccctagctccccaaccccaccactcctcctgagccagctgtcccttccctggatgcctggacccttcccacgaggccacctgagtcacctcacctggggcgaagcttctgggccagcaggtgtatcaagtcccttcagcacagcttgcaaggtctccagatgaggtgtcttcatcagggatcccagagggaggcggaggaagggccaggcctgcaccatcagcttcagggcctcaaaatgtctcatgctgraggcctccatgaacatcagagggaagacctccctgggcagctcgtccaggatgaagatggtcaagaactggttcctcagcaggctctggcctgccagctccaggagtctggatggggactggaggctcattct

SEQ ID NO: 575449 - DNA, 478 bp, Homo sapiens
cctcagtggaccctgtatggtgagcagtccttttccagaggatctgggcaatggtcaaggtctctcatgggcaccatcagaagcctctgagccaccctagctccccaaccccaccactcctcctgagccagctgtcccttccctggatgcctggacccttcccacgaggccacctgagtcacctcacctggggcgaagcttctgggccagcaggtgtatcaagtcccttcagcacagcttgcaaggtctccagatgaggtgtcttcatcagggatcccagagggaggcggaggaagggccaggcctgcaccatcagcttcagggcctcaaaatgtctcatgctggmggcctccatgaacatcagagggaagacctccctgggcagctcgtccaggatgaagatggtcaagaactggttcctcagcaggctctggcctgccagctccaggagtctggatggggactggaggctcattct

SEQ ID NO: 575450 - DNA, 370 bp, Homo sapiens
tggtgggactggaatgacggaatgtctgtttgtcaacatctttggcggtgacatgatactgtcccagtccctgcaatctgctgctcattttcatcctttcaaataaaactccacagtcagaggcttgtgcaagagttggggtccagagcatcaggtctaatgtttgctatgtttatattcactgccaaatctgttattccaaagaaattttactagtgaaatagaaatacgttgtctgacagcattaccccctgtgatatggtttggatcgaaccattgctctccagcctggcaacagagtgagactccatctccaaaaaaaaaagcaattaattataacaacacgtcyattcactctccaaagtgtctg

SEQ ID NO: 575451 - DNA, 566 bp, Homo sapiens
ttgttttgtattaacacaaaatgatcaagcctacattttattttgttacgtactttcaccagtcaaagcaaacactttctaagttctcctattcaaaatttagccactctcactaaccaaagcaattactggctatggagtcatttagatgaatgggaaggatcacaactaatagtagaacctgctctcacacacggttggttaatattgataattaaatgacttggcactgagcagaagctatagatgcaaatgggtggcctatgactattgttgatttcattacttgtaacttatctccatgcataggaaacattagtgtaaccgggtctaatctaggtagtgtcccagactccccytggaatcaaactctttcatttgacacacattatgaagactgaaatgctataagtattgacatagacacagaatcagaacatgaccatgttatcctctgccatataatcagagaacttactgaaactagacatttgttcattggaaactcgaggcaaatagaatgcatctatagctctaccatatgaaataaacaatagtttcattta

SEQ ID NO: 575452 - DNA, 566 bp, Homo sapiens
ttgttttgtattaacacaaaatgatcaagcctacattttattttgttacgtactttcaccagtcaaagcaaacactttctaagttctcctattcaaaatttagccactctcactaaccaaagcaattactggctatggagtcatttagatgaatgggaaggatcacaactaatagtagaacctgctctcacacacggttggttaatattgataattaaatgacttggcactgagcagaagctatagatgcaaatgggtggcctatgactattgttgatttcattacttgtaacttatctccatgcataggaaacattagtgtaaccgggtctaatctaggtagtgtcccagactccccttrgaatcaaactctttcatttgacacacattatgaagactgaaatgctataagtattgacatagacacagaatcagaacatgaccatgttatcctctgccatataatcagagaacttactgaaactagacatttgttcattggaaactcgaggcaaatagaatgcatctatagctctaccatatgaaataaacaatagtttcattta

SEQ ID NO: 575453 - DNA, 566 bp, Homo sapiens
ttgttttgtattaacacaaaatgatcaagcctacattttattttgttacgtactttcaccagtcaaagcaaacactttctaagttctcctattcaaaatttagccactctcactaaccaaagcaattactggctatggagtcatttagatgaatgggaaggatcacaactaatagtagaacctgctctcacacacggttggttaatattgataattaaatgacttggcactgagcagaagctatagatgcaaatgggtggcctatgactattgttgatttcattacttgtaacttatctccatgcataggaaacattagtgtaaccgggtctaatctaggtagtgtcccagactccccttggaatcaaactctttcatttgacacacattatgaagactgaaatgctataagwattgacatagacacagaatcagaacatgaccatgttatcctctgccatataatcagagaacttactgaaactagacatttgttcattggaaactcgaggcaaatagaatgcatctatagctctaccatatgaaataaacaatagtttcattta

SEQ ID NO: 575454 - DNA, 566 bp, Homo sapiens
ttgttttgtattaacacaaaatgatcaagcctacattttattttgttacgtactttcaccagtcaaagcaaacactttctaagttctcctattcaaaatttagccactctcactaaccaaagcaattactggctatggagtcatttagatgaatgggaaggatcacaactaatagtagaacctgctctcacacacggttggttaatattgataattaaatgacttggcactgagcagaagctatagatgcaaatgggtggcctatgactattgttgatttcattacttgtaacttatctccatgcataggaaacattagtgtaaccgggtctaatctaggtagtgtcccagactccccttggaatcaaactctttcatttgacacacattatgaagactgaaatgctataagtattgacatagacacagaatcagaacatgaccatgttatcctctgccatataatcagagaacttactgaaactagacatttgttcattggaaactcgaggcaaatagaatgcatctatagctctacyatatgaaataaacaatagtttcattta

SEQ ID NO: 575455 - DNA, 584 bp, Homo sapiens
agagcctgctgagagaccaggccttgtccatctctgccatggaggagctgcccagggtgctctatctcccactcttcatggaggccttccgcaggagacacttccagactctgacggtgatggtgcaggcctggcccttcacctgcctccctctgggatcactgatgaagacgcttcatttggagaccttaaaagcattgctggaagggcttcatatgctgcttacacagaaggatcgccccaggtgaggtgacccaggagggctggtagatagggctcaggtgtccagggaaagaacagcagggtcaggcagagaagtagcccaagtgtrgcccagagtcttctgatggtgttggcgaggaagatcagggagactttggccattgtccagatcctcagagaaaggagtgctcaccatacagggtccactgtgggaacagaaacctgcctttactcagtggaaggtaaagggaatagaagtggggaatcaaaagtcagaatcaaaagggaatcaaaagggaacagggattgagaaaagacaaagagaacagggagcactgaggacaggagcagctgatttatgg

SEQ ID NO: 575456 - DNA, 584 bp, Homo sapiens
agagcctgctgagagaccaggccttgtccatctctgccatggaggagctgcccagggtgctctatctcccactcttcatggaggccttccgcaggagacacttccagactctgacggtgatggtgcaggcctggcccttcacctgcctccctctgggatcactgatgaagacgcttcatttggagaccttaaaagcattgctggaagggcttcatatgctgcttacacagaaggatcgccccaggtgaggtgacccaggagggctggtagatagggctcaggtgtccagggaaagaacagcagggtcaggcagagaagtagcccaagtgtggcccagagtcttctgatggtgttggcgaggaagatcagggagrctttggccattgtccagatcctcagagaaaggagtgctcaccatacagggtccactgtgggaacagaaacctgcctttactcagtggaaggtaaagggaatagaagtggggaatcaaaagtcagaatcaaaagggaatcaaaagggaacagggattgagaaaagacaaagagaacagggagcactgaggacaggagcagctgatttatgg

SEQ ID NO: 575457 - DNA, 584 bp, Homo sapiens
agagcctgctgagagaccaggccttgtccatctctgccatggaggagctgcccagggtgctctatctcccactcttcatggaggccttccgcaggagacacttccagactctgacggtgatggtgcaggcctggcccttcacctgcctccctctgggatcactgatgaagacgcttcatttggagaccttaaaagcattgctggaagggcttcatatgctgcttacacagaaggatcgccccaggtgaggtgacccaggagggctggtagatagggctcaggtgtccagggaaagaacagcagggtcaggcagagaagtagcccaagtgtggcccagagtcttctgatggtgttggcgaggaagatcagggagactttggccattgtccagatcctcagagaaaggastgctcaccatacagggtccactgtgggaacagaaacctgcctttactcagtggaaggtaaagggaatagaagtggggaatcaaaagtcagaatcaaaagggaatcaaaagggaacagggattgagaaaagacaaagagaacagggagcactgaggacaggagcagctgatttatgg

SEQ ID NO: 575458 - DNA, 329 bp, Homo sapiens
catacgtatttgccctttctcccttgtcacttgacactcttcttttccgtgactaactatatacttgcttaagatttccaggaactaatattgaaaccattcagctatgaaggygagatttcaggatactttttttccagagaagggatcagcaagcagttaatccacaacccagtcatggtgaagctgacaccagccaggcttctagatggtcctttactcatgatagccattggaataagacgtgtagacctgtgccttgcaccactcctgcattttagtttccatggttcctttctccttgaaatccctttggtcagcctgaaaat

SEQ ID NO: 575459 - DNA, 329 bp, Homo sapiens
catacgtatttgccctttctcccttgtcacttgacactcttcttttccgtgactaactatatacttgcttaagatttccaggaactaatattgaaaccattcagctatgaaggcgagatttcaggatactttttttccagagaagggatcagcaagcagttaatccacaacccagtcatggtgaagctgacaccagccaggcttctagatggtcctttactcatgatagccattggaataagacgtgtagacctgtgccttgcaccactcctgcattttagtttccatggttsctttctccttgaaatccctttggtcagcctgaaaat

SEQ ID NO: 575460 - DNA, 291 bp, Homo sapiens
aaaacaacagaagtggtaaataaaatgtggtttttgaaaatctttttccatggtaaggaaatatgaacattttcagacagctcagcagatcctgaaggggaagtgatggtgtccttagttaattcaggatacataaaattatatttgtatgatactaaattaataacttgataaaatatgttttagrttctattctctatgtcacaatctctccacctctaaacatacagacatttcagaaaaatgtctgtatgggaaaatgtctatttaggaaaactgaagggaaagaaa

SEQ ID NO: 575461 - DNA, 612 bp, Homo sapiens
ttggatgtctatggctcctactcctgcctcactgtctcctccatcttaacccacgtttatggccttatgaggagtttcttctagctaggtgattaggaggtaatctggcaatttccattgctgtgcacctaacttgccaaaagccaagaccaatgctgagtccctgacgctatttctcagcatgatcagtcaattacctggtggcarattgattacattggactacttccaacatgaaaagagcacttggttttacatttccagaatttggttctttatctccagaatttggttcttttttctcttccacttcctgaattatttatctgtctaatatttccctccttctggctatcactctgtctgttcctctccctcttctccgtctcttctcaatcattctcattaagtcacatacataagatgggacataattttttttttcttttgatgctacatagacctccaattttaacctacactcaatactctagaaaaactgttcttataaagagcagtgataacttatgtcaaatttaattgctattcttaattgttttctcagcaatattcaagagtgaccagatgtttcaccttgaaacacactcccct

SEQ ID NO: 575462 - DNA, 612 bp, Homo sapiens
ttggatgtctatggctcctactcctgcctcactgtctcctccatcttaacccacgtttatggccttatgaggagtttcttctagctaggtgattaggaggtaatctggcaatttccattgctgtgcacctaacttgccaaaagccaagaccaatgctgagtccctgacgctatttctcagcatgatcagtcaattacctggtggcagattgattacattggactacttccaacatgaaaagagcacttggttttacatttccagaatttggttctttatctccagaatttggttcttttttctcttccacttcctgaattatttatctgtctaatatttccctccttctggctatcactctgtctgttcctctccctcttctccgtctcttctcaatcattctcattaagtcacatacataagatkggacataattttttttttcttttgatgctacatagacctccaattttaacctacactcaatactctagaaaaactgttcttataaagagcagtgataacttatgtcaaatttaattgctattcttaattgttttctcagcaatattcaagagtgaccagatgtttcaccttgaaacacactcccct

SEQ ID NO: 575463 - DNA, 612 bp, Homo sapiens
ttggatgtctatggctcctactcctgcctcactgtctcctccatcttaacccacgtttatggccttatgaggagtttcttctagctaggtgattaggaggtaatctggcaatttccattgctgtgcacctaacttgccaaaagccaagaccaatgctgagtccctgacgctatttctcagcatgatcagtcaattacctggtggcagattgattacattggactacttccaacatgaaaagagcacttggttttacatttccagaatttggttctttatctccagaatttggttcttttttctcttccacttcctgaattatttatctgtctaatatttccctccttctggctatcactctgtctgttcctctccctcttctccgtctcttctcaatcattctcattaagtcacatacataagatgggacataattttttttttcttttgatgctacatagacctccaattttaacctacactcaatactctagaaaaactgttcttataaagakcagtgataacttatgtcaaatttaattgctattcttaattgttttctcagcaatattcaagagtgaccagatgtttcaccttgaaacacactcccct

SEQ ID NO: 575464 - DNA, 616 bp, Homo sapiens
gtgcatagtttgtaacgaaaaattaagttaaaaacagaatttatatgaaaaaacagaccaagcttgaagtaacagctttgttttcatgcataaactctgttatatcaatggttgatgtaacaaattacaccaaactggttgaaattgcctttggggaatcaactaggtctaatgatccaacaaaaatatcaattggttgatgatgcagaaccagtaatcactttcagcttgagaatttattgtacatattttgggtctgtaagtatttaaaaatcacagtaaggtaccaragttagcaatattataaacattgggacatataaaatataatagaaatgatgatgacatggttttgagattttaaaatagctttaagctttcccgtatcctgtctgacatgtaaaaatctaggaagttgccactccatcctaacaacaagcaaaaagcagaacagactaaaatatccacattttgtatggatattttgtggatattgtgaagtcacagagcaaactgctgtccacaacattgaagggacagacaaacagtacagagaatcacaatttaccagagcaaaaattcacaagcagcaacctttgtaggaaccaaggctgag

SEQ ID NO: 575465 - DNA, 532 bp, Homo sapiens
tttgttaacattaaagtaaacttctagcctggagaagggtagactcaggggtatgcatgatagcatgtttaaataatctgaaggaatgctgtagggtgggtggrgtgacaggtttaaactgctccagaatacagaatcaggatcaatgaataaaggttatgagaaggctgatttaccctcactacaaagaagaacctttcaataattaaagcacagcctgggaggaatcttaattgacaaagagaaagtgcagctttgaaagcaaatgcagagagagcttcacagaaaagagagcatggaaaaatcaagccctgaataatgtaatatcatgtgttggtattcagaagccaaaggaagatggtaaaatggtagcagtgacagtggtcctgggagagagatgttctttggataatttcataattgggtaattatgccaagaacacatgtgtacccccaagaggtagacaacagcaccagtgaagacagatggagctgacttagagtgagcttttcccttccttcctcaccctgc

SEQ ID NO: 575466 - DNA, 566 bp, Homo sapiens
gttaattttgagttcaaaggtttttttttttcctatacgcacataaccaagctattaataataaaataacaagaagatataaaaaggtgatttttttttagtaagtaaagtattttgaaaaatgttccaaaatttataaaaatattggtatgggatttctaattttatttgtgtttcagattaatttattacaatatccagtgtcctgctttattaaacagctgagacaatacagaaaggaaaactagaaattaaattatctatttatgccttttaattttagggaaacagaggcttcatagcactcaaaaaatttattatggcmgtcaaacagcggttcacaatagtgttctaaaatttaaaaaaatctttttgaacttcacattacaatgagcaactgagcagatggtactaagaaaagcttcaggtgtgtcttcctcttttatacatattttgtttaatttatattgaaatgcagtccagagatgttatgtttcgtttttattttattttatttttattttttttgagacagagttttgctcccattgcccaggctggagtgc

SEQ ID NO: 575467 - DNA, 550 bp, Homo sapiens
ttcagtttttctttctttctctttttttttttttttaggaacttccatacagtttcccataatggccatactattttacactctcaccaacagtgtgcaagggttccctttctttacattgttacacatctgggagacaaacagaacatgtttatggggtgtagtgggcctcagaaagtcaccaactatagcctcctctattacgttactcagtaagatagatgctyccagggagatgttaggtcaatggtatctgccaacttttcattagaaagtattaccctcccctcacaaaggcagtttagaaatacttcatcatggaagtgaaataaaatgctgtcataatttctctactatgacatatctacctcagtctcttcctgttcaatccatatacacattacccttgccccagggttatctttagatacatgagtctttttatgtattctgtaagtagttaatggatttaattcaatgaaatgatatcaccttcaaaagaaaatctaaactcttagactattactaaagcagcctttgggaagaccct

SEQ ID NO: 575468 - DNA, 288 bp, Homo sapiens
tacccaaaatgttacttactggcagcataaaagtaaaaatttaattttcagataatactgacatagattctctatgttccttaagaaaaaagaaaacatttaacataactaaaaktaatgatcattcctttttaattgtttacattaatatttgtaatttaggttataaatatattttaaaagatgccattcattcccaatttaaatgcacaaatttaatgtattttactaaatcttaaacatactatttataaacattttaatgcttggtcatcaaagtgggtgact

SEQ ID NO: 575469 - DNA, 548 bp, Homo sapiens
attgtatgtaagttgcaataaaaaaaataggcatggccacacttacagcagacaaaatgaactttaaatcaaaaactgwcacaagagacaaagaaggatgtcatataataaaaaggtcaatttaccagagagatataataatttgagtacacattcacccaaacatatgaggaaaacatagacaaaatgaaggggagaaatagacagcaaccccataataacagtaggaggttaatactcaactttcaataatgaatagaaaatccagacatataaccatgaaacagaattgaacacccttatagaacaaatgtacctaacagacatatacactttatagtaataaatacttacatgtagggaaaagaaaaatcttgaataaaaaatgcaactgtgcacaccaaagacgtagcaaaagaagagaaactaaacctaaagttaacagatcaaaggaaaaaacaaaattcagaccagaaataagtgaagaagtataaacaaacaaagaaaaaatcaatgaaattaagagttgctccttgaaaagtgcaact

SEQ ID NO: 575470 - DNA, 548 bp, Homo sapiens
attgtatgtaagttgcaataaaaaaaataggcatggccacacttacagcagacaaaatgaactttaaatcaaaaactgacacaagagacaaagaaggatgtcatataataaaaaggtcaatttaccagagagatataataatttgagtacacattcacccaaacatatgaggaaaacatagacaaaatgaaggggagaaatagacagcaaccccataataacagtaggaggttaatactcaactttcaataatgaatagaaaatccagacatataaycatgaaacagaattgaacacccttatagaacaaatgtacctaacagacatatacactttatagtaataaatacttacatgtagggaaaagaaaaatcttgaataaaaaatgcaactgtgcacaccaaagacgtagcaaaagaagagaaactaaacctaaagttaacagatcaaaggaaaaaacaaaattcagaccagaaataagtgaagaagtataaacaaacaaagaaaaaatcaatgaaattaagagttgctccttgaaaagtgcaact

SEQ ID NO: 575471 - DNA, 548 bp, Homo sapiens
attgtatgtaagttgcaataaaaaaaataggcatggccacacttacagcagacaaaatgaactttaaatcaaaaactgacacaagagacaaagaaggatgtcatataataaaaaggtcaatttaccagagagatataataatttgagtacacattcacccaaacatatgaggaaaacatagacaaaatgaaggggagaaatagacagcaaccccataataacagtaggaggttaatactcaactttcaataatgaatagaaaatccagacatataaccatgaaacagaattgaacacccttatagaacaaatgtacctaacagacatatacactttatagtaataaatacttacatktagggaaaagaaaaatcttgaataaaaaatgcaactgtgcacaccaaagacgtagcaaaagaagagaaactaaacctaaagttaacagatcaaaggaaaaaacaaaattcagaccagaaataagtgaagaagtataaacaaacaaagaaaaaatcaatgaaattaagagttgctccttgaaaagtgcaact

SEQ ID NO: 575472 - DNA, 417 bp, Homo sapiens
ctaagacttttacccaaaaaartatattcaaatagtgaaaaggaaaaacaaacataatgtactttaaagatggcatatgcaacagtagtcatgaaacagagctgagggtttaaccacagctcagaaccatgaggcttgaagtattacaaagtagggatagtttggagactgatggaagaggattttccaagatgagtagaaaaaatattggcagcaagaaagaacataaagatgttaaaatgaaactgtcacctattcttcaataacacttaaaatggtcaacataacctattgcattctgaaaaacctaagttggtgagaaaatagctgtgtaatttcccaagacctgcaggattgccaataggttcgaaacgtagagccaaggaggactctggatgagacgtgcagctggaattc

SEQ ID NO: 575473 - DNA, 607 bp, Homo sapiens
tacagttatatatagttatatatatagctatatatgatatatacatttatctatataaaaactatagtataaaaactatagtttttatactatatgactgttaccatttattatactatagtttttatcattattttagggtatcctaattgtacttattttttaaaagttagctgtaggcaaagaaaggctttcatgaggtattcctgaagaagaaactgtcatcataggaggtgacagctctatgcatgataatgccctaatgacattycagtggacaagatttagagatgaataacagttataataattattctgaccctgcataggcctaggctaaggtgcgtgtttgtgtgttaatttataacaaaaaagtttataaagtaaaaaaaaattaaaaatagaaaaaattttagaataaggatgtaagaaagaaaatattttgtacagctatacaatgtgtttatgttttaagtaaagcattatcgcaaaagagtaaaaatgttttaaaaattaaaaagtttataatgtaaaaaattacataagctaaggttaatttattactgaagaaaattttttaacaaatttagtgtagcttaagtgtaca

SEQ ID NO: 575474 - DNA, 577 bp, Homo sapiens
ttgttatttagtttttctgttcacaactcctttaaggatctcttgtaaaactggtctagtggtaacaaattcccttagtgtttacttgtctggaaaagattttatttctccttcagttacgaaacttagcttggcaggaagaaactaaacttggtttagatttttgtttggaatttctttgttaaaatttattgtctttaagaatgctaaaaatagccccccaatctcttatggcttataaaatttctgctgacaagtccactgttagcctgatgagggttccctttgtatgtgatctggccttttttcctacctggctttaagatttctactttagcattgaccttgaatagtctggtaaatacatatcttgttaatgtatttttttatagcatctcacagatkttctctggatttttggatacctggatgtcaacatctctaatatgattaggacatttttcttgaatcattcctcaaatatgttttctacattgtttagttttctttcttctttcttaggagtgccaataactcataggtttggttgctttacataatatcatatttctcaaag

SEQ ID NO: 575475 - DNA, 577 bp, Homo sapiens
ttgttatttagtttttctgttcacaactcctttaaggatctcttgtaaaactggtctagtggtaacaaattcccttagtgtttacttgtctggaaaagattttatttctccttcagttacgaaacttagcttggcaggaagaaactaaacttggtttagatttttgtttggaatttctttgttaaaatttattgtctttaagaatgctaaaaatagccccccaatctcttatggcttataaaatttctgctgacaagtccactgttagcctgatgagggttccctttgtatgtgatctggccttttttcctacctggctttaagatttctactttagcattgaccttgaatagtctggtaaatacatatcttgttaatgtatttttttatagcatctcacagattttctctggatttttggatacctggatgtcaacatctctaatatgattaggacatttttcttsaatcattcctcaaatatgttttctacattgtttagttttctttcttctttcttaggagtgccaataactcataggtttggttgctttacataatatcatatttctcaaag

SEQ ID NO: 575476 - DNA, 621 bp, Homo sapiens
aatacagtgaatgattgcaagratcatcagttcttatggattatttctgtgcaattgcccacaatctattcctgcaaaacaccatttcatatgctttattttctttttagttatttttgcttttttgagtttttttaattcactattttaaattgtcagcataattttctcaaaattcactatgctatgtatttcatcttcacatcttttccaatactggaagtgtgaatttgtaaagattttttggtgagttttaatctgttttatgcatttttggcaaatttgacttcataaaagtgctttgacttttaggcattgtgtgtgtatatgtaaaaatgttgaaacttcctctataaatgaaaggttgttctctttatacatctgcattagtgaaagataaaatttctcaagatcttagcttttttgagaggctggtattactggaaatgaggaacaaataaaggaatttaataaagttgcaggatacaaaatcagcatacaaaaatcaggcgtctttttatatgctgatagtgaactatgtacaaaagatatcaagaaatcaatttcatttacaatagccacgaaaagattaaaataactatgaataaacttaaccaaaag

SEQ ID NO: 575477 - DNA, 403 bp, Homo sapiens
aaaccgccaatcatggaaaatatgtctactattctacttgtttagaagyttttgagtaacttaagtgtttctactaagctgctcttcgttaaaaaaaatcttcattgacacaaacttacaataaatattgtcaatattattattactgccattcaaaagagcatgccatatgggatagaaaagactctgccttattgaatttatttatttatttggttttaagatgatctacaaaaggcattataacaaaaacacagttattattttaaactcacaagatcataaaacttcaatctacctgagctaagctaatacagctgagtctcattaatatgtttaccaaggacattcaaacatcaaagatgaaaacatctgtattctaaatcagactttattttattta

SEQ ID NO: 575478 - DNA, 403 bp, Homo sapiens
aaaccgccaatcatggaaaatatgtctactattctacttgtttagaagcttttgagtaacttaagtgtttctactaagctgctcttcrttaaaaaaaatcttcattgacacaaacttacaataaatattgtcaatattattattactgccattcaaaagagcatgccatatgggatagaaaagactctgccttattgaatttatttatttatttggttttaagatgatctacaaaaggcattataacaaaaacacagttattattttaaactcacaagatcataaaacttcaatctacctgagctaagctaatacagctgagtctcattaatatgtttaccaaggacattcaaacatcaaagatgaaaacatctgtattctaaatcagactttattttattta

SEQ ID NO: 575479 - DNA, 403 bp, Homo sapiens
aaaccgccaatcatggaaaatatgtctactattctacttgtttagaagcttttgagtaacttaagtgtttctactaagctgctcttcgttaaaaaaaatcttcattgacrcaaacttacaataaatattgtcaatattattattactgccattcaaaagagcatgccatatgggatagaaaagactctgccttattgaatttatttatttatttggttttaagatgatctacaaaaggcattataacaaaaacacagttattattttaaactcacaagatcataaaacttcaatctacctgagctaagctaatacagctgagtctcattaatatgtttaccaaggacattcaaacatcaaagatgaaaacatctgtattctaaatcagactttattttattta

SEQ ID NO: 575480 - DNA, 504 bp, Homo sapiens
agaatgtgtagaaataatatatcagagtctcttaccaacaaaacgaatcaagcagaagaaagaattagtgagcttgaaggctagctatttaaacatacaaagaggaaacraaaagcaaaagaagaaaaaagaataaagcacatctacaaggcatagaaaatatataagagttactgtccttaaaagggcaaatataagagttactgtccttaaattggaggtagagagataggggtagaaatattaattaaagtgataataacaaagaacttcccaaacctagagaaagatatcaatatacaagtagaagaaagttataaaacaacaagcaaatttaacccaaatgggaatatctcaaggcatttaataattaaacttccaaaggtcaaagataaagaaaggataataaatacagtaagagaaaagagacaaataggatacaatggagttccagtacatttggcagcagacttctcactggattccttaaagaacagaagagag

SEQ ID NO: 575481 - DNA, 597 bp, Homo sapiens
atcagaaaaatgtgaatcaaaagttcaatgagatatcatcttaccccagttaaaattgcttttatccaaaacataggcaataataaatgttagcatagatacggcaaaaagggaacactartacattggtggtgataatgtaagttagtaaaattactatggagaacattccatttctcaccagaaactgcctcaaaaaactaaaagtgaaacttccatatccagcaatgccactcgtgtaggtatgtgtctaaaagaaaggaaatcaatatattatacagatatctgcattcctgtgtgttttgcaacactattcccaatagccaaaatttggaagcaacttaagtttccatcaacagatgaatgaataaatgtggtacatatacacaatggtgtactattcagccataaaatgtatgaaatcctgtcatttgctacaacatgcatggaactggaggccattatgttaagtgaaaaacgccagcacagaaagacaaactttgcatgttctcatttatttttgggaactaaaaatcaaaacatctgaactcatggagatagaaagtagaaggatggttaccagagaccagtaaggat

SEQ ID NO: 575482 - DNA, 597 bp, Homo sapiens
atcagaaaaatgtgaatcaaaagttcaatgagatatcatcttaccccagttaaaattgcttttatccaaaacataggcaataataaatgttagcatagatacggcaaaaagggaacactaatacattggtggtgataatgtaagttagtaaaattactatggagaacattccatttctcaccagaaactgcctcaaaaaactaaaagtgaaacttccatatccagcaatgccactcgtgtaggtatgtgtctaaaagaaaggaaatcratatattatacagatatctgcattcctgtgtgttttgcaacactattcccaatagccaaaatttggaagcaacttaagtttccatcaacagatgaatgaataaatgtggtacatatacacaatggtgtactattcagccataaaatgtatgaaatcctgtcatttgctacaacatgcatggaactggaggccattatgttaagtgaaaaacgccagcacagaaagacaaactttgcatgttctcatttatttttgggaactaaaaatcaaaacatctgaactcatggagatagaaagtagaaggatggttaccagagaccagtaaggat

SEQ ID NO: 575483 - DNA, 597 bp, Homo sapiens
atcagaaaaatgtgaatcaaaagttcaatgagatatcatcttaccccagttaaaattgcttttatccaaaacataggcaataataaatgttagcatagatacggcaaaaagggaacactaatacattggtggtgataatgtaagttagtaaaattactatggagaacattccatttctcaccagaaactgcctcaaaaaactaaaagtgaaacttccatatccagcaatgccactcgtgtaggtatgtgtctaaaagaaaggaaatcaatatattatacagatatctgcattcctgtgtgttttgcaacactattcccaatagccaaaatttggaagcaacttaagtttccatcaacagatgaatgaataaatgtggtacatatacacaatggtgtactattcagccataaaatgtatgaaatcctgtcatttgctacaacatgcatggaactggaggccattatgttaagtgaaaaaygccagcacagaaagacaaactttgcatgttctcatttatttttgggaactaaaaatcaaaacatctgaactcatggagatagaaagtagaaggatggttaccagagaccagtaaggat

SEQ ID NO: 575484 - DNA, 585 bp, Homo sapiens
ggggggtttgcagagtgtagcctctgatccttttgttacttaggtrtggaaagttagggttttcctttcaatttagttctaggaagtggtagtgaaacagccttaggttccctgcctccagaccctattttcctgcctcaggacgatgtatttcaaggagagattggtcaagtgcagctgagatgttgagggagatgagaactgagatcaccaatcactgaagtggcaaaatgctaattgctagaactcagacaagtacctggcacataggaggtgtttaatgagtgaatgaaaggagatctttggtgaccttgataagtgggttcatttggtgaagtgagaatgaaagtctaattggagaagtttcaagagaatgataggtgaggaaagtagccatagtgagcagagacaactttcgaagaattttcctaaaaagcagagcagggaaataggatagtacctaaaggagattttggaatcaagggaaatttttactttggaatgatgagaaatattatagcatgctctatgtggatagggataatccaatagagaggagaaaatgaataatgcaggagttagtga

SEQ ID NO: 575485 - DNA, 615 bp, Homo sapiens
gcaggaaaatttgccattgcaattcaaccaaaagatggtcaacataaagctttgtaattatcagctacaaattccagttatagcaatcgttttcttgtgttcaaaaatcttctagacaaattcttacagaagcatggtgtattaaaagtaccatttttatattccaggtagcttacctgcttgagataatgtgatgagggcaaaaattattaatgaatcaaatttcctttccttcccgtttatccaataccaccatcctcttcctcgccacctggacattgccaacacagcagttttcactactatgttcatccttcttctgtatctaggggtagtcagtagaaagaaaactcaagaagaaggtatagggaattagcttttggtagagagaaaaaaaaagcagaacaaaagttgtgtgggagattaggaagacaacacctcagtagatgtggtgagtagaaaaaaattgatggaaagagttgcgaatagaccagaagagagttaatagccacactgagacaaaaagagagataaaaccaaggaaacagaggcaaaaatatttaagaagtctttgctgtagataawtgattaaaactcttttaatcatgtccaagc

SEQ ID NO: 575486 - DNA, 577 bp, Homo sapiens
ggaatttctgggtcatacgtaygcttaataagtttttaaagtgtcaaactattattcaaagtggctgtactattttgtatcccatcagtaatgtatgagagttctaaattctccgcatccttgccaacattattagccattagggaaatgcagataaaacctcaatgagacccctttaaacctcctagaatgaataaaataaaaagatacatagtaacaagtgttggcaagtatgtagagaatttagagttctcatacattactgatgggatacatttattggtcatttgcacatcttcataggagaaatgtcaattcagatcctttgccaatttttaaattgggctattgtattgcaagagttctttatatattctggatacaagttccttattaaatatatgatttgctattatcttctctcattctattgtctttccattttattggtggcatcctttgatgcatgaaaaattgtaatttttataatgtccaatttagctatattttattttttcgcttgtgctttttggtgccacgtccaagaaaacattgtatagcccagggccctggaaag

SEQ ID NO: 575487 - DNA, 577 bp, Homo sapiens
ggaatttctgggtcatacgtatgcttaataagtttttaaagtgtcaaactattattcaaagtggctgtactattttrtatcccatcagtaatgtatgagagttctaaattctccgcatccttgccaacattattagccattagggaaatgcagataaaacctcaatgagacccctttaaacctcctagaatgaataaaataaaaagatacatagtaacaagtgttggcaagtatgtagagaatttagagttctcatacattactgatgggatacatttattggtcatttgcacatcttcataggagaaatgtcaattcagatcctttgccaatttttaaattgggctattgtattgcaagagttctttatatattctggatacaagttccttattaaatatatgatttgctattatcttctctcattctattgtctttccattttattggtggcatcctttgatgcatgaaaaattgtaatttttataatgtccaatttagctatattttattttttcgcttgtgctttttggtgccacgtccaagaaaacattgtatagcccagggccctggaaag

SEQ ID NO: 575488 - DNA, 567 bp, Homo sapiens
attgctaggagaatattatttattgatgggagaatatatttaataacatcatatacaatttttttttttttgagacagagtcttgctctgtcacccaggctggagtgcagcaatgtgatctcggctcactgcaacctccgcctcctgggttcaagcgattctcctgcctcagcctccagagtatctgggattacaggcatgcgccaccacgcctggctacttattgtatttttttagtagagacggggtttcaccatgtctcaaactcctcacctcgtgatccacctgcctcagcctcccaaagtgctgggattacaggcgtgagcctccatgcccggacaaaaatgtcatatataatttttaaaggtaattttcaccttttaccataatcctctattttcatgctcaagccatattacgaacacataatatttgcatytataaggaaaatgtattttgggtcttttatgatgacatgagactgtttatttaattttgtttatcttattctagtttgtgaatttttaacagaatttatttttttaatgcagtggattcttgtttgta

SEQ ID NO: 575489 - DNA, 432 bp, Homo sapiens
gaataacttttgaaattgtggcaaaagtttacaaacaaagacattattggattgatatttaattttagtgattgttttataatagaaataaatgtatgcagcttaataaaatactttataaaccttctgacaaatacatcacaaatatttttataatctaaccagaggcattcaatgcattatccaaacttgggatatcagcgtcacacttacaacaaaaatttagtatggattacagcaaatcttttactttctttacatactgctttcatgtttctcacaaaaactctatgaggygtaaatggtcaaatattaatcctattttaacatgagaacaaattcagaaaagtcgtgttttaagttacatatatatgaagccaggcgatttatatatatatatatgtatatatatataaatataaaatttatcat

SEQ ID NO: 575490 - DNA, 524 bp, Homo sapiens
ccagcctgggcaacagagtgaaattctatctcaaacaaacaaacaaaaaagtgacaaatttttgtagaaatagattaagaaagcaaaaagaaaaaaaaaactaacaatatctgaaaaaagtaatataaatttaagcattgcaggcattacgaaaatcttatgaggacataagaatatgtgaataaatttgtattaataaatataaacatttagrtataatggacaaattactagaagaataccattaattccagaagaaatagataatcaactactactgtaactacataaaacgttagccaagcagttaaaaatctatgctccaagaaaagttcaggtcaacagagcttcatccacaaaaaaatccataatgatcactaaagaaataattttagtttacaacaaacaattatgaagtataaaagacagcaagtattaaacagtcattttatgagctcattatactgttaccaaaacttgacaaagacttgataagaatagaaaatttggggccaatattaatt

SEQ ID NO: 575491 - DNA, 396 bp, Homo sapiens
tatatgctaaaacatggatgaatcctgaaaatattatgctaagtgaaaaaagccagtcacaaaagaccacatattgtgtgacagatctatggaacaggtaaatttatagaaacagaaagtagggccaggcctggaggctaacacctataatcccagcacttcgggaagctgaggttgacggattgcttgagtccaggagtttgagaccagcctgggcaatgtggcaaaactccatctctacaaaaagtacaaaaattagatgggcatggtggcacacacttgtagtcccatctattcagagggctgaggctgcagaatcacttgagcccgggaagtggaggttgcagtgaactgagatygcaccactgtactccagcctgggagacagaataagac

SEQ ID NO: 575492 - DNA, 554 bp, Homo sapiens
tctccctgtgttgcctaggctggtctcaaattcctggactcaagtagtcctcccactttggcctcccaaagtgctgggattacaggcatgagccaccacatccagcctgaaccattgtaacagtaaacatgtattagtttaaaaaaaaatcaggaagaaactaaaactgttttcattgtgaaaaagcagaggggtagagggataaaatgttgagcttgtggatatgtagctcagcatcttgtttctgggttcccctcaaacttggaatccaactaggatcctacataactagtaagcatggagctagtggaaatatgcttcccaatgttcatttgctttttcatttttttccagttaacaaatacatatttagtgttcatggttaccagatactgttctaggcattggggctatagtggtaaaaatatctgatgagatccctaccttcataaaacttacagtttagtggagattggcagagatagttgactaatcctcaatatrataattgctacaaacaagaaataatcagtatgatgagaactgaagccagg

SEQ ID NO: 575493 - DNA, 623 bp, Homo sapiens
cacaacagcaagtctctacctggcctcctgttgaggggcttggggatggccgccctttgtggacagatctcctgcagactggaattccactattaccaacacattcctttgggtctcaagagtttggtctccttaaatctcaccctaaccttaaccaaatgcaaattcccttagtaaaggaaagccattgttatcatcgacaccttaggagatgtgagtgtggactctgagaagtggctgagggcaaggattctggggaagggggccagagggtgtccaggcatgtcatgcaaccttggataagacacttctcctttttgggatcaggacttgtcgtgggcacaacaaggcgcttggaatctatgatccctggggtcccctctgactctggcattgtgtcaatgtaagactgggattggggcactggggaggagggccggcgagaggcatggactgtgaggactgtgtggcttcagcctggctcagagcacagagctcatgctcattcaatggggctgtgcctccatctgagccagctagactccaaggagcctccgtctcaattccagcaccgttttctcccaccaacctggatcttttartaatagaagaaatatagctca

SEQ ID NO: 575494 - DNA, 552 bp, Homo sapiens
acatacagcccctccatttccagcccagcagcacccaactggttctctcctagaataagccaaacatgtttccccttccattcctttgttcacgctgcccgctcaacctggaatgcctttcctgcctcttcatctgcctctgcctactcatgctggaagactgagggaagatctctccttccagagagcttccttggcctgcccagccacgtctctcatagtttcacagttctgtgcacatgtccctgtcactgctgttccacgcctccacccatcagcctcccttccccaacatccctgcagccatgtgtccttctgagtcctgcagcctgtgtccccccacagaccaggatccccctggagacagagactgctttggttcatccctgcaccctcaatgccgcttagggcctggcayacagggctcagcaaattttttttaaataaatctcagtcctcgttttatttgcacaagggtagggatggggaaggcggccggccctgcataggagaacagggcagccagggtggagaggaacacagaataagctt

SEQ ID NO: 575495 - DNA, 563 bp, Homo sapiens
aaaattagccaggcatgttggctcacacctgtagtcccagctattcagcaggctgaggtaggaggattgcttaagcccaggatgtggaggttacaagaagcccagatcrtgccaccgcactccagtctgcatgacatagacccggtctcaaaaaataaaaaacaaaaaggaagatgaatgagaggtcgagaggttatttccttagtaatttctccaataaaaaagaatatttttatttggcagttttaattgcttttagcaacaaaaggtagagaattatgttttgttccaatttggggaagttttctgtttggcatcctcttattttgggaatcctatcatgtgtccctaatatataaacctctttgctaacctaggcaggacactgaagcagagcataatttgagacgggaaatactaaaataaatttcaaccaatgtggccttggaaataattaatgtcttcttttgatcaattttagaaactttggggagtaacactagaggcattgtttcttcagttgaaatggtcacccatgttcagagcagcaaggaaaaggaacc

SEQ ID NO: 575496 - DNA, 563 bp, Homo sapiens
aaaattagccaggcatgttggctcacacctgtagtcccagctattcagcaggctgaggtaggaggattgcttaagcccaggatgtggaggttacaagaagcccagatcgtgccaccgcactccagtctgcatgacatagacccggtctcaaaaaataaaaaacaaaaaggaagatgaatgagaggtcgagaggttatttccttagtaatttctccaataaaaaagaatatttttatttggcagttttaattgcttttagcaacaaaaggtagagaattatgttttgttccaatttggggaagttttctgtttggcatcctcttattttgggaatcctatcatgtgtccctaatatataaacctctttgctaacctaggcaggacactgaagcagagcataatttgagacgggaaatactaaaataaatttcaaccaatgtggccttggaaataattaatgtcttcttttgatcaattttagaaactttggggagtaacactagaggcattgtttcttcagttgaaatgstcacccatgttcagagcagcaaggaaaaggaacc

SEQ ID NO: 575497 - DNA, 562 bp, Homo sapiens
gtactctcagctaacttgtacttagcctatttcccaggaaatattgggaatatttgaggcactgaaatttggtacattcaaggccaagaaaattatgaacaaaacacgaggaaatctcaggacactaacaatacctgtggtaattttaaaaatatgtttacacattctttgatattcttcccttcaagaaggagagyctaattttcttcccattgaatgtgggtagacttagtaacgtgtctaatgaatagaatacagctgaaataatggtgtatcactgctaaaattagttttaaaaagactgaagctttttataatttgaatcagtctctctctctctctctttctgtctctcatatatcactcactatgggtggaagccagctgccatgttgcttgaactaccccagagaaagagatgcacgtagtgaagaactgaagtctcctgacaacaaccatgtgagtgagcctggaggtggattcttcaatcccttcaagtggctacaactccagctaacatcttgactgcaaccacatgggagacaataagtcagaagttact

SEQ ID NO: 575498 - DNA, 562 bp, Homo sapiens
gtactctcagctaacttgtacttagcctatttcccaggaaatattgggaatatttgaggcactgaaatttggtacattcaaggccaagaaaattatgaacaaaacacgaggaaatctcaggacactaacaatacctgtggtaattttaaaaatatgtttacacattctttgatattcttcccttcaagaaggagagtctaattttcttcccattgaatgtgggtagacttagtaacrtgtctaatgaatagaatacagctgaaataatggtgtatcactgctaaaattagttttaaaaagactgaagctttttataatttgaatcagtctctctctctctctctttctgtctctcatatatcactcactatgggtggaagccagctgccatgttgcttgaactaccccagagaaagagatgcacgtagtgaagaactgaagtctcctgacaacaaccatgtgagtgagcctggaggtggattcttcaatcccttcaagtggctacaactccagctaacatcttgactgcaaccacatgggagacaataagtcagaagttact

SEQ ID NO: 575499 - DNA, 588 bp, Homo sapiens
cacataaggactcacataaaattaaggcaaaggggtggaaaaagatatttcatgcaaatggacataaaaagtgagtgggagtagatattcttatatcaggcaaaacaagctttaaagcagttaaaaaagatgaagagggacatataatgataaagaggcttgtccaacaggaaaatatcacaatcctaaatatatatgcacataacactggatctcccaaatttataaaacaattactactagacctaagaaatgaggtagacagcaatagattaatagtggagaacttcagtactccactgacagcactagatggatcatcaagacagaaagtcaacaaagaaacaatggatttaaactataccctggaacaaatggacttaacagatatttacagagcattctacccaaaaactacaaaatacacattatattcatcagcacatggaacattctccaagatagaccatatgataggccacaaaacaagtctcaataaatttaagaaaattgaaattatatcragagctctctcagatcacagcgaaataaaattggaactcaactccaaaaggaaccctcaaaacc

SEQ ID NO: 575500 - DNA, 579 bp, Homo sapiens
ttttttcatgtaatgtgggtcattggcaaaaataataatcctcctggcttcataaaattaaagggttccaaatcattaacatacaaaattaataataaaccatttaacatagacacttgaggragaccagatgtttctgcctaattagagaaggcctgaccctagatgatagtgtatttcaatcacctttttaaataagcataaagccagcacacagagcttaatgcagcccacagtgacactcctaggattaaggaagcctcagtaaaatgtcaaaatcatgcaaaggtgaaagggggaaaaagtaacactatcataaatatagaaactcttctctctttttgtcctataggaaagtagagttgttttttgttgttgttgcaattattgttgaataatgaataacatctacaaattgaaatttgagcaatgcaactaagcagggattaaatggtaatatttaaacttaggtgcatgtattaaaatcttaaatctaaagaaatataaaaagaaactatgaaaataacaattgaaaaataaaaaaataattttgaaaatattaagtaattgggaatgtta

SEQ ID NO: 575501 - DNA, 568 bp, Homo sapiens
taacctcttctctcattgaccttataatcaggtaaaggaaaaagtaaatggaataaaatgatactatattgtkacaagcgcccgacagatgtgctgtgggagcaggggaagaatatcctttcataaataagtagcacagatgcctagagccttggagcacaggcagacagacagggtcagaatcccagctggagcacttcctagctctgcaaccttgggcatgttactcaacctctctgtgccacagtttctttatctgtaaaattgagataaggaaatacttgcctaatgggatagatgtgaggattaaatgagaaactacatgaagagcaaccggcacaaggcatggcacatagacaatgctcagtaaatgttgactaatataggatttttgttatttgcactccaaacaaatacccatttagtattggtccaatcacatcagaccacttcttggatcctaaacatgctctgtcgccatgcatttattcacattgttctctccatctagttgcccttcctctttcactgcatgtattaaaactctacccatcagtattagtttccc

SEQ ID NO: 575502 - DNA, 677 bp, Homo sapiens
accaggtactaggcctggaaaaacaccaacaattgagaaatacgtaacctcttctctcattgaccttataatcaggtaaaggaaaaagtaaatggaataaaatgatactatattgtgacaagcgcccgacagatgtgctgtgggagcaggggaagaatatcctttcataaataagtagcacagatgcctagagccttggagcacaggcagacagacagggtcagaatsccagctggagcacttcctagctctgcaaccttgggcatgttactcaacctctctgtgccacagtttctttatctgtaaaattgagataaggaaatacttgcctaatgggatagatgtgaggattaaatgagaaactacatgaagagcaaccggcacaaggcatggcacatagacaatgctcagtaaatgttgactaatataggatttttgttatttgcactccaaacaaatacccatttagtattggtccaatcacatcagaccacttcttggatcctaaacatgctctgtcgccatgcatttattcacattgttctctccatctagttgcccttcctctttcactgcatgtattaaaactctacccatcagtattagtttcccatgaatgctgtaatgaattaccacaaactaggtggcttaaaacaacagaaatttattttatcata

SEQ ID NO: 575503 - DNA, 568 bp, Homo sapiens
taacctcttctctcattgaccttataatcaggtaaaggaaaaagtaaatggaataaaatgatactatattgtgacaagcgcccgacagatgtgctgtgggagcaggggaagaatatcctttcataaataagtagcacagatgcctagagccttggagcacaggcagacagacagggtcagaatcccagctggagcacttcctagctctgcaaccttgggcatgttactcaacctctctgtgccacagtttctttatctgtaaaattgagataaggaaatacttgcctaatgggatagatgtgaggattaaatgagaaactacatgaagagcaacyggcacaaggcatggcacatagacaatgctcagtaaatgttgactaatataggatttttgttatttgcactccaaacaaatacccatttagtattggtccaatcacatcagaccacttcttggatcctaaacatgctctgtcgccatgcatttattcacattgttctctccatctagttgcccttcctctttcactgcatgtattaaaactctacccatcagtattagtttccc

SEQ ID NO: 575504 - DNA, 498 bp, Homo sapiens
gaacaagtcccagaaagactccttcagcagtctctaaaggctagctgttagtgggtagaaaagatggtgcagatctcatcctgactcagcacatgctaagagctaaactgtctgtcaaaaggaattctttataaaataaaatttaaaagctgagacttaaagtgtacactaatgacctggtaattgtcttaatgacttttcaatgaagtgtgaaattctctgttaacatgtcaacagagtgtgaaatattttacaagcatggctttattataaaactgtgtacttgctrtgtagtctactagtaatccttgttgcttatccagtaaatatttctggttatattctgagcacttagccaattaacatttatattggctggtaatcttttttccattttttcatttgactgtttgtactgtttgtctatttgttaaatctggggaccagagaagactctcctagttttctttgatgacaaatatctcacttgggtgactc

SEQ ID NO: 575505 - DNA, 637 bp, Homo sapiens
agattctaatgaaaatgacagcactaaaaataagaatgaatgacagctaaagaagttttgaatgrcatgtatgctttttgaaaatctttgctttctaattggagtgagagaaatcagaacaatgacatagattttatttttaaaataatcaactttttaaaggtactgtaatgttctatttcttaatctgggtgctgattcattattattctttaagctatgaatatatatatttataatttttatctctggtctacttttaaataattaatcttcttagaatacacttacatatatgtttgtcaacagatccactttttgggaaaagatatccaatcttatcttcccctactctgcagacaggctccctggcctttgctctgggagcaggctcttcctttctgtcctggttccacacccagcaattggattgtattcttccagctcccaggttagcagaaagtggcacaatggttctgtgagggaggcaggtaaagaaaacatctgggcaatagtaattgttactactctatactgggtccaggtagatgacattctaattattctgaattggtgaaataaaaacagcagctgcagtggtatattcttctcttatttctcccatggattgagctca

SEQ ID NO: 575506 - DNA, 637 bp, Homo sapiens
agattctaatgaaaatgacagcactaaaaataagaatgaatgacagctaaagaagttttgaatggcatgtatgctttttgaaaatctttgctttctaattggagtgagagaaatcagaacaatgacatagattttatttttaaaataatcaactttttaaaggtactgtaatgttctatttcttaatctgggtgctgattcattattattctttaagctatgaatatatatatttataatttttatctctggtctacttttaaataattaatcttcttagaatacacttacatatatgtttgtcaacagatccactttttgggaaaagatatccaatcttatcttcccctactctgcagacaggctccctggcctttgctctgggagcaggctcttcctttctgtcctggttccacrcccagcaattggattgtattcttccagctcccaggttagcagaaagtggcacaatggttctgtgagggaggcaggtaaagaaaacatctgggcaatagtaattgttactactctatactgggtccaggtagatgacattctaattattctgaattggtgaaataaaaacagcagctgcagtggtatattcttctcttatttctcccatggattgagctca

SEQ ID NO: 575507 - DNA, 637 bp, Homo sapiens
agattctaatgaaaatgacagcactaaaaataagaatgaatgacagctaaagaagttttgaatggcatgtatgctttttgaaaatctttgctttctaattggagtgagagaaatcagaacaatgacatagattttatttttaaaataatcaactttttaaaggtactgtaatgttctatttcttaatctgggtgctgattcattattattctttaagctatgaatatatatatttataatttttatctctggtctacttttaaataattaatcttcttagaatacacttacatatatgtttgtcaacagatccactttttgggaaaagatatccaatcttatcttcccctactctgcagacaggctccctggcctttgctctgggagcaggctcttcctttctgtcctggttccacacccagcaattggattgtattcttccagctcccaggttagcagaaagtggcacaatggttctgtgagggaggcaggtaaagaaaacatctgggcaatagtaattgttactactctatacwgggtccaggtagatgacattctaattattctgaattggtgaaataaaaacagcagctgcagtggtatattcttctcttatttctcccatggattgagctca

SEQ ID NO: 575508 - DNA, 549 bp, Homo sapiens
aatatttctaaggaattctagattaaaatttaagtaaaatgttagtaaatataccaagtaaatatttcattttcaaaataatcatgccatcttagaaccagatgatctttgaaagggttcaagtwagtggtttatatatatttttacccatataccttctaaaagaatattttaagaactatgtcacttaaatggcttctcataagtttaacatttaaaaatatataattcccaacatacagtaaatattggcatgttataaaaattgttttgactcttttatttgtatctaattgaatttttatttttatttttatttttttttttgagacagggttatactctgttgcctaggctgaattgcagtggggtgactatggctcactgcagccttgacatcctgggctcaagggattctcatactttggcctctgaaagtgctggactacaggcatacctaattgactctgaaggccacatcaatttaagacctactatcatacattacaaaatagaatgcatcaaaaagccctgcacagttaaaagatt

SEQ ID NO: 575509 - DNA, 643 bp, Homo sapiens
tacaccaagtccatttaccattttgttttagttactcagagctccaagctagatactaggtatacagccataaattagaccaaatccttgctctctagttgctcattatgcagtcagtgaaaacatttgaakccatacctatagttcacaaagaagctatattttgagcaaatctacttttttaatagaagtctggcaaactgttgttatgtccttaaaagttccagtgattttttttccaagactacttaagttttaggaacttgctcagatttgtatttgataatagaaaagatattcaagaagcttggcataaataaattccttatattgaaaatttcagaaatccttatattgaaaatttcagagttttcaatatagggaatatattcaatataagcaaagaaaatcaaatttctaaagtaatcatgtgtaatgtaatgctgtgaatgttttttcctaataactagacacccaaggaaaaggtagcaaatgaaatggatgaattgaacagtaaaagaaggaaaagggcaaggattagggaataggaaaagagagtagacacaagatggctcgagtaagaaagaaagcagggaaaggaagagttgaagccaaaaagggacacaactgttcaatgctagca

SEQ ID NO: 575510 - DNA, 639 bp, Homo sapiens
ccaagtccatttaccattttgttttagttactcagagctccaagctagatactaggtatacagccataaattagaccaaatccttgctctctagttgctcattatgcagtcagtgaaaacatttgaagccatacctatagttcacaaagaagctatattttgagcaaatctacttttttaatagaagtctggcaaactgttgttatgtccttaaaagttccagtgattttttttccaagactacttaagttttaggaacttgctcagatttgtatttgataatagaaaagatattcaagaagcttggcataaataaattccttatattgaaaatttcagaaatccttatattgaaaatttcagagttttcaatatagggaatatattsaatataagcaaagaaaatcaaatttctaaagtaatcatgtgtaatgtaatgctgtgaatgttttttcctaataactagacacccaaggaaaaggtagcaaatgaaatggatgaattgaacagtaaaagaaggaaaagggcaaggattagggaataggaaaagagagtagacacaagatggctcgagtaagaaagaaagcagggaaaggaagagttgaagccaaaaagggacacaactgttcaatgctagca

SEQ ID NO: 575511 - DNA, 639 bp, Homo sapiens
ccaagtccatttaccattttgttttagttactcagagctccaagctagatactaggtatacagccataaattagaccaaatccttgctctctagttgctcattatgcagtcagtgaaaacatttgaagccatacctatagttcacaaagaagctatattttgagcaaatctacttttttaatagaagtctggcaaactgttgttatgtccttaaaagttccagtgattttttttccaagactacttaagttttaggaacttgctcagatttgtatttgataatagaaaagatattcaagaagcttggcataaataaattccttatattgaaaatttcagaaatccttatattgaaaatttcagagttttcaatatagggaatatattcaatataagcaaagaaaatcaaatttctaaagtaatcatgtgtaatgtaatgctgtgaatgttttttcctaataactagacacccaaggaaaaggtagcaaatgaaatggatgaattgaasagtaaaagaaggaaaagggcaaggattagggaataggaaaagagagtagacacaagatggctcgagtaagaaagaaagcagggaaaggaagagttgaagccaaaaagggacacaactgttcaatgctagca

SEQ ID NO: 575512 - DNA, 394 bp, Homo sapiens
agaccggcctgaccaacatggtgaaaccccatctctactaaaaatacaaaaattacccaggcatggtagcacatgcctgtaatcccagctactcgggaggctgcggcccaagaatggcttgaacccggaagggggaggctgcagtgagccaagattgtgccactgcactccagcctgggtgacagagcaggactccgtctcaaaaaaaaamaacaacaaaaaaaaaaaacacaaaaacaaaaaaaccacctacttagatttcagatgtatttatttctcatgcttctgactcgtctataccttgctcatcaaagttggttttctttttctttttcaattttttaatgagccatttgctacctgaaattactaggcaatctttgcagtcattgtc

SEQ ID NO: 575513 - DNA, 366 bp, Homo sapiens
tacaagaagaaaagaaaacttcaggccaatatccctgatgaacatkgatgtgaaaatccttaataaaacactggcaaactgaatccagcagcacatcaaaaaacttgtccatcacaattaagctggcttcatccctgagatgcaaggctggttcaacatatgcaaatcaataaatatgacccatcacataaacagaatcaaagacaaaaaccacacgattatctcaatagatgcagagagggcctttgataaaattcaacatccgctcgtgttaaaaactctcaataaactaggtattgatggaacatatctcaaaataataagagctatttatgacaaacccacagccaatatcatattgaatgg

SEQ ID NO: 575514 - DNA, 561 bp, Homo sapiens
aggcacttgtctctagggagaagtcattaaaaggccctttagttttcatctgtgacgttttatttaaagaggaaaacaggccacaaatgtgaccaaatgttaacggttgttaaatttgggtggtagaaatgcactctgggctgtaccacagtgtggtccaaatcttctccagattcacaaaaggagatgacggacagcaccccggatggagtggcaggtgccaccrctcccctgctccgtgtgcctcctccccacgtcccctcacctgtctgcgggaaagtgcaggtcgccgccggcccggtgcagctcactgctgttctccagcctggccagtgcgtccatgcgcttcaccatcagctccagcaggtcgctcatcttgcgcaggatgccgcgggactcggggccccccatcactgtgggcagagtgtgggtatggttaggggaggcccgagcagcctggaggccacctggtgtccgagctggggcagctcagacaaagctggccccaaagtccccccagcaccaaccaacaccagaccccagcctcagctccatcttccc

SEQ ID NO: 575515 - DNA, 557 bp, Homo sapiens
tataaaaactggcagcaggccaggtgcagtggctcatgcccataatctcagcacttggggaggccaaggtggatgcattggttgagctcgggagttcaagaccagcctgggcaacatggcaaaaccccttttcaataaaaaatacaaaaattagctgggcatggtggcatgtgcctgtaatcccagctactttcagggctgaggtgggaggattgctggagcccatgagattgaggctgcagtgagccacgaytgcaccactgcactccagcctgggcaacagagcgagaccctctctcaaacaaacaaacaaaaaccctgaggacatacagaggcatgggtcattgcagcctgggtttcacgatgaccatgcctgcggaaccagatgccccttctgtagttcttcaagccccaccccatcagactggaccaagtccccccgtgccaggggctcaggagctgctcccatcttctgcagatggcatggaactccagaaacccctgagacctggggagacagcccctaccccttcccaatgagccctcggggtaccagg

SEQ ID NO: 575516 - DNA, 582 bp, Homo sapiens
gtgtgtgcctgtagccacaggctgaggtgggaggatcacttgagcctgggaggtctcaggctgcagtgaagttgcagtgagccaagggtcacaccactgtgcaccagcctaggacaacagagtgagaccctttctcaaaaaaaaaaaaaaaaggtaaaattttggtgaaactattctatgtgmcactataatggtggacacatgccatatagattcgtcaaaatccatagaatcaagagtgaaccctcgtgtgaactagggacttggggagatggtgatgtgttaatgtgggttcatcagttgtaacaaacccactctatggaggacgttgatagtcggggggttatgggtgggggaggaggaataggggatatgtgggcactctatgctttctgctcaattttgctgtgaacctacacatgctctaaaaaataatgtctctttaaaaaaaaatttttttttgagacaggttctctctctgttgcccaggctggagtgcagtggcataaactcagctcactgcagtcttgacctcctgagctcaagcaaaccttccacctcagcctcccaagtagctggaac

SEQ ID NO: 575517 - DNA, 582 bp, Homo sapiens
gtgtgtgcctgtagccacaggctgaggtgggaggatcacttgagcctgggaggtctcaggctgcagtgaagttgcagtgagccaagggtcacaccactgtgcaccagcctaggacaacagagtgagaccctttctcaaaaaaaaaaaaaaaaggtaaaattttggtgaaactattctatgtgccactataatggtggacacatgccatatagattcgtcaaaatccatagaatcaagagtgaaccctcgtgtgaactagggacttggggagatggtgatgtgttaatgtgggttcatcagttgtaacaaacccactctatggaggacgttgatagtcggggggttatgggtgggggaggaggaataggggatatgtgggcactctatgctttctgctcaattttgctgtgaaccwacacatgctctaaaaaataatgtctctttaaaaaaaaatttttttttgagacaggttctctctctgttgcccaggctggagtgcagtggcataaactcagctcactgcagtcttgacctcctgagctcaagcaaaccttccacctcagcctcccaagtagctggaac

SEQ ID NO: 575518 - DNA, 574 bp, Homo sapiens
tcagtgcagggttgtcttctctggtaagtgcttgtttagtgtctgcctgtagactacctgggaagaaactcactttctgtaggcaacctgcttttttgaaaaaaataatttcaaattgataagaaattgcgaaaataggccaggcacagtgctcacgcctataattctagcactttggggagctgaggtgggcagatcgcttgagttcaggagtttgagaccagcctgggcaacatggcaaaaccccatctctacaaaaaaagtacaaaaaaattagccaggtgtagtggcgtatgcctgtcgtcccagctacttgggaggctgaagtgggaggttgcagtgaatccagatcacaccactgcactccagcctgggycacagagcaagattctgtctcaaaaaaaccaaaaaaccaaaacaaaaaaagaaattgcaaaaataaaaatagtacaatgaacatctgaatatcctttaacaggattcatctattgttaacgctctaccttagtaacttttttttttttttttttttaaggacagagtcttgctctgttgcccaggctggggtgcagtg

SEQ ID NO: 575519 - DNA, 571 bp, Homo sapiens
ttttagaacattttcattatgcccaaaagaaaccccgtagttcccccttttggcatgacagtgtgaggagcttcatggacttattctatagtgaaatgggtgaaaattatcttaaaaggaatcatttcaagtctctggaagtggttctaggggcatatagcaaatgaagcatttactcaagaaaatctaccacacttggtaagaaaagtaaatctgcaatatttgaaccaagatccactcattcccttcttgcctcccagctcagcgagacagatataactgagagaacaggactctgtttacccccatctctcaatggagggctatcttcccaagatgggcaggatgacagcctttcttctcctgccctcacctacttttggtgaggctaagttcctggtgagtgtggctcaccagtgctcttttctgtctaaccctagctcataagatgtaggttcaaccttgggcatgacactgctgagattatttaaatcctgattgctcttgctttggcaggagtcctaggtcaggagaggtaagccaggggracctggggctgatggcttccccc

SEQ ID NO: 575520 - DNA, 584 bp, Homo sapiens
cagctgtttcaatacttttatatttgctgttgagctgataactgttgtcccatgatgaaaccctagcttgaaaattccctcaaacttggaaatcccaagcaggcacccattacttattgactgggcagtcactttacctttgttctcaagggttctgtcrcaatctgttgctgagttcctcataggggacaccagctgctgggttcatgctgcagaccctggctgagtgactgatgaaaagagtactcagacacaggtatgcagtgtaagagaagctaggggactgtccagcactagtggctgaagaatgagcagtcccaaacagctggggctgcttgcttttattcaatagagacataatgctgaaagcctggagtaaacacaatctgcgggtaattagcatcattccacctttcagggagcagtcaggcagcatggatgatcaaaggtcagctcctggtcaacataagtaaacaaacctgtttaagataaattcccctacccttccttgaacccactccttgccctctgcctcagggttggagaacagctgccttcagcttattctccctcaaagctgtgca

SEQ ID NO: 575521 - DNA, 584 bp, Homo sapiens
cagctgtttcaatacttttatatttgctgttgagctgataactgttgtcccatgatgaaaccctagcttgaaaattccctcaaacttggaaatcccaagcaggcacccattacttattgactgggcagtcactttacctttgttctcaagggttctgtcgcaatctgttgctgagttcctcataggggacaccagctgctgggttcatgctgcagaccctggctgagtgactgatgaaargagtactcagacacaggtatgcagtgtaagagaagctaggggactgtccagcactagtggctgaagaatgagcagtcccaaacagctggggctgcttgcttttattcaatagagacataatgctgaaagcctggagtaaacacaatctgcgggtaattagcatcattccacctttcagggagcagtcaggcagcatggatgatcaaaggtcagctcctggtcaacataagtaaacaaacctgtttaagataaattcccctacccttccttgaacccactccttgccctctgcctcagggttggagaacagctgccttcagcttattctccctcaaagctgtgca

SEQ ID NO: 575522 - DNA, 584 bp, Homo sapiens
cagctgtttcaatacttttatatttgctgttgagctgataactgttgtcccatgatgaaaccctagcttgaaaattccctcaaacttggaaatcccaagcaggcacccattacttattgactgggcagtcactttacctttgttctcaagggttctgtcgcaatctgttgctgagttcctcataggggacaccagctgctgggttcatgctgcagaccctggctgagtgactgatgaaaagagtactcagacacaggtatgcagtgtaagagaagctaggggactgtccagcactagtggctgaagaatgagcagtcccaaacagctggggctgcttgcttttattcaatagagacataatgctgaaagcctggagtaaacacaatctgcgggtaattagcatyattccacctttcagggagcagtcaggcagcatggatgatcaaaggtcagctcctggtcaacataagtaaacaaacctgtttaagataaattcccctacccttccttgaacccactccttgccctctgcctcagggttggagaacagctgccttcagcttattctccctcaaagctgtgca

SEQ ID NO: 575523 - DNA, 523 bp, Homo sapiens
aacctgctaagacctgcaataatgtgcctacttagaagcaaggaagctgactcagagaggtcatataacttgttcaaggacacagtaataagaggtagatcttggattcaaaaccaggtctttctgattccaagatgtgggtacttaatcactacactttattgtcatggggcctctgggggttttagttagtttgaagtgctacctgtcctctygactaccatgctatattgtctatattttctacatttgtgatatagagttgtcattgcttcaattatacacatacatctttatattccaaatctgtaaattacaatttttggaaaagacttcattcataccatgtgaaaatttgaaaacaaagctaagagaatgaagacccttgggtataaattattgctttgtgctctcagctgaattattacaacacactggtatgaggaaaggtcactagtaacatgttactaataataatgatcacagggcagtttgcatatgacttattttgaaaaaaagaaat

SEQ ID NO: 575524 - DNA, 523 bp, Homo sapiens
aacctgctaagacctgcaataatgtgcctacttagaagcaaggaagctgactcagagaggtcatataacttgttcaaggacacagtaataagaggtagatcttggattcaaaaccaggtctttctgattccaagatgtgggtacttaatcactacactttattgtcatggggcctctgggggttttagttagtttgaagtgctacctgtcctcttgactaccatgctatattgtctatattttctacatttgtgatatagagttgtcattgcttcaattrtacacatacatctttatattccaaatctgtaaattacaatttttggaaaagacttcattcataccatgtgaaaatttgaaaacaaagctaagagaatgaagacccttgggtataaattattgctttgtgctctcagctgaattattacaacacactggtatgaggaaaggtcactagtaacatgttactaataataatgatcacagggcagtttgcatatgacttattttgaaaaaaagaaat

SEQ ID NO: 575525 - DNA, 523 bp, Homo sapiens
aacctgctaagacctgcaataatgtgcctacttagaagcaaggaagctgactcagagaggtcatataacttgttcaaggacacagtaataagaggtagatcttggattcaaaaccaggtctttctgattccaagatgtgggtacttaatcactacactttattgtcatggggcctctgggggttttagttagtttgaagtgctacctgtcctcttgactaccatgctatattgtctatattttctacatttgtgatatagagttgtcattgcttcaattatacacatacatctttatattccaaatctgtaaattacamtttttggaaaagacttcattcataccatgtgaaaatttgaaaacaaagctaagagaatgaagacccttgggtataaattattgctttgtgctctcagctgaattattacaacacactggtatgaggaaaggtcactagtaacatgttactaataataatgatcacagggcagtttgcatatgacttattttgaaaaaaagaaat

SEQ ID NO: 575526 - DNA, 566 bp, Homo sapiens
ttcaggctgctataaccaaataccataaactgggtgacttataaacaacagaaatgtatttctcaaggttctggagactggcaagtccatggtcaaagctctggcagattcagtgtctggtgaaggcctgccttctggttcacagatggtgtcttctcaatgtgatctcagtggtggaaggaacaaggcaactctctggggccttttccgtaaaggcactagtcacatttgtgagggcagagctctcatcacctaatcacctccccaaggtttcaccttctagtataatcaccttggaagttaggatttcwacatatgaatttggagggggtagggagggcttgggaggacacaaacattcagaccatagcaataacattcactgctgatgctcaagtagatagttgactcagttggtttttaatgctacgcacacatcaggtacaaatggataacaaggcatgtatgtatgaattcatgttttcatgaatttaactcctggcatcctgagggggtgacacaacttggaggcagattatctcaaagtaaccaatgtataatagggt

SEQ ID NO: 575527 - DNA, 615 bp, Homo sapiens
gctgggcacagtggctcatgcctgcaatcccagcactttgggaagcygaggtgggcggatcacttgaggccaacatggtgaagccccatctctactaaaaacacaaaaaattagccgggcatggtggtaggcacctgtaatcccagcgattcgggaggctgaggcttgagaatcacttgaacccaggaggtgaagtttacagtgagccaagatcacaccaccgcactccagcctgggcaacaaagtgagattctgactcaaaaaataaataaataaagtagattgaaaaaataaacaatagttcaggtcgtttgtggagatggcaaatattgggcacacagattattgaagtttgggaactgtcaacatacatccctaacatcttttaccttttcatcaccatttatgtgtctgcaaaacttacctggctgtggttctcttatagtcactccagccaatgaaatggaagcaactgtgtgaaaactacaccagttaacttataaaatttcaatgacagaggatgggtaggtagtgaccgcaagaacacaatacattctgagaaatgtttcaatgttatcattttaaagtaaatcttagaattcctattagtgtaga

SEQ ID NO: 575528 - DNA, 615 bp, Homo sapiens
gctgggcacagtggctcatgcctgcaatcccagcactttgggaagctgaggtgggcggatcacttgaggccaacatggtgaagccccatctctactaaaaacacaaaaaattagccgggcatggtggtaggcacctgyaatcccagcgattcgggaggctgaggcttgagaatcacttgaacccaggaggtgaagtttacagtgagccaagatcacaccaccgcactccagcctgggcaacaaagtgagattctgactcaaaaaataaataaataaagtagattgaaaaaataaacaatagttcaggtcgtttgtggagatggcaaatattgggcacacagattattgaagtttgggaactgtcaacatacatccctaacatcttttaccttttcatcaccatttatgtgtctgcaaaacttacctggctgtggttctcttatagtcactccagccaatgaaatggaagcaactgtgtgaaaactacaccagttaacttataaaatttcaatgacagaggatgggtaggtagtgaccgcaagaacacaatacattctgagaaatgtttcaatgttatcattttaaagtaaatcttagaattcctattagtgtaga

SEQ ID NO: 575529 - DNA, 624 bp, Homo sapiens
tttttttttttttttttgagatggagtctcactctgttgcccaggctggagtacagtggtgcgatctcggctcactgcaacctccacttcccaggttcaagtgattctcctgcttcagcctcctgagtagtcgggactgcaggcgcatccccaccatgctcagctaatttttatatttttagtagagacagatttcaggctggtctcaaactcccgacctgaagtgatccacctgcctcggtctcccaaagtgctgggattccaggtatgagccaccgcgcctggtcccatgggaagtttttacattgcgtgggatacttaaaagagtggatgcatttgtggcaccattattcacttttttgacttccttataataaaggattgatatttctgatccacagaagagagtggaatcattgttttagtccattctcacgctgctaataaagacttacctgagactgggttatttataaaggaaagaagtttaattgacccatagttcagcatggctggggagrcctcaggaaacttacaatcatggtggaaggggaagcaaacatgtccttcttcacaaggtggcagcaagaggaagtgctgagcaaaagggagaaaggcccctta

SEQ ID NO: 575530 - DNA, 587 bp, Homo sapiens
aatatatttgctttttcatttctgattgtatttatttggatcctctctcttttcttctttattagtctagctagtggtagaggtattttattaattttctcaaaaaatgcctcctgtattcattgatattttaaatggcttttcatgtgtcagtcttcttcagttcagctctaatttcggttatttcttgtcttctgctagctctgggattggtttgctcttggtttcctactttttgttgtggtgttgggttgttaacttgagatctttctttatgatatggactttaagagctctaaatctatcttaacactgctttagctgtgtcccagagattcttgcatgttgtatstttgttctcattgttttaaaaaacttgatttctatcttaatttcattatttaaccgaaagccattcagagcaggttattcaatgtaaatgtacttgtatggttttgagtgaatttctttgttttgatttctaatttcattgtgctatggtcagaaagattgtttattgtggtttcagttcttttgcatttgctgaaaagtgttttacttacaattatgtgattgattttagagta

SEQ ID NO: 575531 - DNA, 577 bp, Homo sapiens
gaatacatacatttttcaccataaaataaaaagaattatcatggcagaaggaaagaaaatcagaatttgaaaagcccttattatcaggtagacacaatagcacacttatctctcaatattatctcatttcagcctcatggctctgagaaataagaaatattatctcctttgaaaagataaataaataggggctgagagatgttatgtgacaaacccaaaaccacaaaacagagtttggacatctttaaatagagagttccaaattctagattatagattagattgctgaaatggtttggctgtgtccccacccaaatctcattttgaattgtagctccsgtaattccaagttgttatgggagggacccagtgggaagtaattaaatcatgggggtggttctttcctgtgctattctagtgatagtgaataagtcttacaagatatgatgttttataaggggagttccctgcacaaactctcatgcctgccaccatgtaagacatgtcttgcttccccttcaccttccatcatgattgtgaggcctccccagccatgtggaactgtgagttcattaaa

SEQ ID NO: 575532 - DNA, 517 bp, Homo sapiens
cagaatttgaaaagcccttattatcaggtagacacaatagcacacttatctctcaatattatctcatttcagcctcatggctctgagaaataagaaatattatctcctttgaaaagataaataaataggggctgagagatgttatgtgacaaacccaaaaccacaaaacagagtttggacatctttaaatagagagttccaaattctagattatagattagattgctgaaatggtttggctgtgtccccacccaaatctcattttgaattgtagctcccgtaattccaagttgttatgggagggacccagtgggaagtaattaaatcatgggggtggttctttcctgtgctrttctagtgatagtgaataagtcttacaagatatgatgttttataaggggagttccctgcacaaactctcatgcctgccaccatgtaagacatgtcttgcttccccttcaccttccatcatgattgtgaggcctccccagccatgtggaactgtgagttcattaaa

SEQ ID NO: 575533 - DNA, 503 bp, Homo sapiens
aattaaatacctaggaattagccatgaaagtgaaagatctttacaaatgaaacgtataaaacactgatgaaagaaattgaagagataccaaaaatgaaaagacatttcatgttcatggattggaagaatyaatattattaaaatatccatactactcaaagcagtctacagagtcaatgcaatctccatcaaaataccaatgacattcttcacagaaataggaaaaaccatcataaaatttatatggaatcacaaaagaccataacagcaaaagataccttgagcaaaaagaacaaaactagtggaatcacattacttgacttaaaattatgctatagagctataaagagtaaaacagcatggtactgacataaaaacagacacatagaccaaaggaccagaatagagaacccagatacaaattcacacacctgcagtaaactattttttgacaaacatgccaagaaaattaactggggaaaagacagtcacttcaataagtg

SEQ ID NO: 575534 - DNA, 503 bp, Homo sapiens
aattaaatacctaggaattagccatgaaagtgaaagatctttacaaatgaaacgtataaaacactgatgaaagaaattgaagagataccaaaaatgaaaagacatttcatgttcatggattggaagaatcaatattattaaaatatccatactactcaaagcagtctacagagtcaatgcaatctccatcaaaataccaatgacattcttcacagaaataggaaaaaccatcataaaatttatatggaatcacaaaagaccataacagcaaaagataccttgagcaaaaagaacaaaactagtggaatcacattacttgacttaaaattatgctatagagctataaagagtaaaacagcatggtactgacataaaaacagacacatagaccaaaggaccagaatagagaacccagatacaaattcacacacctgcagtaaaytattttttgacaaacatgccaagaaaattaactggggaaaagacagtcacttcaataagtg

SEQ ID NO: 575535 - DNA, 503 bp, Homo sapiens
aattaaatacctaggaattagccatgaaagtgaaagatctttacaaatgaaacgtataaaacactgatgaaagaaattgaagagataccaaaaatgaaaagacatttcatgttcatggattggaagaatcaatattattaaaatatccatactactcaaagcagtctacagagtcaatgcaatctccatcaaaataccaatgacattcttcacagaaataggaaaaaccatcataaaatttatatggaatcacaaaagaccataacagcaaaagataccttgagcaaaaagaacaaaactagtggaatcacattacttgacttaaaattatgctatagagctataaagagtaaaacagcatggtactgacataaaaacagacacatagaccaaaggaccagaatagagaacccagatacaaattcacacacctgcagtaaactawtttttgacaaacatgccaagaaaattaactggggaaaagacagtcacttcaataagtg

SEQ ID NO: 575536 - DNA, 613 bp, Homo sapiens
taagacctcagactataaaaatactacaaaaaattgaggacactcttaggactttggtctgggcaaaaaattattgagtaataccccacaagcacaggcaaccagagcaaaaaggaacaaatgggatcatatcaagttaaaaagcttttttagagcaaattaaayaattaagaaagtgaagagacaacccacagaatgggagaaatatttgcagactacccatatgataaggaattaataaccagaatatataggggcctcaataactctataggaaaaaaaaataataattcaattaaaaatgggcaaaagagttaaatagaaatttttcaaaaaaagacatacaaatggcaaacaggcatgtaaaaaagtgctcaatttctttttagagaaaagtgctcacttctcatcagagaaatgtaaatcaaaactacaatgagacatcttactcggctaaaatagcttttattcaaaatttaggcaataacaaatgctggtgagaatgtggagagaagagaaccctcatatactgttggtggcaatgtaaattattacaaccattatggaaaacagtttggaggtccctcaaaaaactaaaactagaaataacata

SEQ ID NO: 575537 - DNA, 547 bp, Homo sapiens
aatatgacaatactagaaaaaagaaaggtaagtgttgaaaccagtagctgcattttcagtatgataatctatttccatttacaacatttttttttttttgctgatgtctgtacttgtgagtgtataagaaagtttctcatccatggtaaagggcattaatgaaattactgtgtgacactccttgaaaaatgagagaaatatayatttagtttccataatgaaatccatatttgcttggtcatggcccaaattggttttgaaaagtatatatttcactgaggcagatgaagtgtccaaaattaataaggataaaaaataagaaaaatttaaggagaaaattttcaattaaagatgagtaactgttgattactcaggtccaagaatcaatactgattaatgttatgtaatgtagcagatcttgccaggatgaagatatttgagtgtaagctcagaatcataagaaacagcttctttgtaacttgcattttatagctgcccacatcatcctattctatatccataggctagaacttcagtctaactgagt

SEQ ID NO: 575538 - DNA, 559 bp, Homo sapiens
tcccacatttctgctgctgggtgtaaactattaagttccactcattctctaagtgataatgatttggtccctgcagtcagaggtcacaggactgtcacccagtggtatcttaccataaataaatccaaacattgatattaattaaagttgcaatattattttgtggcaggatgctatgggaggaatcagtttctgataccacctgaagagaataataaataaatggttctttttaaatatatgtcagataatgtcatacttctgcacaaaaccagccatttcccaattcactcagagacagactacaatgacctatatgatctcctgcctctgtccttatccctacctcactcagtgtaccagctgctrtgttcacagtgaaatgcaggtcaccgcttttattgtctttgcattacctattccttaaattttgaactttcttgtccaaaatattttgtgttgcattttctctgttccatcaggtctccattggtatatcatcctatcagttcagccttccctaacccccaatattaagtatcatcctctgacctcgttt

SEQ ID NO: 575539 - DNA, 606 bp, Homo sapiens
aagaaatacctcagccttggtaatttataaagaaaagtggtttaattggcacatagttctacaggacttacaggaggcatgaaattagcctctgctcgccttctgaagagacctcaggaagcttttattcatggcagaagacaaagcaggagtaagcacatcatatggcaagagcaggaacgagagagagtagaggtgaaggtgycactgcttcaaaatgaccagatcttgtgagagcttactcactattgcaaggacagcaccaagccatgaaggatccaccctgatgacccaaagacctccaccaggccccacttccagcactggggattacaattcaacatgagatttgggtagggacaaatatccaaactatatcatctcccttctgtgtagtagtccatagtatctattgtttccagtttatgtgcatgtgtgctcaatatttagctaccacttataagtgagaatgtgtggtatttcattttctgttcctgcattaattcacttaggaccgtggcctccagcttcatccatgttgctgtgaaggacatgatttcatcctttttaatggctgtgtagtattccatggtatatatgtaccac

SEQ ID NO: 575540 - DNA, 606 bp, Homo sapiens
aagaaatacctcagccttggtaatttataaagaaaagtggtttaattggcacatagttctacaggacttacaggaggcatgaaattagcctctgctcgccttctgaagagacctcaggaagcttttattcatggcagaagacaaagcaggagtaagcacatcatatggcaagagcaggaacgagagagagtagaggtgaaggtgtcactgcttcaaaatgaccagatcttgtgagagcttactcactattgcaaggacagcaccaagccatgaaggatccaccctgatgacccaaagacctccaccaggccccacttccagcactggggattacaattcaacatgagatttgggtagggacaaatatccaaactatatcatctcccttctgtgtagtagtccatagtatctattgtttccagtttatgtgcatgtgtgctcaatatttagctaccacttataagtgagaatgtgtggtatttcattttctgttcctgcattaattcacttaggacygtggcctccagcttcatccatgttgctgtgaaggacatgatttcatcctttttaatggctgtgtagtattccatggtatatatgtaccac

SEQ ID NO: 575541 - DNA, 563 bp, Homo sapiens
aaaaaggcaaacactttgaagacaaaataggcctgagcacatgaccttccatgtcttttgcctgagtcactatattccttgaaagacgaatgacccttgtttttgccttttcctacacataaaataatgtctgatggggttagtgattatacctctgtaatmtataatgagaattattcttatacccaaacctagatgtgattctgctttaatataacttctgagcaagtgtgatgtgattttgtacatactgaacccctaacacaggtcgctaagcagtgagctgaagccctgtgctggaacgatctgacagaactgctcttgggttctgggtctcagtcctcagtaggacttttgaataaaactaacttcaattctttaaaaaagagagagagacagacagaaagaaacaggaaaaaaaaggacacaaataaaatgtttctcttagccactaatgtgtgtgcacttccacaaggcagaattaaagaaattgtgcatctgcattttgagttatttatagaataattaacatcccttcaatatactgttaaatgaacaagcat

SEQ ID NO: 575542 - DNA, 563 bp, Homo sapiens
aaaaaggcaaacactttgaagacaaaataggcctgagcacatgaccttccatgtcttttgcctgagtcactatattccttgaaagacgaatgacccttgtttttgccttttcctacacataaaataatgtctgatggggttagtgattatacctctgtaatctataatgagaattattcttatrcccaaacctagatgtgattctgctttaatataacttctgagcaagtgtgatgtgattttgtacatactgaacccctaacacaggtcgctaagcagtgagctgaagccctgtgctggaacgatctgacagaactgctcttgggttctgggtctcagtcctcagtaggacttttgaataaaactaacttcaattctttaaaaaagagagagagacagacagaaagaaacaggaaaaaaaaggacacaaataaaatgtttctcttagccactaatgtgtgtgcacttccacaaggcagaattaaagaaattgtgcatctgcattttgagttatttatagaataattaacatcccttcaatatactgttaaatgaacaagcat

SEQ ID NO: 575543 - DNA, 563 bp, Homo sapiens
aaaaaggcaaacactttgaagacaaaataggcctgagcacatgaccttccatgtcttttgcctgagtcactatattccttgaaagacgaatgacccttgtttttgccttttcctacacataaaataatgtctgatggggttagtgattatacctctgtaatctataatgagaattattcttatacccaaacctagatgtgattctgctttaatataacttctgagcaagtgtgatgtgattttgtacatactgaacccctaacacaggtcgctaagcagtgagctgaagccctgtgctggaacgatctgacagaactgctcttgggttctrggtctcagtcctcagtaggacttttgaataaaactaacttcaattctttaaaaaagagagagagacagacagaaagaaacaggaaaaaaaaggacacaaataaaatgtttctcttagccactaatgtgtgtgcacttccacaaggcagaattaaagaaattgtgcatctgcattttgagttatttatagaataattaacatcccttcaatatactgttaaatgaacaagcat

SEQ ID NO: 575544 - DNA, 425 bp, Homo sapiens
aggattggtgttgttataagaagtgacaccggaaagctgtccctctctctctctgtacacacacagagaaaggtcatgtgaggacacatgaaagcggccatctacaggccagaaagggagactttatcagaaaccaaatttgccatcaaaccttgattatgaactcctgggctccagaggtttggggaaaaataatgtctgtttttttaaactgtccagtctgtggtatttygttatggcagcctgagcagaccagcaaacctggtcatcaaatggggcgaagagcctttattcagatgtcagctttttcatttgtatccttaaaaggtccatctaactgcctaaaactcaaactcatgatcttttttttttttttttccaacttttattaagttctggggttacatatgcaggatgtgcaggtt

SEQ ID NO: 575545 - DNA, 432 bp, Homo sapiens
aggtgccatcatttatttgatgtggaagtccccccactgatcgcttcgtatcaatttttgcctccttctaaccagttctctcctgaagccacggggacacctttaaaatgtcaaactagccaggcatggtggctcatgcctgtaatcccagaactttgggagaccaaagcaggcagatcgcttgagttcaggagtttgagaccagcctgggcaacatggcaaaaccttgtctctacaaaaaatacaaaaattggcctagcatggtggtgcacgtctgtggtcccagctacttgggaggctgatgcgggaggatcacttgaaaaggtcgaggctgcagygagccgtgtttgcaccactgcactccagcctgggccacagagtgagactctgtctcaaataaataaataaataaataaataaaattatcaaact

SEQ ID NO: 575546 - DNA, 436 bp, Homo sapiens
ataagaatcaggcagaaggagatttgactatggaggagaaagcaatgtgatgacagaaggaggaaagatttgaacatgctctgctgtcggatttgaagaaagaggaaggggatcatgagtgaaggaatccrtcatacagctctagaagctgaaaaaggtaatagattattcctttagagcctccagagggagtgcaaccctgctgacaccttgacactggaccagtgaaactaatttcagccttctagcatcaagaattgtaagaaggcatttaattgttttaggcaactaaatttttgataatttgttacataaaccaaaggaaattaatacaaggacacttcccatgaattcaatatcattgaacagttacgctttcaatgcaagggagtactagaaaaatacacttactagtgcagagagacaataaagaagc

SEQ ID NO: 575547 - DNA, 436 bp, Homo sapiens
ataagaatcaggcagaaggagatttgactatggaggagaaagcaatgtgatgacagaaggaggaaagatttgaacatgctctgctgtcggatttgaagaaagaggaaggggatcatgagtgaaggaatccgtcatacagctctagaagctgaaaaaggtaatagattattcctttagagcctccagagggagtgcaaccctgctgacaccttgacactggaccagtgaaactaatttcagccttctagcatcaagaattgtaagaaggcatttaattgttttaggcaactaaatttttgataatttgttacataaaccaaaggaaattaawacaaggacacttcccatgaattcaatatcattgaacagttacgctttcaatgcaagggagtactagaaaaatacacttactagtgcagagagacaataaagaagc

SEQ ID NO: 575548 - DNA, 608 bp, Homo sapiens
tcttttcttttcttcttggtattttattttctttttcttcttcttctttttktttttttaacaaagtctcactctattgctctggcaggagtgcagtggtgcagtctcggctcactgcaacttccgcctcctgggttcaagcgattctcctgcctcagtctcctgagtagctgggattacaagtgtgcaccaccatacccggctaattttgtattttttagtagagatggggtttcaccatgttggccaggctggtctcaaactcctgacctcaggtaatctgcccgcctcagcctcccaaagtgctgggataacaggtgtgagccactgcacccagcctcttcttggtattttaaaatgttgttacttttactagaatgtttatgagcttcagaatctaaggtcacacgttcgtttctgtttatccagtttaagaaacagttttgctattttgtaaaacaaattgggaacccttccatcatatttgtaatctgtaataaaataacatggaattggaatagtaattttcttggaaatatgaaaaaaatagtaaaatagagaaaataattttaagtgttagtatttttatttctttattatttttagtt

SEQ ID NO: 575549 - DNA, 608 bp, Homo sapiens
tcttttcttttcttcttggtattttattttctttttcttcttcttctttttgtttttttaacaaagtctcactctattgctctggcaggagtgcagtggtgcagtctcggctcactgcaacttccgcctcctgggttcaagcgattctcctgcctcagtctcctgagtagctgggattacaagtgtgcaccaccatacccggctaattttgtattttttagtagagatggggtttcaccatgttggccaggctggtctcaaactcctgacytcaggtaatctgcccgcctcagcctcccaaagtgctgggataacaggtgtgagccactgcacccagcctcttcttggtattttaaaatgttgttacttttactagaatgtttatgagcttcagaatctaaggtcacacgttcgtttctgtttatccagtttaagaaacagttttgctattttgtaaaacaaattgggaacccttccatcatatttgtaatctgtaataaaataacatggaattggaatagtaattttcttggaaatatgaaaaaaatagtaaaatagagaaaataattttaagtgttagtatttttatttctttattatttttagtt

SEQ ID NO: 575550 - DNA, 262 bp, Homo sapiens
tgactcattccattgtttatttgcttacttcatgtaacatgcgccttgttctgccaggccctgtgagggctacaggtgtggttgtgtgcctgtgtgtgagagaacatatgtggacatgtgtrttcatgtgtacatgcacatgcacaagtgtgcatgtagggggcacaatgcaaattcatcccactcagagatcaggctctgggagacaggctgatttggcaggtgctagatgcctactcctccatttccattgaaaggcatg

SEQ ID NO: 575551 - DNA, 577 bp, Homo sapiens
taagactttgggggactgttgggaaggtatagatggttttgcaatgtgaggatatgagatttggcagtggctaggggtggaatgatatgatttgcctctgtccccactcagatatcatcttgaattgtattcccataattcccacatgttgtgggagggacctggtgggagatgactgaatcataggggcagtttcccccatactgttctcatggtagtgagtacgtcccatgggatctaatggttttatcaggggtttctgcttttgtgtcttcctcattctctctttgcctgctgcctttcatgtaagatgggacttgctcctccttgccttccaccttgattgtgagctcccccagccacatggaactttaagtccaattaaacctmtttctttttaaacctctctatttcttttgtaagttgcccagtcttgggtatgtctttatcaggagcgtgaaaacttcttgataactgccccaaatttttcactgataggccccagtgaccaagttagctcagtatttacctggtgatatgtttggttctgtccccacaaaatcgcatcttgaattgt

SEQ ID NO: 575552 - DNA, 614 bp, Homo sapiens
tgatacatattatctagtttctgctgatatagattagaaaattcttgcaaactttttggagaatatttcctcttatgtagacattgtactactgatcccactaaagcatactgggatctgaccctggtgtgtttagcgacaatgaacgayggttatagtaggtcatgacaagaaagagcaccccttgcaagacaactgccccagccaaggttacagcagggtcttcaaagaaggaaacattggcttcttcagacatagaatagcaggcctcttccacagacaaggaaagctctaagtaactcagggttacaagattttcagctgcatgtcagtccaaccagatattctttttccatatctcagggtcgcactccttcctaaacaaagctctattttgtacatgagcaacttgtgaggctgaaaagtaaaactttcttttttattttacaatatataaaatcaaactgggtgtgattttcaatgaggtcagttccaagcttgcaataaaaaagagagtcttttaggaccacccataaaactccctgattctgtgatcttgattgagctgagactgaagaaaggagctcatcaggttttcttctgcaagctcgtca

SEQ ID NO: 575553 - DNA, 614 bp, Homo sapiens
tgatacatattatctagtttctgctgatatagattagaaaattcttgcaaactttttggagaatatttcctcttatgtagacattgtactactgatcccactaaagcatactgggatctgaccctggtgtgtttagcgacaatgaacgacggttatagtaggtcatgacaagaaagagcaccccttgcaagacaactgccccagccaaggttacagcagggtcttcaaagaaggaaacattggcttcttcagacatagaatagcaggcctcttccacagacaaggaaagctctaagtaactcagggttacaagattttcagctgcatgtcagtccaaccagatattctttttccatatctcagggtcrcactccttcctaaacaaagctctattttgtacatgagcaacttgtgaggctgaaaagtaaaactttcttttttattttacaatatataaaatcaaactgggtgtgattttcaatgaggtcagttccaagcttgcaataaaaaagagagtcttttaggaccacccataaaactccctgattctgtgatcttgattgagctgagactgaagaaaggagctcatcaggttttcttctgcaagctcgtca

SEQ ID NO: 575554 - DNA, 629 bp, Homo sapiens
tatggaaaacagtatagagatttatcaaaaattaaaaatagaaataaaacatggtctatcaatcctactttttgatatatatacaaaaatttaattagtatgttgaaaatatgtctgtattcccatgttccttgcagtgttattcacaatagtcaagatatggaatcaacctttgtctatcactgaatgaagagaaataaaatgtggtatatatactggaatactactcagccttacaaaagaaggaaatcctgtcattctgtctgtcacttgagacaacatgaatgaacgagaaggacattattttaagcgaaataagccatttagatgaaaggaataaattcaagagattccattcaagaatacaacatggtgactatagttaatgacaatgtgttgtattcttgaaaatcactaacagagtagattttaagtgctctcatcaaacaaaaaatgataaatatgtgaggttatacatgttatttagctcaatgtagtcattcaacatgtatgcatacttcaaaacattgtgttgtacacaataaatacacttttgtcacttacwgtatacacttttgtcacttttgtatacacttttttgttaattaaaattaattaaaaatagtaaa

SEQ ID NO: 575555 - DNA, 629 bp, Homo sapiens
tatggaaaacagtatagagatttatcaaaaattaaaaatagaaataaaacatggtctatcaatcctactttttgatatatatacaaaaatttaattagtatgttgaaaatatgtctgtattcccatgttccttgcagtgttattcacaatagtcaagatatggaatcaacctttgtctatcactgaatgaagagaaataaaatgtggtatatatactggaatactactcagccttacaaaagaaggaaatcctgtcattctgtctgtcacttgagacaacatgaatgaacgagaaggacattattttaagcgaaataagccatttagatgaaaggaataaattcaagagattccattcaagaatacaacatggtgactatagttaatgacaatgtgttgtattcttgaaaatcactaacagagtagattttaagtgctctcatcaaacaaaaaatgataaatatgtgaggttatacatgttatttagctcaatgtagtcattcaacatgtatgcatacttcaaaacattgtgttgtacacaataaatacacttttgtcacttactgtawacacttttgtcacttttgtatacacttttttgttaattaaaattaattaaaaatagtaaa

SEQ ID NO: 575556 - DNA, 527 bp, Homo sapiens
tataccttggaacaaatggacttaacagatatgtacagaacatttcatccaacaaccacagagtacacattctattcaacagcacagagaactttctccaagatagaccatataataggccataaaacaagcctcaataagtataagaaaattgaaattatatcaaggactctctaagaccacagtggcataaaactggaaatcaactccaaaaggaaccttcaaaaccatgaaaatacacagggaaattaaatagcttgctcctgaacgagcactagatcaaaaacaaaatcaagatggaaattaaaaaattcttctaactgaacaataatgaygcaacctatcaaaacatctgggatacagcaaaggcggtgctaagagaaaagttcattgccctaaatgcctacattaaaaagactgaaagagcacaaacagacactctaaggtcacacctcaaggaactagaggtaacaagaacaaaccaaactcaaacccagcagaaaaaaggaaataaccaagatcagagc

SEQ ID NO: 575557 - DNA, 308 bp, Homo sapiens
gaattctcttcaactttcaggtcagagagtcagtgatccatgaaaccatgcaattggaagtattttcttgcagaggattacattaaataaattccaactcctattaagtcytatgattctgagaatacatgtttggaaaactaaaatttagggcttaataatcatttttgagtaagtgatcccaagtctcatgtaatcacttcagcacaggtattagtgttcctattttattgacagaaggaaaggaaagggaaggggaaggggaaagggaaggagaaggggaaggggaagagagattctgagagatt

SEQ ID NO: 575558 - DNA, 616 bp, Homo sapiens
attattaaattattattattactgtattctgttttacagaggagaaaactaaaacataaagacattaattataagctgtagagcagaaatatgagcctcgtagagtagttaagagtagattctgcactcttaaactactcaattcagccactagattatatgtggtttgagaatttgtcttgttcttgttcttatacagagggcaacacagagtaaaatcttttaagaactaattgtcagaaaatctggcctctactggaaaatcttgtatgttttctttagtcaggtcatggaaatgacattatcatttgttacagtctttaccttagacgtgtcagaaagaccagaataaaatgtaatgttcaaaaacaatagttaacatttgctaggatattggtacaaattattcctcttctttcaatataatttggataatatatttctattttattaaggaagtaggatacgtgtattactgcaaaataaattttggacctagatgaatgaaatttacaartaggtaatttataaataagtattttacctctataatatcatattgcctaatccagtgtattttctgtagctgacatacaatatatattgtttgattagg

SEQ ID NO: 575559 - DNA, 653 bp, Homo sapiens
atcccaaatattttctaacacttagtccatgttcaattttccccacttgttacaagaatgtcttttcacagatttgttcatatcaggatctaaagaagggcaaaacattggacttggttaatatgcctcttaagttgcttgtcatctataacttgttctcatgcattttgttaaagaaattggatcatttttttctgtacaaatttttacatttttatttcactgattgcattttgtagtgttatcagcatcttgtattattcgtatttccatgtttttctgcacttgcagacctagaagyttgaatagattgaggtttaattgttttaacaagaatatgtcatagggggtgatatatatttcaaaataccaatgctggccaggcacagtggctcacgcttgtaatccgagcactatgggaggcccaggcaggcgggtcacttaaggtcatgagtttgagaacagcctggccaacatggtgaaacccatctctactaaaaatacaaaaaattagccaggcatggtggtgggtgcctgtaatcccagctacccaggaggctgaggcaggagaattgcttgtgcccaggaggtggagactgcagtgagccaagattgcaccactgaactccagcctgggcaacatagcgagaatc

SEQ ID NO: 575560 - DNA, 584 bp, Homo sapiens
aatcagcttgattctacagatgcttgctaccccatatcatgaaagtagatttaagccggtcctatgaatagcaaatccaggctgtaagagtctacttggatagacaaaagcctcaattataaaaacaaaacaagacaaaacaattcaaagcttacctgagagtctgtagtttacactctgggtgtttcaaggcytcacacaatgactttactccattatcccctatatcactcccttttaggtcaagatgcatcagattcttgttatgaatcaaagaagtagagatatcctgacaaccatcagggaaagtgataaatttcaaccttcagaagaaaaatatgcaggaggtattacaaaaccatttctctccttggttacaggatccctttcttttcaatctaattcttggatattacatgaatattcttttatcttattttcatctaaaacaattgggttataacttcaatttctatttatgacctgataattgacactccccagttttttttaccttaacggaaaagaaggtgataacatcatgaaaagcagaagaggagcctctttaacttgtaatcccagga

SEQ ID NO: 575561 - DNA, 470 bp, Homo sapiens
gcctatctgcctccgtccaccacacagtgagcatctgcattttttatgactctggaagctacattttgaaaattattggtcatggaccctccctggcttgaatgtgcagagacccaaagcaccagctttgatgggggtcctgggagcagtcaccagatgcctagagatgtacccagggtaggagtgaagaaactgccttgcatgggaagagagggatagcccaagttcctagtccaagatgttgcagattcttcatagcaaataattgaagaatctaagaatatgactgtggcttgaaggcatagaattttccataattttggttaatgtcacataactaagaacaaaaattggagtcaagtctgacaagacagcaagggatttaggggccaagatcmtgatgaaaagggaatctttaagcagccaacctaaaacttggtggttttctcttcaaacattagcagaattct

SEQ ID NO: 575562 - DNA, 605 bp, Homo sapiens
taatccaccacaatccattaactatttgagaaaataagttacatttattgaagtaaattccagattaatttcttatgtttagatgaggagatagatgaaagtagaatataatcagaaaatgtttcctagttttaagatggaaaaacatgtgtaaaatgaacagatataaaacaatggggaaatacagagttacataaattttaaraaagtgtggcagacaccatgaataaaagtaaaaaacaaaactctgagatatcccatttgccacaactgtgatccacagaatttaaataagatgttaatacattaaaaacccctacagttttaatcaataaaccacataaacagccctttactaaatgacaacccaaaaaataatttttacctttcttatctaatatctatccatccgtctttttttctcttattcctatatgcaccacgggctggagatgtacaggtagggtaaaaagaaacattatgcctaccctcaaagaacatacagcctaatgtgggagacaaatattcacagagacacatgtaaaatataattgtgataactgctaaaaggaagagtaaggtgctgcacaagcgtacaactgaaa

SEQ ID NO: 575563 - DNA, 505 bp, Homo sapiens
ttcagaaaagaaatattcagaaaccacagagataaaacattacaaacaaagaaaatggcttaaaaaatgttaatactacatagctctggatactgaagtaatgagcaagttatattccttatttttctacacttactagaacttatattaatatcacaattttattttctcttacaaagtattaacaagaatgaggaataaacaaaaatgaagaagatagggagttaaggcaaaagttaagaagttctccaggtagaagctgaggcaggaggatcacttgagctcaggagtttgaggccagcctgggcaacacagtgagaactccgttcccagaaaataaaataagygatacagtttaaaaaaaaaaaaaaaaaggaaaaatggaagattactagaaatcactctagtataaagttgacttcttttctttaaaataaagaataacattcaaagttaggtggggtaattttcattgatgtagcacttaccatgtaccatgcactgt

SEQ ID NO: 575564 - DNA, 591 bp, Homo sapiens
taaatatcttctagctatactagctaccaaataggcatcattttcctaatggaaaactatgaactcacccgagcctctgaatgttacagtttggatatctcaaagcatcacacagaattttcactccatcatcctgcaaatcgttgttcccaaggtccaggctcctcaggtttgggttattcaaaataacagaagccagatccagacaacatgcattagtgagaacacagcccatcaatctgtaagaattacaataggaaaagtgaatccttccattgtgaggttaaataagtttcttcctaggagatatacccaggtatttgaacctcttttctcactcttttctatctacaatccaggacatacatgggagggtctaatttatcagtaaaaatgatgggatttcttaatgagcagaataaaccagcaggtaaaactgttttcttccacaaacaggttatctacagagctttaaaaatcaagggtataaacatttatttttaccaatacttaaaaaaatgaatataaactttcccaaggaacyaatagatctctgtgctttcagtttttaatatatctttaagtgaaaaa

SEQ ID NO: 575565 - DNA, 580 bp, Homo sapiens
agctccatggactagaagaacaggcagatggagtagaataagagtaatcttaataaagtaagtactctttgtaygtaatagaagcggcattttcaaacagtaaggaaaatccatattatgccattattgcttttgtacaatagatctgatatatgggggaaaataagtttaagccttataacaaaataaatttggaataatttaacatgtaaacgttaaaattaaaccatgaagagtatgagatgacatatgtgtattttttttaaaagaaaggtacttccaaactccttgaggtcatgaggcagaatttgacatcacaaaaaattttaaacttatctgttctaaaaatgaccataaagaaagttagaaataaagcaacatgctaagaaaattatttgtaatatataaaaaataataatatatgtgatattaataactataagatatatataatagaaaacatcagaaaaaaacagcccatgaagaggaaattcctaaatataaaaggccaaaaacatttgaaaagatgctcaagatttaaattactttaaaagttacttttcaactatttaattaatac

SEQ ID NO: 575566 - DNA, 610 bp, Homo sapiens
gcaaaaatggacaaatgggatcatagcaagttaaaaagcttctgcacagcaaaagaaacaaccaataaggtgaacagacaacccataaaattgaagaaaatatgtgctaactayccatttgacaaggggctaataacgagaatatattacataaggagttcaaacaacactacaggaaaaaaatctaattatccaattaaaatgggcaagagatctgaatagatatttctcaaaagaagacacacaaatggcatatgcaaagatgctcaacatcattaataatcagagaaatgtaaatcaaaactacaatgagaaattacctcactccagtaaaaatgacctatccaaaattcagtcaataacaaatactggtgaggatgtggagaaaaaggaaccctcatacactgttagtagcagtgtaaattaacacaactattatggagaacagtttggaggttcctcaaaaaaaccaaaactagagctaccgtatgatccagcaattccactgtggagtatatacccaaaagaaagaaaatcagtgtattgaagagatacctgcactcccatgtttactgcagcactattcacaatagccaagatttggaagcaa

SEQ ID NO: 575567 - DNA, 465 bp, Homo sapiens
ttatttctattttttaaaaatccaaaattttaaattgggattcaaaaggaaaatgaactgtaagggccaaccaaaccaaacacatctttcatgatccaaggaactgcagaaaggggaccaagggtgaatatctttaaacacatcctggcaaaatcgttgtagcgaaaatctacatctacattaaaggcatcaaagaaaacactataacttcttgtggtgagacagtggctaggcactgaaagatacaaaggcatgtgagatgtagttcttcctctcaaaactttttcaataacatttgggcagttaagatattacatgcataaaatgattttcatgaagggaaccatgatgaaccaaatgatagctgcagaagagttatacayggttcagaacagggaagacttggaggaatcttctcaaagaatcttgaaattaaattggaaatttaaacatggggaggaattc

SEQ ID NO: 575568 - DNA, 616 bp, Homo sapiens
agacaatgttatagttttagtttatgacacaacatggtttataaagaaattaaaattaaaaagtcaaaaagaaaaaaatgtcttttgcatttatccacaattggccatttctgatgtgttttattctttatcaagatttgagtttccattgtatatcattttcttccgtgatgaaattcccttaggatttctttttgtatgggtctgctggcaaaacacattattttatatttgttttatctgaaaatgtcatttaacctttattcttgaagaatattttctgtgaatatagatttcyagtttatagggttttttgttttgttttttgcctttcagcattttgaaactctgttccactctcttctggtcaccatggtttttaatgagaagtcaaccattaattgaattatttcccagagcgtattatttttcttttggtgcctttaagatttacgtgctgcctttggcttttgaagctgactgttatgtgcttttattcttttggtctcttttttccttcaacttttattttaaattctggggtacatgtgcaggatgtgcaggtttgttacataggtaaactctggtttgctgcacagatcaacctatcacctag

SEQ ID NO: 575569 - DNA, 616 bp, Homo sapiens
agacaatgttatagttttagtttatgacacaacatggtttataaagaaattaaaattaaaaagtcaaaaagaaaaaaatgtcttttgcatttatccacaattggccatttctgatgtgttttattctttatcaagatttgagtttccattgtatatcattttcttccgtgatgaaattcccttaggatttctttttgtatgggtctgctggcaaaacacattattttatatttgttttatctgaaaatgtcatttaacctttattcttgaagaatattttctgtgaatatagatttccagtttatagggttttttgttttgttttttgcctttcagcattttgaaactctgttccactctcttctggtcaccatggtttttaatgagaagtcaaccattaattgaattatttcccagarcgtattatttttcttttggtgcctttaagatttacgtgctgcctttggcttttgaagctgactgttatgtgcttttattcttttggtctcttttttccttcaacttttattttaaattctggggtacatgtgcaggatgtgcaggtttgttacataggtaaactctggtttgctgcacagatcaacctatcacctag

SEQ ID NO: 575570 - DNA, 361 bp, Homo sapiens
tgctacattttctctgcaaccttgccaacatctgttgtttcttgactttttttttcaagttctgggataactggcatgagatggtgtctcattatggtttkgatttgcattcctctaatgatgtgatgtgctttagattgagctgttttgtgtttattttgtttgatgttcactgagcatcttgtatttgccaaggtatgtctttcatcacatttttagctgttaatttgacaaattgtttttctacttctttatccattttctctcctagaattttaattacacataaattgggcagatggatatctcttcacaggcctctgacgcactaaaaacaaattttctccctgttcattttgaa

SEQ ID NO: 575571 - DNA, 361 bp, Homo sapiens
tgctacattttctctgcaaccttgccaacatctgttgtttcttgactttttttttcaagttctgggataactggcatgagatggtgtctcattatggttttgatttgcattcctctaatgatgtgatgtgctttagattgagctgttttgtgtttattttgtttgatgttcactgagcatcttgtatttgccaaggtatgtctttcatcacatttttagctgtkaatttgacaaattgtttttctacttctttatccattttctctcctagaattttaattacacataaattgggcagatggatatctcttcacaggcctctgacgcactaaaaacaaattttctccctgttcattttgaa

SEQ ID NO: 575572 - DNA, 625 bp, Homo sapiens
taataattttctgttgtttaaagcctccagtttgtggtcatttgctacagcaatgtcaggaaactaatacagtaacctttttaggtacatcctggaattcccaaggtattccagtcaattcccacagcatcctgtattttccctactctaygacttaccacattgtatattaacagcatgtttctgcattctctattagaccagaaactccgtgaaggcagagactacacctcatttatctttatatatccccagcacttatttcacattgttctttacatataataaatgctcaataaatttttgttacatgaggccaggtgctgtggctcatgcctgtaattccagctctttgggaggccgaggtcgggggattacttgaggccaggagttgagaccagctgggccaacattacaaaaccctgtctctactaaaagtacaaaaattagccgggcgttgtggcacaccctgtaatcccagctactagggaggctgaggcagagaatcgcctgaacccgggaggtggaggctgcagtgagccaagatcgcaccattgcattccaacctgggtgacagaggagactccataaaaaataaataaataaataaattaattaattaatt

SEQ ID NO: 575573 - DNA, 625 bp, Homo sapiens
taataattttctgttgtttaaagcctccagtttgtggtcatttgctacagcaatgtcaggaaactaatacagtaacctttttaggtacatcctggaattcccaaggtattccagtcaattcccacagcatcctgtattttccctactctatgacttaccacattgtatattaacagcatgtttctgcattctctattagaccagaaactccgtgaaggcagagactacacctcatttatctttatatatccccagcacttatttcacattgttctttacatataataaatgctcaataaatttttgttacatgaggccaggtgctgtggctcatgcctgtaattccagctctttgggaggccgaggtcgggggattacttgaggccaggagttgagaccagctgggccaacattacaaaaccctgtctctactaaaartacaaaaattagccgggcgttgtggcacaccctgtaatcccagctactagggaggctgaggcagagaatcgcctgaacccgggaggtggaggctgcagtgagccaagatcgcaccattgcattccaacctgggtgacagaggagactccataaaaaataaataaataaataaattaattaattaatt

SEQ ID NO: 575574 - DNA, 548 bp, Homo sapiens
ttgccctgttcctattgttgaaaacattaaaggccatatttaagagttggcactcacagttttgaggtcctgttgctgttttttgtcattttctcccaatattggggtagattgagtaataaaatgtatatccaagagagattgcccttctgggaagtctgggtctgaattagtacatttcctgagtgcctcagctaaatgaccctgaaactgtagaattttcatctttttcctgagttatttctctaatgactggcttaaccacacactttttcctctgcttcttttccatggcactgcaagcagacaacaatacttgtaactcatgacaatttaaattaaagaacatggtcagcttaacaaactcctctataaacttttctggattttatgaaaaccggccaaawttttccttgtataaagccaaattacacatagaaaatggcatatgtactctaagtgattccctcattttcactagctaacttgaacaattaatgtagggttgaatttaggggttgatgtgaggccccactcgtggtagtaac

SEQ ID NO: 575575 - DNA, 624 bp, Homo sapiens
aatggttaggctagactcaagctatctgcwttcagatcacttagtcattccaggtgttttgggctgtgagactcccttgaacagaaaccatggctatcaggcctcacccttcccagtctagtcttatgaagggaggggtacccatctcccatgccactacatgaacctgtgctacacttttctctttgttctgagtgggggggttcctccctgactcaagatcaccacgagcaggctttgtctgccagtctaaaggtctacacgggtcatggaactctcctgtagctaggatctcagaggtctatggcaggaatgttatgccctgaggttccttcactcatcccttccttggatctgggtccaggtctggaggctggtcctggcacccagcaatgctgagcaggcagccctgctctctctctcttcactcatggtgtcttctgttgcctctttattgaattttagtgttctctttcaaaaaatcttttcaacgtgtgaatgtttacctgatattttggttcatctttgtggcagaggctcatcctggctgccatctggaacccttccctccaaaatgttctaatttttttccttgctctgtttttctgtgttcctccaccaccc

SEQ ID NO: 575576 - DNA, 367 bp, Homo sapiens
tccctgccctgtttgatgtgtcaggcagaatcctacaatgctgcatatcagtggaaaccttgtaaatgaattccaacttctaaatatacgaaagagctttctaagacaatttctttctctgcagtaaataattctttgttaaaatgagtcagcagcctctatctgtatgatcaagatttggttttaggatcgctaaaagtaggggacttctatgtgctggggggacaaggctgtcttttcctaattttgctcacaaaaatggatatcagtaggagacagtggtggctttgccatataccagctgtgtgcccttcggcaagtcacttatcrtctctggaccttagtttccccattggtatgataagga

SEQ ID NO: 575577 - DNA, 550 bp, Homo sapiens
aaacccatctctactaaaaatattaaaaattaaaaattagctgggcctggtggcatatgcctgtaatcccagctactccggaggctgaggcaagagaattgcagaaacccgaatggcagaggttgcagtgagccgagatcatacctgtgagagagagggagactctgtctcaaaaaaaaaaaaaaaaagccaattttattttaaatatttgattaagaaattataattcgtatggccattattattgatactggcattaatagcagaagtrctaattaggaaaattcagtcaaaattgggtcgaatctacaaaagaatatgtagctatccagagctttgataaggctaagtacttttatgtgcctaatacaatccagccgtgagcaacctaaaaagcgttgcttattactcatgattgttcaaatgtactaagaatatttgagaaaattcataccaaagccatttatttttatcaaacatttttatgtctgtactacacaagctaatgtgttcccgtgttcatagctacatgtttacatttaaagaagta

SEQ ID NO: 575578 - DNA, 579 bp, Homo sapiens
tagtatattgcctaatttatgagctaatatatgtaaaacacttagaatattactggtaaataagaagtgctacgtaagtgcttactcacctgtaaaaaaaaggcgcagcaataataatacccatctcatgatgccatgatgattaaatgaggtaakgcatatcaggtataatatttagcaaagaaaccattttagatttttttttcaaaataatggcttaatgcagtaatctgtcttctaaataattttaaatttttttcatgaaaaaccctttttttaaccttgttttatcttgaggatagacaaggaagaattttccacaatattttaatgatgcaaatattttaatattgttatgtaactgacataaattgtattagccctcaaatgaagtaagttctctggtattactttctaatataaatgacttttgaataatcatgcttattttagaatgtaaacaattagaaaaattagacattttttagtgaataagcacaagtttggcattcttcaaaagttaatcattaatatttatatatgtacatatattctagacagaaatgttgctaatttgta

SEQ ID NO: 575579 - DNA, 518 bp, Homo sapiens
ctgttaggaaggcaacttccatgtcagcttgctgttattgcagctagaaatctatcagaagccatgttactattaatactgaattcttttttttaccgctttagtggaaatggcatcagtttctctcttaaaagtctcattccacagccagagctctaaattcccatctaagcttaccctttttattacctctttttcctcttaaaataagcccttctacaatcccacatctctatttatcagttcttttacagtctcctgcttcttcattaaygaactcctttgctttccccctgtttactccatagtggaattagctttctagagacacaactttattgaaccattcgtatcaagtacaatgaatgtattcataagtgccttaatttcctgatatgatatgacctttacattgcacattctttttttaaagaaatgaatgatgcatttaacttatttttaatacacttttgtcatatctagtgatctcctatgagattcttttttttttttttttt

SEQ ID NO: 575580 - DNA, 464 bp, Homo sapiens
  misc_feature 453: n = A,T,C or G
cctagctcttgcttctgctattccaaaccagctgcatcctctgctttcatacccctattgatgtttctttttataaaatgctttcccgttttcttttgtctattttacttttatagattcaattaaagtctatcttttgcaaaaaactttgccaaagaacacaaatgctgattttcytccagattcctaaactccttatagttcaatacaaaagtataaagtacttatcgaattatttatccttgtatactgtttatgctgaaatttcaaaatttcagttgttcaaactacattttttctcccacaacagtttttcacaatggtagatgagttgtattatgagaactcttactagaaagagttatgagaaaaaatatttgaccaccttactgtactccatcttggtttgattcactgtgccaatttgatttagccaccctaaagtgtacaganagagaaataac

SEQ ID NO: 575581 - DNA, 464 bp, Homo sapiens
  misc_feature 453: n = A,T,C or G
cctagctcttgcttctgctattccaaaccagctgcatcctctgctttcatacccctattgatgtttctttttataaaatgctttcccgttttcttttgtctattttacttttatagattcaattaaagtctatcttttgcaaaaaactttgccaaagaacacaaatgctgattttcctccagattcytaaactccttatagttcaatacaaaagtataaagtacttatcgaattatttatccttgtatactgtttatgctgaaatttcaaaatttcagttgttcaaactacattttttctcccacaacagtttttcacaatggtagatgagttgtattatgagaactcttactagaaagagttatgagaaaaaatatttgaccaccttactgtactccatcttggtttgattcactgtgccaatttgatttagccaccctaaagtgtacaganagagaaataac

SEQ ID NO: 575582 - DNA, 464 bp, Homo sapiens
  misc_feature 453: n = A,T,C or G
cctagctcttgcttctgctattccaaaccagctgcatcctctgctttcatacccctattgatgtttctttttataaaatgctttcccgttttcttttgtctattttacttttatagattcaattaaagtctatcttttgcaaaaaactttgccaaagaacacaaatgctgattttcctccagattcctaaactcyttatagttcaatacaaaagtataaagtacttatcgaattatttatccttgtatactgtttatgctgaaatttcaaaatttcagttgttcaaactacattttttctcccacaacagtttttcacaatggtagatgagttgtattatgagaactcttactagaaagagttatgagaaaaaatatttgaccaccttactgtactccatcttggtttgattcactgtgccaatttgatttagccaccctaaagtgtacaganagagaaataac

SEQ ID NO: 575583 - DNA, 464 bp, Homo sapiens
  misc_feature 453: n = A,T,C or G
cctagctcttgcttctgctattccaaaccagctgcatcctctgctttcatacccctattgatgtttctttttataaaatgctttcccgttttcttttgtctattttacttttatagattcaattaaagtctatcttttgcaaaaaactttgccaaagaacacaaatgctgattttcctccagattcctaaactccttatagttcaatacaaaagtataaagtacttatcgaattatttatccttgtatactgtttatgctgaaatttcaaaatttcagttgttcaaactacattttttctcccacaacagtttttcacaatggtagatgagttgkattatgagaactcttactagaaagagttatgagaaaaaatatttgaccaccttactgtactccatcttggtttgattcactgtgccaatttgatttagccaccctaaagtgtacaganagagaaataac

SEQ ID NO: 575584 - DNA, 604 bp, Homo sapiens
actatttaaaattaaacatagaaaggaaaagggaggaatctggctccaagccaaaatcttgtgtgtgatctttgaggccctgccaaaggtcattataaaagttttccatgcaggtcttgatgaagaaaactgacctccacagcttggtgtgcacagtcagtgcagcgcagagtctgaagggagttaccaacaaagtttaagcccacagcctccaccccacacatgcccaggctgaagctggccacaatttttcgtttttacttagatctgcatttctagctcgaatgcctccctagaggcctccttattaggagagcttcagcccaggccaatcccaggtatttccttgtggggagatatttaactactaacaacatgaattattattaaacaaagaaaatttaatttatttttgattctgtcttggtaaagctatacttatctagaattttaattcgttttccaacatattaattccaacattaatcatgttcattaattttatttataagatatatatttatgtataagatatacaayatttcgtgtcccttctttcatgcctcatgtctttatctgtgccttcccaattaagttaaaaagt

SEQ ID NO: 575585 - DNA, 630 bp, Homo sapiens
agactaagtccttcttttgtttttttaattttttttatttttttgagacggagtctcgctctcgtcgcccaggttggagtgcagtggtgcgatctcggctcactgcaacctccgcctccctggttcaagggattctcctgcctcagccttccaagtagctgggattacaggcacatgccaccactcccaactgatttttgtatttttagtagagacagggtttccccatgttggccaggctggtcccaaactcctgacctcaggtgatccacctgcctcagcctcccaaagtgctgagattacaggggtgagccactgtccccagcctttaagtccttattttcattatcataacttgacagagggctctgggaatgaaagcaatgtgtagatggctggacctaagaaagatgaggagaaagtagtaagacaartggatgtggaggcacattcttatatgatggttttctccatggccttaaataatactgaggattgataataaggtgaagggtgtaagctgatggcttctcacagataatcacttcactaaacattgccgcaatattctttatattgcttttgatataaccaaacatgccctcatatgataattatcaacttaggttt

SEQ ID NO: 575586 - DNA, 551 bp, Homo sapiens
tcacttccacctgagacggtgtcagctcggccttcactgtctatatttctatcagcattttggtcacaaccacttagcaagtctctaagatgttccaaactttccctcatcttcctgtcttcccctgaaccctccagactcttccaacctttgctcattacccagttccaaagctgcttccacattttcaggtatctttaaagcaatgccccacttctcagtaccaatttttagtattagtttkttcttgtgtgtcagagaaagaaatacttaagactgggtaatttatacagaaaagagttttaatttggctcctgattctgtaggctgtacaggaagtatgcagctgggatttgttcctggtgagggctcaggaagcttataaccatggtggaagggaaagagggagcaagtgtgtgacatagtgagagtgagagcacaagagagagacggggaaggtcccagactgttttaaacaaccagatctcacatgaactaactgaaaaagaactcacttatcaccaaggggatggtgctaaaccattcatgaa

SEQ ID NO: 575587 - DNA, 539 bp, Homo sapiens
actccatctcaaaaaacaaaaacaaaaacaaacaaacaaaaaatgaaataattgtaaaaaccaactatagttctcagtaatgatagtttcattactgtcagctattagtagagttaattaactcctatcaacctcacattttccatttaaaaaatacaggagaaaaagtttgatgtgggtttaatgagaaaatttatataaartagatctaactactatatttatcacaaaacagatgcacaaactatgtttttttcctctcacttgttcttattttatatatcattttaattgaggaaatcattgagcataatgtaacaaatattttcataagttattataaagagggtttgaaggacttgttagaaagtgtctggcagtggaaaaaacatctgaatagaaaatgaaaatagcatgtgaatgctgaaatagcgtattaaatagctgcaactctaatataatttatatttggattttagtatagacagaataattaaatttatttctgcagtcttttcagttgttaaacattttattga

SEQ ID NO: 575588 - DNA, 620 bp, Homo sapiens
tctctgtgttgcagtagcaaagtcatctgcagagagagagaagtgagaagggagaagagagtgtcagaaattagaggattgtagagattgaaaaagttatgtcaggcacaattgaaaacccrgtttccaatggtgatcattgtcttaaaatattatgtttgttttcttgcatgacattcttcagcagcagtcatggactgagaaatatgcagaaatcagatagttgagttcatctagagaagaggttgcaatgtgcttctaaaaaggacaaaaccaaaagcaaccgagagagagagagagagagaaagagagagagaaaaatgaagatgtgaaaggggataggtcaaaactcagtaattttttttaagcaaagggccagatagtaaatatttttattttgtgagccatattgtctctgtaggaagtactcagttctcccatgttctgcaaaagcaaccatggacaataagaaaatgtggctgcgttccaataagaatttatttaaaaaataggtgatggattgtatttagcccaagggaagcagtatgtcaattctggttttatgttactggcaattacattttaaaatattcagtaatggaatctacagtattgattcc

SEQ ID NO: 575589 - DNA, 620 bp, Homo sapiens
tctctgtgttgcagtagcaaagtcatctgcagagagagagaagtgagaagggagaagagagtgtcagaaattagaggattgtagagattgaaaaagttatgtcaggcacaattgaaaacccagtttccaatggtgatcattgtcttaaaatattatgtttgttttcttgcatgrcattcttcagcagcagtcatggactgagaaatatgcagaaatcagatagttgagttcatctagagaagaggttgcaatgtgcttctaaaaaggacaaaaccaaaagcaaccgagagagagagagagagagaaagagagagagaaaaatgaagatgtgaaaggggataggtcaaaactcagtaattttttttaagcaaagggccagatagtaaatatttttattttgtgagccatattgtctctgtaggaagtactcagttctcccatgttctgcaaaagcaaccatggacaataagaaaatgtggctgcgttccaataagaatttatttaaaaaataggtgatggattgtatttagcccaagggaagcagtatgtcaattctggttttatgttactggcaattacattttaaaatattcagtaatggaatctacagtattgattcc

SEQ ID NO: 575590 - DNA, 620 bp, Homo sapiens
tctctgtgttgcagtagcaaagtcatctgcagagagagagaagtgagaagggagaagagagtgtcagaaattagaggattgtagagattgaaaaagttatgtcaggcacaattgaaaacccagtttccaatggtgatcattgtcttaaaatattatgtttgttttcttgcatgacattcttcagcagcagtcatggactgagaaatatgcagaaatcagatagttgagttcatctagagaagaggttgcaatgtgcttctaaaaaggacaaaaccaaaagcaaccgagagagagagagagrgagaaagagagagagaaaaatgaagatgtgaaaggggataggtcaaaactcagtaattttttttaagcaaagggccagatagtaaatatttttattttgtgagccatattgtctctgtaggaagtactcagttctcccatgttctgcaaaagcaaccatggacaataagaaaatgtggctgcgttccaataagaatttatttaaaaaataggtgatggattgtatttagcccaagggaagcagtatgtcaattctggttttatgttactggcaattacattttaaaatattcagtaatggaatctacagtattgattcc

SEQ ID NO: 575591 - DNA, 620 bp, Homo sapiens
tctctgtgttgcagtagcaaagtcatctgcagagagagagaagtgagaagggagaagagagtgtcagaaattagaggattgtagagattgaaaaagttatgtcaggcacaattgaaaacccagtttccaatggtgatcattgtcttaaaatattatgtttgttttcttgcatgacattcttcagcagcagtcatggactgagaaatatgcagaaatcagatagttgagttcatctagagaagaggttgcaatgtgcttctaaaaaggacaaaaccaaaagcaaccgagagagagagagagagagaaagagagagagaaaaatgaagatgtgaaaggggataggtcaaaactcaktaattttttttaagcaaagggccagatagtaaatatttttattttgtgagccatattgtctctgtaggaagtactcagttctcccatgttctgcaaaagcaaccatggacaataagaaaatgtggctgcgttccaataagaatttatttaaaaaataggtgatggattgtatttagcccaagggaagcagtatgtcaattctggttttatgttactggcaattacattttaaaatattcagtaatggaatctacagtattgattcc

SEQ ID NO: 575592 - DNA, 408 bp, Homo sapiens
tcgttatactgaaggataaatgcttacatgtgcctcagagaatagatgtttttattccygggaagaaagataaactttttcaaaaaacataaagattaagtaggatgcagtttccagctttggattctgacattcaggacatggggagggtgatgagcttctcctggaggactgaatttaggacacaatcaagttcatgatggaagcccttatgaggtagagagggagtgcatctcagctcttttgattaattaaatgattgtttgaattggagaaggtgtgggtattttgtgttgtttgggtgagtacattggaatggttttctagcattcctttgagattttccacagtataagttaaggtaaaagaacatttttacttgtttcagaaagcatactgaggaagctt

SEQ ID NO: 575593 - DNA, 408 bp, Homo sapiens
tcgttatactgaaggataaatgcttacatgtgcctcagagaatagatgtttttattcctgggaagaaagataaactttttcaaaaaacataaagattaagtaggatgcagtttccagctttggattctgacattcaggacatggggagggtgatgagcttctcctggaggactgaatttaggacacaatcaagttcatgatggaagcccttatgaggtagagagggagtgcatctcagctctttygattaattaaatgattgtttgaattggagaaggtgtgggtattttgtgttgtttgggtgagtacattggaatggttttctagcattcctttgagattttccacagtataagttaaggtaaaagaacatttttacttgtttcagaaagcatactgaggaagctt

SEQ ID NO: 575594 - DNA, 588 bp, Homo sapiens
aaattttcttttaagctctttacagcttttaacaagtaaartatactcctataaacaaaatttgaagtatatttgtttctctctacctgatttctccagaatttggaaactatttgtgagtgttcttaacttacaataacacagttatttgcataagtgcagtgaaaatctgttttcatttataacaggacgcaattgaagaaagtggttattttaccaaggctttaactggaatggtgtgatttcctttaaggaatcaaacttgacttatagagccaataaaagccccttggaaaaactagcctcataccttttcctacacagctgctgcacagggttcctgacctggggtaggtaaagaatgtcactttctatcaggcccaggagccctggtttatcatggaacttcaaaaggagagaatcatccatctcatgggtatttaatggcacaaatccatgggtgggctcaactttaaaaaagtcttatctgagattcctcctgaggaacgcagttcgctcaaagccaatttaaaagcatatgtaataaataattattttgctgcactgtatgcaaataattaggccaag

SEQ ID NO: 575595 - DNA, 588 bp, Homo sapiens
aaattttcttttaagctctttacagcttttaacaagtaaaatatactcctataaacaaaatttgaagtatatttgtttctctctacctgatttctccagaatttggaaactatttgtgagtgttcttaacttacaataacacagttatttgyataagtgcagtgaaaatctgttttcatttataacaggacgcaattgaagaaagtggttattttaccaaggctttaactggaatggtgtgatttcctttaaggaatcaaacttgacttatagagccaataaaagccccttggaaaaactagcctcataccttttcctacacagctgctgcacagggttcctgacctggggtaggtaaagaatgtcactttctatcaggcccaggagccctggtttatcatggaacttcaaaaggagagaatcatccatctcatgggtatttaatggcacaaatccatgggtgggctcaactttaaaaaagtcttatctgagattcctcctgaggaacgcagttcgctcaaagccaatttaaaagcatatgtaataaataattattttgctgcactgtatgcaaataattaggccaag

SEQ ID NO: 575596 - DNA, 542 bp, Homo sapiens
acttaaaacaagttcacaaataactgcacttatataaagctaagactaaccagatatgctagacactggtgggctgggaatgagttataagcatgtggaggtatcgaccattcactcagctttttgggagtgtggggaatgaaggggctgtaaaaggcttggttgctttcagccttyagctgctttgtccatttatcccagtggactttacaaacattataatttctatatatgccatcatatacaaatgaatggaaagcatttacatagaacataagtaattacagttattttcacaaagtaatgccaaagtctaggaaacatatagatatgctttacaactggcacttcactatttgtggaaagtaactatattccagcaataatgattaaggaataattttcctctttttttgttggtgtttctttttgtgacagcatctctctctgttgccaaggctggagtgcagtagcatgatcatagctcactgcagtcttaacctcctggcctcaagtgatcctcctgtctcagcctccaagta

SEQ ID NO: 575597 - DNA, 542 bp, Homo sapiens
acttaaaacaagttcacaaataactgcacttatataaagctaagactaaccagatatgctagacactggtgggctgggaatgagttataagcatgtggaggtatcgaccattcactcagctttttgggagtgtggggaatgaaggggctgtaaaaggcttggttgctttcagccttcagctgctttgtccatttatcccagtggactttacaaacattataatttctatatatgccatcatatacaaatgaatggaaagcatttacatagaacataagtaattacagttattttcacaaagtaatgccaaagtctaggaaacatataratatgctttacaactggcacttcactatttgtggaaagtaactatattccagcaataatgattaaggaataattttcctctttttttgttggtgtttctttttgtgacagcatctctctctgttgccaaggctggagtgcagtagcatgatcatagctcactgcagtcttaacctcctggcctcaagtgatcctcctgtctcagcctccaagta

SEQ ID NO: 575598 - DNA, 531 bp, Homo sapiens
tgtctctaaactaaaaaaaaataaaataaaatcacagttcatataggaaaaaattattaaatttacagacattaaaatctaacactatacaaaagactccatcaacaaagttaaaagatgaccataggctggaagattttgggaaagcgtgtaacaattaaaaattaataagaagaatatataaaaggtactatcacaaattataaatgaaaagataagtatcctagtttttatatatataagtttaaaaaatatggccaggcayggtggctcatgccttaataccagcactttaggaggccaaggtgggtggatcacttgaggccaggagtttgagaccagcctgaccaacatggtgaaaccctgtcttactaaaaatataaaaattagccagttgtggtggtgcatgcctgtaatcacagctacttgggaggttgaggcaggagaattgcttgaacccaggaggtacaggttgcagtgagccaagatggcaccactgcactccaacctgggccacagggcgagaatatg

SEQ ID NO: 575599 - DNA, 587 bp, Homo sapiens
aatttttttttgcaaatttgactcctgaaggtacattactactacaactttgtgtgtaagcattgtgtgtgtgtgtgtgtgcacaaatgtgaagacctccttgataaataaacagatgtcctttttgtgcctctgtgtttgtgaaagatacaatttctcgaggtcttggctctttgggcaactggcaaatatggtggtgacccatcatgattctcgattgatctcatccaaagaattaggatgtccatcacagtatttcagatgactacagtttataaagctgggtgcacacaattattaactatagtgatatgcatttatacattgtgattttttacgcaatttatttatgaataaaattttgacactatttatttatgaataaaattcatctgctcataactgttrtacccttgtgactgttgttagtatacctgagtgtttatgcttgcaaaatatatatattattccctattgtgaagtgttctgttgtgtttttataagtttttcaaaataaatccacctataggaatataaataaatgtcttttaaattattgttttcagagttatattttcaggatttta

SEQ ID NO: 575600 - DNA, 490 bp, Homo sapiens
gggagacagagtaagaccctgtctcaaaaaaaaaaaaaaaaaaaaaaaagacagaaactagcctcatggctattgagcacttgaaatgtggctactgcaattgagaaactgaacttttcattttatttaatttaaataaccacatgtagaaagtgtcaggcctctgagcccaagccaagccattgcatcccctgtgacttgcacatatatgcccagatgkcctgaagtaactgaagaatcacaaaagaagtgaatatgccctgccccaccttaactgatgacactccaccacaaaagaagtgtaaatggctggtccttgccttaagtgatgacattaccttgtgaaagtccttttcctagctcatcctggctaggtgattttaaatcacccccactgagcaccttgtgacccccactcctgcctgccagagaacaaaccccctttgactgcaattttcctttacctacccaaatcctataaaacagcccc

SEQ ID NO: 575601 - DNA, 490 bp, Homo sapiens
gggagacagagtaagaccctgtctcaaaaaaaaaaaaaaaaaaaaaaaagacagaaactagcctcatggctattgagcacttgaaatgtggctactgcaattgagaaactgaacttttcattttatttaatttaaataaccacatgtagaaagtgtcaggcctctgagcccaagccaagccattgcatcccctgtgacttgcacatatatgcccagatgtcctgaagtaactgaagaatcacaaaagaagtgaatatgccctgccccaccttaactgatgacactccaccacaaaagaagtgtaaatggctggtccttgccttaagtgatgacattaccttgtgaaagtccttttcctagctcatcctggctaggtgattttaaatcacccccactgagcaccttgtgacycccactcctgcctgccagagaacaaaccccctttgactgcaattttcctttacctacccaaatcctataaaacagcccc

SEQ ID NO: 575602 - DNA, 566 bp, Homo sapiens
gcccagctaatttttttttgtttttgtctttgtttttttttttttttcaagacagagtcttgctctgtcacccaggctggagtgcagtggcgtgatctcggctcactgcaacctccacctcccgggttcaagcaattctctgcctcagcctcctgagtagctgagattacaggtgcctgccatcatgcctggctaatttttgtatttttagtggagacggagtttcaccatcttggccaggctggtcttgaactcctgacctcgtgatccacctgcctcagcctcccaaattgctgagattacaggtgtgagccaccacacctagcctttttttgtattcttagtagagacggggtttcaccatgttggccaggctggtctcaaagtccttacctcaggtgatcccacccgcctcagcctcaccaagtgttgggattacagacacgagccactgtgcctggcctgaaccttagttttagatgaagctactcataaaagaatgcrtatagataacaacagtaacacttacatcttagggaatgactgagtagttatttgggggccat

SEQ ID NO: 575603 - DNA, 471 bp, Homo sapiens
gtacctaattaacatattttgtttcattaatattattattggccaaacatttaaaaaattacactaaaatacatytaagcgagagcactgattaagttccatttagtgtaagccatgacattaagtcatttatatcaatgattctatagtttctcttaaacagtaatttctaatgatttccatcattttaaaagaagagcaaagctccttaaatgaccttttctaatgtactagataggatccgtatggcacaaactgtccttctatccttaatactaaaacaacaataattagcatatacatctagcttgatatgtgacaagattactgcatattttatcatgcaattttttttttttttgagacggagtctcgctctgtcaccaggttggagtgcagtcgcgtgatctttgctcactgcaacctctgcctcctgcgttcaagcgattctcctgcctcagcctcccaagt

SEQ ID NO: 575604 - DNA, 471 bp, Homo sapiens
gtacctaattaacatattttgtttcattaatattattattggccaaacatttaaaaaattacactaaaatacatttaagcgagagcactgattaagttccatttagtgtaagccatgacattaagtcattyatatcaatgattctatagtttctcttaaacagtaatttctaatgatttccatcattttaaaagaagagcaaagctccttaaatgaccttttctaatgtactagataggatccgtatggcacaaactgtccttctatccttaatactaaaacaacaataattagcatatacatctagcttgatatgtgacaagattactgcatattttatcatgcaattttttttttttttgagacggagtctcgctctgtcaccaggttggagtgcagtcgcgtgatctttgctcactgcaacctctgcctcctgcgttcaagcgattctcctgcctcagcctcccaagt

SEQ ID NO: 575605 - DNA, 509 bp, Homo sapiens
ttcctttctgtttgttagttttgcttctaacagtcaggtccctcagctgcaggtctgttggagtttgctagaggtctactccagatgctgttttcctgggtatcaccagtggaggctgcagaacagcaaatattgcagagcagcaaatattgctgcctgatccttcctctggaagcttcgtcccagaggggcacccgcctatatgaggtgtctcttggcccctactgggaggtgtctcccagttaggctacacaggggtcagggacccacttgaggaggcagtctgtctgttcttagagctcaaatgccatgccaggagaagcactgctctctttagagctgtcagagtggaacgtttaagtcttcagaagttgtctgctgcctttggttcagctatgccctgccmacagaggtggagtctataggggcagtaggccttgctgagctgcagtgggctccacccagtttgagcttcctggctgctttgtttacctactcaagcctcagca

SEQ ID NO: 575606 - DNA, 560 bp, Homo sapiens
cacatgttctctgtcctctagataaggagatttcaaattgctacctagtgagtcagttcccagccagcactaaaactggcttaacttctagtttttcttccaagtctacctttaaatcacatgccctttctccaccaaagcctgcagcaggagttcctccgcccttcaccgcatcatcggaggcacagacaccctggaggggggttggccgtggcaggtcagcctccactttgttggatctgcctactgtggtgcctcagtcatctccagggagtggcttctttctgcagcccactgttttcatggaaacaggtagggcctcacggtccttactttcragtggcactctgtggccatagacaatatatctgccctcaaattgtgggaagcagatccctgttggggacattcaatcaattcaattgcactttcattttttggatcccacgtgtgtgacaaacatttttttttaaggtattattggtataaaaaaagcacaaaggaaacatcaagaatgaataggcttttactaaggctgggaaaataagatagggctttta

SEQ ID NO: 575607 - DNA, 518 bp, Homo sapiens
aatgaatgaaattcatgctattaaaaatagagcagtaatatttttytaagacactggtagaactaggctacctgaaatttccaggtacacttgcattttggaggatagtagctcgggtaatatgggcttgaaattttcccttcaaagccagtgatgtctttgaccaacactgtgttttcacactctggaaaagatacccagtgacacacaatgatttgcagctgtgagattatggaaaatacacttcatacatttctttaattactaaggcacacttccttgatcgacaagctttatacatttcttaaactttgggttttttttttttttttcagaagaaaggaatgccaccctacagatgtatagctaaaatgcttattctctaattctatatttgttttcacatcatatgttttggctgcagatctgcaagatgctattactctctttaaaaacatagttctgaactcagagacaccagcagcagctgaacagcaatccctcctcagaggcctgag

SEQ ID NO: 575608 - DNA, 518 bp, Homo sapiens
aatgaatgaaattcatgctattaaaaatagagcagtaatatttttctaagacactggtagaactaggctacctgaaatttccaggtacacttgcattttggaggatagtagctcgggtaatatgggcttgaaattttcccttcaaagccagtgatgtctttgaccaacactgtgttttcacactctggaaaagatacccagtgacacacaatgatttgcagctgtgagattatggaaaatacacttcatacatttctttaattactaaggcacacttccttgatcgacaagctttatacatttyttaaactttgggttttttttttttttttcagaagaaaggaatgccaccctacagatgtatagctaaaatgcttattctctaattctatatttgttttcacatcatatgttttggctgcagatctgcaagatgctattactctctttaaaaacatagttctgaactcagagacaccagcagcagctgaacagcaatccctcctcagaggcctgag

SEQ ID NO: 575609 - DNA, 573 bp, Homo sapiens
aataaataaaaataataataaaacaagcatgaattgctcacagatccaatgtgctctgtggcagaaatgaaaaacactgggatttgtggcaaggtatccagccaccataaaatttctttgcagctgcccaggaagaacaccaaattccactaacatcctagcatgcagacggtgtctttcaaaatattcacaatttttaaaaaaatgataatgctgataagagtgtatggaaatrgccacatatacttagcaggtgaggcgctaaactggtagtatggagggtagtttgacaatattaatcaaaaatggatacttatcactaggaaattatcctaaggtaattattacaaagatatagctataaagatgcttcttatagcattaattttaatgatgaaatttgagagcattttaaaatccaacagtaaagggttaattaaatgaaaagtgatacatccattcaacagattttcaaggaaaaattattcagtcatttccttgtagaactttccatgtagaaaggaccagcttcctcatctggtcttgttgggacaccccattgagtcagacctt

SEQ ID NO: 575610 - DNA, 573 bp, Homo sapiens
aataaataaaaataataataaaacaagcatgaattgctcacagatccaatgtgctctgtggcagaaatgaaaaacactgggatttgtggcaaggtatccagccaccataaaatttctttgcagctgcccaggaagaacaccaaattccactaacatcctagcatgcagacggtgtctttcaaaatattcacaatttttaaaaaaatgataatgctgataagagtgtatggaaatggccacatatacttagcaggtgaggcgctaaactggtagtatggagggtagtttgacaatattaatcaaaaatggatacttatcactaggaaattatcctaaggtaattattacaaagatatagctataaagatgyttcttatagcattaattttaatgatgaaatttgagagcattttaaaatccaacagtaaagggttaattaaatgaaaagtgatacatccattcaacagattttcaaggaaaaattattcagtcatttccttgtagaactttccatgtagaaaggaccagcttcctcatctggtcttgttgggacaccccattgagtcagacctt

SEQ ID NO: 575611 - DNA, 580 bp, Homo sapiens
aaatcctcaccaaaacagtaatgaactgaatccagcagcatgtcaataaactaatccttcaagatcaaggaggctttatccctgagatgtaaagttggttcaatatacacaaatcaataagtttgattcatcacataaacagaactaaaagtgaaagccatatgatcatctcaatacaggcagaaaaggcttttgatacaattcaacatctcttcttgttaaaagccctcaataaactagatattaaaggaaatacctcaaaataataaaagcgatctatggcaaacccacagccaacatcatactgaggggcaaaagctggaaacatttccattgagaactggacaaggatgcccactctcaccactcctattcaacatagcactggaagtcctagccagagcgatcaggcaagagaaagaaagaaaasgcatctaaataagaagagaggaaatcatacaatctctgtttgtagatgatatgattctatacctagaaaaacccatagtctctacgccaaaacccctatgtcagattaacaacttcagaaaagtttcagaatacaatatcaatgtacaaa

SEQ ID NO: 575612 - DNA, 580 bp, Homo sapiens
ttcttatttctgcccatgaaaacccaatatattagctcagtcattttcaggttatagctcygaaagttactacaccctatatattaagggtgtagtaattttaatacttactaaagtatttgcttatcagttagctttccacaattttggcatcaagaaagggaaaatgacaatgttcttcctgaagagaggagaatatgatgttggtgaatactgtaatagaatttgtaatctaccttctaatgtttcaaagccccagagtgaggaggaagttccttgcacatgtagatataaaactaaggcagagggcctgcagccttgctcagcatttggttctccagtaggaaagtgatgttcagagcttgtctggccaacctgcagcagcagaccagcacaattaagagagcaactggtttggtctgatggagagcagatctcatttacaactgcatgtttctttcaattccagagtacatggacattggacatggacattagtttaaggacattggtatggtgggaacaacctgagaataaagatgagatggaaggtgtggcatagactcagggtctgcagaag

SEQ ID NO: 575613 - DNA, 522 bp, Homo sapiens
ttttgaaaacaactatatgcttaaagcttttaaaaaattaaactgttgtctctttaatataaaaatattcatgggaaatcaaaaaaataacacatgcaaactataaaaattaatgcatgatactctttccactagcccaattccttggtagaccaactaaaaaaaaattacaagtttaaatagagttaattatttaaggactgatcatgtcatgygagttctaatatgctcactcagatttcttttagttttgccctttggaccaaccacatccttgcaaaaggcctcaaaaatagctactgcttccataacagccattcagagtcagtaatgttgagtttctccaagatgtgaattatgttttcatagcagaaaacactaatttaagttgaaacatgttggaaaatgtcatttcctttgcaaaccaaacaaattaagaggaagaaaaatatcacttagtggaattcagagcttgttgtgaaattttgaaagagttctagaaatttggcaaaacctaaagta

SEQ ID NO: 575614 - DNA, 522 bp, Homo sapiens
ttttgaaaacaactatatgcttaaagcttttaaaaaattaaactgttgtctctttaatataaaaatattcatgggaaatcaaaaaaataacacatgcaaactataaaaattaatgcatgatactctttccactagcccaattccttggtagaccaactaaaaaaaaattacaagtttaaatagagttaattatttaaggactgatcatgtcatgcgagttctaatatgctcactcagatttcttttagttttgccctttggaccaaccacatccttgcaaaaggcctcaaaaatagctactgcttccataacagccattcagagtcagtaatgttgagtttctccaagatgtgaattatgttttcatagcagaaaacactaatttaagttgaaacatgttggaaaatgtcatttcctttgcaaaycaaacaaattaagaggaagaaaaatatcacttagtggaattcagagcttgttgtgaaattttgaaagagttctagaaatttggcaaaacctaaagta

SEQ ID NO: 575615 - DNA, 575 bp, Homo sapiens
tgatttatgctggacctactcttaccctctgcccttgtttgttctctttcttcttgcgcctgtaaactacaaggctctatttctctcattgccataattccaattcttctactttcttgcctggattaytgcaacagctaacaaagttcatcttcctgcccccagctgtttgcttatctgattcaccctgcacagcagctgccacagctatcttctaaaatcaaagcattgtgtcccattacttctggacaaatccaggctctctagcatcatcgtcaaagctcttaaaattatgtcctctcctactccccaacctcctcatagctcaggctccagctggaccttcaagagatccccactggggatgtaaagtttctctcactttacaaatggaatcttctgcttggaatgtccatcttgccttctctgacttttcactcttactaattgtttaagagcaagttgaaaggtcgacacatcagagacgtttgacctgacattcctcttccttcctaaatggtttacttttccttatgtggaatctggtagcactttgcacacacctctgttagcac

SEQ ID NO: 575616 - DNA, 617 bp, Homo sapiens
tgctgtagtccattttgtgaaaacaccacagtttatccaccctccatatcatgggcatttgggttgtttccagtatttggttattttgaayaagtatgaatttgtctttcagtggacatatgccctcatttccctgggtttttcacctaagagagagcaactgctatttcatgggataaacagagtgagtagcataactagcttatttgacagatgtagttgatgatttcttaacaactcctctatatcacaaaaatatcctcagtaataatcacaaaataaaataaaacaaataatgatcaggaaaataatgcaaacaatgaaaattttcatttattggacttcatattatgatactaaatctttttaattacagtataaacatgaaaaagcaacagattaattcctttaattacatttttttacagaaaactaatacatttacattttgatctgtcacagtgataattaatattaatttctgttttcacatctcacttttgcaaatttgtgaatgattttcccaaaatgtgtcttctttatgtattgatatacaatagatgccataactaggttcatcaatagttttacttatagttgattgaagaactaaaata

SEQ ID NO: 575617 - DNA, 618 bp, Homo sapiens
agtaataaattggggctgtgatgtaggtgatacaagacaatgagaagcttaaaaataatttatattttaactttataatgtactatgtgatgtatattttattactcctggtaataaaattgtttggtattcctgaacatatataaactgactgttagaagcttagaactaggtaaggaagaaaaagataatgagtatttcattgagaataggattctaagagtagagtctgccagttcagtgtgggttggccaggtgtatttcttaggccaaatgcctaagtacttragtgatccatctaataggtttgccgtcttgggtttctaagaaattactgctgagactagcagaagggttttccaactctgcaatacctatgatttttattttataacttttgacctatagtccctgtgttttgaataatgttatttgaaaataaacagcatttatcatagaaaaaaaatcttgctacttattcagaaaagatgtatttccatgtttcctcatgtattgccttattttagtaaagatttaacaagattagcacatagttattgtgaaataaagcaaggtaatataaattagaaatgtatgagaaaaaaaagaaaaacaagg

SEQ ID NO: 575618 - DNA, 570 bp, Homo sapiens
gtgagtggtaaatgaatgtgaaggcctaggacattactgtactactgtagactttataaatacygtacacttaggttacattacatttactcaaaatttcttttttcagtaataaattaaccttggcttactataattttttactttataaactttttgatgcttttaactttttgactgttttgtaataacacagtgtgaaacacacattgtacagctgtgcacaaatattttcttggctgagcgcagaggctcacacctgaattccctgcactttgggaggccgaggtgggtggattacttgaggtcagaagtatgagaccagctgggccagcaaggcgcaaccccgtctctaccaaaaaatacaaaaattcgccaggcttggtggcacacacctgtagtcccagctactcaggaggctgaggcaggagaatcgcttgaacccgggaggcggaggttgcagtgagccaagatcgcaccactgtactccagcctgggggatagagtgggactctgtctcaaagagaataaaaataaaagtaaataaaataatttttcttttttatatcc

SEQ ID NO: 575619 - DNA, 570 bp, Homo sapiens
gtgagtggtaaatgaatgtgaaggcctaggacattactgtactactgtagactttataaataccgtacacttaggttacattacatttactcaaaatttcttttttcagtaataaattaaccttggcttactataattttttactttataaactttttgatgcttttaactttttgactgttttgtaataacacagtgtgaaacacacattgtacagctgtgcacaaatattttcttggctgagcgcagaggctcacacctgaattccctgcactttgggaggccgaggtgggtggattacttgaggtcagaagtatgagaccagctgggccagcaaggcgcaaccccgtctctaccaaaaaatacaaaaattcgccaggcttggtggcacacacctgtagtcccagctactcaggaggctgaggcaggagaatcgcttgaacccgggaggcggaggttgcagtsagccaagatcgcaccactgtactccagcctgggggatagagtgggactctgtctcaaagagaataaaaataaaagtaaataaaataatttttcttttttatatcc

SEQ ID NO: 575620 - DNA, 591 bp, Homo sapiens
gtgtgtgtgtgtgtgtaacaaagcagtctgtgtattcttaaataaaccctgtcactagattgtcatgtagcattagataagcaatttgattgcaactccctctctctctgtttttccatacagctagtggaagctgtcaaacaaggcttgttgagcttgtggaaagaatcagctttcagaaattgcatcttgctacctaactgccatttcaagatggcrtggaatccaatattcattgagcattagtagaggctgtacttccaaggaactggctttagattgtaaggagtttcagcaaatgatgaaataatgtcacaactgatgctttgggaaactatagacctagaaagtttatgaggtattacttatacatttaataaaaggattttagactcttaaagcaatgtctggcataataagtggccaaatatgttttttaaatatatgaatgggctttaaatataattatttagaatagtcacccacttattcagtaaacatttctgaatgcctatgacgtgtaagccctgagctgtgtgctgaaaaagtgtcatgaaagaaagaaggaaataactgtttaaggctatgatg

SEQ ID NO: 575621 - DNA, 606 bp, Homo sapiens
cgaactaaaaagtaatcaaaagcrtaatttaaaaataccttgaactgaatgaaaataaattgtggatgccatcaaagctgaattaagagggaaatttatagcacaaaatgtctatactaggaaagaaaaaagtactcaagtcaatgaccttagcttccactttaaagaaattataaatggaagagcaaatggaatccaactaagcagatgaaataatcagcacagaaaacggtgaaatagaaaacaaaaaatcaatagagaaatatcagtgcaaccaaaagctagttacttgataagattaataagattgataattccctacccagacttaccaggaaaagaagagagaagacaaaaattgccaatatcatgaatgagagagttgatatcactatatattctagaaacattaaaagaatactaagggaatgttgcaaaaactttatgtcaataagttagaaaatgtaggaaaaatgggcaaattccatgaaaaacataatctatcaaaacttaggaaaaataaataacaaaacagtccaatctctattaaagaattacatttttgattaaaaatttactgacagaaaaacagtgcacacagatggt

SEQ ID NO: 575622 - DNA, 566 bp, Homo sapiens
tggagttgatttccaattttattccactgtggtctgagagagcacttatataatctcaattttcttgaatttattgagacttgttttgtggtctgtcatatgatctgtcttggagaaagttccatacactgatgaatakaatgtatattctgtggttgttgggtagaatgttctgtaaatatctgttaagtcaatttgttcaagggtatggtttaaatccattgtttctttgctgactttcttttttgacgacctgtcctgtgctgtcagtggagtattgaagtcccccactattattgtgttgctgtctatctcatttcttaggtctagcagtaattattttataaatgtgggacctccagtgttaggtgcatatatatttagcagtgtgatattttactgttagacaaggtctttttatcattatatataatgtccctctttgtcttttttaacttctgtttctttaaggtttgttttgtctgatataagaacagctactcctttcacctttggtgtccatttgcatggaatgtctttttccacccctttaccttaagtttatg

SEQ ID NO: 575623 - DNA, 429 bp, Homo sapiens
  misc_feature 429: n = A,T,C or G
tattctctgatggttgtttttctactggctcagtggtagtatcctctttatcattttttattgtatctatttgatactcagttgcagtgtaggattcactcgctgttttcattctaccccttgtgcaagcctgaacctggaaggcactcgtcctgtgggaatgcagccaccatgaagtgttccagaaaggctgtttacaggtgcatccatgctgagctcccataggagaagcctcagctttgtctgcagtagtggctgatgggaagaagtccctttctttaatacctttcacaagtatgagggctacctgactgttggggtagagctgcagactttycctactgagcctagcactgaacctgtgtctctgctgaaagaaacttcccacaaacagaaagttctgagactcaaaacctgccatatgaattn

SEQ ID NO: 575624 - DNA, 591 bp, Homo sapiens
aacaatatgtttcaatgtctatacttttttgaaagatcacattagaacagcaaaattgttcccccaaattttaaaatcatgcttccttccttgacaattactgggtgatgtggtttggctccatgtccccaccaaaatctcatcttgaattatactcccataattcccacatcttatgggagggactcagtgggagataattaaatcatgggtgctgttttccccatactattctcatggtagtgaataagtctcacgagatctgatggtttgataaggggttttgactttcacttctctttcattctttcttggcactgccatgtgagaagtgcctttcrctttctgccatgattgtgaggcctccccagccacgtggaactgtgagtccattaaacctatttttcttccaagtcttgggcatgtctttatcagcagcatgaaaacggactaatacagtaagttggtaccaaaagtggggtattgctgaaaagataaccaaaaatgtggaagcagctttggaactaggtaacaggcagaggttggaacagtttggagggctcagaagaagaaaggaaaatgtgagaaagt

SEQ ID NO: 575625 - DNA, 579 bp, Homo sapiens
ctacttgcaggcagaaaacatattctgtttccatatttccagtacctagcacctaacwtttagcctggcacatatttatcaaccaaatgaatgagtttcctagcataataatttccatataatagctactaaacaagcatttactgaatttaacttaatgaacaaagaatgtaaattactacccacaaaagagcataagaattaaaaaatacaggatgaaggtgagattagagtgggaaagaatgaatgggcaaatttcacagaggttcaatcctgccttttccctggatccccactcccagctccatttaaggtattttaggttttatttaaaaagctagggtaagttttttcccttcctccttctctccctcctgcccttccttcctcttctaaattttaacagacttttgttttattagatacagggtcttgctctgtcacccaggctggagtacagtggcataatcatggctcgctgcaaactcaaactcctaggctcgaacaattctccagcctcagccacctgtgtatctaggactacagatgtgccccaccatgcccagctaattttttttt

SEQ ID NO: 575626 - DNA, 568 bp, Homo sapiens
ttgctgggctattttcagcaatcagtcatgtaaaatgctgtcctaaacacaatgttaggaattttttttaattaaattcatacttgacttattatgattcrttaatttttaaatactacattgttgagcaaacaagaagtgagctgcagcatacacaatcagcccttatagaagagtatttatttgagaaaattcacagtgataggactcttgcagaggtgttgccccgacactctggggcagcacacagcaatatagcagtatcatatgccaatgcagactcttaagagagagaacctttgggctgggacttttaagctgaatgattagggaaagactagttcttaccctgcgatgatcaggagatgaatgaacattcctcaaagatggaaaaggaactttacatactcttttcagttgcacataagatggtcatatcactttagaaagaaacatgacttggccaggcacagtggctcacgtctgtaatcccaccactttgggacgccgaggcgggcggatcacctgtggtcaggagttcgagaccagcctgactaacatggtgaaa

SEQ ID NO: 575627 - DNA, 537 bp, Homo sapiens
ttaagttctttgtagattctggatattagccctttgtcagacggatagattgcaaaaattttctcatgttctgttgcctgttcactctgatgatggtttcttttgctgtgcagaagctgtttagtttaattagatcccatttgtcaattttggcttttgttgccattgctcttggtgttttaggcatgaagtctttgcctatgcctgtgtcctgaatggtattattataagcaggacagayattccaaaatgtctttgtgacccaagctaagttcctttatgcctcatgtctttgtgtttgttacatcttatgtctagcatgtctctgtttgacaccaatgctccctctccaattatgtatgaaatctaacattcccattgggtcttatttgtgttagttgcttttatgtttgggccccctttgcaagcgtatatatccatatcataagactaattattgactttgctatgaagttttattaatatgcctgtctctccaactaaacatagtgctcttaaaggctgtgaatcatatca

SEQ ID NO: 575628 - DNA, 553 bp, Homo sapiens
ggacctgtgagaagagggccactgtcctccagacccgagaatggtagatccactgacrgtttgcactgtgtgcctggaaaagctgcagacattcaacaccagctcatgaaagcagccaggagggggctgtactctgcaaagccaaggccttgggagcccacctcttgcatcaatgtgaaatatggtgtcaagggagatcattttggaactttaaggtttaatgactacctattggatgtcatacttgcatgggaattgtagtcccttcatcctggccattttttcccattcagaacatgtctatttacccaatgcctgtactctcattgtatttaggaagtaactaacttgcttttgattttacaggctcatagacagcaggaacttgccttatatcagatgagactttggacttggacttttgggttaatgctggaatgagttaaaatttgtggggctgttggaaagggattattgtgttttgaaatgtgaacaaatgagactgggatgggccagggatggaatgatatggtttggctgtatccctaccaaa

SEQ ID NO: 575629 - DNA, 676 bp, Homo sapiens
agaaagtcgtgggcagagtaaagagcatgggacaagggattgcgtctaagggtgaggggagaactattatcacctctagacctcaaggagaaaggggaaggagcaattacaaaaacctgagagatctttccacagaggagcacagccattgcaacccattccsaggaggaggagtcggagaataaacacctgttctccagcttcccttacttctggatctcctatcggtgcttttattccctggacccagcaatcaacaaagggtcacagaacaggacggaaagggaagaaagtctggagggactgatggtgcatatctagtgggcttttctttttcattttactgtttgacatatagtctaagctaaaggataaagaaaactttcttagataccttccaaaggatatttatttagtaagcatagaagaggtttaatacagttctagagacaactaagaaactttgtagtctagaacacctaaaattggtattcccaatgatccatcaattcactatttatatagagcatgtttcatgccaggtactgtgctggcggtgaaaagatacacaagacagacatgccctgcccatataaaattcacatgttggaggggatgtagacaatactaactagaaagagaagcaggatgactgttggttataagcatcgcaaag

SEQ ID NO: 575630 - DNA, 563 bp, Homo sapiens
cttttgcatcaactggagataaagattcaagttgagtttaaaagctattttccttttaaattccagtaccctcatgtagtaaaactagatcattgtgtcaacaacataaaatgtccaatcatggctactatgttcaccaaagtaaggcaatcagaataaacagtggatatatacaagataaaaatattttattgagtgtattattgattaatcagttatactcgcaggcagaatttgcaaggagggggcatgtatataaaagctaaggaaagtttgctaacctaaaaacaaaactacttttactttttttttttttttttttttgagacagagtctctctctgtcacccaggctggagtgcagtggcacgatctcagctcactgcaacttccgggttcaaatgattctcctgcctcagtctgccgagtagctgcgactacaggctcatgcccccatgctcrgctaattttttgtaatttttagtggagacaggggtttcaccatattagccaggatggtctcgatctcatgacctcatgatctgcccgccttggcctcccaaa

SEQ ID NO: 575631 - DNA, 586 bp, Homo sapiens
ctccaaattatgattctgggactaagtgacccatcactcagatccctctctaacaaaatgtaagcaagtttttctcatatttactttgaaatagcagttaaataaatgaacaaataatttgttctattaatacttactgataaccstctatgtgcaaagcacaacattggtcctttagggataaaaatatgcatcaaacttcgcactcaaagagcttagagtttaagggggaaaattagacatgttcacaaaatacataaggccctaacagaggagcagataaagggccttgcctgggacttcagaatttatcatttatatgctgaatccccaaaaatatttgacatgaccaaattaaaagtgattagccatagagtttgaaacccaacaaaaaagaaacaaatacaaaccccctatgtgcttgtggtagaaaacacattaaaaatatataactagtttattgaaccttgtgaactccagtcacttctgctgtgttacagtgagtctcttcctcacattgcttaataataccttgtatttatcccatttttccaggcacttttagttattaaacactatgtctggc

SEQ ID NO: 575632 - DNA, 591 bp, Homo sapiens
aacaagaacaaacaacaacaaaatcctttggttacaataattccattactgtaaagcaatacactgcctcttatccaagcctgcttttggatgttgaggttccactgagacagcctaagggtgtacagcattttgtacagtgctttatgtgagggtaggtgcttaataagaattcattgaaagacaatcaatatgtacagatgattcaaacaatttgaagttgtttcattcagtggcatttgcttttttattttaattttactttaagttctggggtacacgtgcagaacrtgcaggtttgctacattggtatacatgtgccatggtggtttggtgcccctatcaacgtatcatctaggttttaagcctcacatgcattaggtatttcttctaatgctatccctccccttgccccccacccaccaacgggccccagtgtgtgatgtttccctccctgtgtccatgtgttctcattgttcaactcccacttatgagtgagagcatacagtgtttggctttctgttcctgtgttagtttgctgaaaatgatggcttccagcttcatccatgtccctgcaaaggacatgaactc

SEQ ID NO: 575633 - DNA, 621 bp, Homo sapiens
tgtattttattttattgtgataagaacacttaacatgagctttaccctcttcacagatttttaagtgtagaagaaagtatcgttaactatgggcactatgtggtayagcagatctctagaatttattcatcttgcataactgaaactttatgtctgttttgatgtttgattaacaactctctgtttcccccttccctagcccttggcaacgaccatcctactctttgcttctataagcttcactattttagatacctctgataaataggatcctgcagtatttgtccttctatgactggcttatctcacgtagcatgatgtcctcaaaatacatctatgttgttgcatatttcaagatttccttcttccttaatgctgaataatattccattgtatgcatatgccacgttttctctattttcatctgttaatgtgcgtttaggttgtttccatgtcttggctattataaatagcaatgaacatgggagtgcaaatatctccttgagatcttgatttcaattctttcgggtaaatactcagaagtgggactgctggataatataataggtagttctatttttaatctgaggaaccttcctaatgctttctgtagtagctgca

SEQ ID NO: 575634 - DNA, 621 bp, Homo sapiens
tgtattttattttattgtgataagaacacttaacatgagctttaccctcttcacagatttttaagtgtagaagaaagtatcgttaactatgggcactatgtggtatagcagatctctagaatttattcatcttgcataactgaaactttatgtctgttttgatgtttgattaacaactctctgyttcccccttccctagcccttggcaacgaccatcctactctttgcttctataagcttcactattttagatacctctgataaataggatcctgcagtatttgtccttctatgactggcttatctcacgtagcatgatgtcctcaaaatacatctatgttgttgcatatttcaagatttccttcttccttaatgctgaataatattccattgtatgcatatgccacgttttctctattttcatctgttaatgtgcgtttaggttgtttccatgtcttggctattataaatagcaatgaacatgggagtgcaaatatctccttgagatcttgatttcaattctttcgggtaaatactcagaagtgggactgctggataatataataggtagttctatttttaatctgaggaaccttcctaatgctttctgtagtagctgca

SEQ ID NO: 575635 - DNA, 621 bp, Homo sapiens
tgtattttattttattgtgataagaacacttaacatgagctttaccctcttcacagatttttaagtgtagaagaaagtatcgttaactatgggcactatgtggtatagcagatctctagaatttattcatcttgcataactgaaactttatgtctgttttgatgtttgattaacaactctctgtttcccccttccctagcccttggcaacgaccatcctactctttgcttctataagcttcactattttagatacctctgataaataggatcctgcagtatttgtccttctatgactggcttatctcacgtagsatgatgtcctcaaaatacatctatgttgttgcatatttcaagatttccttcttccttaatgctgaataatattccattgtatgcatatgccacgttttctctattttcatctgttaatgtgcgtttaggttgtttccatgtcttggctattataaatagcaatgaacatgggagtgcaaatatctccttgagatcttgatttcaattctttcgggtaaatactcagaagtgggactgctggataatataataggtagttctatttttaatctgaggaaccttcctaatgctttctgtagtagctgca

SEQ ID NO: 575636 - DNA, 533 bp, Homo sapiens
gattgtaaatacaccaatcagcactctgtatctagctcaaggtttgtaaacacaccaatcagcaccctgtatctagctcaaggtttgtaaatgcaccaatcagtgccctgtrgggacttagagaacttttgtgtctagctcagggattgtaaatgcaccaatcagcaccctgtcaaaacggaccaatcagctctctgtaaaacagatcaatcagctctctgtaaaatggatcaatcagcaggatgtgggtggggccagataagggaataaaagctggctgcccaagccagcagtggcaacctgcttgggtcttcttccacactgtggaagctttgttctttcgctctttgcgatatatcttgctgctgcttactctttgggtccgcactgcctctatgagctgtaacactcactgcgaaggtctgtagcttcactcctgaggccagcgagaccacaaacccaccgggaggaatgaacaactctagacaggaggaacaaacaactccagacatgccaccttaagagctgtaaca

SEQ ID NO: 575637 - DNA, 499 bp, Homo sapiens
tggtggaaattacttcacccttggtcaggatttgtgcattttccataattgttttacctctgtgatttctgaaaggacctcgtatgaatagaaaatgcttttcgtattacccatttattatttcatcagacatttctttaggaattaccatgctatattttaggcattgggatagattctaaagatgaaaatctttgctgctaacgagttcacagtctagtgggagagatagacatggaacaaacaacaacaatgacaaaacatcagtgctggagatcctcagccagagagcctagaatgactggggacatgggaggggaagggaagtaagaggttcacagataggttagtattggcatccattgatggtccttgtcattgatgtttcaaagtggggtgytaagaagagagaatgtcgtccccattctcaatcaaggtcagggaccattgcttccaatgctcaggaagagtggggctcatttattccataaaagctttg

SEQ ID NO: 575638 - DNA, 586 bp, Homo sapiens
ataaaattatgtttccaggagatcttcatccctttcagtttgattctataaaagccactttttccactatacttgagaayggtgatgcttggcagacatttctaaggtgttccatcttacagatatccagtctaacttgtgtgtctggcctgacctcagcagatattctgactttggttaatccctttatctatccctccaccccttacaactttacttcagccaaaattgctatgaataaagctgctacagtcttcatacctggttcagggtttcccaccaaaaaaaaaagggcgggggggatatcaaccatctgctaggtgctttaaatatattatctgattaaattctcaaaccgttactctagggtagatatttattatctccattttatagatgagggttttgaaactcaaagaagctgtaacttaaaccaagtttgtacacctagtaagtggaagaactgctattccaactgaagtttgcctgattccaaagtccatgttggcatctgtattagtctgttttcacactgttgtaaagaatgatctgagactaggtaatttataaaagaaagaggtttaat

SEQ ID NO: 575639 - DNA, 550 bp, Homo sapiens
tgacacaatcttggctcactttaacctccgcctcctggattcaaacgattctcctgtctcagcctcccaagtaactgggactacaggcatgcaccaccatgcctggctaatttttgtatttttagttgaaatggactattgccatgtcagtcaggctgttcttgaactcctgacctcaggtgatccacccgcctcgcctcccaaagtgctgggattacaggcgtgagccaccgtgcccagcctccatttgctttttgcaagcataataaaatttttcctgtgggtataatatccttgatttattactcacactttttgtctgttaggtttacgttttaaaccattttttttcagcaacaaaaacacttgyagacctttaaaaatatacttttaagtctgtattttttaaaaagcccttccaatggttccaattaggagccagggtgaagcccagtgtgtatcctagtggcataggattaacattaagtatttttacctatttaatttttttatgtttcatctatcatgcagcacacataatagattagaa

SEQ ID NO: 575640 - DNA, 621 bp, Homo sapiens
cgggaaaagatccccacacccatgattcaattacctcccactaggtccctcccgcaacagccaaaccatatcatagcctaacagatggattctagtttgacctgagttaatctgatcaccttttaacaccatgcagttgtttttattgcctgggcataatccatccatatcatcagagaaagattatccaaaacttagtttgggactctgtactttaacttccatcatttgcaagtatcctattttcatatttttcattttttctcaagaggcatgtgaatgaggtttaactatagcttaagaatttttcatttttttttatgaaggagtcactgaaataattaaaatataacatccacttctttttcttggaacttaggtagcamtgtgagtaagtgttcagtaaaacttcatttttttaataaagcctcaacttgtgttcttttccatttggaatgcagcagccaaaaactataaacaggaaacagcctggaagatatcacctggacagctatgagcaatcaacacggcgtctacgtcccgcagaaacagaggacattgcaataaaggttatttttatttcctggattcttacatgaatagaaacatttatgttactat

SEQ ID NO: 575641 - DNA, 555 bp, Homo sapiens
ttattttcacacagcatcccctagtagggagacaaccacytttcatagatgcccagttcaacagctttcatgacaatcattatcatcctttcattgaactaaaaagagcctcttcactgtaacccagcaagatgttgccagtgctatcttaaagggtagtttaaaaagaaaggttggccgagtgcggtggctcacgcctgtaatcccagcactttgggagggattgcacccaaggcgggtggattacctgaggtcaggagtttgagaccaacctggccaacatggcgaaaccccatctctactaaaaatacaaaaattagctgggtatggtggcacatgcctgtagtcccagctacttgggaggctgaggcaggagaattatttgaacctgggaggctgaggttgcagtgagctgagatcgtgccattgcactccagcctgggcgacagagcaagactctgtctcaaaatacataaataaaataaagaagaagggctgaatctcatatcactggaaacacattttatgatctatttagaagtgaaatttctttct

SEQ ID NO: 575642 - DNA, 555 bp, Homo sapiens
ttattttcacacagcatcccctagtagggagacaaccacctttcatagatgcccagttcaacagctttcatgacaatcattatcatcctttcattgaactaaaaagagcctcttcactgtaacccagcaagatgttgccagtgctatcttaaagggtagtttaaaaagaaaggttggccgagtgcggtggctcacgcctgtaatcccagcactttgggagggattrcacccaaggcgggtggattacctgaggtcaggagtttgagaccaacctggccaacatggcgaaaccccatctctactaaaaatacaaaaattagctgggtatggtggcacatgcctgtagtcccagctacttgggaggctgaggcaggagaattatttgaacctgggaggctgaggttgcagtgagctgagatcgtgccattgcactccagcctgggcgacagagcaagactctgtctcaaaatacataaataaaataaagaagaagggctgaatctcatatcactggaaacacattttatgatctatttagaagtgaaatttctttct

SEQ ID NO: 575643 - DNA, 542 bp, Homo sapiens
tttgaggaatatccttttattttcaccaactaaaaacagtcaaagaatagccagtagaattattgttgtctaaaaaataagcccaaaagaataatatattttaatattatgggaataccttaaactttacaaatgttggaacaggaaattttcctgcaggttttatttatatatgatcagaatttctgatccaatcttagttttctcattttctagcccagacttttagaaaaccatattctgatttataaaattaaatgagatttgtaataataataatatcttattttacaaagatttgtaataataataataacttattttacaagaacttccttgtcaaagcttttaaatctagacagtttcatatataaaactatattagaagtcactgccatggcaaagcaaagatggatgacacaaagcytgaaaaatttctaaagccaatggcctccaagataaacttttaactttattattcctcagttgtcactgatttagcctaggtggctttacactctaaaaaaaagtttttcttctat

SEQ ID NO: 575644 - DNA, 607 bp, Homo sapiens
atgataaatatcttcaaaactaacaaataaaaaacagaaaaatttgtaaaaaaatataaagatgaagctatcagtgcaaaacaattaaaaataaaaccttaagggattccttgaagcatattaattacatatttaaaattaataagaggaaataaaaattcataaggcagagaagcaaatttgagactaaaggcatagcacaaataccattaaaatactagaaataaaagagagaaagaatagagcccaggcattattttactatatattgcacaataaatataacatgcatatctatgtatccacaaacacacacacacatatatacatacctgtatgtgtgtgtgtgtgtgtgtgtgtgtgtgtgtgtgtrtatatatatatatatatatatatatatatatacaggtttatacatctgtatacatatgtatgtatacacacacacatatacatgtatgtatatttatatacacatacaactgtatgttaaatcatgacatagatattatagtggattatttatttttactttcttgatacattatttgatataataaagtgaaaaatcacataaaaagaatatgatagagaaaataaacagtga

SEQ ID NO: 575645 - DNA, 666 bp, Homo sapiens
aattgaggctgaatctggagggcatggtgctaagtaaaataagccaggcatagaaagacaagtagtgcataacctaacatatatgtggaatctaaataaatcaaactcatggaagcagaaagtataatggtggttaccagagccatgagtgcgtgasagtgagagaaatagagaagcaacagcaaatcaaccccaaagctagcagaagatgatcaataattgaaatcagaggttaactgaagaaaatcaagacaaacaaaacattcaaaatattaacaaatccaggagttggttttttgaaatcttagtaagatagataggccactacttagactaataaagaagaaaaaagagagggtccaaataagcacaatgagaaatgacaaaggaatcgttaccactgacccgacagaaatgtaaataagcatcagaaactactttgaatgcctctatgccaacaaactagaaaacctagaagaaatggatgaattcctggccataaacaatctcccaagaccgagccaggaaaaaaatgattctctgagcagaccaaaaaggagctccaaaattgaatcagtaatagtctaccaacaaaattttatttcaaggtaatttaaggcatgtttcatgtttactttgtttccctgattaagtcatgtacatcat

SEQ ID NO: 575646 - DNA, 666 bp, Homo sapiens
aattgaggctgaatctggagggcatggtgctaagtaaaataagccaggcatagaaagacaagtagtgcataacctaacatatatgtggaatctaaataaatcaaactcatggaagcagaaagtataatggtggttaccagagccatgagtgcgtgacagtgagagaaatagagaagcaacagcaaatcaaccccaaagctagcagaagatgatcaataattgaaatcagaggttaactgaagaaaatcaagacaaacaaaacattcaaaatattaacaaatccaggagttggttttttgaaatcttagtaagatagataggccactacttagactaataaagaagaaaaaagagagggtccaaataagcacaatgagaaatgacaaaggaatcgttaccactgacccgacagaaatgtaaataagcatcagaaactactttgaatgcctctatgccaacaaactagaaaacctagaagaaatggatgaattcctggccataaacaatctcccaagaccgagccaggaaaaaaatgaytctctgagcagaccaaaaaggagctccaaaattgaatcagtaatagtctaccaacaaaattttatttcaaggtaatttaaggcatgtttcatgtttactttgtttccctgattaagtcatgtacatcat

SEQ ID NO: 575647 - DNA, 592 bp, Homo sapiens
acagtcttaaattctcagcttatttacaaagttacttagaataaaaacatttccttctctcccttcaataaatttacttcatgcatttgtaatatatttaggtttaatcatcacagwttgcatgttaccctgggattcctggacttcctaatgatattttaaaatttgcatttgttaaacttcactctttatgctgtaatttgttaaggttctatgcaaatatccatttgcattttgacaaatcccaggtgttatgtattcaccattacaagagcatacaaaataatttcaccagctaaaaatcccctgtgccacatatattcaaccttcaccttttccatatcactgatctatttaaggtctctacagttttgccttacagaaattcatataaataaaattgttaactccatagccttttcagactggtctttttcacttataaataagaatttaaattttgttcatgtttttacatggcttgatagctcatttctttttattgctgaatagtatttccattgcatggatgtaccataggtacattacccattcaccaaatgaagaatatcttggttgtttccagtgttta

SEQ ID NO: 575648 - DNA, 293 bp, Homo sapiens
aaattccactctgggtaggcctagttyaaatgctccttctgtgggtgagcatcagccatcagtctgtttttcctttctgatctaacagaaaagaactgagtttagggcctgacaatttctgtgttctctcccttacagcattcagagatgaccgccacagcactttgctgctgctgggggtgggggaggaataacatctcatttcatgactgtgttttctttctcttcaatgcctctttcagtgatatgaagttaaaaccgggtactatgagtccttaccagattataggtta

SEQ ID NO: 575649 - DNA, 578 bp, Homo sapiens
tactttgcccgttttttaatcagatcatcagatgtttctcctatagaattgtttgacctccttaygtattctggttattaattctttgtcagatggattttgagttgtctcttcatcttgttgattgttttctttcctgtgcagaagcttttgaacttgacatgatctcaaatgttcatttttgctttgattgcctctgcttctgaggtaataagaaatattttgctcaaaccaatatcctagagagtttccctacttttccacttcagtagtttcacagtttgaggtctgacagttaaaactttaatccttttttgtttcatttttatatgtggtgagagacaggcacctagttttattcttctgcatatgaatattcagttttcccggtaccatttattgaagagacttgctttccttaatgtatgttcttgacacctttgacaaaaataagttcactctagatgtatggattcacttctagattctctactcagtgtcattgttctatttgtttttatgccagtatcacactgttttgaatactatggctatgtcataaaatttgaagtcaggtt

SEQ ID NO: 575650 - DNA, 578 bp, Homo sapiens
tactttgcccgttttttaatcagatcatcagatgtttctcctatagaattgtttgacctccttacgtattctggttattaattctttgtcagatggattttgagttgtctcttcatcttgttgattgttttctttcctgtgcagaagcttttgaacttgacatgatctcaaatgttcatttttgctttgattgcctctgcttctgaggtaataagaaatattttgctcaaaccaatatcctagagagtttccctacttttccacttcagtagtttcacagtttgaggtctkacagttaaaactttaatccttttttgtttcatttttatatgtggtgagagacaggcacctagttttattcttctgcatatgaatattcagttttcccggtaccatttattgaagagacttgctttccttaatgtatgttcttgacacctttgacaaaaataagttcactctagatgtatggattcacttctagattctctactcagtgtcattgttctatttgtttttatgccagtatcacactgttttgaatactatggctatgtcataaaatttgaagtcaggtt

SEQ ID NO: 575651 - DNA, 601 bp, Homo sapiens
aaattctatccaaaaaacccagaatatatattctattcatcagtgcatataactttctccaagatagaccatattataggccacaaaacaaacctcagttttaaaaaattgaaattatattaagcactctctcagaccacggtggaataaaactagaaatcaactccaaaagtaaccttgaaaaccatgcaaatagatggaaataaaataacctgctcgtgaatgatcattctgtcaaaaatgaaatcacacctcaaggaactagagaaacaaggataacacaaaaccaaacccagcagacaaaatgaaataaccaagatcagagcagaactaagtgaatttttttaaaaaagtacaaaagataaatgaaacaataagctggttctttgaaaagataaataaattgatagaccactagsaagattatccaaaaaaagtagagaaataatccaaataaactcaattagaaacaaaatagaaggatattacaactgacaccacagaaatataaaagatcctacaaggatactatgaacgcctttaggcacataaactaggttaaatcaggaataaataaataccctgcacagaccaataacaa

SEQ ID NO: 575652 - DNA, 525 bp, Homo sapiens
ctcttttatgcctaaattagtaaaatgttagtatatgaaaatcttagctttatttatttattttttttaatttatttttgagacagagtctcactctgttacccaggccggagtacaatggcatgatctcagctcactgcaacctccgcctcccgggttcaagcaattctcctgccccagcctcccgagtagctgggattacaggcacacaccatcatccctggctaatttttgtacttttaatagagatgggatttcaccattttggccaggctggtcttgaaccagccttcaggtgatctgcctgccttggcctcccaaagtgctgggattacaggtgtyagccactgtgcccggtgctttatgttttttttgttttgtaatgagatggagtctcgctgtgttatccaaaatttcagatgaatttaatgattcatttctttttctttctttgtttttgagatgaagtctcgctctgttgccaggctggagtgcagtggtgcaatctcagctcactgcaacctc

SEQ ID NO: 575653 - DNA, 612 bp, Homo sapiens
caagacatacattgggggatgggatagtctcttcaataaatagtgctgggaaaactgtatgtacatatgcagaagaatgaaacttgatcctttcttgccttatacaaaagtcaaatagaaatggattaaagacttacaaaatctatgatctcaaacaatctactaaaagaaactactgaaagaaaacattggagaaattctccaggacattggactgggcaaagacttcttgagtaataccccacaggcacaggcaaccaaagcaaaaatggacaaatgaggtcacatcaagttaaaaagtttctccacagcaaaggaaacaatcaacaaagtgaagagacaacccacagaatgggagaaaatatttgcmaactacccatatggcaagggattaataatcagaatatataaggagctcaaacaactttataggaaaaagtctagtaatccaattaaaaatgggaaaaagatctgaacagacatttctcgaaagaagacatataagtggcaaacaggtatattaaaaggtgctcaatatcattgataattggagaaatgcaaatcaaaactacaatgagatatcatctcactacagttaaaattgcttttatt

SEQ ID NO: 575654 - DNA, 509 bp, Homo sapiens
tgaaggaccagagtgtctggacttcagaagtggcctagatcttgggccagtgcctgaccaaacagatgagggctatccctaaacccttggggcaagatcgtccacttaakttgggatgtgtggtctgtgggatcctcaaggcaaagagaaactggaagtcagagcacaggggaatgcagaagaaggcatctttgaggtccagaacagtgaaccattctgcttcctctggtatttgagagagcagggtataggggttgggtacaacttaatatagaggaattactgcctcaattatgagtctaagatcttgcactaatctcctctgaccagtcagtttttctactcatagaattggggtgttgcagggactgctgcattttcttactaagacttgagcttttaaatgtctaataatatcttataatccttcatgagcttcaggccttaagtgatattgcctttgatacagaaaagtggtggggtcttttagcctgatttggactgggcag

SEQ ID NO: 575655 - DNA, 509 bp, Homo sapiens
tgaaggaccagagtgtctggacttcagaagtggcctagatcttgggccagtgcctgaccaaacagatgagggctatccctaaacccttggggcaagatcgtccacttaagttgggatgtgtggtctgtgggatcctcaaggcaaagagaaactggaagtcagagcacaggggaatgcagaagaaggcatctttgaggtccagaacagtgaaccrttctgcttcctctggtatttgagagagcagggtataggggttgggtacaacttaatatagaggaattactgcctcaattatgagtctaagatcttgcactaatctcctctgaccagtcagtttttctactcatagaattggggtgttgcagggactgctgcattttcttactaagacttgagcttttaaatgtctaataatatcttataatccttcatgagcttcaggccttaagtgatattgcctttgatacagaaaagtggtggggtcttttagcctgatttggactgggcag

SEQ ID NO: 575656 - DNA, 509 bp, Homo sapiens
tgaaggaccagagtgtctggacttcagaagtggcctagatcttgggccagtgcctgaccaaacagatgagggctatccctaaacccttggggcaagatcgtccacttaagttgggatgtgtggtctgtgggatcctcaaggcaaagagaaactggaagtcagagcacaggggaatgcagaagaaggcatctttgaggtccagaacagtgaaccattctgcttcctctggtatttgagagagcagggtataggggttgggtacaacttaatatagaggaattactgcctcaattatgagtctaagatcttgcactartctcctctgaccagtcagtttttctactcatagaattggggtgttgcagggactgctgcattttcttactaagacttgagcttttaaatgtctaataatatcttataatccttcatgagcttcaggccttaagtgatattgcctttgatacagaaaagtggtggggtcttttagcctgatttggactgggcag

SEQ ID NO: 575657 - DNA, 509 bp, Homo sapiens
tgaaggaccagagtgtctggacttcagaagtggcctagatcttgggccagtgcctgaccaaacagatgagggctatccctaaacccttggggcaagatcgtccacttaagttgggatgtgtggtctgtgggatcctcaaggcaaagagaaactggaagtcagagcacaggggaatgcagaagaaggcatctttgaggtccagaacagtgaaccattctgcttcctctggtatttgagagagcagggtataggggttgggtacaacttaatatagaggaattactgcctcaattatgagtctaagatcttgcactaatctcctctgaccagtcagtttttctactcatagaattggggtgttgcagggactgctgcattttcttactaagacttgagcttttaaatgtctaataatatcttataatccttcatgagcttcaggccttaagtgatattgcctttgatacagaaaagtkgtggggtcttttagcctgatttggactgggcag

SEQ ID NO: 575658 - DNA, 626 bp, Homo sapiens
  misc_feature 604, 605, 606, 607, 608, 609, 610, 611, 612, 613, 614, 615,616, 617, 618, 619, 620, 621, 622, 623, 624, 625, 626: n = A,T,C or G
tattttctctacttcgaaattttctgtgtttaggccattcttgcattgctataaagaaatacctgagactgggtaatttataaagaaaagaagtttaattggctcactgtgctgcacactatttaaaaagcatactggyatctgcttctggagaggcctcaggaagcttccaatcatggtggaaggcaaagggggagcaggcacatcgcaaagtgaaagcaggagccagagagagagaaagcaagctaggtgccacataatttttttttaatcttggaacatttttaaaaatttttatttccataggtttttgaggaacaggtggtatttggttacacaagtaagttctttagttgtgatttgggagatttttggtgaacccatcacctaggcagtatacactgaacccaatttgtagtgtttcatcactcaccgtcttcccaccctttccacacacttttaaacaaacagatctcgcaagaattcactagctatcacaaaggcagccccaaagggatagtgctaaatcattcatgagggatccacccccatatccaatcacttcccacccagcccacctccaacattggagattacatttcannnnnnnnnnnnnnnnnnnnnnn

SEQ ID NO: 575659 - DNA, 423 bp, Homo sapiens
ttcctgatttccctgagtgtctctctgtgttctcttgtagttcaacgactgtacttaaagcaatcattttgaattcttttgtggccaattcatagctttccatttgtttgaagccagttactaaaaatattttcctgttccttagatggtgttatgtttctttgttttttcatgtttcttgttgcctgactgagagcagtcagtaacatctggaagagttactccaaatgtactcttccagatgttactaactactctcaatagggaaagcccttttcttatgggmtagtgtgagggtgctgtctgggtggggcatggcagtccaggctctggagagggtacagcagcatagtcatcatgcaactttgttatctaacattagcatggcaaagattgcaggggtcatcagtggccaagggagtg

SEQ ID NO: 575660 - DNA, 591 bp, Homo sapiens
gccacttttgagctagccatgcatgagaaacaagacagacttttgcaagaacaagtcatgataacaactatgactttgaggtgtcatgtaagcaacacagatgacaggtgctttacatcaaatactacccatagaagcaagctccacttttcgcactatctggaccagtcaaggtagcagcagcatggtgtgatagaggtcacttgagctatggagtcagcacagaatttcaattctacctatgctctcgcttcagtaatcttcagaaaattactaaaatctcgaggtctcaaattcctcatatttctaattgggagagtgataaatatttcaaatgataggtggaccaattgcatagttcattcacatgcttggagctcagcaaatatatatatttttctacttatacttaatttgattccaaaattttactggtatggtaaataataaaacttagaataaagtatcattttgaccagtttctaagmaatttaaatcccccattgtggttttgtgtctgaagctggttcctgccggtgggttcgtggtctcgctgacttcaagaatggagccacagacccaccagcagga

SEQ ID NO: 575661 - DNA, 611 bp, Homo sapiens
acctaagtcaatcagaagcatcctaacataattgttgtgttgatgagcagctctgcatccttaacagcaactgctacacagccaacaagctctcatgcatgtctcacagctccctgaattagattccaaagaccatctgcctatgccacaactggggatgactttccgtctgtacttagtatttctctgccttgcaataattgccaagcatccaagaagcttcagagccattaaagacagaaacacacacgactcattttctagagacctatgataaaagacaatagagctagcattatacaatgcagcatggtatgaagacatctttctaatgcagagcaggatttgtttagttttaaagccaagtatatcagcagatatactgcataaaatagagttgacgaggaagaacttggtgttacagactgctgggcccatgagttctctgttgcaacaaaatttaatgggccattgaggcttgaagttgtaattcaacataaacccactttgaaaattgcaatttgaagtattagtattttatgttattagaaggttttgctttgaaataatatttttaattttgcaytggacattaggatatcaatacttca

SEQ ID NO: 575662 - DNA, 354 bp, Homo sapiens
gatggaagcttccagacctcaattcttaactcctgcacacctagaggaccaacaccatgtggtagctgcaaaggctttgggcttgcatcttctgaagcaatgrtccaagctctaccttggccccttttaagccacagctggagctgaagcagctgggatgaagggcaccatgtctccagcctgcacaaagaaggggaacccaggtctgccccattttttccctcctaggcttcagggcctgtgatgggtggggctgctatgaggatctctgatatgccctggagacatttttcccattgtcttgtattaacatttggctcctcattacttatgcaaacttcttcagcaggcttg

SEQ ID NO: 575663 - DNA, 630 bp, Homo sapiens
aatatcaaaatatatatacacctgatatggtttggttttgtgtccctacccaaatcttacctgaaattgtaatcccataatccccacatgtcatgggaggaacctggcagagatcattgaatcatggagcagtttcccccttgctgatctcatgatagcgagtgagctctcaagaggtctcatggttttataaggggtttccccctttgctcagcatgcattctctctcctgccactgtgtggagaggtgcctactcacatgattgtaagtttcctgagtcctccccatatatgcagaattrtgagtcaactgaacctcttttctttataaattacccagcctctggtatttcttcatagcagcgagagaacagactaatacagtaaattcgtaccaggtgtggggtgctgttataaagatacccaaaaatgtggacgtgactttggaactgggtaacaggcagaggttggaatagtttggaagactcggaagaagacaggaaaatgtgggaatgttttgaacttcctagagacttggagggctccgaagacaggcagatgtcagaaagtttggaacttcctaaagacttgttgaattgctttgaccaaaatactgatagtgatatggaa

SEQ ID NO: 575664 - DNA, 584 bp, Homo sapiens
ctatgtaacaaacctgcacgttgtgcacatgtaccctagaacttaaagtattaaaaaaaaaaaaaaaactacccaraacccaaagtcaacctacaaattgaggaactaagcctaatgagacacgtttggcaaaaacttctcagctaatccaacttggcctttgttcataaatacaaggaatcaagcattcccaggcattcaaataaaattcaaggtattaaaaaatagtaatccctgaccatagaggaaacatataaagaaaaaaagaataaaattgtataatcacatgctatgcacaaaagtataaagtgtttattttattcagcacacaaaaatgaactgcaataaaaaatagcaataaagaacaaaagagaattattgcgaattgaacatttgctacttcctgtaatatatgcctatggaaaaacttaaattaccaagaaaataattattataataaacaaaagaccagcatatggcaatttaaaaaatcatatttaaacataagtcaaaataatatttgtcaagacagacaaataataaagaatttttatctatcagataaaataacaaaaagatgagat

SEQ ID NO: 575665 - DNA, 610 bp, Homo sapiens
aaaagtataaaacactgatgaaagaaatagaaaaggacaagaaagaattgaaagacaatctatgcattcatgggttagaagaatcaatattgttaaaatatctatactactcaaagcaatctacagattcagtgcaatcccaatcaaaatactaatcacattcttcacagaaatagtaaaaacaatcttataatttatatggaaccacaaaggatccagaatagacaaagctatcctgagcaaaaagaataaagctggaggcatcacattacctgacttcaaattatgctacagagctatagtaaccaaaacagcatggcactggcataaaaataggcayatagaccaatggaacagattagagaatctggaaattatacatctacaataaactcatttttgataaaggtgacatgaatatacattggggaaaggacactctcttcagtaaatggtgctgggaaaactagatatccatatgcagaagaatgaaactaactagatgcatatatgttgctatataaaaccaaatcaagttggattaaacacttaaatctaagaccccaaacaatgaaactactgaaataaagtattggggaaactctcccca

SEQ ID NO: 575666 - DNA, 587 bp, Homo sapiens
ttaatttataatttttatgttatgagaaggtgctctacacttctctttttcagaattctagaattatggtttgttttctactttaattttaaatttatttctaggagataacaaagatattacatgtctttagaaaggcttatttctcacattcctttgactgtttcagatttaacacaaatagcatctytaagaggtagttagaaaggttggtcgtagttttaaatatgtctgtatttatatatcccaaacaaagagcatttggggagatatttaagtatattttctgttaatcttttttttttttttttttttttctgagacagagtcttcctctgttgcccaggctggactgcagtggcacaatctcagctcaccgcaacatctgcctcccgggttaaagcaattctcctgccttagcctttcaagtagctgggattacaggtgcctgccacctcgcctggctaatttttgtattttcagtagagacagggttttgccaagttggccaggctggtgtcagacttctgacctcaaatgatccacctgcctcggcctcctaaagcgctgggattacaggtgtgatt

SEQ ID NO: 575667 - DNA, 306 bp, Homo sapiens
ggctggtcttgaactcccaacctcaggtgatccgcccgtcttggcctcccaaagtgctgggattacaggtgtgaggcactgtgcccagctgctagatttcttaaatacagcatcaaagcataatccataaaataaaaacttgataaactgggctttgtcacaattaagaacttctcttcaaaagacattaaragaatgaaaagatagccacagactgggagaaaatagttgcaaatttcatgaagaagaacttgaatccagacatattttcaaaactctcaacattcaataataaaaaagagacaa

SEQ ID NO: 575668 - DNA, 613 bp, Homo sapiens
gttctgctcaccccttcctcaggcacctaaagagtgtcagttgctgtcatgggctgggtgtggtccagaatctcttcaaggmcacttcatggggaaatactttcaaagatcaatccaccagctgtttctggactaggtctgagcaaattaatatatctccccaaaaggaaagagtttaaaagggttaaaattgcagaaaaagaaatagatggctggccaggcatcgtggctcacacctgtaatcccagcactttaggaggctgaggcaggcggatcatgaggtcaggagatcgagagcaccctggccaacatggtgaaaccctgtctctactaaaaatacaaaaattagctggttgtggcggcacatgcctgtagtctcagctactcaggaggctgaggccaaacaatcacttgaacccaggaggcagaggttgcagtgagccgagatcatgccactgcactccagcctggcaacaaagtgagactgtctcaaaaaaaaaaaaaaaaaaacttatcaaactcccaaattgtttgggccaggctcggtagctcactcctgtactctcaacactttgggaggccaaggtgagttgatcatgaggtcaggagttca

SEQ ID NO: 575669 - DNA, 513 bp, Homo sapiens
acatctgtgacccctcaaagtcatcaggaaatgacctaaactcatttatgttgagtataacatacttttattcattcactaaatatttattgaagactttatgttagacaaatacatgtattcatatgtttatgcaatatgatatcaatttcaaatgtagcttagtcttcaaatgggtgtaaataaaaaaattcccrtgaataaatgtattctggttaaacttacctttaaaaaatatatattccatttcatttaaagcctgaaatatggctgggtgcagtggctcatgcctgtaatcccagcactttgagaggctgaggcgggcggatcacgaggtaaagagattgagaccatcctggccaacatgatgaaaccccatctctactaaaaatacaaaaattagctaggtgtgggggcatgcgcctatagtcccggctactcaggaggctgaggcaggagaatcgcttgaacctgggaggtggaggttgtagtgaaccaagatcgcacccctgc

SEQ ID NO: 575670 - DNA, 494 bp, Homo sapiens
ttgctatatccagaaattagaacaaaggctggaacatagtggataatcaataaacattctttgactgatggggtgaaataaatatayagatatttgcatgtgaagaaaaattcaagagtgatatcaacatagctaaatgttaacagtgattaacaataagtgactttaaaataaaataaccttttattctgtttataaaataatatctgttcattctagttattagtaaaagtaaagagagaagaaagacactcataattccaacacctaacaaaagttactattaacatttttatattttttcttttgttttttatggacattattttcccccaatgaaaataagatcactctgtttatgtaattaaaaaaaatttaaatctcacctaaaaaattgagacatgtttattttatttgtctaaaaatttattgtctaaaaaattgagacatgtttatttgtatcatatcaatccttgaaatattcaaataactga

SEQ ID NO: 575671 - DNA, 494 bp, Homo sapiens
ttgctatatccagaaattagaacaaaggctggaacatagtggataatcaataaacattctttgactgatggggtgaaataaatatatagatatttgcatgtgaagaaaaattcaagagtgatatcaacatagctaaatgttaacagtgattaacaataagtgactttaaaataaaataaccttttattctgtttataaaataatatctgttcattctagttattagtaaaagtaaagagagaagaaagacactcataattccaacacctaacaaaagttactattaacatttttatattttttcttttgttttttatggacattattttcccccaatgaaaataagatcactctgtttatgtaattaaaaaaaatttaaatctcacctaaaaaattgagacatgtttattttatttgtctaaaaatttattgtctaaaaaattgagacatgtttatwtgtatcatatcaatccttgaaatattcaaataactga

SEQ ID NO: 575672 - DNA, 619 bp, Homo sapiens
actgcacttttcccacagtcttagcaactggcagaccaggagataccttcccttgcctggcttggtgggtcccacacccacggatccttgctcactgctagtgcagcagtctgagatcaacatgcaatgctgcagcttgacggggggaggggcatccgtcactgttgaggcttgagtagctcacagtgtgaacaaagcagccgggaagctccaaatgggtggagcccactgcagcttagcaaggcctactgcctctctagattccacctctgggggaagggcatagcagaacaaaaggcagcagacagtttctgcagacttaaatgtccctgtctgacagctckgaagaaagcagtggttctctcagcacagcgtttgagctccaagaacagacagactgcctcctcaagcaggtccctgacccctgtgtagcctgactgggagacatctcccagtaggggccaacagacacctcaaagaggtgggtgctcctctgggacaaagcttccagaggaaggatcaggcagcaatatttgctgttctgcagcctctactagtgatacccaggcaaacagggtctggagtgggcctccagcaaactacagcagacctgcagctg

SEQ ID NO: 575673 - DNA, 506 bp, Homo sapiens
tcatatcaacagaataaagggaaaaaaacataaaatcacttcaatagatgctgaaaaagcatttgataaaattcaatattccttcataataaaaactctcaaaaaactggggatagaagaaacatactttaacataataaaagctatatatgacagactcacagctagtataatacttaatggggtaaaactgaaaactcttcagttttgaagatctggaacaagacaasgatgtcctctttcaccactgttattcaatataatactggaagtcctagtagagtaatcagacaacagaaagaaataaaaggcattcaaatgggaaaggaagaagtcaatttatccttgtttacagatgataaaatcttatatgtggaaaaacccaaactaattcagtaaagtggcaagatacaaaaccaacatacaataatcaatagcatttctatatgccaacagcaaacaatatgaaaaagaaatcaaatcccatttccaatagttatgaataa

SEQ ID NO: 575674 - DNA, 585 bp, Homo sapiens
aattatgattacttataccaaccacataatttttattgatttaaataatcacattacacaaagcatccactttaagacagcaaaacgtattaattctacaactataatcttaagcaaaactgatttaatgaagctcctgcaataaaattataaaaaattctagaattcagggcctcccaaaatataaaaaatattcattttaaatttgaaaatttcatatgtttatatacacagagatatcagaagtgcaagaaattaatcttgagaaaaatggcaaatttagagctaaaacagttaagggtcagaaaggagagaaatccaactgtaaaaagtacaagaaaattagaactttgcatgccagtatcttgattcatggaaatgaatctaagcttttagaggcccaaattacagaaatagaaatacagacatttatattcctttataaagggtgcaagcagcattaagtttccaaatagagagtgaggagacaagaaagacattgggaaacacccaacgtgagctattaatactaagaaaaatctgaaaattccttaacaatakgctgttgataagattataaaagtg

SEQ ID NO: 575675 - DNA, 485 bp, Homo sapiens
ataatagctacaatcgcttgagtaactaaatggatgccaaaaacatgctgaacattttatatacatgagtgctcatttctgtgttaaatctatgaggcattatcattttaatcctcattttatagatgataagcaaggattaataaagcttaactttcccaaatcaattaaatattcttgaattcatatttcttgttctttccattaaactgtgatgtatattatatattttcaccttttgaatgaatgggaatccattatctgccrtcattgctggcacatttattaaatgagtgaattgactgattgattcatccagtatttatagagcatctatgtgtcaggctatgttttaggcattggtaaaacagtggtgagcacaaaagaagttcccatccttgcacagtttactttctgttagaggaaagcagacaataaacatacatacatagacagatgatagtagatagatagacagacagaca

SEQ ID NO: 575676 - DNA, 465 bp, Homo sapiens
tgactcattttcttcagttttaaatagcaagctataaaatatataaaataaacaaacttttttaaatgattaaaaattaaagtgatagacatacaaattttaaataatataaacacatttgaaagcaaaatgcacatctttgtttgaaatacaattgaaatgagagacacagaaaatttgaataatataattagtaaatttgaaaacatraagcacattttttcaagaattaagagatggtttgtacaagttacatacacatctttcttcaaacttgatgcgcacttccctcaaacacatgaagaatttcagactcagactaattaatttgtctcagcattcactcctactaaatatctccttcctgtttgtggtacttttctcagagatgagtctttattaggctgagaggtaggagctcccagggcaaactatggagctggggcaaacagaatctaaactgta

SEQ ID NO: 575677 - DNA, 611 bp, Homo sapiens
atattttctatacgattcagaaaatttgtggccattaattcttcaactatttttctgccttttcttttggtcctccctttttctgaatcactatatgtatgctgggtcattttacattgttgcactagtttctgaatctgttttattttctttaatattttctgtctttyttctgaacggaataatttttactaatctatatttaacttcacttattcttttccagttttctcacatttgcagttgagcctatttagtaaattttttttttcattttggtgatttacataatgtcccctttattcacttttttaatattttacattgctccattgatattctctatctgttcacttgttaataatacccatatccaagccaactcagtttcaatttctactgagtgcatttttcttgaatatgaaccacactattttctgtatctttttatactcagattttgtgtattaatttctgtggcagacttttataatgacctccctcccaaggatatagtcacctcttaatccacaaaacctatcagtgtgagagtatatgaaaatatacatgattaatctaaggatcttgagaggagaggttatcctggatta

SEQ ID NO: 575678 - DNA, 551 bp, Homo sapiens
gcatggctcccttagcccctttgtttgggccaayttttccctttcggaatgggagtatttacccaatgcctgtacccctattgtatcttgaagtaactaacttgtttttgattttacaagctcataggtagaagggacttgtcttttaagcatagcgtaaaagtttggaaaatttgcagcttgaccatgcagcagaaaagaaaaacccattttctggggaggaattcaaggctgcagaaatttggataagtaaagaagagccaagtggtcatactcaagacaatggggaaaatgcctccagagcatttcagagaccttcatgccagcccctcccctcagatgagactttggacttcagacttttgagttaatgctaaaatgagttaagactttgggggactattggggaggcaataattggttttgatatgtgagaagaacatgagatttgggagggatttggatttcccaaatctctttgggaaaaaaacactgaaaataaatacaatgttagaaaagtaatacaggtttgctcttactttaactgactg

SEQ ID NO: 575679 - DNA, 626 bp, Homo sapiens
cttccaaatcttagctatagtaagcaatgctgcaacaaacaggagtgcagacatctctttaatatactgcttttctttcttttgggtatatatccagcratgggattgccagatcatacagtagctcaatttttagttttttgaggaacctccaaactgttctccataatggttgcactaatgtacattcccaccaacagtgtacaagggtccctttttctccacatcctcaccagcatttgttattgcctgtcttttggatataagccattttaactggggtgagaagatattttagttttcatctgcatttctctgatgataaatgacattgagcatcttttcatatacctgtttgccatttgtctgtctttgttggaaaaatttctgttagctcttttgcccatttttttaatcggattattaaattttttcctatagagttgtttgagctccttatatagtctggtgattaatcctttgtcagatgggtagttggcaaatattttctgtcattctgtgagttgtctcttgactttgttgattgtatcctttgatgtacagaggctttgtaacttgatgtgatcctatttttccatttttgctttggtcgcctgtgcttgtgg

SEQ ID NO: 575680 - DNA, 605 bp, Homo sapiens
ctggcacataactagtcatggagaatagtgaacccacccttgctctgaccagccactgctgtgggtgtgaatgtgcacagagacctcacacagtcctgcaccctccagtgccccaaccctgtactaataccaccaccagaggaacatgcacacagccccatgaaggctgccaccctagtacccactagtaccctgctgtagctgatgagcatgcagtatgcatcccaccatgctgctgctgctgctgcagctggcacaggcaaattaggacagatcacactgtcaccctgctatgatgtgctttggatggcatcacccattagagtattgtgaccagtagtctgggaacaccttggcccctccagcacaataggttcataacctcgaggagccagagaacaaagytggggctcaataccagtctcccagagttagaacatgcagtccaggagtcctgagctgaagcttggccccctaaaatcttccagaaatgaagtcagtcacctgaacccaacactactataatcaggtccccaaggtcaccaaataggataaagacaaaaaagacagcaacttcaaagatggaaagaataaaagcccacaaa

SEQ ID NO: 575681 - DNA, 551 bp, Homo sapiens
taaagggtacttatttctacaaaaactcctccttttcctctgccagtaatcagtcaaccagaactctctgccctgatagtcaacaggtagtctgctgtcaggcaggacttgcttgtttatggaatcaggactgccctgtacccctcagcaccagttctctgtctccctaagctgaaaaccagctgtcctgttctgaggaccatcctcagtgctccatgcaggtatcctctaccttctggaaataatattctacttttgcccatctaacagagacaaatgagtctaatggtgagagatttggggcagtatgggagacactgtgagacaggtggaacccctcaaagggccctgtgaatgctgccatctgtctcagagccagtcttgcttccaaccagagggagaaagtcaggtgggtgaaaggcaccaggacaccttsgcccaaatcttgaagaaaacacaagagacataataagggcacttaggagaacaaataaagctgggtcaaatttctcctcataattcctcttgcagggaagatgaagggaaaactg

SEQ ID NO: 575682 - DNA, 545 bp, Homo sapiens
agttgatacatgtttgggttgtttcyttttagggatattataaacaatgctgctatcaatattcatgtacaagtttttacatggacatatgttttgattttcttgagtatatacctaggagcttaatcactgagtcatatggtaaccctatgtttaacattttgggaaactgccaaactatttccctagctcagacactattttacatccctaggaggagtgaatgagggttctaatctctccacagcctcacaaacacttgttaatttttatattatagccatcttaggggatgcaaagtggtaactcattgtgattttgatttcccttaggggtaatgatgtgcctactggccattcatatatcttttttgagatacttctattcagattctttgcccacttaaaaattgttttatttgtctttgtattattgagttgtaagcattctttatatatctagatgtgagtcccttatcaggtctattatataatttgaaaacgttttcttcattctgtaggttctttttactttcttaatggtgt

SEQ ID NO: 575683 - DNA, 485 bp, Homo sapiens
aatggagcaatcttggctcactgcaacctctgcttcctgagttcaagcaattctcctgcctcagcctcctgagtagctacgattacaggtgcctccaccacgcatggctcatttttttttgtatttttagtagagacggggtttcaccatgttggccaggctggtcttgaactcctgacctcaggtgatccacccacctcaacctcctaaagtgctgggattacaggcgtgagccaccacacccagccagatatatgatttcaaatattttattctagtctgtggctttttctcattctcttaagattctctttgaaagagaagatgttcttaatgattaaaaaggctaattcatcagtgttttcttttatggaccatgcttttggtattgtacctaagaaatatttgctkattccaaggtcacaaaatttttcttatatgttttcttttataaactttacaggtttaggttttataaataggtc

SEQ ID NO: 575684 - DNA, 600 bp, Homo sapiens
cccaggctggagtgcagtggcacaaactcggctcactgcaacctctgcctccaggattcaagtgattctcctgcttcagcctcctgagtagctggaattacaggcatgcaccaccatgcccagcgaatattttgtatttttwgtagagatggggtttcatcatgttggccaggctggtcttgaactcctgacttcaggtgatccacctgccttcaggtgattcacctgccttggcctcccaaagtgctgggatgacaggcgtgagccaccgtgccctgacactaggttcaattttttaataaaattttgttttgacaaaattttatagagaaaagtttcaggaagagaataaagaactaccacaaatctttaacccagattcactcgctgtttccatgagaccctcttcctttgttttccacgtatccatctgtttatctgtctatacgtttattttaagtcactggaagtaagttctagacatttcacatctttgctcctaaatacttcaatttatatttcccactaagttaggaaatattttgcactaaagtaaggtaggtagctgggtgagtgttgatattacttatatagaaaata

SEQ ID NO: 575685 - DNA, 585 bp, Homo sapiens
ctgctttctccttcagttatttatttacttatttatttatttatttattatttattttagccctgtgcatctagttctctctgctagatttattaatatcatctcccagcttctacttctccttttagaaaagcaacctttcatttttcttcccttcttactctgccatttccttgaacaatggctcaaacagagatccccatacttctgcttgtcattcattgggtcttttcaattcagtttttctttacttgggcaagtattgattcagtgcccattgtaggaattactaaagaaaaaggagttgwtgagctaaacgcacacacagacatacttggaaataaatactataaccaaaaaagagttgtaaggtaataaggaaaaatacatgattgccacttaaatgaatgttgctggtaacagttattgtgcttaaagtagtccaaatattgttcatgaattatttattttgagttcctgaggcaggacttgagccaagaattcagggagtatatttgggaagagcaggaatcactggctggaactggggaagtgggagagaaaagggaaggcagtcaacaaagt

SEQ ID NO: 575686 - DNA, 431 bp, Homo sapiens
aaaatattgtgtttaatagctccatggcattctgctaagtgatatgtggtgaaatgtattagttatttattgctctgtcatcagtcattccaaaatctcagaagcttaaagctgcagatatgtrtaatctggcatggtttctgagagtcaggactctgggagcagctaggctgattggctcaggcttggattctcccacatggtcacagctgagatgttgagtgggaccatggtcatctcagggtttgactgaggcttgagctgcccacctccctcacggcactgctggctggagatgtcaatgcctcactaagcagaactctccttacatgatggcaaatgtcttcctgccaggtgggagacataggagaaagcaaggaatgagtctcggtgacttttacgaagttgtttccaatgtcacgtgccatcac

SEQ ID NO: 575687 - DNA, 319 bp, Homo sapiens
actgcactccagtctgggcaacagagcaagaccctctctctaaaaacaaaacaaaacacattaccatctgttaaacatgggacattgggacatgtgctatttataggaaaaacatagatgtattaattctgatttttctgggttctagaaactctcagcccagataaatacacacatacatgcaatgtatatcacttatgacaatgtttaaatataaaagattatgttayatatatacacatgtatcatgtatgtgtgatggttaattttatgtgtcgacttggctggaccatggtgcccagatatgtggtcaaagatt

SEQ ID NO: 575688 - DNA, 535 bp, Homo sapiens
cctacggggtgagcaagatgaaccastgggccatgaaagaaaatgtaagagcttctcattgtattaaatcttaatgagaaaggaaagagttatctgtaatgttttattatcaggtctctaatcaagatggataggcacccagaggaagccagtggcacctcactaggttatttgccttactgacatgctttgcagcttacatgtgtcacaagaagttcgtttaaagattgtatcacctaatgttactgagttatctttgggaatagaaaattgatttcaaaagtgtgtgcacagagatatcagttgcacctcggtagtccagagagcagaacagtttggcccagtcacccccagcaagggtcaaaaacaaaacaggagccccatgtggacacagattccaggcgtccacttctagctgacatggagtcagtcacagaaactgcatataccctttcccttaaaacaacagaaaaaagaatttaggaaatgatgtttttcaggacactttacatcaagcagtgaaggacagtgatta

SEQ ID NO: 575689 - DNA, 540 bp, Homo sapiens
gcaatgcccatgatttataattcaatagcagagacagaagcaggaaagggaccttcatccttgaaacaaaaagaaacgctgctgcatttacctagaaactccccaaggccaaagtccttgtctttgattttatttctgttttcacatggcctacagctmtaacggttcctacctacagcaaatttcagcaaatgaaaggactgagtagtactttttagagcctcctgggtggctcttttatgtaggaacaattctaacctggatccatctggaggaagtcacggtgggtgaccagggtccaccactgccctttccaccctctttgtcactatggtcaccaagctcacctctctatcccctgttctgatgaggagggcctggccttctaggcacaatcttagttggaaaaccttttatcactcaatagatgcttggcagcctttgctttccctgcagccttagaacgcgagtttagtaggggtttagggcagcccatcacagaaacaccatgtctcacccagccttccaccaggaaggtaa

SEQ ID NO: 575690 - DNA, 426 bp, Homo sapiens
gtctttgattttatttctgttttcacatggcctacagctctaacggttcctacctacagcaaatttcagcaaatgaaaggactgagtagtactttttagagcctcctgggtggctcttttatgtaggaacaattctaacctggatccatctggaggaagtcacggtgggtgaccagggtccaccactgccctttccaccctctttgtcactatggtcaccaagctcacctctctatyccctgttctgatgaggagggcctggccttctaggcacaatcttagttggaaaaccttttatcactcaatagatgcttggcagcctttgctttccctgcagccttagaacgcgagtttagtaggggtttagggcagcccatcacagaaacaccatgtctcacccagccttccaccaggaaggtaatgtga

SEQ ID NO: 575691 - DNA, 426 bp, Homo sapiens
gtctttgattttatttctgttttcacatggcctacagctctaacggttcctacctacagcaaatttcagcaaatgaaaggactgagtagtactttttagagcctcctgggtggctcttttatgtaggaacaattctaacctggatccatctggaggaagtcacggtgggtgaccagggtccaccactgccctttccaccctctttgtcactatggtcaccaagctcacctctctatcccctgttctgatgaggagggcctggccttctaggcacaatcttagttggaaaaccttttatcactcaatagatgcttggcagcctttgctytccctgcagccttagaacgcgagtttagtaggggtttagggcagcccatcacagaaacaccatgtctcacccagccttccaccaggaaggtaatgtga

SEQ ID NO: 575692 - DNA, 620 bp, Homo sapiens
ggtttagagtcatacatcctcacacgtctgttagtgtgaagaagtgcaccagtacctctcaaacttttatatcaatgtgtcctcacggcagaaggcagcctttctcttaaatcagaattcatcagaaagaggacaacccaagcctcatttcagagagagggctggtatactcttagaaacctatgtgactgtcatccctaagtayattcatgttttttctcttgatctcaagagaatcaagggaaactgatgcttcagaaagatgtcccacatttatcctgtggcactcaaagtacccaaggttgagataatatgaggaagattcaaggtgtcaagttcagtttcccaagatctattccacagaagatgagcaaatgtcacttcagagaccactgactgaaggagagtctggtcccagaaccatggagaattagaatatgaggtggagaactcagaaaaaaaatgttaaaatctctctggaaagtagaagcctgggagaaaaccaaaccaaacccattctctcattgccacccagagatactgtcaatgttttgagttcatgggggaagtgtaggcttttcccaccgtcaacatctgtaagggagtgaggcagcctggaa

SEQ ID NO: 575693 - DNA, 559 bp, Homo sapiens
cctgatgtcacatacagatgctgggagaatgtcaagtttctatagaaatttctaaacatttaccctgaatttctatgtttctatcattacatagagatgacagagtgttgacagactttgagtggtctttagtaaccaattgttgaaagtctggtttagctaaactagtttgtaartacctcggcaggtgcctttgctgtaggaattctcagagtctctataaactaatgagcattggaaatctgcaggggggaaacagagtatgcagtatcccccatgatgattcaaccccagattttatttttcactgaggatctcacacttagtagtgtatcttttctatgcattgggcactgggagacgacgtgtagtcatctcaacagagacctggccttcagatgccaccactcactgccgctctgtccaggcgagcatcaacttgcactgtttcagaagcaaaaggaaaatgaaccgcagccactgaagtccctcagaactgaggaaaagttactgactttcctgatttgtgttcaatctggctggccatgggtacagacac

SEQ ID NO: 575694 - DNA, 559 bp, Homo sapiens
cctgatgtcacatacagatgctgggagaatgtcaagtttctatagaaatttctaaacatttaccctgaatttctatgtttctatcattacatagagatgacagagtgttgacagactttgagtggtctttagtaaccaattgttgaaagtctggtttagctaaactagtttgtaaatacctcggcaggtgcctttgctgtaggaattctcagagtctctataaactaatgagcattggaaatctgcaggggggaaacagagtatgcagtatcccccatgatgattcaaccccagattttatttttcactgagsatctcacacttagtagtgtatcttttctatgcattgggcactgggagacgacgtgtagtcatctcaacagagacctggccttcagatgccaccactcactgccgctctgtccaggcgagcatcaacttgcactgtttcagaagcaaaaggaaaatgaaccgcagccactgaagtccctcagaactgaggaaaagttactgactttcctgatttgtgttcaatctggctggccatgggtacagacac

SEQ ID NO: 575695 - DNA, 559 bp, Homo sapiens
cctgatgtcacatacagatgctgggagaatgtcaagtttctatagaaatttctaaacatttaccctgaatttctatgtttctatcattacatagagatgacagagtgttgacagactttgagtggtctttagtaaccaattgttgaaagtctggtttagctaaactagtttgtaaatacctcggcaggtgcctttgctgtaggaattctcagagtctctataaactaatgagcattggaaatctgcaggggggaaacagagtatgcagtatcccccatgatgattcaaccccagattttatttttcactgaggatctcacacttagtagtgtatcttttctatgcattgggcactgggagacgacgtgtagtcatctcaacagagacctggccttcagaygccaccactcactgccgctctgtccaggcgagcatcaacttgcactgtttcagaagcaaaaggaaaatgaaccgcagccactgaagtccctcagaactgaggaaaagttactgactttcctgatttgtgttcaatctggctggccatgggtacagacac

SEQ ID NO: 575696 - DNA, 374 bp, Homo sapiens
tgcaggttagttttatacattttagggagacatgagacatcaatcaaatacatttaagaaacacattggtttggttcagaaaggcggaacaatttaaagcaggggtkggggggggctttcaggctataggtaaatttaaacattttccaattgacaattggttgagtttgtctaaaaacctgggatcaaaggaaaggatatgttcaggttaagctaaaagattgtggataccaaggttcttctgaagtcttatagtggctgcccttagagataatagatgacaaatatttcctattcagacctttaaaaggtgcttgacttttactaatttcttcaggattgggagggcttggaaggaaaagatctagttatgt

SEQ ID NO: 575697 - DNA, 374 bp, Homo sapiens
tgcaggttagttttatacattttagggagacatgagacatcaatcaaatacatttaagaaacacattggtttggttcagaaaggcggaacaatttaaagcaggggttggggggkgctttcaggctataggtaaatttaaacattttccaattgacaattggttgagtttgtctaaaaacctgggatcaaaggaaaggatatgttcaggttaagctaaaagattgtggataccaaggttcttctgaagtcttatagtggctgcccttagagataatagatgacaaatatttcctattcagacctttaaaaggtgcttgacttttactaatttcttcaggattgggagggcttggaaggaaaagatctagttatgt

SEQ ID NO: 575698 - DNA, 374 bp, Homo sapiens
tgcaggttagttttatacattttagggagacatgagacatcaatcaaatacatttaagaaacacattggtttggttcagaaaggcggaacaatttaaagcaggggttggggggggctttcaggctataggtaaatttaaacattttccaattgayaattggttgagtttgtctaaaaacctgggatcaaaggaaaggatatgttcaggttaagctaaaagattgtggataccaaggttcttctgaagtcttatagtggctgcccttagagataatagatgacaaatatttcctattcagacctttaaaaggtgcttgacttttactaatttcttcaggattgggagggcttggaaggaaaagatctagttatgt

SEQ ID NO: 575699 - DNA, 497 bp, Homo sapiens
gagggtatgctgccagcgcctggctcacccggtggcctcggcccagaaggaccagaggcagccagtacgctggagcccagggcctgggggcgagtctgtgagtggggagacccactgggccctgcaggaagtcacggagaagctggcccatggcaggactcacctccaccttctccatgacttgaaaatgccacctgagggcaggtcgctgccgagatgtgactgcaatattttggctccagagcagctttatggaccacctggaggagaaggcagacctgagtgagctggtgaagaaaaaagaactctgcttcatccaccactggcgagagagatgccatcagtgagtgggaggccagggcacggcagggggagctacagggccgttggaggggccccagcgtctgagccctgtcctcccgcaggaaaacccatcaccttttatcagaaccagggggccgtkccaaagatgcagcactgggaggaggacaccatca

SEQ ID NO: 575700 - DNA, 476 bp, Homo sapiens
atctcagctcactgcaacctccgccacccaggttcaagcgagtctcctgcctcagcctccctagtagctgggattacagacacacaccaccgtgcctggctaacgtttttgtatttttagtagagacagggtttcactatgtttgccaggctcgcctcgaactcctgaccttaggtgatccaygtgcctcagccacccttaagtgctgggattataggattataggtgtgagccaccacacctggcctctttttttttttttttttgaggcggagttttggtcttgttgcccaggctgccaggatggagtgcaatggcatgatcttggctcactgcagcctctgcctcctgggttcaaacgattctggctcagcctcccgagtagctgggattacaggcatacgccaccacacctggctaattttgtatttttgagtagagacatggtttcgtcatgttggtcaggctggtttcga

SEQ ID NO: 575701 - DNA, 476 bp, Homo sapiens
atctcagctcactgcaacctccgccacccaggttcaagcgagtctcctgcctcagcctccctagtagctgggattacagacacacaccaccgtgcctggctaacgtttttgtatttttagtagagacagggtttcactatgtttgccaggctcgcctcgaactcctgaccttaggtgatccacgtgcctcagccacccttaagtgctgggattataggattataggtgtgagccaccacacctggcctctttttttttttttttttgaggcggagttttggtcttgttgcccaggctgccaggatggagtgcaatggcatgatcttggctcactgcagcctctgcctcctgggttcaaacgattctggctcagcctccygagtagctgggattacaggcatacgccaccacacctggctaattttgtatttttgagtagagacatggtttcgtcatgttggtcaggctggtttcga

SEQ ID NO: 575702 - DNA, 589 bp, Homo sapiens
aatttcttccttatcagttttaatgtctcctttttcatctctgattttatttcattattctctcttttcttcttagtctggctaaaggtttatcaagtttatcttttcacaaacctactgtttttcattgatcttttgtgctgttttatttattaaagtttcatttatttctgctctgatctttattatttcttttcttctactaatgttgggcttggtttgctcttgttttttctagttctttaagatgcattgttaggttgtttatttgaagtttttcttcctttttggtagaggcacttatatctataaacttccctcttagcactgctttcactgcatgccatargttttggtatgttgtgtttgcattatcatttgtttcaaggaatttttcaatttctctcttaattccttcaatgacccattggtcattcagcagtatgttgtttaatttccatgtgtttgtgtagtttccaaaattcctcttattattgatttctggtttttttccattgtggttagagaataggcttgatattatttcaaatttttttaatgttttaaggcttgttttgcagcctaacat

SEQ ID NO: 575703 - DNA, 612 bp, Homo sapiens
gctggtggctcatgactgtaattctagcactttgggaggccaaggcgggtggattgcttgagcccaggagttagagcaacatggcaaaatctgtctctggaaaaaaatacaaaaaaattagctgggcgtggtggcacacgcctgtggtcccaactatttgggggtctgaggttgggggatcacctgagctcgggaggtcgaggctgcagtgagccgtgattgcaccattacactccagcctgggtgacagagcaagatcttgtytcaaaaaaacataaaaccaccacaaaaaagaataaagtgtgttctttgtaaccctggtcttcatgataaacacctgcgtatataccatgggtgctaggcagtgtgcaagacacgtggagagggattcatggtctcccctttcagggaacttgtagcctagttactctcctgctagcggtaaccatttataacttgatctataatttagatgttcttgaaagcaatatttcctttgacttgttttaacctttagacttcccactttccgaagaaccccagcccacgcacacacaccccttgttgctaattagagaactttgatatgcaggagaaagcactaataaagaa

SEQ ID NO: 575704 - DNA, 559 bp, Homo sapiens
agagatctcccagtacgggccgacagacacctcatataggtggctacccctctgggacgaagcttmcagaggaaggatcaggcagcaatattttccattctgcagtatttgctgttctgcagcctctgctggtgatactcaggcaaacacagtctggagtggaacttcagcaaactgcaacagacctgcagctgagggacctgactgttagaaggaaaactaacaaacagaaaggaatagcatcaacatcaacaaaaaggtcatctacaccaaaaccccatttgtaggtcaccaacatcaaagaccaaaggtaggtaaaaccacaaagatggggagaaaccaaagcagaaaagctgaaaattctaaaaaatcgagaacctcttctcctccaaaggatcgcagctccttgccagcaatggaacaaagctggacggagaatgactttgacgagttgacagaagtaggcttcagaaggtcggtaataacaaacttctccgagctaaagaaggatgtttgaacccatcgcaaggaagctaaaaaccttgaaaaaagattagat

SEQ ID NO: 575705 - DNA, 521 bp, Homo sapiens
attcaacaagcactttagaaaatctcctcagggacatctgagacaatgtcccactctcaagaagctcccaatcatgtggggggaagtagacacagatgggtaagtgtgtatattcattcatctatttaatatgtattgtttgagcacctactgagtgctatgctgggtgatggggtgcagggtggccatgctggacaggccctgtcttcagggagctcacaatttgtcagagaagacaaacatcaaacctgttattacaaaagagtgtgatgagggctgagggaggagctgcatggggctgggaggtctctagcaggcaggtgtgatagtctctctggaaaagaggtgtttaagtataaacttgcagatgatgtttgtgcagatgaagggaaggaagcaagtacactcccagtagaggcagcaacccatgtgaagattcagaggcaaggaagagtgagaagcatttgagggcttcacagacaaatagwgtagtatgtacttaggtgtggatatccatgtgt

SEQ ID NO: 575706 - DNA, 514 bp, Homo sapiens
tattttataggtctcttacaaagtgtcagaaaaaggtaacaagaagataatattaagcagacatcatttagtagtatagaatagagctggagagagcaacacaggagtttgggagaggggccctggaattgagtttgccaataatatagaagtggcatatcagagaaaggattatgaagcactttccccatttgtgcttggccatacctgaacttggaccttccacgaagagctctaaagcccaagggacatctctttagcctcacaaagcctcatyatcatcaaatgcccttcaaattagaagtgaattagttctcattgccccataaatttgtttcataattttactaattatatagtttctcttgacttaaccaccaagaatttcacgctctgcttttgaaatgtgtgtttcaaaagctgcaccacaccagctatcagaccacggtcaaaaaagcaaaaagaaaaaggaaaagagaggagagaagaaaagccacaattccacccatcttgg

SEQ ID NO: 575707 - DNA, 625 bp, Homo sapiens
acatgaattaatgcaggcagagcacttagaatatgcctggcatttaggaaggacttatcacatgttgtctgttattattaccwtatgataattttgttttggtatttcagttggttgtcctattgtgcttattccctattcttggtttatggtagtggcaaattaattaattaattaatttttattacatggataggtgtaccaagtgacaagttgatactgatcacaaaaatccataattcaggaaggtgagaattatgtggtgagagaggtagtgaggtcagatatatatgttagttgaggcatctatggaacatcaaggtagaggagtatggtcagcaatcagatacagaaaataaattggactttatgcagtcatttgggaatcatcagaatatgcctgttatttgaaactactaaagtgagtttaaagaatgagatgccgtatggagctccagagaacgtgaacattctagagaactccccaaaaataaagatgatgatatatatttggagacatagaagagaaccacagcaactttgggcactgtatgtggacagagaatttgtggtccaccccagtctttaaatgcctcttcacttctacaacagttgacatagtgtc

SEQ ID NO: 575708 - DNA, 557 bp, Homo sapiens
gcaattgatagcatggaatttgaaatagaaaatattaaagtatttctatttacagatgatataatagtgtacctgcagaactgtagagaatcaatgggaaaaattataagcagtaagataatttaataaggtaccaagatacaagattaatctataaaaattaagtcttcataaatacaaataataagttaaaatatatatttgaagagaaaactccaatttatgcaaacaacaaataagataaattaccttggaataatctgaacaagataaaacttacatgaagaaaactttaaaactctccttaaagacataaaaacatttttgaccaaatgggaaggcaatccatatcagygtgcccaagagcccttcaagttttgggacttgctagaaggactcacaagactcagtatagaatcatacttgtggctatgatttattgcacaaaaggatgccaagcaaaatcagcaaagggaaaaagtgcatagagcaaatcaaaaactagaataatagaagatgtgaattgaattacagagaaaaagaactataagtgattc

SEQ ID NO: 575709 - DNA, 340 bp, Homo sapiens
taatctctcaactagaatttaagacctaagagactaggaatctgtgtttacctcactgataatacccaatgcactacaacagtgcctgacacatagaagatatatgacaaatacattgagtaactaaacaaattaatcatgatttargcaagcctgattatttgtcccttcatacagaaattattaaaacttttatgttgattatacctgtaattatacacttagtttagcttgaggataatagtatatacaaaataatcataaagtatcatctgaaatcaaccacaatttcacctttcttggaaaaatatcacaaattatttaaacatcttttttctat

SEQ ID NO: 575710 - DNA, 340 bp, Homo sapiens
taatctctcaactagaatttaagacctaagagactaggaatctgtgtttacctcactgataatacccaatgcactacaacagtgcctgacacatagaagatatatgacaaatacattgagtaactaaacaaattaatcatgatttaggcaagcctgattatttgtcccttcatacagaaattattaaaacttttatgttgattatacctgtaattatacacttagtttagcttgaggataatagtatatacaaaataatcataaagtatcatctgaaatcaaccacaatttcacctttcttggaaaaatatcamaaattatttaaacatcttttttctat

SEQ ID NO: 575711 - DNA, 443 bp, Homo sapiens
aaaatgaagaaatagtatcctaatgatggccaatgactagatttggccctgaatgctgttcttggttaccaacttgtcttaatccccaatggctcttggcttaattaaatatatctttagccaatttggaggtctaaaacttcaatctatagctttgtttgcctataattcagaagaataaactgatagcttgatttaattatgcatacacacaaatacacacatagccatgtattttmaaagagcttcagatcagtgaaccaataatctctgaggtacatggttgtattagaggagaaacattaagcatctctgaaaacagtatttagacgtttcagaaaattttgttggaatataaaagaaataatatgagtaaaatctatcatcaagagatgatctaaaagttcaatgtaaaattctttgtaattctctgggacaaacac

SEQ ID NO: 575712 - DNA, 569 bp, Homo sapiens
ttccccctttgctcggtatttctccttgctgctgtcatgtgaagaaggacatgtttgcttccccttctgctatgattgtaagtttcctgaaatgtgagtcaattaaacctctttcatttataaattacccagactcaggaatgtctttattagcagggtgaaaacagactaataaacctccccagccatgcagaactgtcagttaaatctcttttctttataaattacccaatcttgggtatttcttcatagtagtgtgagagctgactaataacaatgataaatttgaaataaaaattaaaaagctttgtttgtctaatgataccatccaaraagtgaaaaggaagacagaaactatgaaaaaatatttgtagtgcacatatctgtcaaaggatttgtatctggaatttatgaaaaactcatgaatatttacgaaagtagacaacataataaaataagcaaaaagatttgaatatacactttacaaagaaaatgtacaaataaaaagcacatgaaaagatgttaaccttcaacagccaaataagtgcaatgagatgaaataccacacc

SEQ ID NO: 575713 - DNA, 587 bp, Homo sapiens
atccatacctctactaagaagcttttgaccacagtgtctttccagtttagcttttgctgctccattccttcatttgggcaagcactgctttgtttggactcagcaactacagtgatattcactttacctggaagacattcccaaatataaattaaattgatcattggtcccttctgtaatgagaaatgactagagtctgtgaaccatgtcttgaattggattaaccaaattctatcattaagttaatgcttagaacaaaataacttatttcttctccttcctaggtataatgtggtatcttccatttcacctgttccatgattttcatgattccttacattaaatgataaatttacttaattaaaacttaagaaattttaggaaaagtaacattttacaaagttgtctgagtcaatttcytgatattgattgtttataaaggttacttatgacaatataggctaataatgtcagcgaactagggctcctaacttcccaaaatcaagcaagcatagtaaaatatgatatagtagataggcactggattgaaataatgtcctagcaaggaatccattgtttttaaactt

SEQ ID NO: 575714 - DNA, 588 bp, Homo sapiens
aaaaaaccaaaagaggtagaagaaaaaatataataaaaataaatgatgtaatgaaaatcatttaaaataacattaaaaataaagataattaacaaatccaaaaactaatgggaaaaaaacacaaacacaactagtaataaaaaaggggaaataaattatgatagatttattttttcaaatcataagtgaacatattttatgccctctattttaaaacctaaatttaataagaaatatctagatccagaaactaacatattatagaaaattcttagtgaactaaaaaaggaaaattttttgactcgataaagtatgtctcacaaaatgctacagttacttagtaggtttacgcattacatttttaaaagcattccccaaaatatgcaaaatacaaccaggaagtccactatcatctctaatattcawattggagatctttgccaatcgaataaaacaaactaataacaaaaacctcagaagattaagttcagaaaggaagctaaaatataacattttcacacaaaatgctctttacacagaaaacacttttaaattgcacagaaaagatacaagagacaaatgggaacc

SEQ ID NO: 575715 - DNA, 562 bp, Homo sapiens
atcttcaccactgatgagtctatgtataygtacttggagcctgtaagctgcacacctgcagtcaattaagtattattgagaaaatgtcacttccaaaaacagacaaacagagcttctgaaaaaaaccacaaaagctcaccattccttctaatagtttcccttccctttcctaagcagttttaatatgtaggtacttcagatgtcttttataaagaaagttaatcaagatggcacaaaatgcttgtgccaactggtgttgctgctttttataaaatatccaattcacttaccatttcttcatgatggattagtaaacgttgatttctcaatattcctaagtgattgtttaacaacatttcttttactctctgcttgcctaaaacatatgctttaaatttattgatagtcagccttgtaaaaaatgtgtattattaaaaatggaaatgcttaaaaaagaaaatacaaattaccaaatatcaggatatctccaagagaaccaaaattagcattttaggctttttcccacaagttctatttctctttatatttatcatttatatta

SEQ ID NO: 575716 - DNA, 562 bp, Homo sapiens
atcttcaccactgatgagtctatgtatacgtacttggagcctgtaagctgcacacctgcagtcaattaagtattattgagaaaatgtcacttccaaaaacagacaaacagagcttctgaaaaaaaccacaaaagctcaccattccttctaatagtttcccttccctttcctaagcagttttaatatrtaggtacttcagatgtcttttataaagaaagttaatcaagatggcacaaaatgcttgtgccaactggtgttgctgctttttataaaatatccaattcacttaccatttcttcatgatggattagtaaacgttgatttctcaatattcctaagtgattgtttaacaacatttcttttactctctgcttgcctaaaacatatgctttaaatttattgatagtcagccttgtaaaaaatgtgtattattaaaaatggaaatgcttaaaaaagaaaatacaaattaccaaatatcaggatatctccaagagaaccaaaattagcattttaggctttttcccacaagttctatttctctttatatttatcatttatatta

SEQ ID NO: 575717 - DNA, 562 bp, Homo sapiens
atcttcaccactgatgagtctatgtatacgtacttggagcctgtaagctgcacacctgcagtcaattaagtattattgagaaaatgtcacttccaaaaacagacaaacagagcttctgaaaaaaaccacaaaagctcaccattccttctaatagtttcccttccctttcctaagcagttttaatatgtaggtacttcagatgtcttttataaagaaagttaatcaagayggcacaaaatgcttgtgccaactggtgttgctgctttttataaaatatccaattcacttaccatttcttcatgatggattagtaaacgttgatttctcaatattcctaagtgattgtttaacaacatttcttttactctctgcttgcctaaaacatatgctttaaatttattgatagtcagccttgtaaaaaatgtgtattattaaaaatggaaatgcttaaaaaagaaaatacaaattaccaaatatcaggatatctccaagagaaccaaaattagcattttaggctttttcccacaagttctatttctctttatatttatcatttatatta

SEQ ID NO: 575718 - DNA, 526 bp, Homo sapiens
tgcacacctgcagtcaattaagtattattgagaaaatgtcacttccaaaaacagacaaacagagcttctgaaaaaaaccacaaaagctcaccattccttctaatagtttcccttccctttcctaagcagttttaatatgtaggtacttcagatgtcttttataaagaaagttaatcaagatggcacaaaatgcttgtgccaactggtgttgctgctttttataaaatatccaattcacttaccatttcttcatgatggattagtaaacgttgatttctcaatattcctaagtgattgtttaacaacatttcttttactctctgcttgcctaaaacatatgctttaaatttattgatagtcagccttgtaaaaaatgtgtattattaaaaatggaaatgcttaaaaaagaaaatacaaattaccaaatatcaggatatctccaagagaaccaaaattagcattttaggctttttcccacaagttctatttctytttatatttatcatttatattaatatgtttgaga

SEQ ID NO: 575719 - DNA, 520 bp, Homo sapiens
  misc_feature 204: n = A,T,C or G
ccagaaggcaatcgaatacaacagtgggtgaatgaggagtctgtgggagggattctacaactctccttccagttaatctcagagcccatcctcggatggtatgaaatcaccgtggagatgctcaatgagaagaaacatatcactccttctctgtggaagaatatggtaaataatagcaatgaaaatattacctattaataaaanaattataaaatmtttccaattttgcaagggcaggattattaaataatgaattttcaagtgagtatctcttcctttcctctttccttgtcctctgttactattttagggttctccatctactgtgatttttatctcctagttcagcccataatcttcctgcaattctctgttaacctaggctatctatcttccttttgtagtatctggattctattttatatgatagtttctgggatgtaaagcacttcttatgagaagaatggaattaacattagtcatatgttagccattagtcccttcatattttctcctaaaa

SEQ ID NO: 575720 - DNA, 563 bp, Homo sapiens
gggatttttttcatatgctggaaacggcattcccagtttgcytaacagacaacccacaccatcatttttcccactctctccacacccttaactttatgaatgagatccttcttgtctagtaaatgatgaaatcttttcccacagtagaaggggatttcccatgcgtagactgagaattagaaacaactgctctgtatcctgtatgcaaataacattgttattgtactgtaaaaaacttacgtatgtctgtgttcatgtgtatatgtgttctgttattcttactgtttcccatttaaacagttagaagacttttaccaaatttagaaggtgtattagggaggtctatatttatatctatctctcaatttggataatgtttatgtacaaagttcacttttgagatctgggggaaaatctaaaaaaatgaacaatcataccttaagtcagatgtaacttagagagttggaggcaagtataaataatattaatagaattactccatatgtattataattccatggaataagaaaataaatcataattctaaacatgagtcccagata

SEQ ID NO: 575721 - DNA, 563 bp, Homo sapiens
gggatttttttcatatgctggaaacggcattcccagtttgcctaacagacaacccacaccatcatttttcccactctctccacaccyttaactttatgaatgagatccttcttgtctagtaaatgatgaaatcttttcccacagtagaaggggatttcccatgcgtagactgagaattagaaacaactgctctgtatcctgtatgcaaataacattgttattgtactgtaaaaaacttacgtatgtctgtgttcatgtgtatatgtgttctgttattcttactgtttcccatttaaacagttagaagacttttaccaaatttagaaggtgtattagggaggtctatatttatatctatctctcaatttggataatgtttatgtacaaagttcacttttgagatctgggggaaaatctaaaaaaatgaacaatcataccttaagtcagatgtaacttagagagttggaggcaagtataaataatattaatagaattactccatatgtattataattccatggaataagaaaataaatcataattctaaacatgagtcccagata

SEQ ID NO: 575722 - DNA, 563 bp, Homo sapiens
gggatttttttcatatgctggaaacggcattcccagtttgcctaacagacaacccacaccatcatttttcccactctctccacacccttaactttatgaatgagatccttcttgtctagtaaatgatgaaatcttttcccacagtagaaggggatttcccatgcgtagactgagaattagaaacaactgctctgtatcctgtatgcaaataacattgttattgtactgtaaaaaacttacgtatgtctgtgttcatgtgtatatgtgttctgttattcttactgtttcccatttaaacagttagaagacttttaccaaatttagaaggtgtattagggaggtctatatttatatctatctctcaatttggataatgtttatgtacaaagttcacttttgagatctgggggaaaatctaaaaaaatgaacaatcatacyttaagtcagatgtaacttagagagttggaggcaagtataaataatattaatagaattactccatatgtattataattccatggaataagaaaataaatcataattctaaacatgagtcccagata

SEQ ID NO: 575723 - DNA, 373 bp, Homo sapiens
gacaaacactgtcacacattttaaatagcaaactgacatgcataactacataaagctttctttttaattcataaaccttaatgaatatagagtgcccgattttaactaaatggatcctttaaacagataatggtgattatactataaataactaaagtttcctgattccttgcattataagtaacctagttttcaacacccatwttagcatgtgggcgtggttttctaaccttagatactaaatgtcataatttatttttaggctctcccatggtggaaattgaaatgggaccatcttacattcagcattttctcctaagtccctttacatagctctgtaatagttttagaatataaacacatcataacacat

SEQ ID NO: 575724 - DNA, 615 bp, Homo sapiens
ttatactaaatgatgaaaaactgaaagcatttcttctaacatatagaacacgacaaggatgcctactgtcaccactgttactcaacagtactggaagtcctagcttgagcaatcagagaagagatggatataaagggcatcaaaattggaaaggaataagtaaaattwtccttgtttgctgatgatatgatctcatatttggaaaatcctaaggactccacaagataaccattagaactaataaacaaagtcaataaagtttcaggatacaaaatcaacatccaaaaatcagtggcatttctataggccaacagtgaacaatctaaaaaagaaattaagaaagtaatcctatttacaatagataaaaataaaatacaaatcttaggaattaactaaagaagtgaaagatctctacaataaaaactataaaaacattgatgaaagaaattgaagaagacacacaaaaataatggaaagatatttcatattatgtattggaagaattgttattgttaaaatgttcatgctacctgaagcaagctacagagtcaatgcaatccctatgaaaataccaatgacattctccacagaagtagaaaaaagaatcctaaaact

SEQ ID NO: 575725 - DNA, 585 bp, Homo sapiens
tgacatataacattaaccatcacattgatctcaagtacaagagcaaccaaacaaatttttagggagacccaaccacagcccagattacaacatgaaaagacttcagatactattgctatctattataaatgtagttaacaaaagcagtcaagaaggcttttttgatatcaaccaagaacaatcaattaaaaaactatgagctgtttcttagattttattccaaaatacaaataaaaatgtattctttttatattccctaagctatgtattgaatgtctatcaagaatacgttgtatatgttatctcactgggtgaagtaaatatttgtattaccaaactggacttcatggaaggtaatgataacacactctcatagagtgcttactataagccaggtgctatgccagcccctttacatgtattaatttatttgtcctttccaaaaccttataagattactatttatatatatatatatwtttattatactttaagttctagggtacatgtgcagaacacatgtgaaaaagctgactcctttacttggaatcacttggactttagatttagactctattttgctat

SEQ ID NO: 575726 - DNA, 614 bp, Homo sapiens
gccttctttgctttcagacttattactcacaatagtatcttcttctgggaatatataaaacatgatcactacctgcttaaaatctcccaatgccttcccattacatttacagtaagactccaactcctaatcaaggcctacagagaccttcrgaagacagacttgtccaactccatgtttacgccttagtaacctttatcttcccaccatgctctagccacactggcctcctttatgttcctgaaatacctggaaggtaattcctgcctcaagccctttgtacttgctgctgccagttttctcctttttgggctttgccaatggcaagttgttctcatcattcaggactcagttcaaatatcaccttctcagagaagccttcccaggtaacctgtcttaaggagcacctcttatcacatcacatcacatcacagttttgctttcccttaagcacttttcattctcagaaattattttgattacccaattagtttactcttatcatctgttcctcccaacaagaatatacatggtataagaatgaggattatattattcttatccgtcattcttacctctagcaccttgatttggtcctttctcatagtacataa

SEQ ID NO: 575727 - DNA, 614 bp, Homo sapiens
gccttctttgctttcagacttattactcacaatagtatcttcttctgggaatatataaaacatgatcactacctgcttaaaatctcccaatgccttcccattacatttacagtaagactccaactcctaatcaaggcctacagagaccttcggaagacagacttgtccaactccatgtttacgccttagtaacctttatcttcccaccatgctctagccacactggcctcctttatgttcctgaaatacctggaaggtaattcctgcctcaagccctttgtacttgctgctgccagttttctcctttttgggctttgccaatggyaagttgttctcatcattcaggactcagttcaaatatcaccttctcagagaagccttcccaggtaacctgtcttaaggagcacctcttatcacatcacatcacatcacagttttgctttcccttaagcacttttcattctcagaaattattttgattacccaattagtttactcttatcatctgttcctcccaacaagaatatacatggtataagaatgaggattatattattcttatccgtcattcttacctctagcaccttgatttggtcctttctcatagtacataa

SEQ ID NO: 575728 - DNA, 619 bp, Homo sapiens
cttcatatattttaaagctttattattatgggcttatacattgattattgttagatcttccctgtttaattgaccttttaatcttactgaaatatccctcattatctctgatagtgctttttgtcttgaagtttattttgtctgatattagagcaaatctttcttatgcttactgttttcatggtatatgtttggctttcctttattttcagtctgttgtctgtatttttaaagtacatctctrgtagacaacatacacttgggcttcactattttatttagtgtatctctgattgttaattagagtgcttcatccatttctatgtaataaatcattggtatagttggattttaatccaccatttccttacttgttttttatctgtcccatttgtgtattgaccttctgttccttatttctagccctttttttttggttaattattttttttctagtgtttaattagtgttggattttcaacagcacccttttgcattattttgtggttattttggaaattaaagtatacactttaacttgtaatattctacttagagttactattgtagcacttgagaaaaaaatgcaagaaccttgaaacagggtagttttatttac

SEQ ID NO: 575729 - DNA, 616 bp, Homo sapiens
aatgccagaaagattcagtgatttgtccaaggccacacagccaggtaatagtggagctggtattaaaaaaacctagtattcccgacttccttcaagatgctctgccccaccatgtatagagaaaggctgtgattatctacatccataaatctcaacagtcactcatgttgctgtttgaataaatgaaattagtaagttaggataggaacactccacttcttttcaaacattaaaatacacacacacacatgcacacacacacacacactctataaacattatggcctaagcagtcctgatacttctacataaataacttttatgtagatgctagttggaaacattagggttctcacaccccatctccacaagttgagattcggtatagtgatgcccttagagctgtaccttaaataagtccctgagagactgtgatctgctggttctaaagtagtgacctactttaaacatattttgragatttgtattaatctggcatccttataagtctatacaacacagatgataactagtcataataggaattgagattaaataagagtcaagacattttggtttctaaacaatgacagaagagaccatctagagcaattgc

SEQ ID NO: 575730 - DNA, 631 bp, Homo sapiens
cttgtttttacttatgtaatgccagctgaattagattatctctttttcctttgctgaattgccggaataatttggtgctgtgtgaaaaaaaaaatgcaagtatagtgccctgtcatttttgttaaagaaaacagttttgaaagttaagcaaagtaaacattttgcaaagttaactgaagcaaaatcagtttatttctgatttcyagaggcaagtaaatgatgacatgtgatggactcctcactaaactatgggtcatgaaattcaggatttatgttcactttcaccactaattgattgagtgcattctttttaacctctggagaattgtagcagtggcacttgccacatttcctactgaagtattttgcagattaggtcaaattcttaaagtactagcactttaatgaaacgtacttgctcaaagattaggaaaagcatggagaaagctgtttcttgattttataaagaatccaggaagtgtttgaaatacagttggatttcaacagatcttgattgtgaccttccagagaggcattcataggtctggaatttcccaggatgctttgccaggaattagtgttgaattaccagaaaatcagtatgacacgtagcacacacttatctagatag

SEQ ID NO: 575731 - DNA, 595 bp, Homo sapiens
tgtctttccttttttaacaaatatccacagtatttcagagattccttagtcatctcagggaataaattgagtacttcaggctgcctacattgaagagaaggttctcatatgaatgccaggtagtttgtgtcccattcattcctaccaaggttcttgtttaagaatgggttgttactcaattgttgtaatgtaaatagaaatttttctgtctttaatcatttcagcttagttaacccacagttattcttttaaaaactaggaaatacaaatgagtaaaaggtaaaaaaattcacataagctcagagataaccagggtttacatttggtatgtatcttttcagacatttttctacacacatacatatattgtgaagggaaccagaatatgccactttggcatgaggattattttgagctgaaggcaattaagaaatagcttatgcagaaaaaactctctgccctcctccatctgactaaaagcaggacataaatttctacttgtaaaggtgtttacctcttttgtaccagaaagaagagaacaactcttttttttwaattacactttaagttttagggtacatgtgcagaacgtgca

SEQ ID NO: 575732 - DNA, 502 bp, Homo sapiens
ctatagccacaccccaccatgcctggctaatttaaaaaaaaagttttttttttttttttgtagagatgggacctcactatgttgccctggctggtctcaagttcctgggctcaagcagtgctgcctcagctttccaaagtgctgatattgcaggtgtgagccactgcacttagatgggtgtgaacactttatgtggggcttcaattccaaatccctaccttatgcaagttcactgccttgtttcctgtccccaagtagccattaaaatccaagactttagataatggaaattggcaattgctttgaggccaactgctccttcagtgtcagtctataactgtgggttacagcttgcttgttagtctttgcccttgggattttcctttactttttttttttaaatgaactcaactatgcatgagaaaggattgatgttatatagtattyaatttatctaggtatcttgtaggagaatttttgaaaatatctaggctgccattcc

SEQ ID NO: 575733 - DNA, 583 bp, Homo sapiens
tctactgggtaaatcaccacaatttattaatccatgctcctgaaatgagcatttggattttaaaaatacttttgctatgataagcaatgttgcctatacaaatttgcaagaatttcccacaggatacataccaaggagcagaattgctaggtaaacacattttcaactttacaagactgttctaaatttgttttttccaaagtgattggacatatttctatctcctccaccagcatataatatctcttggacctgcatctttgccaacccctagtattatcagatttcttaatatttctcaatctagtgactgtaaaatatctctttgggatcttaatctgcagttyacagactaataataaggttaagcaacctttcctattttatttgtcacttggatttactctcctataatatgcctaccataccttttgaccattttccagttgaatttttattgatttataggagttctttatatatagcatattatttagcagtggtaggtgatatatcttgaatatatccaattcacatacatttttctcattcagttctcatagttctataggtactttacagt

SEQ ID NO: 575734 - DNA, 600 bp, Homo sapiens
aaaaaataaggggctctcctgtatgtcttgatcataaattcctaagaagcaaaccattaataatggcttatagcatggacttgaaacaaaatatattagaaggcacatgcaagaaaacgtttagtaacaaaataatttcaaaattatttaagtagaattcctagaagataaattctcattctctttatttactgattagaatcaagatatcaagattttagtccttggtcagcaactgccgctggaaatgtaattagattcgaaataacacattctaaatttatcttttaactctcacaaattgtattctgcctctaaactttatccctgagcctccactccttctccctgggttgttccaaactttcatttacctttatgattaacctcaaaaacttctctttttaaagcaaaatggtgatctaatgccaagaaactgggagcatggttcctgattctgtgttgcataattygaagagtggatgtacccacaatgtggagaacagtcagcggggttgtgggtgggaaacaagagaaaggaggacagattcccctgtccccagcatgcacggaacatctgttcgtttatattaaatggaa

SEQ ID NO: 575735 - DNA, 512 bp, Homo sapiens
ataatcctcacatgtcatgggagggacccagtgggaggtaattgaatcatggggatgggttttccccatgctgttctcatgatagtgaataagtctaacaagatctgatggttttataaaggggaattctcctgcacatgctccctcttgcctgctgccacgtaggacagatgwgcctttgcttctcctttgccttctgccatgattatgaggcctccccagccatgtagaaccatgagtccactaaacctcttttctttataaattacccggtctctggtatgtctctattagcagcatgagaacagactaatacacatgcataacctccatccctgccaccatggccactttgttcatgggcccactgtgttataacaggagtgactgaggaaagagattgactagtatgcacagaatggatcatcctattcacctgatgattaaagtcctctgctgagaaggtgagcattcacgtaggacacaaatatctccacatcttttgcccactc

SEQ ID NO: 575736 - DNA, 537 bp, Homo sapiens
tgttctcatgatagtgaataagtctaacaagatctgatggttttataaaggggaattctcctgcacatgctccctcttgcctgctgccacgtaggacagatgtgcctttgcttctcctttgccttctgccatgattatgaggcctccccagccatgtagaaccatgagtccactaaacctcttttctttataaattacccggtctctggtatgtctctattagcagcatgagaacagactaatacacatgcataacctccatccctgccaccatggccactttgttcatgggcccactgtgttataayaggagtgactgaggaaagagattgactagtatgcacagaatggatcatcctattcacctgatgattaaagtcctctgctgagaaggtgagcattcacgtaggacacaaatatctccacatcttttgcccactcagatctagccctatatgttttccccaaattacttttcaccaattttccaatccccttcctttcaagtccctgaccatctggcaaaatcattagcta

SEQ ID NO: 575737 - DNA, 633 bp, Homo sapiens
ttggtgatagagtgctgctgtgcacacctaactttatggtttggtgggtcagataacacccagataggtagctctggtcatgtagtgactttataactcatgttcaagcattcagtttcttctaaagcacagtggcaggccaagagctgtctctcaacaggagagtagttatctaggatgatgccaggggcttgctccaaaatgactaaaagtctccactacgatttacctataggggtctgccaaaggctcsaaacagcatccctgtctgccactgacacctcaaataccattggatatactggatcatatggcccaagtggcagagcagcttgcatagcagcttggagctcctgctgctccaggagactgcagagccttctcctggagttccactcaaaacttgcagcttttttagtcactcaatagatgggccaggataacacatccaaatgagaaatgtgttgcttccaaaatccaaataagcccactaggattgtgcttctttcttggttttaggaggggccagatgaaagaacttaaccttcaccttagaagggatattttgacatgccccacaccactggaccctagaaatgtcactgaagtaaaaggcacctgaattttagtaga

SEQ ID NO: 575738 - DNA, 546 bp, Homo sapiens
tatgtgtatacacacagacacatgatayatatatgtatattgtaatatacacacatggatacacacacatattctgtacacaaactttttgttagatgtatgtgatacagacaggaggcagagaaacactgggtagaagaaggtgaatccccagcaaaggccccaccctcaagcctggaaacacacagccctaaatgggaacagacattcctgtttttgtacccaactcttgccttttgaccctccatgcctgctatcatgtacccatataaaccccaaaccccaggatctatgaggagaccaacagaagagcagaagagcagcagagcaacatggcagagagggagagaaggaaaggagcatctgaatatcaagaggagtttggctggggacgatcagagaggagtcagctgcaggacagctgaactccagggtaagatcatcttcccactcccacccctttccagttccccatctatctcactgagggccacttctaccactcaataaaatccccacacttaccactcatcaagtccatgtgac

SEQ ID NO: 575739 - DNA, 550 bp, Homo sapiens
cacgagttgtgtcaactgtcaatttttatgtgaaaatacaattgttatcagcaacatttgggggaaaaaactayccttttctatgtagactactttgtcatgtttgttggcagttaattctatatatgttttgttttgaattctgcatgctgctttattgatctttaacaccaataccacactatatgtagctgtactagtcagggttctccagagaaaaaaaaatcaatagaagatagatagatagatagatagatagatagatagatagatagatagatatgtattttatatacatacatatgaatatatttattttaagaaattaactcatgtatttatgaaagctgccaagttccaagatctacagttgttaagctggaaacccaagagagccaatggtgcagttctagtccaaagaacagcaggttgagactcaagaaaagctgatgtttcagttcaagtctgaagacagggaaaaaaatgatgtcccagttcaaaggcagtcaggaaaaaggaatacctcctgattcattgtgagttaattttt

SEQ ID NO: 575740 - DNA, 628 bp, Homo sapiens
ccagccatgggtttgtacactcaaatatctattattgggtaaattcctttcctattcaggtcccaagataacttgggggctcctgggactgttaaaaagtgacattctttactcacaggttaggaaccctacacagagactgtgtagacaatgtrtaaggccagtgtttccaaggggcttttattggctctataagtcaagtttgattccttaaaagaaagcacaccattccagtaaaagccttggtaaaataaccagtttttccaattgtgtcctgttacaaatgaaaacagattcttattgcacttatgcaaataactatgtttccataagttaagaatactcacaaatagtttccaaattctggagaaatcaggtagagagaaacaaacaggctctgaattttgttcacaggagtacactttactcagttgttaaaggctgtcaatagctcaaaagaaaagttttccagactctgaaaaacaaaacaaaggataagcaaaattttaagcaaaaagttagaaaagactacttcaatcttctattagtacagtccattcagttaacttctgttctgcttgatattcaggaacatttcagctctccatgagagtcctgaaagcttttc

SEQ ID NO: 575741 - DNA, 609 bp, Homo sapiens
cagcctggtcaacatgatgaaaccccgtctctactaaaaataaaaaaagtagctgggcatggtggcagatgcctgtaattccagctgtttgggaggctgaggcaggagaattgcttgaacccacgaggcagaggttgcagtgagctgagatctcaccactgccctccagcctgggcaacagagcaagactccatctcaaaacaaacaaacaaacaaaacaaaacaacataacatctgacaagcaactcatcctatgtatgttctgttttagaactctacattctgtctcattaccacaccatatgtagctttatagcaaatcttgaaataagctaaagtctttcaactgagttctttttcaaaatcattgaacgattctaggcccattgcattttcatacaaatgtttcggtctgtcaattttttattgaatctatggatcaatttggagagaaataccatcttgacaatattgagcatttcaattcrtgaacatggtatgtttctccactgacttacatttttcttaatgtcttccagcaatgcatttttagttttcattttctacacaggtcttgctcaagtttattaaacttatccttaaacattt

SEQ ID NO: 575742 - DNA, 576 bp, Homo sapiens
ttttgaaaggatccctcagggctgaagggagtgctcaatgaagaatgaatttggaatgggagtcttactgtagaagctggcattcaatcctcattgaggaaaattgcccactgaatggcagagaagttcactgagttatctgtattagaattggtccacaatccctggacagaatcaaacaaccttccaggattcagatgagcagaggtttgtggacagtcatgcagaaggagttgggatggcacttctagcatgagtatttaagtgcattatatacattggaggacctcagtgaggtggtcaccagattcatgccagagctgcaaggtcactgaggcactaygtgccctctcttgcagcagggacagtgtgccactaagatgtttcctcacatatgctcagttgacagaaatatattttgcacacatatattttgctgtacaagaataagaagaaataaaacagcagcaaattggaccagaaagagaagcactcttgcaatttccttccagcatctagcactgacaaaacttaatattatgctcactatataggagaaataattataaagagtcc

SEQ ID NO: 575743 - DNA, 582 bp, Homo sapiens
tacagtggttaaaagcccagggtttgccatcctggctgtaatgtgttctaggtttgtgatcttgagaaagttacttaacttctttgggcctgtttcctcctatgtagaaaggggatttatttsttcagcattcattcttttaacaaatattttttgagcactttgatcagcactgtgctaagtcctgggaatatactggagagtaagacagacaaggaccctgactcacatagcttacaacttaacagtggacataaatattaaacagacaactacatccataacccagcacatagaattattgtgacaaatcctgtcataataaattttcctagtacgcactaaccttgtccaggagtgtcagggaagacctcctcagagagggcatacttgggatgagctctgagggatgagtaggcattaccagataaagaggccctagagacgggaaaaagcagggctcttaagtaaagggatgccaaggtggctagaactgagtgtacaaggtcctccctacctcacaggtgttcaaagattaaatgaggtaattggtggtatacacaagtgacactttgagaacca

SEQ ID NO: 575744 - DNA, 582 bp, Homo sapiens
tacagtggttaaaagcccagggtttgccatcctggctgtaatgtgttctaggtttgtgatcttgagaaagttacttaacttctttgggcctgtttcctcctatgtagaaaggggatttatttcttcagcattcattcttttaacaaatattttttgagcactttgatcagcactgtgctaagtcctgggaatatactggagagtaagacagacaaggaccctgactcacatagcttacaacttaacagtggacataaatattaaacagacaactacatccataacccagcacatagaattattgtgacaaatcctgtcataataaattttcctagtaygcactaaccttgtccaggagtgtcagggaagacctcctcagagagggcatacttgggatgagctctgagggatgagtaggcattaccagataaagaggccctagagacgggaaaaagcagggctcttaagtaaagggatgccaaggtggctagaactgagtgtacaaggtcctccctacctcacaggtgttcaaagattaaatgaggtaattggtggtatacacaagtgacactttgagaacca

SEQ ID NO: 575745 - DNA, 582 bp, Homo sapiens
tacagtggttaaaagcccagggtttgccatcctggctgtaatgtgttctaggtttgtgatcttgagaaagttacttaacttctttgggcctgtttcctcctatgtagaaaggggatttatttcttcagcattcattcttttaacaaatattttttgagcactttgatcagcactgtgctaagtcctgggaatatactggagagtaagacagacaaggaccctgactcacatagcttacaacttaacagtggacataaatattaaacagacaactacatccataacccagcacatagaattattgtgacaaatcctgtcataataaattttcctagtacgcactaaccttgtccaggagtgtcagggaagacctcctcagagagggcatacttgggatgagctctgagggatgagtaggcattaccagataaagaggccctagagacgggaaaaagcagggctcttaagtaaaggsatgccaaggtggctagaactgagtgtacaaggtcctccctacctcacaggtgttcaaagattaaatgaggtaattggtggtatacacaagtgacactttgagaacca

SEQ ID NO: 575746 - DNA, 577 bp, Homo sapiens
tcacccaaagaccccagctgggctccctcatttcgggtccaatgcttgttacatttaagtagaaacctttcatggaggaatagaagatatgcactgcttgcagaattgggttgccaacagtcatctgttgctagggtgaagataatgcattcctacaaggaaaccagaacttcctgttattaagagagtatgctgatasctacctggttcacacactgaccatccctagaggttgtcatataaaatagcatctgagacaagacaaatccgtccagaacactctattataataaaaatcttggccatggccccacttatgccaaatggtatttgacacattgggtccccaggtttcagtgaaactcacgtatggggtctgttattgttacgattagcactttggtttatgtcatcacagcaatacctgaaggaaaaaaaggcaaaaatttcagggtgaaaaattttcagctgattgcaggcttaatgccactgtgcatagcttgagtaatctttcctgtacttgaggataggtcctgagcttgctgtcttaggacccattttgacaattcatgtgagt

SEQ ID NO: 575747 - DNA, 553 bp, Homo sapiens
tccctgtctctctgctgagtgttttttccattagttcactgtgtcccagccagactcctgaaaatgtgatttttttttcccccaaagcgtcaagacttatgtaatactgagtgtggcccattttggatgggcttgcttctttgctattttgagagggctgccatggtgacatcatttatttttctgatgtgattaaagaaaatgtcagctggcatctgaggtgttgggaggcaggggaagggtggcatcatcrgtgtggtcatgatattaagcttccagaacacccagcccagggcttttcacttgactctcagatgtccttgcttaatcggggtagggcttttgccactgctaggctttgatcacaatgagaggactctttgtgattccatctctaatttccatcctactcccttgcaggcagtgacacgtagaatctgtttccctttgtccttcatcatttgcctcgttccagcctaaagccatgcagaagacaaatctttattgagtgtttgctgagcagcagatactgatctaggttccgaccatggga

SEQ ID NO: 575748 - DNA, 541 bp, Homo sapiens
gggctggtatcactagcatttctttgagtgaatcattattagagccagcctgttgtctgtttttatacatatgtaattcccaaagttttgtaaggatgtgtgattctataggaagtgtcagaaaagtttcagtatggccatgtgtggcgtaatgtatttgtgagagaaaaatcatgactaattgtaaaagtggcacactgactattagtacagaagaaaagagctggaggtcactaccagctattttgcaaagatcttatgtaaaactctgacttcctgagctagacttccctgaagttctactcccaagagaattacagagctcagtggaaaataaagatcaagtggaggttgagaagatgtagagaagccaatgaatttaattaactgtctagaacaactgaatgargttggattaacaaaaattagcattcacgaatcaaaattgaaagagcctgaaaggacagaaagtagagtctttagaatcttgtgtaagtcgaccatggcaaaaacagtgagaggccattccttgaagactgag

SEQ ID NO: 575749 - DNA, 495 bp, Homo sapiens
tttgtttttttttttactgcttccacccccgcagcaaatgggctctattataaggaaaagaaaataggcaacatttatgccgatcaaaagattagcaaggttgctattggttgatttaaaagtttacttagagctttctggaagccagggtgaaaaggcaacatgattaaataagaaaactaattgtccagatgaaggaatgaaatgaaaggcaggtggataaaagaaggaacagcagagaggaagggaggaaggacggaaagaaatgaagaaatcctacatggtgmttgttgtaatcatgtacacttggccttagcgcagctcagtgatataagccccagaactttccagaacaaaaagagactggaaggaagtgtgttacatctgtgaggtttcaggtgctatattcaaagaagtctcatccatgtaacatatttattattttctgggtggatgtctgtggtcttctacgtaaaatgcttctgagggggaagt

SEQ ID NO: 575750 - DNA, 496 bp, Homo sapiens
cggggcgaatggactatggctggattgggagtccacttcctcctctgtaaagatgacagacgagggagatctcgcgttctgggggtgccctatagccctcttttggccagaagcggtggatcacgcctgtaatcccagccytttgggaggccgaggcaggaggattgcttgagcccaggagttcaagaccaatctgggcaacatagggaggctacatctctcaaaaaataaataaataaataaataaataaataaataaataaaaataaagccagcgtcgtggcagggcgcctgtggtccctgtggtccctgtggtcccagctactctggaggctgaggcgggacgatcgcttgagcctgggaggcagaagttgtagtgagctgagatcgagccactgcactccagcctgggcgacagagcaagacactgtctcaaagaaaaataaataaataaaataaggccctctttttccgggaccaacagactctgagggca

SEQ ID NO: 575751 - DNA, 496 bp, Homo sapiens
cggggcgaatggactatggctggattgggagtccacttcctcctctgtaaagatgacagacgagggagatctcgcgttctgggggtgccctatagccctcttttggccagaagcggtggatcacgcctgtaatcccagccttttgggaggccgaggcaggaggattgcttgagcccaggagttcaagaccaatctgggcaacatagggaggctacatctctcaaaaaataaataaataaataaataaataaataaataaataaaaataaagccagcgtcgtggcrgggcgcctgtggtccctgtggtccctgtggtcccagctactctggaggctgaggcgggacgatcgcttgagcctgggaggcagaagttgtagtgagctgagatcgagccactgcactccagcctgggcgacagagcaagacactgtctcaaagaaaaataaataaataaaataaggccctctttttccgggaccaacagactctgagggca

SEQ ID NO: 575752 - DNA, 609 bp, Homo sapiens
ggatcatgatcgtattacaaaataaaacatatggttaatggggtagcatctttattttgggcaggttgagacatattatgaccctgcccatgatgattaggtccattgytctcacatggtgtgaactagaagtgaaagagaggtagaacttcaaaaaagattgaaatgctgctacagaagaaaaagaaaatactgaggtctctgtaaccacagatatttatgttataagaaatcaatacagattaaaaattaggtaaaaaaattgatttactaataatcttgatctttagccacatttctctgaaataaatttgctatgatgccgtgatggggatcagcaagctacgttttccaagttccttcaagtgggatcctgctacgttctgctattgggaggtactagagaaacataggcaagagaatggaagaatagatctccttttcctgtttgtttgccgtccttgctgatattctcccaagaacatccccttgccctaggagcagtaattgtttcagtttaccaattttttcagagccccagaaagtgcctcttcagaggtaacagcagcagttggaacatatctctccctcagaggtctagcctcagct

SEQ ID NO: 575753 - DNA, 609 bp, Homo sapiens
ggatcatgatcgtattacaaaataaaacatatggttaatggggtagcatctttattttgggcaggttgagacatattatgaccctgcccatgatgattaggtccattgttctcacatggtgtgaactagaagtgaaagagaggtagaacttcaaaaaagattgaaatgctgctacagaagaaaaagaaaatactgaggtctctgtaaccacagatatttatgttataagaaatcaatacagattaaaaattaggtaaaaaaattgatttactaataatcttgatctttagccacatttctctgaaataaatttgctatgatgccgtgatggggatcagcaagctacgttttccaagttccttcaagtgggatcctgctacgtwctgctattgggaggtactagagaaacataggcaagagaatggaagaatagatctccttttcctgtttgtttgccgtccttgctgatattctcccaagaacatccccttgccctaggagcagtaattgtttcagtttaccaattttttcagagccccagaaagtgcctcttcagaggtaacagcagcagttggaacatatctctccctcagaggtctagcctcagct

SEQ ID NO: 575754 - DNA, 609 bp, Homo sapiens
ggatcatgatcgtattacaaaataaaacatatggttaatggggtagcatctttattttgggcaggttgagacatattatgaccctgcccatgatgattaggtccattgttctcacatggtgtgaactagaagtgaaagagaggtagaacttcaaaaaagattgaaatgctgctacagaagaaaaagaaaatactgaggtctctgtaaccacagatatttatgttataagaaatcaatacagattaaaaattaggtaaaaaaattgatttactaataatcttgatctttagccacatttctctgaaataaatttgctatgatgccgtgatggggatcagcaagctacgttttccaagttccttcaagtgggatcctgctacgttctgctattgggaggtactagagaaacataggcaagagaatggaagaatagatctccttttcctgtttgtttgcygtccttgctgatattctcccaagaacatccccttgccctaggagcagtaattgtttcagtttaccaattttttcagagccccagaaagtgcctcttcagaggtaacagcagcagttggaacatatctctccctcagaggtctagcctcagct

SEQ ID NO: 575755 - DNA, 609 bp, Homo sapiens
ggatcatgatcgtattacaaaataaaacatatggttaatggggtagcatctttattttgggcaggttgagacatattatgaccctgcccatgatgattaggtccattgttctcacatggtgtgaactagaagtgaaagagaggtagaacttcaaaaaagattgaaatgctgctacagaagaaaaagaaaatactgaggtctctgtaaccacagatatttatgttataagaaatcaatacagattaaaaattaggtaaaaaaattgatttactaataatcttgatctttagccacatttctctgaaataaatttgctatgatgccgtgatggggatcagcaagctacgttttccaagttccttcaagtgggatcctgctacgttctgctattgggaggtactagagaaacataggcaagagaatggaagaatagatctccttttcctgtttgtttgccgtccttgctgatattctcccaagaacatccccttgccctaggagcagtaattgtttcagtttaccaattttttcagagccccagaaagtgcctcttcagaggtaacagcagcagttggaacatwtctctccctcagaggtctagcctcagct

SEQ ID NO: 575756 - DNA, 619 bp, Homo sapiens
agatcttcttgttgaattgaaccctttaccactatgtaatgcccttctttgtctttcttaatctttgttagtttaacatctgttttgttatttcccttttttattgcacacaaaaattgaattaggtgcttgcaaaatcaaggattagccctttaagcaaattttggttatagtaagtaatgggacagaaatttcagggacccaagagactaagaaaccagtttttaaaatgtattgtacaatctctttattctctactcaagtgaatatcatccagaattcagatgttataacattggcttctgttcattgctggtgagcagaagtctttcaaacatctgagctctctggactcaccatgttttaccaacatgatcatggggggttttgcctactgtgagtgacatcttcaaagggagagtacgttctggctcttttgattaaggtggaaatctttgtgagtgcccctttgagaactgttctaagagaaagtacctattgctaatttggtaaagtgatattaaacaacgtgctggaatagttttttgaayatagattttccataaactctgcaatcattccatgttcagtttgtagcaatcatgtgaagtcattcttt

SEQ ID NO: 575757 - DNA, 605 bp, Homo sapiens
cttttgctcctgtgtacccaaagtttagctctcacctataagtgaggacatgcggtatttggttttctgtttacatcttaattcatttaggatgatggcatccaggcacatctatgttactgcaaaggaaaggatttcattctttcttctggctacatagtattccatggtgtatatgcatcatagtttctttatccaatccaccattgttggaaaccaatgttgattccatgtctttgctatttcatatttgcaatataacatgcaagtgtgcagaagctctttagtttaatttggtctcacttgtcaacttttgtttttgttgcttttgtgttttagtacttagtcataaattctttgcataggccaatatccaaaagagcttcttaggtctaattctaggcttcttatagtytaaagttttacatttaagtctttaatcaatcttgagttaatttttttatatggtgagagacaggagtctaatttcattcttctgaatatggttagccagttttcccagcaccattaattgaatagggtatccttgccccattgtatttttatcaattttgttaaagatcagttggttgtaggtatgggac

SEQ ID NO: 575758 - DNA, 605 bp, Homo sapiens
cttttgctcctgtgtacccaaagtttagctctcacctataagtgaggacatgcggtatttggttttctgtttacatcttaattcatttaggatgatggcatccaggcacatctatgttactgcaaaggaaaggatttcattctttcttctggctacatagtattccatggtgtatatgcatcatagtttctttatccaatccaccattgttggaaaccaatgttgattccatgtctttgctatttcatatttgcaatataacatgcaagtgtgcagaagctctttagtttaatttggtctcacttgtcaacttttgtttttgttgcttttgtgttttagtacttagtcataaattctttgcataggccaatatccaaaagagcttcttaggtctaattctaggcttcttatagtctaaagttttacatttaagtctttaatcaatcttgagttaatttttttatatggtgagagacaggagtctaatttcattcttcygaatatggttagccagttttcccagcaccattaattgaatagggtatccttgccccattgtatttttatcaattttgttaaagatcagttggttgtaggtatgggac

SEQ ID NO: 575759 - DNA, 492 bp, Homo sapiens
gtataacgtagactaggtttgtcaatagatggttcttattattttaggtatgttctttgaatgcctagtctattgagggttttaattatgaaggcatgttggaytttatcaaatgttttacctgcatctgttgagataatcttatgttttttttcattttaaattctgtttatgtggtgaatcacattaactgatttgcatatatttgaacaactcttacatcccaggtataaagttcacttgatattgtattatctttttgatgtgctgctgaatgtggtttgcaagtactttgttgaggattttttcatctatgttcatcagatatattggcctagggttttgttttttgtgtgagtatttgccatattttggtatcaggatgatataggttttgtagagtaagttagaggagaatctctcatcctcgattttttggaatagtttcagtaggattggcatgagctcccctttgtatgtctggtagaattc

SEQ ID NO: 575760 - DNA, 490 bp, Homo sapiens
gtataacgtagactaggtttgtcaatagatggttcttattattttaggtatgttctttgaatgcctagtctattgagggttttaattatgaaggcatgttggactttatcaaatgttttacctgcatctgttgagataatcttatgttttttttcattttaaattctgtttatgtggtgaatcacattaactgatttgcatatatttgaacaacycttacatcccaggtataaagttcacttgatattgtattatctttttgatgtgctgctgaatgtggtttgcaagtactttgttgaggattttttcatctatgttcatcagatatattggcctagggttttgttttttgtgtgagtatttgccatattttggtatcaggatgatataggttttgtagagtaagttagaggagaatctctcatcctcgattttttggaatagtttcagtaggattggcatgagctcccctttgtatgtctggtagaat

SEQ ID NO: 575761 - DNA, 492 bp, Homo sapiens
gtataacgtagactaggtttgtcaatagatggttcttattattttaggtatgttctttgaatgcctagtctattgagggttttaattatgaaggcatgttggactttatcaaatgttttacctgcatctgttgagataatcttatgttttttttcattttaaattctgtttatgtggtgaatcacattaactgatttgcatatatttgaacaactcttacatcccaggwataaagttcacttgatattgtattatctttttgatgtgctgctgaatgtggtttgcaagtactttgttgaggattttttcatctatgttcatcagatatattggcctagggttttgttttttgtgtgagtatttgccatattttggtatcaggatgatataggttttgtagagtaagttagaggagaatctctcatcctcgattttttggaatagtttcagtaggattggcatgagctcccctttgtatgtctggtagaattc

SEQ ID NO: 575762 - DNA, 492 bp, Homo sapiens
gtataacgtagactaggtttgtcaatagatggttcttattattttaggtatgttctttgaatgcctagtctattgagggttttaattatgaaggcatgttggactttatcaaatgttttacctgcatctgttgagataatcttatgttttttttcattttaaattctgtttatgtggtgaatcacattaactgatttgcatatatttgaacaactcttacatcccaggtataaagttcacttgatattgtattatctttttgatgtgctgctgaatgtggtttgcaagtactttgttgaggattttttcatytatgttcatcagatatattggcctagggttttgttttttgtgtgagtatttgccatattttggtatcaggatgatataggttttgtagagtaagttagaggagaatctctcatcctcgattttttggaatagtttcagtaggattggcatgagctcccctttgtatgtctggtagaattc

SEQ ID NO: 575763 - DNA, 537 bp, Homo sapiens
tgttgttaggctgcatatgttcagctttcagtgaagatgaacaaatgatgataaatgagaaactgaaagaaaacaaaccaataggtgttttttaagaaacaatattattaaagtgcatgtgttttctactgaatgaaagcaacatagaccttttcctcacattggtagttagtaagatrtataaaaacaactttgtaaagaacaattaatacaggttaatgaatcattgtgaaaaggggataacacactttattgtagcaatgatctgcaaggtgttaaatgttaaaaaagatgaagaacaattgagtagttatttgatcacagtgtttattaaattgcttttcctgtatctggcaagctttacagaaatgtcttcaacagaataactgtgttaaaagccaaatgaaatgcattttgaaatatgattcttcacttggtgtgcaggtataatctcaggtgtaattcagacaagagacaaattcaattttaaagttccatttgttacaatttgatgattgtgattaaagaaccataaaa

SEQ ID NO: 575764 - DNA, 537 bp, Homo sapiens
tgttgttaggctgcatatgttcagctttcagtgaagatgaacaaatgatgataaatgagaaactgaaagaaaacaaaccaataggtgttttttaagaaacaatattattaaagtgcatgtgttttctactgaatgaaagcaacatagaccttttcctcacattggtagttagtaagatgtataaaaacaactttgtaaagaacaattaatacaggttaatgaatcattgtgaaaaggggataacacactttattgtagcaatgatctgcaaggtgttaaatgttaaaaaagatgaagaacaattgagtagttatttgatcacagtgtttattaaattgcttttcctgtatctggcaagctttacagaaatgtcttcaacagaataactgtgttaaaagccaaatgaaatgcattwtgaaatatgattcttcacttggtgtgcaggtataatctcaggtgtaattcagacaagagacaaattcaattttaaagttccatttgttacaatttgatgattgtgattaaagaaccataaaa

SEQ ID NO: 575765 - DNA, 568 bp, Homo sapiens
tggcacatgtatacatatgtaacaaagctgcacgttgtgcacatgtaccctaaaacttaaagtataataataataaaattaaaaaaaaaaaaagagaaaccttgtctctactaaaaagaaaaaaatacaaaaaaattagccagccgtggtggcgggtgtctgtagtcccagctgctcgggaggctgaggcaggagaatggtgtgaacctgggaggcagagcttgcagtgagccgagatcgtgccactgccctccagcctgggcgacagagcgagactctgtctcaaaaaaaaaaaaaagaaaaaaaataaaagaaaagaagcaccatatttcttctctttggcctatttatcagccagaaacatggggaaggtaggttcctgaatattggaagaccacagaaaatgcraagaaaccaggctcacatttattttagtgaccaccactgcaagtttggtttgggtgagaagtcctgtgttttgggtttgatccttgaggcctcatgagtttcagccctgctgctgaaagtgtcttggttttagccaaactgtggaggaaagtgacattga

SEQ ID NO: 575766 - DNA, 559 bp, Homo sapiens
acagattctcagcttcttgtcttcttatttcaataacaacgaaatggtttttctcactgtatgatccttatagcagtcttcttttcccccagttttacagtaagtggtgggaggacaactaggaactgaagcatgacagatgtcagcagatggggttgcccatgaagaatgggaggtggtgtggggatagggaagagggagagagagagagaagcagaagcagggttagacaaggaacacccaaattctgtttaaaagagaacattcagtcttgccttctctcatttagagaaagcatttccaattagttacctcttgcttgctttatactgtggctcttgaatttgtagggaaagtaaaaatcaccatggataaaagacaggatctgaattcaattggaattgaaagttaactctggaagagtctcatcatgctatatttacrgtgtggctgatgatgatgataaaaataaatgatgaggataacattataattaaatgatgatgttatgtgataataatgaataacaatagatatctcactgttattaataaatctg

SEQ ID NO: 575767 - DNA, 581 bp, Homo sapiens
tcaatgtgtctggctaggataccttcaagcatcatttcagtagggaggactgcccgcctctgtcctagtgtatcactgagtctcactgtctggaaccagcttcgagtgaatcacaggcccattcctgtggcatcctaaccaggaaatatggcatggcccttggctgagactgggtgcacgcacrctgggagctgggtgtggaatccatccctcccaaaccatgtgagctgaatgtgagggaggggtgatttcccctttaccagcatcagggaatacgatgccacaagaacagctgatcactaaacaagatactgttatttctttctctgtgacaaaaatgtttaatggcttaaaaggaaagaataaataatagttggtgggcattcataaagtaaagaaagaatcatatttcaaagggagattatatttaataagccagagaggaaaaagaccagaaatttaatgaggacagatcagtacaaggatctgggtgaagaagaaccttttcctttatgcaccttggaggagagtcatcatagttagtgatactaacctccactgtattgggtgaccattttata

SEQ ID NO: 575768 - DNA, 677 bp, Homo sapiens
aagactttttttgcaggtgatggacacccgcttttaactagttatggctttggtagaaagaatttactggctcgggtaacaaaccactggaaggtaagcaggttggaagtagcctaaaggtcgcctggatttatatattcgaacagtgtcatatctgttaatctgtttctttcttttcccatctctctttttctatgttagttttattctctactcctgaaaaaggcctttttcttaaaaaatgattgcaggcagtgtggggttctatagtctgaaaggcctaaaggaacttcttttccagctcctagtgggaacacccttggaatgactctggccagcttgggtgatgkgcccacctcaacttttccgtgtctctccatgagtctagcaagtgatagaacattgtgattggcatgtggtgggttggaatagaagagcaggtcccccagaaaagcagggtgtcattttggtaagtcaaaaccataattgtccactgtagtagctgaggccaaggcttggtgtggaggtggcatggaagtcatcaactgatgaaacctactgtgtggggtgccactcctcgtgtatacagtaacttatccccattttgaagataatttaggcacaaaattcactctaagtctcagaaagtgtaattttttgtgattagtaaatgtggt

SEQ ID NO: 575769 - DNA, 677 bp, Homo sapiens
aagactttttttgcaggtgatggacacccgcttttaactagttatggctttggtagaaagaatttactggctcgggtaacaaaccactggaaggtaagcaggttggaagtagcctaaaggtcgcctggatttatatattcgaacagtgtcatatctgttaatctgtttctttcttttcccatctctctttttctatgttagttttattctctactcctgaaaaaggcctttttcttaaaaaatgattgcaggcagtgtggggttctatagtctgaaaggcctaaaggaacttcttttccagctcctagtgggaacacccttggaatgactctggccagcttgggtgatgtgcccacctcaacttttccgtgtctctccatgagtctagcaagtgatagaacattgtgattggcatgtggtgggttggaatagaagagcaggtcccccagaaaagcagggtgtcattttggtaagtcaaaaccataattgtccactgtagtagctgaggccaaggcttggtgtggaggtgrcatggaagtcatcaactgatgaaacctactgtgtggggtgccactcctcgtgtatacagtaacttatccccattttgaagataatttaggcacaaaattcactctaagtctcagaaagtgtaattttttgtgattagtaaatgtggt

SEQ ID NO: 575770 - DNA, 596 bp, Homo sapiens
actttctggcaacactgggccctctaagaatttgccacatcaaactgagaagttgctttgagagctttctggcagaaggagcttttgcagaggtcacgyttaccaagtcatcattccattgagatatgtggtattctagtgattcccaaatgctgatcctcagattggctgcagcagaatcacttggataactttcgaagaaatgattcctaagctaagtcccacccacagagattctgagtagatctggtggaggaagcctgggaatccacaggtttgtagaactctccaggtgattctgctacagagccatgacgccgtatgctctagtctatgcagtgatcattgatacagggtagaactttaagagttcaacatacactgacatttcttctcatcttgaataaagtaacaaaggtttaataaagagaaaaagaaatggattgtggatactaaataatacctttgttctgaagaagacaatgaaaagaactttaacaaccatttaagaagcagttaggggttaaagatgattgagttgatttgaaccctaataagtgttatctgttgattggagagcacttaataaatattaa

SEQ ID NO: 575771 - DNA, 596 bp, Homo sapiens
actttctggcaacactgggccctctaagaatttgccacatcaaactgagaagttgctttgagagctttctggcagaaggagcttttgcagaggtcacgtttaccaagtcatcattccattgagatatgtggtattctagtgattcccaaatgctgatcctcagattggctgcagcagaatcacttggataactttcgaagaaatgattcctaagctaagtcccacccacagagattctgagtagatctggtggaggaagcctgggaatccacaggtttgtagaactctccaggtgattctgctacagagccatgacgccgtatgctctagtctatgcagtgatcattgatacagggtagaactttaagagttcaacatacactgacatttcttctcatcttgaataaagtaacaaaggtttaataaagagaaaaagaaatrgattgtggatactaaataatacctttgttctgaagaagacaatgaaaagaactttaacaaccatttaagaagcagttaggggttaaagatgattgagttgatttgaaccctaataagtgttatctgttgattggagagcacttaataaatattaa

SEQ ID NO: 575772 - DNA, 534 bp, Homo sapiens
atatctgacatttaaatggtgaaaaacacctcttgaaggacacgtgtcctatttgtttgtagatatgtacactctctgttacactcgttcatcgtaagtcacatattagtattcagcaatcaacaccaaaattgtatatgcctttttgtggtcaaagtttcataggtagaaacattaattgctaagcagggatccatattcatatatttttctccaaaagaaaaaatacaaagtatcttttatgccttcatagaactagcagtaccagagtcccaaacgtgatatcattcaggtaaaagagatatgtaatcaataataacaaaaaatgatagcttctgaaaacatgtagttgaatgtgtttactttgataataaaagcacttgcaagcaaacattgggggaaatagttgaaaaaataaggattagtatttattaacttaaataaatataaacatttataatatataagtakaaatatataatatatacaaaatataaataatatataactttttttgtcatgtaccaggcattg

SEQ ID NO: 575773 - DNA, 538 bp, Homo sapiens
gtgacttgatttgtgcagtttttctatgtctcctaataatggtatctcttaggatttcctgctttcaaagatgatttggagtcagtgtattttaaaaaggcatttcacttttctagggaaagtttaatgctaaggattaggtgacaagattgatctttttttatcacaggggctaatagtgactagctccaataaataatagaagtataaataaaattaatttctagagyctcttttattacctttgtctaacagaataatttgattatttttcaaccccttaggttttttattagaacgtgtttgaaaaattgtactcatttaatttttttttagattcagatgtttttgaagtcagaatcccagaagaccatataccagatacaggtaatgcagtacctataacaaaaattttcattttggatgttagtattttctctcaaacatgaattgtggatggattctttcaaccttcctggaactcaagggcaaggagttactcttcaaagcagcttggagacaccagctggtagtatgt

SEQ ID NO: 575774 - DNA, 589 bp, Homo sapiens
ccaggtattagctagagaccttaggcatgttacatggactttctgatccttggtttcatcacgtgtaaaatggagctatcaatagaagtctgaataattggggtaatagcttcctcttagggatattgaggggattaaattgacccacaaggaagccttccccacactgtgacccagtatcttatcccccttacaatgctggagctaaataaataagcatcaactcattgttcagtctatcagttaatcaatattctattattcaaaatggtaatgctaattgtagacacttgtcatacatcatgtatgtaattattttgtttatgtgagcttttattctgtaagtatgtaagtgtataggttcatctaactgtattgtgccatttacatattcatgtatttttatatatttgttstatttacatgttcatgtctttttatatgatattatttattgatcttatatcttgaaatattctttgaaaagccatttagaatgctagtaccatattgcactgtactttatggccttattattggacatttaggttgttttctatttttctactccatataaataacacttact

SEQ ID NO: 575775 - DNA, 592 bp, Homo sapiens
  misc_feature 585, 586, 587, 588, 589, 590, 591, 592: n = A,T,C or G
cagtgaataccttgtataccgttctgaaatacccagtctcagaaggagagcaagcaatgctactcaaggcctatttcacagaacagtaattatgtgggtgctaagaggtacccacgtaatcaccccaaagcatatgtggtcaaatacaattggaatagtcaggtgaaacagctgtaacacagtcctttcttgtgagactctgaggagcctttgccatgctaacatcaattgagagtctccaagtagatgaaaagtggaatgtgctacacagctttgaaagcttgtgtggccttggtgccctctgtgtctcttaaaattcattatactggcctggcataatgcagaacacatctcagtaacatgtagataaataagaagtatttgtgggggatgtgggaggtgaartggtctgaggagggtggtatagtggctagagaaataggtttcaaggcagaagacaagggtggtgtgagcacctgaaagattctctgaacacaaggaagaaatctggtgtgggacaaaggcttcaggagagtcatatgatgctaatcaaataccagaattgttgccttagttctggggcannnnnnnn

SEQ ID NO: 575776 - DNA, 592 bp, Homo sapiens
  misc_feature 585, 586, 587, 588, 589, 590, 591, 592: n = A,T,C or G
cagtgaataccttgtataccgttctgaaatacccagtctcagaaggagagcaagcaatgctactcaaggcctatttcacagaacagtaattatgtgggtgctaagaggtacccacgtaatcaccccaaagcatatgtggtcaaatacaattggaatagtcaggtgaaacagctgtaacacagtcctttcttgtgagactctgaggagcctttgccatgctaacatcaattgagagtctccaagtagatgaaaagtggaatgtgctacacagctttgaaagcttgtgtggccttggtgccctctgtgtctcttaaaattcattatactggcctggcataatgcagaacacatctcagtaacatgtagataaataagaagtatttgtgggggatgtgggaggtgaaatggtctgaggagggtggtatagtggctagagaaataggtttcaaggcagaagacaagggtggtgtgagcacctgaaagattctctgaacacaaggaagaaatctgstgtgggacaaaggcttcaggagagtcatatgatgctaatcaaataccagaattgttgccttagttctggggcannnnnnnn

SEQ ID NO: 575777 - DNA, 556 bp, Homo sapiens
aatattctttttaaaaatacttgtccagcttgtatttggaggacagrcagagcagtagatggggtgatagagagaggaatgatccctggtcagagtcttcagctactgaccctagtaattcaatcttgagcccaattttgcatactcagcaaaagaaaagttttgcagtcaagcagacccatgctttttagaaagcaagttataaaatatctgtcattacttgaacatgccatttgggaggaggagactcatccctcctagccgaaaaaccgtatcaaagtattcccccaaataccttattaaagtattcaaagtaatctcaaactttctgcctcctgagaagagttctgggaagcacacttttctatttcttgttgcatttctagaatgttttaccactcattgtagttcagcatccccagaaaactgacaggcaggccatcaccctgcagttggtataagatggaaagagggagaggacttgctatgatcctgtttgggcaaagagacccctccctgtccccatgctcacctgtcccatgagcaagttcaagtc

SEQ ID NO: 575778 - DNA, 551 bp, Homo sapiens
ccactgagcccagtgcaggcatctgaccattttatcatcatctcagcaagcaagccagaaaaggcagctcatttaatcaacaatttcatggaaactaagacttctctttccaaatagcataaatattccttttcctttttattttacctcctgaaaattattatgaaggtctgctcacacatatttatggcatacctttcttaaatcttttgtcaaagaaggtagcaatgtgtatggctatacatttggacagatttattacaaaaatataatacatatacacrtgctcaaattatagctctatatggcatgtatataacattgatgaaataaaaataatagcacatagtaagctctcagcaaatatttgcttgattctttgcacaaatgatttatttcactccttacaacagccctatgcagtcttctctctgactcttacccacttctccctgttgtagactcgaagtgaagctgccatgaccgtcctgagtggccatgtcgtggtctgcatctttggcgacgtcagctcagccctgatcggcctccgg

SEQ ID NO: 575779 - DNA, 543 bp, Homo sapiens
ctgtgccaccttctgtttttaactaaataaatgcaaataacagagttctttayttctgctgtacagaaggccaactccttctgcagctcagccccaacccctgttcatttagaagtccagcaacgtgttcatggttgtgtttgtgtgtgtgtccgtgtgtgcatgtgtgcatgatattcttgactgcaaaacattaggacttcagtctgaaaaaacagtctgggactccacaatttagtgtgaggatatgggatttaggagtcatgtaattaactacttcctaatcataatgaatgcatagtccacaaactctcaaaacattgtagagaattatgcatttcaacatttgatgtaattctccacatcacaaattcatgcaaatctcacttatcctccaaatatttttcttgtaagttcacatccctgaaactgagaaacaggggccaggtgcagtggctaatccctgtaatccctgcattttgggatgctgaggcgggaggaccacttaagctcaggagttcatgagcagcctgggcaacatgg

SEQ ID NO: 575780 - DNA, 501 bp, Homo sapiens
ttggctaaacattattctgggtgtgtctttgagggtggagggtgtttctgcatgagattaacatttgaatttgtggagtgagtaaagcagattgctcccccaacaaccctcaacccaacccatgtgggtgggcttcatctaacccactgaaggcctgaatagaataaaaaggaggagtaagggagaatttcctccctctgcctgatggtcagtcttaagctgggacatcagtctcctcctgccttcagatctagacttataccattgactttgctggttctcagattttcagactcagacagagactataccatcttctttcctgggtctccagtttatagagcttgggatttcccagccactataaccctgtgggccaattctttataatcaacatctctctctctctctctcacgcatgtgtgtgcacacacacacasagagacaccattgctctgtttctgtagagaaccctaatatacttactttgtcccagaagca

SEQ ID NO: 575781 - DNA, 529 bp, Homo sapiens
ttcttcatcgacagaaccctttaaacatggcttgagggcatggcccactttcatacctgcagagctgcatactaaattgaatggtccttcagaattggagagaaaatgtggtgtcaatcaaccaacaactctagtgccaaatacttctgccttcctcagccacaatacagtcrttaggggcagaatcaactagctcagtgtgctctgtgctgctgacattaactagctttttctttctcctctgtttttggaaaaccacctggaagacctttcttcttactccagaaggtaatgggaggaattttgctaagtgaagacatcatttctcatttataggacttgaaagaatattctctgattcccagtgccacatcaaaggcctcaccttaaatcctggtggactttttcttccgtggatatttttattagtaacgttagttgctgcagagcccatgaagagtagctccatgtttcttgcttggaaataatccctccttcatttgactgattttaaaagtgaggctgtgac

SEQ ID NO: 575782 - DNA, 465 bp, Homo sapiens
cactgagaaatggaaacaaaacaccagtggttctgaatatccatgattcactgtaacaaaaytgaagggttaggaagccagagagagttgagagagatgaggggtggtaatttccaaattaggaggtccatgacttaactttgatataatttaattttacaacttaagagtataattttacacagagagtgttcaattcttctggaacatctaccaccagggagacaactcctcatcagcttttagttaaagagtttgttcatgatttgtataatggcccagaggagagctcttcctggccagtactcatatccttcaagcctgatgaatcgctccaccagatgggaggtcttaccttttaagaaagtggacccagaagtctctaggtgaagatacctgacagggagtcaatggaaatggactatgccagcagtagcgaaaaagagccaccttcccagttggtgg

SEQ ID NO: 575783 - DNA, 528 bp, Homo sapiens
aacggctaacaataacagttgcaaacagtccctgagagccctggtttgtcctgtgtttcctcctgaactcatatcaaggaggaggtttacatcacccattctgatctgtttgcctctgaacaaatagtttcaaaagttatttcatccccatcatccctccccttatccttaaagacggtatatttataagaactttctttctccacaaatgtgtcagattctattattgtacataaacccaaaatggcagtatggaaatgaaaaccagggaccgttgctaatgagaagcatagcattccagagtttgatgggcttctcttctgctacagcatttgattaaaaaaattgtttttcaaaatgatttatctacggtgaagcaaaaaaatcatccttgtttccctcttctgtgtaaataacaaatcaatattwccagtaaaagaaataagaaagagaaaacaagggaatgtctgcagattgtatgccagatccggatgcatttaagataaatttatgttcatgtctttaatt

SEQ ID NO: 575784 - DNA, 550 bp, Homo sapiens
agacccactcggctgcatccactaccactggccttggggatctactgcttctgtttccttttcctaaccattatttcttccttattcctcatcatcttccccagttcaaatatatcttacatcttgagtgtgttgaaggtgacaggcaggcagctctcacctgctggtgtgaagtattggctcaggctgagcagcagacacaaagcaagtgggagccaccagtggggacagctggccagcgctgaggctcttgcttccagctgcaggtggtagcttcagttagagctcatgggaattattctttaaatccctgtatatggcaaggagacttttctcctcctttctcaggaagtcagcatgtctccttacatcgatggggggaaaataataaagtgcttcacatcccattcactgaaaatccactgtagttttcaamcacttaaccttctcgagtggaaatacaaaacacatttcctgtgaagtactgccacacagagtcctaaagaagtcatgtggcatttctaagtatcatgcacaattttcttttcgg

SEQ ID NO: 575785 - DNA, 546 bp, Homo sapiens
caaatggcaggtgcaattgatattctttgtgaaggataaattatgggaaagaagatctggaaacaaagtaccagaaaaaaccacataggcaaaaatccaccaatgcttccaatgaggagtggcagggttactaccacatatagagcatttgctctggaaaatcaaggacttgtgacattcacattcagttttattaatttcagcaaacctgattattttggtgtgagtcagggcagcataaaaccaatgcattgggyagggctcatgtgaggaaaggagtctgttgtagctagagaggtgtcagcatctgcaggtgggcacatcaacctgcccaaatgtagagcaacattcgaggccttttatggcggtcagggtaatttgactctgactcgaggtaggcagcttgaatgcaacagcagcacccaaatgattcctcccgcgtggaggtatccaaaagctgaatgtctcatagctattacctattaggagccattattctgtttgttctgctcaagccaaggaagagttttcctgattgttctcaaa

SEQ ID NO: 575786 - DNA, 552 bp, Homo sapiens
aggcatccccagcatagacatcatgtcctactaccatgtgactttgagtaagttccagaacttcactattttttagcttcctcatctataaactggagataataaggacctatctcacagagtggttgcacgaattcagtgagtgaatatatataaagattgcctggtatatgttgaattattatttttatcatccttcattaacatatgaaattaacaaagaaacagagatgaacttgacsaagatcacatagcggatgagtggactgctagatcagaagcttgccatctcccatagtattgatggaaataataatgataagccactttaaccataactagtgcttttttttttttcaaatgactgactgtcatcaagctagccttataagaggtcatatcagctacaggcagagaagcccacagatagtggctgagagttgaacagcttagtataacagactataaaagttaaatggagtcaatttgtttaatttctaggtcatggaataattgtcccaacagaaataagccaacaaaaataccaagaga

SEQ ID NO: 575787 - DNA, 601 bp, Homo sapiens
tagcatattgcacacagtaaccaagacacacagtgtgaattcaataaatggctgattaacatgtaaactctgttgasaatatgtttccatagtttattaagcatgtatctcaaggaaaaaggtctttcatgagaagctgaaccagaggcaaaaaaaaaaaaaaaagtctcaaggctagagatcttcctttcttccttcttgttcctttataccttcttgaacagaacctttgtttctgaacagccaacagccaattcctttgactgctggacaactcttgaatagattgatctcaaattgatcactgcttcttctgaaggtaacacatttgttccgttgtttctgctgacagcacatggtgggctctgtagtggatctgggggtgctgatgttttctccttccatatgtcattgggtatttgagtcggggtaggaagccatggcaaacccattgcttctgttcatccacctatgtttccttattgatttgaatttatcccaaataaatttggatatttaaggcagggtgtgcacctttaattgttcagaccctagccaatggcctagaccttatctcactggactaatacacaagctaaca

SEQ ID NO: 575788 - DNA, 481 bp, Homo sapiens
gaattctggcagcaaatgatctgaattagaagtcagccgacctgggtcctgggtcagggtctgcgtatgagtgcagctatgacgcaaaagagggtgaggccagagcatccccaagccgcttccagcccttctgttgcactccacaccttgttctccaatgcattgaccagaaaggcycaccatacactagcattataaaatattgcacaggatgtgtccgaggataaattatgatagcatacagataaagattttatagttcaagaacatctatagaaggtgattatgcccttaagaaatatactaaatgctgtgtttagtgtaaagtcataatccacactggtccttacctcccaaggttaaaagcatactgtatttctaaagtgttctggcagaatattcttcgtcgggcacctggcttgcactaaaaacccatgcattttacctttatctgagtttgaaagaaattatcagtgcaccc

SEQ ID NO: 575789 - DNA, 483 bp, Homo sapiens
gtaaataagtaatgatcaacagattggctgtgggtttttgaaaagcatgcctgtgtcagtttgcatgatgggggagaattttcaaagtggatcttgctttcattcgttgctggagaggggctgagggaggcagtcatcctgggctggagctgtctgtttcatggtacatcaaaattgctaaacgtgggtcaggtggtgagtggaaacttgccaagctacagaactcgggcttctcatgttggttgcctttgggctgctgctaaggcctcagttcctgtcgctgggatgtcttatcccaccagcccaccatggtctcccttcgcagcccagctggaatgggccatcccatgacaagtgagaaagtcttagacactcctcccttrccacgtctttctatgtcccaggtgctccacattctccatctgacctgggagcaaagatggacccctcctgagccctctctccatatcccttgacttccag

SEQ ID NO: 575790 - DNA, 541 bp, Homo sapiens
gcccagctggaatgggccatcccatgacaagtgagaaagtcttagacactcctcccttaccacgtctttctatgtcccaggtgctccacattctccatctgacctgggagcaaagatggacccctcctgagccctctctccatatcccttgacttccagtttacagaaagacctcagggccctttgttttacatttgaatatctggcactggcaatgaagtcatgggtccatttttgctaaaccccctttgttgattggcagaaaacaagggctctcccagctccctgtggcttttccagttgcccccgcctcttccgacacctgctttctactctccagtaaatgggactttcaggtcctattcctcatgacctgaaaaayccataaaggaagctaatgacttatttgaagtggatttttcgacatgagtttgtgacttgcagtttgagcagaatcaatcattctgaatgcgggcaggttttagtggcctatgggcagtgacaggaatagctccaagaggaactggagaacccagaatgg

SEQ ID NO: 575791 - DNA, 583 bp, Homo sapiens
ggcactggcaatgaagtcatgggtccatttttgctaaaccccctttgttgattggcagaaaacaagggctctcccagctccctgtggcttttccagttgcccccgcctcttccgacacctgctttctactctccagtaaatgggactttcaggtcctattcctcatgacctgaaaaatccataaaggaagctaatgacttatttgaagtggatttttcgacatgagtttgtgacttgcagtttgagcagaatcaatcattctgaatgcgggcaggttttagtggcctatgggcagtgacaggaatagctccaagaggaactggagaacccagaatgggctaggatgggctgtaatttaccactgtggcttctgcaaataaaacagactcctgcgtgaaggctccttccaaatcatctgccagcaggagatgcaacggggactctgcactaatggtcttttccttccctttgttcttgtatcaggcttaccctagtgtttaagtgtcacttaactctgcacgatcattaggtgaacagscttgttttgtatatctggatcctgaggtagtatgtttttgagtca

SEQ ID NO: 575792 - DNA, 459 bp, Homo sapiens
actgttttccatagtggctgtagtagtttacattgccgccagcagtgtagaggtgttctctgttcaccgcatccatgccaacatctactgtttcttgatattttgattatggccrttcttgcaggaataaggtggtatcacattgtgttttgatttgcattttcctgatacttagtgatgttatatacaaatggccaacaaacatatggaagtcatttttagcacaaaacttgcctcccatggccatgatcaacaaagtgctatgggtacatggctaaagaatcaggagcccatctggtgatagctttggctgtggatgatttaaacttcagtcttttcctgattgaggacttctcattccatgtctctaatggtgatattcttagtcatcttttctggcaaaataagtggttgtttctaaaattaacttcccaagtgttagtttaactaatgaaggga

SEQ ID NO: 575793 - DNA, 459 bp, Homo sapiens
actgttttccatagtggctgtagtagtttacattgccgccagcagtgtagaggtgttctctgttcaccgcatccatgccaacatctactgtttcttgatattttgattatggccgttcttgcaggaataaggtggtatcacattgtgttttgatttgcattttcctgatacttagtgatgttatatacaaatggccaacaaacatatggaagtcatttttagcacaaaacttgcctcccatggccatgatcaacaaagtgctatgggkacatggctaaagaatcaggagcccatctggtgatagctttggctgtggatgatttaaacttcagtcttttcctgattgaggacttctcattccatgtctctaatggtgatattcttagtcatcttttctggcaaaataagtggttgtttctaaaattaacttcccaagtgttagtttaactaatgaaggga

SEQ ID NO: 575794 - DNA, 492 bp, Homo sapiens
caggctgtgcccggcttgtgacaactgtcgtgaagggaaatcttagcttcagagacagaaagcagattttgggtggtcttggggttggactgaacttatggttttagcatctggctctcacatgccagtttactcctcaaaatttgtgtgcctggttaatgcctyttttaagaaaatgtaatttttttttcaggtgagccatacaccagacacattcctatgtaatatcttatttaatctccctgacaacctgctgagggagagttaccaccttcattttacagttgagaaagcagagattcaggggaattaggtacctttcccatagccttatagctagtcaagggcacatggagttgatctccaaacatctgatttcaaagtctatgcttttctcggcacatcagcctgtctcttaaaaggcaagtgttatcctgatgagaatgggcctgaagctatacatgtactttcaagggtcatgggggcaccccc

SEQ ID NO: 575795 - DNA, 492 bp, Homo sapiens
caggctgtgcccggcttgtgacaactgtcgtgaagggaaatcttagcttcagagacagaaagcagattttgggtggtcttggggttggactgaacttatggttttagcatctggctctcacatgccagtttactcctcaaaatttgtgtgcctggttaatgccttttttaagaaaatgtaatttttttttcaggtgagccatacaccagacacattcctatgtaatatcttatttaatctccctgacaacctgctgagggagagttaccaccttcattttacagttgagaaagcagagattcaggggaattaggtacctttcccatagccttatagctagtcaagggcacatggagttgatctccaaacatctgatttcaaagtctrtgcttttctcggcacatcagcctgtctcttaaaaggcaagtgttatcctgatgagaatgggcctgaagctatacatgtactttcaagggtcatgggggcaccccc

SEQ ID NO: 575796 - DNA, 576 bp, Homo sapiens
aggcatgtggaaagggctgaagctgagtaacagaaggcacagaaacaggaaaggccgagtgtttttcacagagggtcacctggctatttgtgtactaatggtataaccaaggtacttaaagggctcactatgtcaaaggaaatgcttgtaggtgggtgcactgttaacctgagtagatcctccaaagaagagcctgttctattgttttgctgacctcttcatgctcgccaactgccagaaatctttctaaatgcttagcacagtacctcacacctagtagacactcagtagaggtttgtggaggggatggatacatgaatacatgatttaatcctgctatctgttgtttgcagcctgttctctcttaacgtgccctcaaatgasataaagcagccaaatacctgtattaaaaacctacactttccctccaggatttagtctcccttcatttgacaactgggcactggacaagggttacagagatcaaagatgttgcacttgtctggaggagcctttatcagatggccaggttgtctctaatataaactgtactattcccttaacctttactaatag

SEQ ID NO: 575797 - DNA, 576 bp, Homo sapiens
aggcatgtggaaagggctgaagctgagtaacagaaggcacagaaacaggaaaggccgagtgtttttcacagagggtcacctggctatttgtgtactaatggtataaccaaggtacttaaagggctcactatgtcaaaggaaatgcttgtaggtgggtgcactgttaacctgagtagatcctccaaagaagagcctgttctattgttttgctgacctcttcatgctcgccaactgccagaaatctttctaaatgcttagcacagtacctcacacctagtagacactcagtagaggtttgtggaggggatggatacatgaatacatgatttaatcctgctatctgttgtttgcagcctgttctctcttaacgtgccctcaaatgagataaagcagccaaatacctgtattaaaaacctacactttccctccaggatttagtctcccttcatttgacaactgggcactggacaaggkttacagagatcaaagatgttgcacttgtctggaggagcctttatcagatggccaggttgtctctaatataaactgtactattcccttaacctttactaatag

SEQ ID NO: 575798 - DNA, 562 bp, Homo sapiens
acatataataaatgctttattacagtacttttccatgggggaaacacaaagtactttctaaatcttccctagttaaatccctgagcctttccagggagagagggagatggaaattcttatcaatcatctcccctagaatagatggagaaatgaaggtaagtgcttctcccaccccsatagacttaacataaaggaattggttcaaatggtgggccaaattatcttttattgtgtgcatataaatgatggttagaaatccatatgctacgttaaactagggaaataaattaggccgagtcatctaggtttgctgagacaggtattcaatatgaagttgtaaaagggaaagatcacctttaaaaatgatctataaagacatgttaaaatcaagagaaacatctcatattacatcatctatgagatgaattaaatttcctgttaatgccagggaaaaaaacctcaaaggcaaatgtcagatgaagtgcagatcaataaaaatattttgataagtaaatgcaacaatgctatttaacacatgattggcaactgctgaaacataaat

SEQ ID NO: 575799 - DNA, 532 bp, Homo sapiens
gtaaggaatcgaaagcatctctaattacctcacagatcatgtggattccaggatgccctcttattccctgtgaacaggggtgagggggtttaaatcatccccatgtgaggtgtaaggcagaaccatttgcagatactaagctaaggctaaggcagccttctgggtgggawtctaaagaatggatccagtccttgaaataatgaaagaaagaaatctagatacataaagatgctcttggcgctgaagcaccagaaactacattactggtttttgtttttgtttttaatattttcgacattaagtcttctatacacattccaaatctagaaagtttaaataaaatgctaatccccgtcttcttcaaaatataaaaagacaaggattctggatagtgataaccttctcccccttttgcctactatctttagaattcgttattgaccttctaataggaacacataaatttttccaaggatctctgatctctttaggagagtatccaatgttaagtttgttttgttctactgactgc

SEQ ID NO: 575800 - DNA, 610 bp, Homo sapiens
tgtactgattcattcattcgggaagtgtctattggaacccgaggttcagaactattgatttactcttggatcccatccatacttaagttacaacaacttttatttgtatgtgctgcagtcatttayttattcagtaaatatttattgaatacatactgtgtgattagcactctccctgacacccacaggaatatcagtgaaggagaagccctattttgtgtcctcggggatttagcagttaaggtgtagaatgctccaggcaagtgagtgataggatttctctatctgagaccaggtgaactagtgagtgcataatgcgctctgtaagagtgtaatgtgggacacattcccagagtcgagatgagaatttgcagagttgaatcaggaaaatagtaagctatccagagattaaagagaaaggaattttccttgtgttatagcttacagtgggggattgattagaaagaagacaaaagtcagagtctatgctgtttccctgtgattacttctcagtaaaccagagtccagtgtctcattcaaaggcagtgctccttctctcagccagtcaataaacttccaaaaaaacagctttaggggagggaaggtggca

SEQ ID NO: 575801 - DNA, 610 bp, Homo sapiens
tgtactgattcattcattcgggaagtgtctattggaacccgaggttcagaactattgatttactcttggatcccatccatacttaagttacaacaacttttatttgtatgtgctgcagtcatttacttattcagtaaatatttattgaatacrtactgtgtgattagcactctccctgacacccacaggaatatcagtgaaggagaagccctattttgtgtcctcggggatttagcagttaaggtgtagaatgctccaggcaagtgagtgataggatttctctatctgagaccaggtgaactagtgagtgcataatgcgctctgtaagagtgtaatgtgggacacattcccagagtcgagatgagaatttgcagagttgaatcaggaaaatagtaagctatccagagattaaagagaaaggaattttccttgtgttatagcttacagtgggggattgattagaaagaagacaaaagtcagagtctatgctgtttccctgtgattacttctcagtaaaccagagtccagtgtctcattcaaaggcagtgctccttctctcagccagtcaataaacttccaaaaaaacagctttaggggagggaaggtggca

SEQ ID NO: 575802 - DNA, 431 bp, Homo sapiens
cattgattgtataaatgccaatgttgcaattcacaacaatgtcagggttattacagtaacccccaaggagaggaagaaactagctttcactctctgatcattagaataaagcaggggctgtcaccattattggtttccctctgcaatagtccagggaaaccggagacataagctgtaagaaatgccttagaaactgtgaccaaggaagacccactggggagctcacatcacatatccccmcttcctgcagaagacctggagttagttatctgggccgcacggaagtgcaagtgcctgggtgccaccaggagacagccaaccagtctataaagcactgttatgtgatggggctcctaattatttgtaattggccaggtcacctgggaggctagctcccttcaacaagccagaggaatataaactgggcccag

SEQ ID NO: 575803 - DNA, 518 bp, Homo sapiens
tgccctgtttactggttggagagaaagtattacctcaggatgacctgagacctgcccctagtgcatttaggatttaaaagatactcagaactatgttcccataatatcagcaagcaagcaaatgaaacagcaagctgacaaaaaacacttttagaaaatgtgtgccttggggaagaggagatacattttggtttggtatacttgattctttctgggaaggagtcagacgttgttaacagtggcctacaactttcatccagaaaagcaaataagcaagcctgatgatcgatcgcccttcaataaaaagaaaaaagacagctaatgtcaagcttcattaactggggtagtggtttccagaaaccaggcataatttcacactggagctcaagccatggtttgcaatggaacatccagaggcatccaggaagtcttagaggtatgccacactacactctactccccacayatctctcatcctggcctggaccatttaaatataaacaatccaggatttcccc

SEQ ID NO: 575804 - DNA, 291 bp, Homo sapiens
atcctggcctggaccatttaaatataaacaatccaggatttcccccaagagactgacctgaggaacatcaaaaacctcccggaacaaagacattaccctctctgaccagcatggtacctggaattctaactttggtttattgaatcagtraagcaaccaattgaatcagtaaagcaatcaataagaatcccctattctgagcatggaatggaggctacagtaatgattaagataaagtccctagtcaaagagaggtccacaagatagcaggaaaaaaatatatatacacca

SEQ ID NO: 575805 - DNA, 291 bp, Homo sapiens
atcctggcctggaccatttaaatataaacaatccaggatttcccccaagagactgacctgaggaacatcaaaaacctcccggaacaaagacattaccctctctgaccagcatggtacctggaattctaactttggtttattgaatcagtaaagcaaccaattgaatcagtaaagcaatcaataagaatcccctattctgagcatggaatggaggctacagtratgattaagataaagtccctagtcaaagagaggtccacaagatagcaggaaaaaaatatatatacacca

SEQ ID NO: 575806 - DNA, 576 bp, Homo sapiens
agaaggctggagagccctgagtaggtaaagaaaggttgctagagtgaagatgagaggtaagcagcgtgggagagggattaatttatggctccagtaagggccagcactgttacacactcactggatttcacagtctgggagtaagctgggaacacaattcgttccagcaacaatagagtctgtaactgtttctggccagacagtataaatttctttactatggctgttgctgtagtaatttcaagtgccttaggctggcctgtgctgcagagagatctctggaacaggtggagagtgtacagtcagttgtccacagggactaaatcaaagtttctaaagcttctattgctagaagaaagtccaagcatttgccattgagcacaccaatcaacactgctgtgatccagggagacccagaggaatkgggccgtttgttgtatggaaaggaggatcatgagaaatctccctgaacaagggatcccaacatcttcagtttgcaaggtgatagagacccacttccaaagcctctcccacaactcctcaaagaccagttagttgaaatcaaggaccaggatt

SEQ ID NO: 575807 - DNA, 386 bp, Homo sapiens
gaagagaggcctgaaacagatccttccctcagtacccttgggaggaaccaaccctcccagactttcatctcagacttctagccaccagaactgtgagaagctctgttgtttaagacactgggtctgtgatacttgattacagcattcctagaaaattaacacaatagcccaccttgaagaaaaacaggcacaatatatcagatatcccttagctgaaggcccccggctgcccttcttgaatcttaagtttttcttgtccatttaagggggggaaaaaagcatcccgccattatttcaggaatacatagacatatatatgtaatacccagtatctcctctaaaggttttcggccaatatccytcccctctccaaccaccttctctac

SEQ ID NO: 575808 - DNA, 508 bp, Homo sapiens
cttattacttaagaaatatatttaataagctatcactgccatagtgattcctttgatgaatctgggcaaaataaattgaaaaacttctgaaaaagaatcgccattctagatgctaataagaacattcgtgattcatgggaggaggtgaaaatatcaacaggagtttggaasaagtgaattccaaccctcatggatgactttgagggctttaagacttcagtggaggaagtaacagcagatgtggtggaaaaagtaagagaaatagaattagaagtggagcctgaacatgtgactgaattgctgcaaactcatgatcaaacttgaacatatgaggagttgcttcttacgggttagcaaagaaagtggtctcttgagatggaagctactcctagtgaagattctgtgagcattgttgaaatgacaacaaaggatttagaatagtacataaacttagttgatgaagcagcagcagagtatgaaaggattgactccaattttgaaagaagtt

SEQ ID NO: 575809 - DNA, 605 bp, Homo sapiens
aaacttctgaaaaagaatcgccattctagatgctaataagaacattcgtgattcatgggaggaggtgaaaatatcaacaggagtttggaagaagtgaattccaaccctcatggatgactttgagggctttaagacttcagtggaggaagtaacagcagatgtggtggaaaaagtaagagaaatagaattagaagtggagcctgaacatgtgactgaattgctgcaaactcatgatcaaacttgaacatatgaggagttgcttcttacgggttagcaaagaaagtggtctcttgagatggaagctactcctagtgaagattctgtgagcattgttgaaatgacaacaaaggatttagaatagtacataaacttagttgatgaagcagcagcagagtatgaaaggattgactccaattttgaaagaagttctactctgggtaaaatgmtatccaacagcatcacatgctacagagaaatcttttgtcaaaggaagagtcagtcgatgcagcaatcttcattgttgtcttattttaagaaattgtcgcagccaccacaatcttcagctaccaccccccgatcagacagcagccaccaacactgaggca

SEQ ID NO: 575810 - DNA, 572 bp, Homo sapiens
cctggagccacactgacaaaactctcaggccaggctgtagccaccctggcagaactagggtccttttcaatttctctgcatctatctacttgcattattttccctgctgccacytaagatgttatctagtgttaggcagccagcattctcagaagaaggaaatggttgcctttatgtttgggagacagcctgggagaaccaacacgttcatcagtcctacaggaggttgtacaagatgctcttgacacaagagggcaaggtcatgaccatctgctgagcatgaacttgtccagggacctgtgtggtccacccaagcctcagtaccatgacaccaactacttttttcttctccagtcctgggggaggcctgtcatatgctatcagtttgtgcattaagagatgaatttacttagctaagctgtccctgccttccttctttcttttgcccagtggaaggaattgtgagggtgacttggctcagtccattttgccattttctattactaaaatctttcatgctagcaggctctgatgtgagaagtcctaacaaaatgaccccacgaaaggtttga

SEQ ID NO: 575811 - DNA, 540 bp, Homo sapiens
aaaaccttcaggggttccctaatgcctatgacaagcaaaaccttcatgactgggtgccagaatactcttacattctccactccatctaggccactccaaagacccctggctatagccacacccaggcatttactgtggtctgagcactgtccctatgtcttccatcatcctaattagggaaaacttacctagatttaccagactttacatttctgtacctcaacatactcacctgtaaaatgggggcaagagtaataactacttatagagttgtagttaggactcagtgagttacaggcatccagtctcggtaaacctagrcaagtaatattattagttgagcattctcctcatggtatggaactaggttcaataagacctcctcctaaaccaggctcaggcctcccaaaccagaggtaatgacagctctttctattctcacagcccatgctagtggaacccccagcttgttcttacccaattctgtgtttttatgtgcttgtcttctcctctgctaaactataagcattttgaaggcag

SEQ ID NO: 575812 - DNA, 449 bp, Homo sapiens
ttggtaacaccctcacagatacacccaggaacaatactttgtatccttcagtccaatcaagttgacactcaatattaaccatcacagatgcttactccaatctccttctctgaaataggagtgctatgacttatctgtcagtacgggttaatgtcttttcccctctccctcctctccttttccttctacctttatctttctcattgaatataatagaagcacttagaaagaaagaaacacattgcgagctatatgtgtatccmagttatatttacttttaacctttaggaaattctcttatcggttaatcaccgattaatcagatatttaatgaattgggatatgtgcaccattgtgccaagcttggtgccacttctagaggaaactgctactagatttgatcaaatatatgtgcatgaaaagattaatagcaatacttacaaatgcca

SEQ ID NO: 575813 - DNA, 589 bp, Homo sapiens
tgcagcattggatgctgtatttcatttccatctgaggattcctcaaggactcctcccgcatgtacgtgcagrctgattagttgtgtcactcagatgtctttaacttattaaaaattaaatgacaaattaatttccattcccatcttggctttggaaattatcagttttgcagagcaagtaataggggaaaagtcggtggggggatgggagaagggggcactcaaaatttctgaaataattattgtgattttaggaagagaacagatgaggtttcctttccctgattcctttctaaatgtatcaacagctaattcttttttctagagtgattgttttaatttttaagcaactttcttgataactcttcttttttaaaaaaaaaaaacttttgtttactgtatgaagcagaataaatgatactagcatgaaaggctaggcatggaattagtattttaaaatgacatcatcttgtttccccagagaaaaattctaatggggaaaatctttgctctgttcttccaaaattggtcacatttgggtccccattgtttaagcagcaattgaattgcaggctagtggtgaaagtcca

SEQ ID NO: 575814 - DNA, 588 bp, Homo sapiens
gggctgatttaatggcaggaacaatgtatttccctctgggtaggcagaaacagttggactctaattcttaagagcctttgttcaggaacatctgggttgaaactactgtagttaacagatgatgttggcagtaaaaaaaaaaaargggggttgggctttgtataatgtcgttgtcaaatttggtagacctttacctaataattatcaagaaagcaatctaacttgttattataacagttttattgcagattgctggcttaagacctttttgtgacaagtggcattttttttcttgaaaaaagaagtcatttctattcccctgtaattatttttgcaaccagcaacaacttcctgcgttggacatactggggcattttattttagaaaccaataattaaattattgctagcttatggctgattttatcccatttatcacattgtgaaggctttcttacttccttttttccccttacctcacctcaccctgcttcctgatttcacaccaattctgtatatgttgaaacactgtaagttgagtaaaggcagaattagaataaggattagatggctaatgctcattcttctt

SEQ ID NO: 575815 - DNA, 589 bp, Homo sapiens
tgcagcattggatgctgtatttcatttccatctgaggattcctcaaggactcctcccgcatgtacgtgcaggctgattagttgtgtcactcagatgtctttaacttattaaaaattaaatgacaaattaatttccattcccatcttggctttggaaattatcagttttgcagagcaagtaataggggaaaagtcggtggggggatgggagaagggggcactcaaaatttctgaaataattattgtgattttaggaagagaacagatgaggtttcctttccctgattcctttctaaatgtatcaacasctaattcttttttctagagtgattgttttaatttttaagcaactttcttgataactcttcttttttaaaaaaaaaaaacttttgtttactgtatgaagcagaataaatgatactagcatgaaaggctaggcatggaattagtattttaaaatgacatcatcttgtttccccagagaaaaattctaatggggaaaatctttgctctgttcttccaaaattggtcacatttgggtccccattgtttaagcagcaattgaattgcaggctagtggtgaaagtcca

SEQ ID NO: 575816 - DNA, 167 bp, Homo sapiens
aggcccacttctattcacccactccctccttactgcagtggctggcgtggtgtccccgaaaggacaagkccatgtcctaagccctggaacctgtcaatgtgaccttcttgagaaaaagggtcttttcagatgtagttaagagaaggatctggagattatcctgaatt

SEQ ID NO: 575817 - DNA, 352 bp, Homo sapiens
cagttcttttcttcagtctctttaaatgtatcatgctattatttctgttctccaagatgtctgataagaaattcactaggatagtcatattragagctcttgcatatgatcggtccattttaccttgctgttttcaatgtccttttcctatctttccatttcagcagttagattttaatgtgtcttagggtctacgattttgtcctacttggaattcattgagcttcttgtaattgtatatttatatcttttttcaaatttgggaagttttccatatttatttattcaaataatttttctgttttttttttttctttctcttcacctcctgcaagttcctgatgtagtttgc

SEQ ID NO: 575818 - DNA, 352 bp, Homo sapiens
cagttcttttcttcagtctctttaaatgtatcatgctattatttctgttctccaagatgtctgataagaaattcactaggatagtcatattgagagctcttgcatatgatcggtccattttaccttgctgttttcaatgtccttttcctrtctttccatttcagcagttagattttaatgtgtcttagggtctacgattttgtcctacttggaattcattgagcttcttgtaattgtatatttatatcttttttcaaatttgggaagttttccatatttatttattcaaataatttttctgttttttttttttctttctcttcacctcctgcaagttcctgatgtagtttgc

SEQ ID NO: 575819 - DNA, 352 bp, Homo sapiens
cagttcttttcttcagtctctttaaatgtatcatgctattatttctgttctccaagatgtctgataagaaattcactaggatagtcatattgagagctcttgcatatgatcggtccattttaccttgctgttttcaatgtccttttcctatctttscatttcagcagttagattttaatgtgtcttagggtctacgattttgtcctacttggaattcattgagcttcttgtaattgtatatttatatcttttttcaaatttgggaagttttccatatttatttattcaaataatttttctgttttttttttttctttctcttcacctcctgcaagttcctgatgtagtttgc

SEQ ID NO: 575820 - DNA, 631 bp, Homo sapiens
tttttcttaaagttttcttacattttctgtttcacctgagtatactttttaattatttcaacttttattttcatgcagaaagtttgttttttattcctagtgatctgtgattgtctgtttatatttagaagaaaattctaggtagctggtatggtttccctctattcttttttaagtctgatttttcatatgagcatgacatcaaactggtagcttatttaatgagtatagtatataaggtmttatattttaattaactataagaaagtgggaagctggatgtcaggctgtggcctcaccaacactccctctcccctcaaaacttgcatgccagccagaatgagaagaattttattctgaattttcagcacccataaatgaagcttttgttttccccagatagttcaattttttttagaaagaaatgctatgcttttttacctggggataactaggctaacagttctctgcacatttagagaaaactatggagtcataggctgcctcagctgttccatatgcagtttcaatcaattcaccagatttcaacaccactttttattattgatctctgtcatatctgccactgatcatgaaggcgctctggaattctttcaattttttttttttt

SEQ ID NO: 575821 - DNA, 631 bp, Homo sapiens
tttttcttaaagttttcttacattttctgtttcacctgagtatactttttaattatttcaacttttattttcatgcagaaagtttgttttttattcctagtgatctgtgattgtctgtttatatttagaagaaaattctaggtagctggtatggtttccctctattcttttttaagtctgatttttcatatgagcatgacatcaaactggtagcttatttaatgagtatagtatataaggtattatattttaattaactatragaaagtgggaagctggatgtcaggctgtggcctcaccaacactccctctcccctcaaaacttgcatgccagccagaatgagaagaattttattctgaattttcagcacccataaatgaagcttttgttttccccagatagttcaattttttttagaaagaaatgctatgcttttttacctggggataactaggctaacagttctctgcacatttagagaaaactatggagtcataggctgcctcagctgttccatatgcagtttcaatcaattcaccagatttcaacaccactttttattattgatctctgtcatatctgccactgatcatgaaggcgctctggaattctttcaattttttttttttt

SEQ ID NO: 575822 - DNA, 631 bp, Homo sapiens
tttttcttaaagttttcttacattttctgtttcacctgagtatactttttaattatttcaacttttattttcatgcagaaagtttgttttttattcctagtgatctgtgattgtctgtttatatttagaagaaaattctaggtagctggtatggtttccctctattcttttttaagtctgatttttcatatgagcatgacatcaaactggtagcttatttaatgagtatagtatataaggtattatattttaattaactataagaaagtgggaagctggatgtcaggctgtggcctcaccaacactccctctcccctcaaaacttgcatgccagccagaatgagaagaattttattctgaattttcarcacccataaatgaagcttttgttttccccagatagttcaattttttttagaaagaaatgctatgcttttttacctggggataactaggctaacagttctctgcacatttagagaaaactatggagtcataggctgcctcagctgttccatatgcagtttcaatcaattcaccagatttcaacaccactttttattattgatctctgtcatatctgccactgatcatgaaggcgctctggaattctttcaattttttttttttt

SEQ ID NO: 575823 - DNA, 631 bp, Homo sapiens
tttttcttaaagttttcttacattttctgtttcacctgagtatactttttaattatttcaacttttattttcatgcagaaagtttgttttttattcctagtgatctgtgattgtctgtttatatttagaagaaaattctaggtagctggtatggtttccctctattcttttttaagtctgatttttcatatgagcatgacatcaaactggtagcttatttaatgagtatagtatataaggtattatattttaattaactataagaaagtgggaagctggatgtcaggctgtggcctcaccaacactccctctcccctcaaaacttgcatgccagccagaatgagaagaattttattctgaattttcagcacccataaatgaagctwttgttttccccagatagttcaattttttttagaaagaaatgctatgcttttttacctggggataactaggctaacagttctctgcacatttagagaaaactatggagtcataggctgcctcagctgttccatatgcagtttcaatcaattcaccagatttcaacaccactttttattattgatctctgtcatatctgccactgatcatgaaggcgctctggaattctttcaattttttttttttt

SEQ ID NO: 575824 - DNA, 315 bp, Homo sapiens
cacctgtccagggaagggacctctaatccccaggtgtcaagggagggaagtgattggaacatggggcagtttcccccatgctgttcycatgatagtgagtgtgttctcatgagacctgatggtttttaaagtggtagattttttctgcactctcacttttacctcctgctgccttatgaaaaagatgcctgcttccccttctgccataattgtaagtttcctgaggcttccccagctatatggaattgtgagtcaattagacatctttcctttataaattaccccatcacaggtatttctttatagcagtgtgag

SEQ ID NO: 575825 - DNA, 315 bp, Homo sapiens
cacctgtccagggaagggacctctaatccccaggtgtcaagggagggaagtgattggaacatggggcagtttcccccatgctgttcccatgatagtgagtgtgttctcatgagacctgatggtttttaaagtggtagattttttctgcactctcacttttacctcctgctgccttatgaaaaagatgcctgcttccccttctgccataattgtaagtttcctgaggcttycccagctatatggaattgtgagtcaattagacatctttcctttataaattaccccatcacaggtatttctttatagcagtgtgag

SEQ ID NO: 575826 - DNA, 315 bp, Homo sapiens
cacctgtccagggaagggacctctaatccccaggtgtcaagggagggaagtgattggaacatggggcagtttcccccatgctgttcccatgatagtgagtgtgttctcatgagacctgatggtttttaaagtggtagattttttctgcactctcacttttacctcctgctgccttatgaaaaagatgcctgcttccccttctgccataattgtaagtttcctgaggcttccccagctatatggaattgtgagtcaattaracatctttcctttataaattaccccatcacaggtatttctttatagcagtgtgag

SEQ ID NO: 575827 - DNA, 571 bp, Homo sapiens
aaatgacagaagtagaattcagaatatagataaaaatgaagttcactgagttaaaagagtatgttataacccaatgcaaggaagctaaaatttatgagaaaacattgcaagagctgatagataaaatatccagtatagaaaagaacagaactggtctgatagagctaaaatcacaatctaaggattttataatgcaatcacaaatattagtagcaaaatagaccaagcaaaagaaagaatctcagagcttgaatactgcctttctgaagtaatacaggccgacaagaattgattaaaaacaaaaagaaattaaaaatccaagaaacatgagattatgtaaagagacsaaatttatagctgtttggtttgacacgtaatcatcagattctctaaagtggaaatgaaagaaagaatgttaaagacagctagaaaaaaaggccaggtcttctacaaagtgaagcctttcagactaacagtggaccactcagctgaaaacctacaagccagaaaaattaggggccaatgttcaacatttttaaatagaagacattccaacacagagttttatatt

SEQ ID NO: 575828 - DNA, 571 bp, Homo sapiens
aaatgacagaagtagaattcagaatatagataaaaatgaagttcactgagttaaaagagtatgttataacccaatgcaaggaagctaaaatttatgagaaaacattgcaagagctgatagataaaatatccagtatagaaaagaacagaactggtctgatagagctaaaatcacaatctaaggattttataatgcaatcacaaatattagtagcaaaatagaccaagcaaaagaaagaatctcagagcttgaatactgcctttctgaagtaatacaggccgacaagaattgattaaaaacaaaaagaaattaaaaatccaagaaacatgagattatgtaaagagacgaaatttatrgctgtttggtttgacacgtaatcatcagattctctaaagtggaaatgaaagaaagaatgttaaagacagctagaaaaaaaggccaggtcttctacaaagtgaagcctttcagactaacagtggaccactcagctgaaaacctacaagccagaaaaattaggggccaatgttcaacatttttaaatagaagacattccaacacagagttttatatt

SEQ ID NO: 575829 - DNA, 571 bp, Homo sapiens
aaatgacagaagtagaattcagaatatagataaaaatgaagttcactgagttaaaagagtatgttataacccaatgcaaggaagctaaaatttatgagaaaacattgcaagagctgatagataaaatatccagtatagaaaagaacagaactggtctgatagagctaaaatcacaatctaaggattttataatgcaatcacaaatattagtagcaaaatagaccaagcaaaagaaagaatctcagagcttgaatactgcctttctgaagtaatacaggccgacaagaattgattaaaaacaaaaagaaattaaaaatccaagaaacatgagattatgtaaagagacgaaatttatagctgtttggtttgacacrtaatcatcagattctctaaagtggaaatgaaagaaagaatgttaaagacagctagaaaaaaaggccaggtcttctacaaagtgaagcctttcagactaacagtggaccactcagctgaaaacctacaagccagaaaaattaggggccaatgttcaacatttttaaatagaagacattccaacacagagttttatatt

SEQ ID NO: 575830 - DNA, 571 bp, Homo sapiens
aaatgacagaagtagaattcagaatatagataaaaatgaagttcactgagttaaaagagtatgttataacccaatgcaaggaagctaaaatttatgagaaaacattgcaagagctgatagataaaatatccagtatagaaaagaacagaactggtctgatagagctaaaatcacaatctaaggattttataatgcaatcacaaatattagtagcaaaatagaccaagcaaaagaaagaatctcagagcttgaatactgcctttctgaagtaatacaggccgacaagaattgattaaaaacaaaaagaaattaaaaatccaagaaacatgagattatgtaaagagacgaaatttatagctgtttggtttgacacgtaatcatcagattctctaaagtggaaatgaaagaaagaatgttaaagacagctagaaaaaaaggccaggtcwtctacaaagtgaagcctttcagactaacagtggaccactcagctgaaaacctacaagccagaaaaattaggggccaatgttcaacatttttaaatagaagacattccaacacagagttttatatt

SEQ ID NO: 575831 - DNA, 352 bp, Homo sapiens
cagttcttttcttcagtctctttaaatgtatcatgcyattatttctgttctccaagatgtctgataagaaattcactaggatagtcatattgagagctcttgcatatgatcggtccattttaccttgctgttttcaatgtccttttcctatctttccatttcagcagttagattttaatgtgtcttagggtctacgattttgtcctacttggaattcattgagcttcttgtaattgtatatttatatcttttttcaaatttgggaagttttccatatttatttattcaaataatttttctgttttttttttttctttctcttcacctcctgcaagttcctgatgtagtttgc

SEQ ID NO: 575832 - DNA, 564 bp, Homo sapiens
aacaagacatagagaaggagtgggtggtctcaagtttgtacagagactatcccatcctttataacctatagaggcaccctaatatggatgcagtgaattaattagcaatcagtggtattggtgtctaatagactaagtgcatctgagggacttttacttgtcctccatgcccagcctctttgaaaataataaagtcaaaaaattatagtttcttgttttatcaaaggaacagcctcaaaagggaaaattagctcattatacattaaatgattttctacmaaaaaaagataactgtttatcaaatctcatcatctaaaagacaaaaaaacctgattgcttttaaacctgtgtttccaatggatacaaaagatgttgcctctttttccctctaaagtttgtgtttgaatcctaagttgaagacagaaatttgtagacattttaaatgtgaaatacaaatagttaaaatcattacaatacatcaaagagtgcagctcatattttaaagtaaattttcataattttcttttttagaggcattcagcgtatgtgcacacacaaacacac

SEQ ID NO: 575833 - DNA, 566 bp, Homo sapiens
taagattgtagggaattgagttttataagatttggtgtaactatttgacttacctggatataagctgatctgctttgggccccatataattgcatgtgacaccaaatgggaaaagaggatgaatattctccttcccctcccttggcgtgaaactcagcagaattttgacactgtgacagaattttggcactgtgacagaattttgacattgtgacagaattttgacattgtgatgacggagtccaggcaggtcacaggtgctgcacttgaatgggggataattgataagtgtgaatgagaggagtagcaggaagaggatgatttgccattttgcaaaaaggtatatttagaaataggaacacttttacactgttggtgggactgtaaactagttcaaccatttgggawgtcagtgtggcgtttcctcggggatatagaactagaaataccatttgacccagccatcccactactgggtatatacccaaaggattataaaacatgctgctataaagacacatgcacacatatgtttattgtggcactattcacaatagcaaagactt

SEQ ID NO: 575834 - DNA, 566 bp, Homo sapiens
taagattgtagggaattgagttttataagatttggtgtaactatttgacttacctggatataagctgatctgctttgggccccatataattgcatgtgacaccaaatgggaaaagaggatgaatattctccttcccctcccttggcgtgaaactcagcagaattttgacactgtgacagaattttggcactgtgacagaattttgacattgtgacagaattttgacattgtgatgacggagtccaggcaggtcacaggtgctgcacttgaatgggggataattgataagtgtgaatgagaggagtagcaggaagaggatgatttgccattttgcaaaaaggtatatttagaaataggaacacttttacactgttggtgggactgtaaactagttcaaccatttgggaagtcagtgtggcrtttcctcggggatatagaactagaaataccatttgacccagccatcccactactgggtatatacccaaaggattataaaacatgctgctataaagacacatgcacacatatgtttattgtggcactattcacaatagcaaagactt

SEQ ID NO: 575835 - DNA, 506 bp, Homo sapiens
tgttggccaggctagtctcaaactcctggcctcaagtaatctgcctgcctcagcctcccaaagtgctgggattacaggcatgagccactgtgcctggcatggtgtggatatcttaaaggcaaatgacttggtaaaataacttaaatgaaagtaacaaggtaaaatttgtgttttaggggggagaactgcatgattttgaaggttggataaaagaaggctactgtactgtccaagttagaagatatgaaacctcagagagactggagtagtagaaacatagattaaaggagggctataagaagttcttttttgattggataagggaacagggatgaggtcaagggcagagttgatgctgtcttcyatgtttctgatttgtgtagatgaagttttatgggttccttaaccaagaaaagaaagtaagagagaagcaggttagattggagatgacaatggagcttaagtttgatgcatttttaactttcttatgtaaataaatatagtga

SEQ ID NO: 575836 - DNA, 607 bp, Homo sapiens
ttgcccatagtcccagttactcaggaggcaggaggattgcttgagcctgggggtggaggttgcagtgagccaagtttgcgccattacactccagcctgggcgacaatagtgaaactccattaaaaaaaaaaaaaaaagcctcacaaatataatcagttttggaatagactcaaaatataaaataagtayattcattatatttaaaaagttataggatgaccagaagaatagaaatattaaataaaaatagtctgtgtaatttaaaacacacataacatagttgaaatttaaaatgcaatggatgtattgagcagcattttggacataaacaaagagataattagtgagctttaaggcaattctaaagaagttattccaaaatacatcatgtagttgaaaataaaaatagttgaaaaataaaagactagttgaaagatgtaagagaaagtgaaaagatgtaacatatctaactgaagtgatgatagaatgggttgacattattcaaataatgatggatatatttgttccagtaacgtgaaaaagaaagagatgaaaaagaaaagaaaaaatattttcaaaactagagcatttcggtttccaggtaaaa

SEQ ID NO: 575837 - DNA, 529 bp, Homo sapiens
gatggggtttcaccgtgttgggcaggctggtcttgaactcctaagctcaggcaatccacccgccttggcctcccatagtgataggattacaggcatgagccactgtataatttggagaccagcccttagtcaaatatagttcttgttatgtttgttcctgtctgtgaccttttaattcatttctaaaaattgtgtcttttaacaagtaaaaatttataattttaaataaattttaatttatcagtttctttctttatggtcatcattttctaggacctaagaaaaattgcctaactgcaaatcacaaatatattgtatgtttgcttctaagctcttcatagttttagcttttagttttggtctgttatgaccttaaatttgtgtatgtgcatatgtgtgtgwgtgtgtgtgtgtgtgtgtgtgtgtgtgtaatttgctggagaagtcaatattcttgtttttccctatttataggcaattattccagtccattttgatgaattgtctttctggtgctattggattactt

SEQ ID NO: 575838 - DNA, 584 bp, Homo sapiens
agttttccaaatctttaagaattcggaagcagtctacagatgttgaatggacatatcttttcccaagggttgtgtatcccattaattcaacttccagtctcttgatgcacaaattttaaaaactaccagggctcattctttaagatttccaaatatgccaagatagagcttgcacgtatgatgaccttataattttaacttaaaataattccaactgaaaatgaacccatagtttctaaaaatattaatctcattatgttgatgacaggatcttcttatattcccatcatcaatcaaccaatcaatctgtttttgcatatttatgaattacctgtgaatgccaggcactttgcaaagactttgggatagaaaaataaataaaacatactttgttcttgaaatgctcacaaagaaggagagaaatatttccatamagcccagaagcctgcaactacttcccttcactggttcattattattatctcttgcccctcaattctcaatgcaaaatgagtggataattacaaatggtgatggctgtcactgctgtcctttagaacaacattaaatggccacatggaaat

SEQ ID NO: 575839 - DNA, 609 bp, Homo sapiens
taaaggaacaatatgttggatgtgataatggaatgcctgtttagcttaatattaaaaaagcagtcatactttgccacagcaatatattaaagaagcaaaattgtataacatttttactagatgcatttgtaaaagcaccaaactaggamtagaaaggaatttccttgatatgatacagtctgttttcacaaactatagagcaaacactttatggtgaaacagcaaccttttttttttttttttaactaggaccttaccaggtgaggtaaaaacagcttgattttcaacttccagcaagtgcttcctgttgcctgagggctttctcctgctgctgagccagctttggtgcccctgtggcagtccagatgtgccagggaatgaatagccctagaagcagctctctgcatggctgataggaattaatgcatacatacccaccatctgcaccctggcccttggggggaacaactgggaggcatgtgtcctccactgattcgtagtttcttacccatgcaaaagtgccagtagcccacagtagaagctggcatcctttatcggctatcttattttccttcattttttcatatctttaataaactatttgcacta

SEQ ID NO: 575840 - DNA, 568 bp, Homo sapiens
agagctctacttctacatatttactcacatgtgaacaatttttttcttctctttctcaatagaattattctaataatgcaacctggattaccccaacatatttaaaatattataaggcctataatattttaggtttaaatatttaagtctttattataatatcttattgtcaggagttctgcatttcatgaaaatagcaagtttaatatctgcattaataaaatcacaggcatatctgcaatcattttaagaaaactgatctgtcaagtctgaaaaaacttaattacttcaatgattcattaaagatggactgtatgaatgccccacatataaataagtgaaatgatagaaatatgaataaatgtatcaaatataaatataataaaatataaatacatcctttatagtaygtttaagccatgattgtgcatcagatagcatctgtgcatcttacttaaaatttggatgcctagggtttaccaccaaactgtgaagtcagcactgttagagatgggcctatatatatttattatttttaattgtctactatggagagagttgaatatac

SEQ ID NO: 575841 - DNA, 568 bp, Homo sapiens
agagctctacttctacatatttactcacatgtgaacaatttttttcttctctttctcaatagaattattctaataatgcaacctggattaccccaacatatttaaaatattataaggcctataatattttaggtttaaatatttaagtctttattataatatcttattgtcaggagttctgcatttcatgaaaatagcaagtttaatatctgcattaataaaatcacaggcatatctgcaatcattttaagaaaactgatctgtcaagtctgaaaaaacttaattacttcaatgattcattaaagatggactgtatgaatgccccacatataaataagtgaaatgatagaaatatgaataaatgtatcaaatataaatataataaaatataaatacatcctttatagtacgtttaagccatgattgtgcatcagatrgcatctgtgcatcttacttaaaatttggatgcctagggtttaccaccaaactgtgaagtcagcactgttagagatgggcctatatatatttattatttttaattgtctactatggagagagttgaatatac

SEQ ID NO: 575842 - DNA, 577 bp, Homo sapiens
cacatgatgttttggaatatgtatacattatgaaataaaagtctactaaagtcttattggatatgtataaacagaaaaattccaagtcaagtaaacaaaagtgtatctcaaattataaagttagtcatcatctttcaatcaattctcagacttgagccaatttataggcccagccacccccttgaagtaagggggaatccagttcctcttgaggaaatattccaacagactaccaaaragtatgttgtaaatctttctcccagtcttccccaaaaagatcttggccagtgcattaggaaaaataaaataatcctattttaggggaactagtggacactagctctgaaataatattaatcatcatcgtggctccccattcagagtaggagcttatgaaggtcagttgataaataaagttttagctcagatccatctcatagtgggtagagtgtgtccctaaacccatcctgtgggtatgcaattatgcattcccggttctagaatgcataattgaaagagacatacatagcagctgcaagaatccccacatttgctctctgatgtgtgtagttagggc

SEQ ID NO: 575843 - DNA, 577 bp, Homo sapiens
cacatgatgttttggaatatgtatacattatgaaataaaagtctactaaagtcttattggatatgtataaacagaaaaattccaagtcaagtaaacaaaagtgtatctcaaattataaagttagtcatcatctttcaatcaattctcagacttgagccaatttataggcccagccacccccttgaagtaagggggaatccagttcctcttgaggaaatattccaacagactaccaaagagtatgttgtaaatctttctcccagtcttccccaaaaagatcttggccagtgcattaggaaaaataaaataatcctattttaggggaactagtggacactagctctgaaataatattaatcatcatcgtggctcmccattcagagtaggagcttatgaaggtcagttgataaataaagttttagctcagatccatctcatagtgggtagagtgtgtccctaaacccatcctgtgggtatgcaattatgcattcccggttctagaatgcataattgaaagagacatacatagcagctgcaagaatccccacatttgctctctgatgtgtgtagttagggc

SEQ ID NO: 575844 - DNA, 577 bp, Homo sapiens
cacatgatgttttggaatatgtatacattatgaaataaaagtctactaaagtcttattggatatgtataaacagaaaaattccaagtcaagtaaacaaaagtgtatctcaaattataaagttagtcatcatctttcaatcaattctcagacttgagccaatttataggcccagccacccccttgaagtaagggggaatccagttcctcttgaggaaatattccaacagactaccaaagagtatgttgtaaatctttctcccagtcttccccaaaaagatcttggccagtgcattaggaaaaataaaataatcctattttaggggaactagtggacactagctctgaaataatattaatcatcatcgtggctccccattcagagtaggagcttatgaaggtcagttgataaataaagttttagctcagatccatctcatagtgggtmgagtgtgtccctaaacccatcctgtgggtatgcaattatgcattcccggttctagaatgcataattgaaagagacatacatagcagctgcaagaatccccacatttgctctctgatgtgtgtagttagggc

SEQ ID NO: 575845 - DNA, 597 bp, Homo sapiens
atatacacacagtgcacacatatacttacctgaatatatatgtacacatatactgtatatatgtatgtgggtatacatttatgaacatatatacacttgtacacaggcatatatattggtataaagaaatgtgtttacacttacactttagagaaccaagtatcatagataattcattttgtggacaaaatttttcaaataaaatrtagtgtaaataaagtacttaattttgtactctccaagtgatttttttttttgagacaagagtctcactctgttgcccaggctggagtgcagtggcccgatctcggctcatcacaacctccgctttgtgggtttaaacaattctcctgcctcagcctcccaagtagctgggactacaggcacacaccaccatgcctggctaatttttgtacttttagtagagatggggtttcactatgttggcccggctggtcttgaactcctgaccttgtgatgtgcctgcctcagcctcccaaagtgctgggattacaggtgtgagccaccacacccggcctccaagtgttttaaaatattaatacctgactcagtgaatgtttgacatttttatcacta

SEQ ID NO: 575846 - DNA, 215 bp, Homo sapiens
aaagaacgaatattcattcttctcaaactcttccaaaagattgaagataagaaaataatttcgaacagattttatgagtccagcattagcctgatgccaaagctagacaaaagcagtrtaagaaaataaaactacaggttaatattactgataactatatatgtgaaaatccacacaaaataatatcaaaccatattcaacagaacattcaaagg

SEQ ID NO: 575847 - DNA, 539 bp, Homo sapiens
cagtgagtgaactcttcagaaacaacagacttagtaggcaccctgaaaggactatatgtaaaacaagccaagcaatcaatcaaacaaaacagtgtgagattactctagccaaacttgtttgaggaaaaatactgcaaggtcaaaaccaaaatcttttgtatgtgtgtgtcatttaccatgtgatcatggctctgtggcccacagagttctaatattcaaaaattgttttgaaaacactcccaaaaactgaagtgtctgaatgttatctgtttagaattatcawcaaatctggaagtgttgagtaattgaaatgaaacccatacaaaagattcttcccactaaaagtcaatgtatgctgggtgcggtggctcacgcctgtaatcccagcactttgatggctcaagcctgtaatccaggctgagtcaggagttcgagaccagcctgggcaacatagagagactgtaccctgccgaccaaccatctgtccaaaatataaaaatattttttaaaaaatttagccaggtgtggtggctcacaag

SEQ ID NO: 575848 - DNA, 539 bp, Homo sapiens
cagtgagtgaactcttcagaaacaacagacttagtaggcaccctgaaaggactatatgtaaaacaagccaagcaatcaatcaaacaaaacagtgtgagattactctagccaaacttgtttgaggaaaaatactgcaaggtcaaaaccaaaatcttttgtatgtgtgtgtcatttaccatgtgatcatggctctgtggcccacagagttctaatattcaaaaattgttttgaaaacactcccaaaaactgaagtgtctgaatgttatctgtttagaattatcatcaaatctggaagtgttgagtaattgaaatgaaacccatacaaaagattcttcccactaaaagtcaatgtatgctgggtgcggtggctcaygcctgtaatcccagcactttgatggctcaagcctgtaatccaggctgagtcaggagttcgagaccagcctgggcaacatagagagactgtaccctgccgaccaaccatctgtccaaaatataaaaatattttttaaaaaatttagccaggtgtggtggctcacaag

SEQ ID NO: 575849 - DNA, 539 bp, Homo sapiens
cagtgagtgaactcttcagaaacaacagacttagtaggcaccctgaaaggactatatgtaaaacaagccaagcaatcaatcaaacaaaacagtgtgagattactctagccaaacttgtttgaggaaaaatactgcaaggtcaaaaccaaaatcttttgtatgtgtgtgtcatttaccatgtgatcatggctctgtggcccacagagttctaatattcaaaaattgttttgaaaacactcccaaaaactgaagtgtctgaatgttatctgtttagaattatcatcaaatctggaagtgttgagtaattgaaatgaaacccatacaaaagattcttcccactaaaagtcaatgtatgctgggtgcggtggctcacgcctgtaatcccagcactttgatggctcaagcctgtaatccaggctgagtcaggagttcgagaccagcctgggcaacatagagagactgtaccctgccgaccaaccatctstccaaaatataaaaatattttttaaaaaatttagccaggtgtggtggctcacaag

SEQ ID NO: 575850 - DNA, 536 bp, Homo sapiens
ggatatgatggcttagcttgggctcagaggcctgacattcctgtcttcttatattaataagaaaaataagaaaaataaaacaaaatagtgttgaagcattggggcagtgaaaattttggggggtgatatggagagataatgggcgatttttttcatggctgtttcgagcaggattggggtggcatgggaacctagagtgggagaaattaagctgaaggaagattttgtggtaaggggtgatattgtggggttgttagaaggagcatttgtcatacagaatgattggtgatcgcctggatgcggttttgtatgaattgagaaactaaacagaaggcacaaggtccaaataagagaaggagaaaaacaggtatcaaaggactaagaattgggaggacccaggacatccaattagagagtgcccaagggggttcagcataatwtcttgcttggttggtgaattttggggctctatccttgacagagtcctcctttttaagttggaggctgagcttggtgaggtgtgtttttaaaagacc

SEQ ID NO: 575851 - DNA, 536 bp, Homo sapiens
ggatatgatggcttagcttgggctcagaggcctgacattcctgtcttcttatattaataagaaaaataagaaaaataaaacaaaatagtgttgaagcattggggcagtgaaaattttggggggtgatatggagagataatgggcgatttttttcatggctgtttcgagcaggattggggtggcatgggaacctagagtgggagaaattaagctgaaggaagattttgtggtaaggggtgatattgtggggttgttagaaggagcatttgtcatacagaatgattggtgatcgcctggatgcggttttgtatgaattgagaaactaaacagaaggcacaaggtccaaataagagaaggagaaaaacaggtatcaaaggactaagaattgggaggacccaggacatccaattagagagtgcccaagggggttcagcataatawcttgcttggttggtgaattttggggctctatccttgacagagtcctcctttttaagttggaggctgagcttggtgaggtgtgtttttaaaagacc

SEQ ID NO: 575852 - DNA, 627 bp, Homo sapiens
agaataatttaaagagcaattgaattgtttgtaattcaaagggtaaatgcctgaagggatggatatcctattccctatgatgtgcttatttcactttgcatgcctgtaccaaaacatctcgggtaccccacaaacatatacacctactatgtaccaacaaacattttaaaaataaaaaagaagaaaatagccayaaaaaagagaaatatctaggaatagagctaacgaaggaggtgaaagatctctacaaggagaactataaaacactatgaaagtaatcagagatgacacaaataaatggaaaaacattccatgctcatggattgaaagaatcaatatcattaaaatggccacattatccaaagcaatatgcagattcaacacaatttctattgaactactaatgtcatttttcacaggattagagaaaaacagttctaaaatttacatagaaccaaaagagagcccaaatagccaatgcaatcctaagcaaacagaacgaagccagaagcatcacactacttgacttcaaactatactactagtctacagtaaccaaaataacatggtattggtacaaaaacagatacatagctcaatgggacagaatagagaacccagaagaaa

SEQ ID NO: 575853 - DNA, 627 bp, Homo sapiens
agaataatttaaagagcaattgaattgtttgtaattcaaagggtaaatgcctgaagggatggatatcctattccctatgatgtgcttatttcactttgcatgcctgtaccaaaacatctcgggtaccccacaaacatatacacctactatgtaccaacaaacattttaaaaataaaaaagaagaaaatagccacaaaaaagagaaatatctaggaatagagctaacgaaggaggtgaaagatctctacaaggagaactataaaacactatgaaagtaatcagagatgacacaaataaatggaaaaacattccatgctcayggattgaaagaatcaatatcattaaaatggccacattatccaaagcaatatgcagattcaacacaatttctattgaactactaatgtcatttttcacaggattagagaaaaacagttctaaaatttacatagaaccaaaagagagcccaaatagccaatgcaatcctaagcaaacagaacgaagccagaagcatcacactacttgacttcaaactatactactagtctacagtaaccaaaataacatggtattggtacaaaaacagatacatagctcaatgggacagaatagagaacccagaagaaa

SEQ ID NO: 575854 - DNA, 373 bp, Homo sapiens
gggctggaataccattttgctaatattaatattccctacagtgactggcatatattggtaatatatagctttgcacatattggttttcaatgtatatctcttacatgcatgcataaaaaatgtaatatattccaaagtttgccttcataggcatatgttgcttctgcctttggggaacatttaaagagaaaaaaatcaaggcagtgggctgaattgctctatgttgttttatttttatttttatttttgagacagagccttgctctgtcccccaggctggagtgcagtggcacratctcagctcactgcaacctctgccttcggggttcaagcaattctcctgtctcagcctcctgagtagctgggactacag

SEQ ID NO: 575855 - DNA, 373 bp, Homo sapiens
gggctggaataccattttgctaatattaatattccctacagtgactggcatatattggtaatatatagctttgcacatattggttttcaatgtatatctcttacatgcatgcataaaaaatgtaatatattccaaagtttgccttcataggcatatgttgcttctgcctttggggaacatttaaagagaaaaaaatcaaggcagtgggctgaattgctctatgttgttttatttttatttttatttttgagacagagccttgctctgtcccccaggctggagtgcagtggcacgatctcagctcactgcaacctctgccttcggggttcaagcaattctcctrtctcagcctcctgagtagctgggactacag

SEQ ID NO: 575856 - DNA, 568 bp, Homo sapiens
ctgtgtataagaagtgctctttgaatattggcaaaygattttgcagaaaagaccttatattctctcaatggacactcaggaattggatagtgcatgtgttctgtaagatgggaaccatcagtgccctgaatatattgaagggtcatttcctgaacccagatatgctccattctctcagtttctttagttgtatagaaaaaaacaagtttggatgagatcacttcagacagtacataaaatggctatttctggttttgtttttgtttgtttgtttttgttttgtttttattttgttttgtttttgagatggagtcttgctctgtcgcccgggctggagtgcagtggcctgatcttggctcactgcaagctccgcctcccaggttcacaccattctcctgaaaatggctatttctgaaaaacacataaggaaggtgaattgctgagagaagaactagaatgaagaataagagcagtggggaggtgtatagtaagtggtgcaattaatgctttttatattcaatatgtaattatagcagagatacaatgattcttaagagagaaatggctg

SEQ ID NO: 575857 - DNA, 558 bp, Homo sapiens
ccctgctctggccatataagaagtgcctgcctcctctttgctttccaacatgattgtaaatttcccgaggcctctgcagacatgtttcctgaacaccctgtggaaccatgaaccaattaaaccttttttctttatatattacccagtcttaggcatttatttatagcagtgtgagaacagaatacagtctggaagagtaggtgagggttagatcgtgatagtaattaatgctgagctgtaagttttattctattctgaaattaaggaagagctaagtataacagggctttttatctgttgggttttgtttgcttgtttaatgagcaaagtaactttactttgaaagagaaaaatttatattccaatattgaccacagaaaagcacacacacagacacacacacaccacaaacagacacacaagcaygttagctagatgtgtctattagcttaattcattatgttaacatttactgttattaaaatatatgtttactgtcatgacctcagttgccctagctatatgttttcaaattctagatggtggcacataagccat

SEQ ID NO: 575858 - DNA, 594 bp, Homo sapiens
tatttcatcatctcatcatttcatctcatctcatttcaattttatttcaatttcatttcattatttcatttcatttcatcagttcatctcaccatttcatttcatcatctcatctcatcatttcatcattcatctcatcatttcatctcatcattcatctcatcatttcatatcatcattttatctcatttcatctcatttcatctcatctcattccatcattacatctcatttcatctcattttatgtcatcatttcatgtcatcatttcatcacatctcatctcatttcatctcatcatttcatcatttcatctcatttcaactcattgcatctcatctcatcatttccattattccatttcatcatttcattcattatgtcatttcayctcatcatatttcatctcatctcatcatttcatctcatcatttcatctcatttcatctcatcatttcatctcattttatctcatctcatcatttcatcatttcatctcatcatttcttctcatctcatcatttccatttcattttcatttcattatgtttcatctcatttcattatttcatttcattatgtcatttcatttca

SEQ ID NO: 575859 - DNA, 328 bp, Homo sapiens
atccgcgttgagattgaaaatgttccctgtgaatttgtgcagaactttgacccccattaccccattatcctgggtggcttgggcaacagygagggaaatgttggacacgtgcaggtgggtccctttgctgcatatttggtgcctgaggctctgtggatttcccctccatcagtcatcttaccctctcatccccctcagatgcgtctgaagaaacatcgctggtataagaaaatcctcaagtcccaagatccaatcatattttctgtagggtggaggaggtttcagaccatcctgctctattatattgaagaccacaatggaagacaaa

SEQ ID NO: 575860 - DNA, 328 bp, Homo sapiens
atccgcgttgagattgaaaatgttccctgtgaatttgtgcagaactttgacccccattaccccattatcctgggtggcttgggcaacagcgagggaaatgttggacaygtgcaggtgggtccctttgctgcatatttggtgcctgaggctctgtggatttcccctccatcagtcatcttaccctctcatccccctcagatgcgtctgaagaaacatcgctggtataagaaaatcctcaagtcccaagatccaatcatattttctgtagggtggaggaggtttcagaccatcctgctctattatattgaagaccacaatggaagacaaa

SEQ ID NO: 575861 - DNA, 567 bp, Homo sapiens
gctcctgttagcctgattttcggatagctgccacaggagttgtccttgatctggataaatccataaaaattgtgaagaaattaaagctaactggttttccatataaaattttcaagaacacttcatttattaaggtctgtatatctatatattctcatatttataaatgtccatattgtttgagaaaaggaatgaaatacctctaaaatgtgggcctcatrtttttagaaaagtgtttgaaatcttttataaacttcatattttgtttgctcctttatattctgtattacttaaatatgctcaaaaaagcagtggtaaacagctatttaggaattgaggctgttactcctgacttccatgtgagactgccatggaactcatattgaaaatatgtcattttatccactaggttttgtttcctactttttaaattggtgttaagaaagggaaaaaaatcacaagtttgtctaactcagtagaaaaatcgacaaagcatttgcagacaacttggcaagggtacagagaaacggatgtactgttttacagtatttggggaggggtggtttg

SEQ ID NO: 575862 - DNA, 567 bp, Homo sapiens
gctcctgttagcctgattttcggatagctgccacaggagttgtccttgatctggataaatccataaaaattgtgaagaaattaaagctaactggttttccatataaaattttcaagaacacttcatttattaaggtctgtatatctatatattctcatatttataaatgtccatattgtttgagaaaaggaatgaaatacctctaaaatgtgggcctcatgtttttagaaaagtgtttgaaatcttttataaacttcatattttgtttgctcctttatattctgtattacttaaatatgctcaaaaaagcagtggtaaacagctatttaggaattgaggctgttactcctgacttccatgtgagactgccayggaactcatattgaaaatatgtcattttatccactaggttttgtttcctactttttaaattggtgttaagaaagggaaaaaaatcacaagtttgtctaactcagtagaaaaatcgacaaagcatttgcagacaacttggcaagggtacagagaaacggatgtactgttttacagtatttggggaggggtggtttg

SEQ ID NO: 575863 - DNA, 540 bp, Homo sapiens
aagttgacagtcattattaaccatctcactccccttcatatatatatgtatatagtcctttaattctgtcactctagagaaccctgactaatacgtctacacttctgatgatctatttcttttattttaggtcatttatttcccctgggttgcctacactcgcttcttcccactcccctatgaaggacaatataagcctctggacctcactaggtcagggcatgtccctgcttgcactatccatgacactttcctcttttactctttagcaatgagggaatgtcatccttacccagatgccagccacctgtctcacatccaggacagcgagtctccatctcctctccagcaaatacccatgtatgtgggcatggtggcatgcccctgtgatcccagctactccataggcttagggggcagaatcacttgtgcttgagaattcaaggttgcaaggagccatgatcacaccactgcacttcatgctgggtaactgagaccctgtgatttttcscctacattttacagaattttttttttttg

SEQ ID NO: 575864 - DNA, 513 bp, Homo sapiens
ctgaggaaggaggatcacttgagccagggaggtggaggtttcactgaaccatattsacgccactccactgcagcctgggcaacagagctagaccttgtctcaaaaaattaagttagttaaattaaacataaagttgcattgtatctaagaaattgggaaagcaggaaatgcttctgtttttcttttgagttgaacaatgagaacacatggacacagggaggggaacatcacataccggggcctgtcaggggggtgggaggctgggggagtgatagcattaggagaaatacctaatgtagatgatgggttgatgggtgcagtaaaccaccatggcatgtgtatacctatgtaacaaacctccacgttctgtacatgtatctcagaacttaaaatgtaataataacaataataaaaacgacaaaaaaaggaaatgcttcttgttagaacagattacataacctcattgctttttataatagcctataataacagaatatccacaaggtggcagta

SEQ ID NO: 575865 - DNA, 266 bp, Homo sapiens
aagttgggaaagatccatcatcttgaaaactttttctccacaaacccactgtgatctctcaagcaattggtaaggaatccaagagagtctgtatatgacacagatcagggagagcagaacacttgggaggtgaccaggtcttgggggccgagcccttatgaatsggattagtgcctttataaaagaagctcaatggagttcttgtgtgccttccactatgtgaggacatagaaagaaggcaccatctatgaaccatgaaatgggct

SEQ ID NO: 575866 - DNA, 318 bp, Homo sapiens
taggcacaaactcagtaatcatgtggaagataagaacaacagtatcaccaacaagacatccaatcttcaatggcagatactctttcctttcaagtgaaaaaaaaaaaaaacagtatggcatattctctaacaaacacagaatttctaatatttgcggttttccttccttctttccatcttcctttgtcttctcttcccttcccttgccttcttccttcctttcttcttttcctcttccttttttcttttttcttttcctttctttctttttcttttttctccttcsttccttctttccttcttccctcttattcttcc

SEQ ID NO: 575867 - DNA, 512 bp, Homo sapiens
atgcccagttaattttttgtatttttagtagggatggggtttcaccatgttacccaggatggtctcgatctcctgacttcgtgatccacccaccccagcctcccaaagtgctgggattaggcgtgagccaccgcgctggggtcctcattcttgtatcttaaaagtcagtgatgttgagtaatttctcatgccaccacccccaaggttgcctttcttctgtcttcttctttcacttataaggaagtttgtgatttcattgatcccacccatttaagacaatctctctatcatttttccgcaaccttaatttcacttgaaatctaatttcacactgccgtgcaacctaacatatttgtatgttagactctgggaattaggacatgaaaattttkgggaggccattcttttgcctacagcagacataatctatttaacctgcagattaaagcgttctttatttttctgtctccctgtcttaatttttttaaaataatatgaattgtagtaaagag

SEQ ID NO: 575868 - DNA, 393 bp, Homo sapiens
taatataaagaattaattaaggtagcasctacttttcaaatagcgcatttttttcacagacctattaaataagacaaataacatttaaactttatttttaaatttgcagaatagtagttttcagcagatggtttattttagcaaattccatcttcacattgtgctatgcttttatgagttccagctgttaacggatactattttactgctgaaactatcatgtgtgatataattgctcattatgtgtcttaaaacacaagcaatataattattttcaacttggagcaaattaaaatcttatcagcaatttaaaaactctagagtcgtcttcttctggttaattattttaaacttgtatttttctctttatgtttttagtgagttgtcttatca

SEQ ID NO: 575869 - DNA, 393 bp, Homo sapiens
taatataaagaattaattaaggtagcacctacttttcaaatagcgcatttttttcacagacctattaaataagacaaataacatttaaactttatttttaaatttgcagaatagtagttttcagcagatggtttattttagcaaattccatcttcacattgtgctatgcttttatgagttccagctgttaacggatactattttactgctgaaactatcatgtgtgatataattgctcattatgkgtcttaaaacacaagcaatataattattttcaacttggagcaaattaaaatcttatcagcaatttaaaaactctagagtcgtcttcttctggttaattattttaaacttgtatttttctctttatgtttttagtgagttgtcttatca

SEQ ID NO: 575870 - DNA, 393 bp, Homo sapiens
taatataaagaattaattaaggtagcacctacttttcaaatagcgcatttttttcacagacctattaaataagacaaataacatttaaactttatttttaaatttgcagaatagtagttttcagcagatggtttattttagcaaattccatcttcacattgtgctatgcttttatgagttccagctgttaacggatactattttactgctgaaactatcatgtgtgatataattgctcattatgtgycttaaaacacaagcaatataattattttcaacttggagcaaattaaaatcttatcagcaatttaaaaactctagagtcgtcttcttctggttaattattttaaacttgtatttttctctttatgtttttagtgagttgtcttatca

SEQ ID NO: 575871 - DNA, 583 bp, Homo sapiens
atatcttagaagcattgtaggtgtgccctaacatatcaccaaagcttgtgagcaaagactaaaaataatttattcatggcattaaatataatctttgccaaatcactagatggatagccaccaaactaaaaaacagaggcttaagtggctacatacaaatagaatataaacttcacagagttagaatagkaaagtttctacgataaacaagccacaatggtaaaaacaataacaaaaacaacaaacagaaacaacaataatccctaaggagaaacaggagttggattgtcagagttatcacattatgtttttctcaacgtgcagtttccaatgaaaagttgtaaggtatgcaaaaaaacagcagtgtatgacccataggaaggaaaaggagagtcaacagaaatagtcttaaggaaacccagacacaagatttactagacaaaggccttaaatcagcctttataaacatgtttaaacaaataaaggaaaccatgtctaaacaattaaagaagtgtaaaaaataaaatctcatcaaatagaatatattaataaagaaatagaaaatatttttaaaaagaaccaa

SEQ ID NO: 575872 - DNA, 604 bp, Homo sapiens
cctgtagtaaataataaaacttatgttcttgatggtttcaattttgtcttcatcactggaaaacacatttttattaactaatacgtatgtggtattaaatgtatttatttcttcccattaaaatattaattctaatgttttcaaatgatttcacattacatacaaccccaaatcaatttgaaattaaatttgttttgcttttaatttccgaattcaagggtaaatcagtttaagaactatttgtaatctatttaaaaatagaattttataaattacatatagtagacatgttttactatatatagactatcatattaaagaagactgtattatttcacactacttctgaaactgaattaacaaatttttttttyttcagaaaaaacctagatgtgaagatagaaagcaaaaggttaaaataataccctcgtggttttctttttttttttttttgaaatgtaagtctttccaaaacctattttattttatttattattttttaattttattattattatactttaagttttagggtacatgtgcacaatgtgcaggtttgttacatgtgtatacatgtgccattttgctgtgctgcacccattaa

SEQ ID NO: 575873 - DNA, 607 bp, Homo sapiens
catgttttctaagtatgtaaatcatatctcatcagaatacatcattctttacaatgataaagaagcaaaagaaaaacaaaaggacaaagaacatcttaaatgactacattcaactgccatggagctttaattttttaactactcaaaaagatatccactcttcttattccaactatatgactcttctgaaaaaagtaaaactatgaagacagagtaaacatcaatggttgtcacgagttgctagggagaaagggagagatgaacaggcatagcacagagaatttttagggcggtgaaactgttctgtcgataatattacagtaatagatacatgtcatgtcattatacatttgtccaaattcacagaatgtacagcatcaagagtgaggcctgatgtaaactatgaacttcaagtgattataatgtgtcaatgtaagttcatcagttgtaacaaatggaacactctctggtggaaaataytaataatgggggaggctatgcgtgtgtgggaggcatgggatatatgagaaatctctgtaccttcctctcaattttgctgtgaacctaaaactactctaagaaacaaggttattgattttaaaaaaat

SEQ ID NO: 575874 - DNA, 478 bp, Homo sapiens
tcagctgggctcagtggctcatgcctgtaatctcagcactttgggaggcaaaggtgggtggatcacctgaggtcaggagttcaagaccagcctggycaacatggcaaaacctcatctctaataaaaatacaaaaattagctgggcatggtagctggcacctgtaatttcagctacccgggaggctgaggcaggagaatcgcttgagcctagaaagcagaggttgcagttaaccaagatcgcaccactgcactgcagcctgggagacagagtgagattctgtctcaaaaaacaaaaaagatattcactgtctatgcatcccaggatctccagaacaacaattaaaataaataaataaaaaagatggctgggggcagtggctcatgtctgtaatcccagcactttgagaggctgaggtgggtggatcacctgaggtcaggagttcgagaccagtctgactaacatggtaaaacctcatct

SEQ ID NO: 575875 - DNA, 264 bp, Homo sapiens
tcaagccctaatttacctctaattactcttacagcaatgcaatgaatcatgatttaaaatttaaaaaaaaaattgctgttaaattattagtcaagcgcccagggcaatggacagtaragaaataatgtaggccacgggccgagatgacaaaacggtccttttatttaaagctataacaataatatgaagccagccctgtaaaatagacatccaatgaaaaaggcatgctagttcttttgcttttttgtgtacttggcctcctgt

SEQ ID NO: 575876 - DNA, 264 bp, Homo sapiens
tcaagccctaatttacctctaattactcttacagcaatgcaatgaatcatgatttaaaatttaaaaaaaaaattgctgttaaattattagtcaagcgcccagggcaatggacagtagagaaataatgtaggccaygggccgagatgacaaaacggtccttttatttaaagctataacaataatatgaagccagccctgtaaaatagacatccaatgaaaaaggcatgctagttcttttgcttttttgtgtacttggcctcctgt

SEQ ID NO: 575877 - DNA, 467 bp, Homo sapiens
gtagcatgggactcctgggctcaagtgatcctcccacctcagcctcccaaatagctgagattataggcctgtaccagcatatctggctatgttcttttactttttgtagagatggggtcttgttatgttgcccaggctggtctcaaatttctgggctcacgtgatcctcccacctcaacttcacaaaatgctgggattatgggcatgaaccactgcatctcaccaatttactttcttttactggttcattttaaaggctaaatctcagaaacagacagtgaaagagatgtacatgctgggcacagtggctcatgcctgtaatttcagcactttgggagactgaggcgggagcatygcttaagtgctcaggagattaagaccagcctgggtaacaaggtgaaaatgcatctctacaaaaagatttttctaaaaattagccaggcacagttatctatagttctagctac

SEQ ID NO: 575878 - DNA, 608 bp, Homo sapiens
tcaaacctcttattggttctataattaattctttttctaattagctttttaaaaatcagaattgatattagactaatcagttattaatgaggagatgaaattgagttgtttgtacactttatctaagatagtgttatattggctaactcaaatcagtagttcagcaaatgcagaatcagagcttcttcagtgtggaactctcttgtggttcttgaagatgccatttctttctttttttttttttgagacagcatcttcctctgtcaccaggctcgagtgcagtggcacaatctcaattcacagcaacttctgcctcccgggttcaagcatttcttttgtctcagcctctgaagtagctgggactacaggcacatgccacyatgcccggctaagctttgtattttctgtagatacggggtttcagcatgttggacaggctggtcttgaactcctgaccttgtgatccactggccttggactcctaaagtgctgggattacaggtgtgagccaccgtgcctggcctcttttttcagtctttaataaactgctgccatcatttcagaccacttgctattttaggcacttagaaatttttcactggaattca

SEQ ID NO: 575879 - DNA, 608 bp, Homo sapiens
tcaaacctcttattggttctataattaattctttttctaattagctttttaaaaatcagaattgatattagactaatcagttattaatgaggagatgaaattgagttgtttgtacactttatctaagatagtgttatattggctaactcaaatcagtagttcagcaaatgcagaatcagagcttcttcagtgtggaactctcttgtggttcttgaagatgccatttctttctttttttttttttgagacagcatcttcctctgtcaccaggctcgagtgcagtggcacaatctcaattcacagcaacttctgcctcccgggttcaagcatttcttttgtctcagcctctgaagtagctgggactacaggcacatgccaccatgcccggctaagctttgtattttctgtagatacggggtttcagcatgttggacaggctggtcttgaactcctgaccttgtgatccactggccttggwctcctaaagtgctgggattacaggtgtgagccaccgtgcctggcctcttttttcagtctttaataaactgctgccatcatttcagaccacttgctattttaggcacttagaaatttttcactggaattca

SEQ ID NO: 575880 - DNA, 481 bp, Homo sapiens
tttctgtagatacggggtttcagcatgttggacaggctggtcttgaactcctgaccttgtgatccactggccttggactcctaaagtgctgggattacaggtgtgagccaccgtgcctggcctcttttttcagtctttaataaactgctgccatcatttcagaccacttgctattttaggcacttagaaatttttcactggaattcatgtaaagaaagaccatgggtgtttgtactggatttagtattcatccttcgactgcatgactcacccctagtgccataattttactaatgaatttttcagatactactcagctggccactgaacctaaccagcaacccaccctcaaccattcagtggtcttttgttcttstgtgtttctcctgaatgttgattactctcagaaggtgataaaaacttggatttctttttttttctttctagagacagggttttgttctgtcacccaggctgcagt

SEQ ID NO: 575881 - DNA, 481 bp, Homo sapiens
tttctgtagatacggggtttcagcatgttggacaggctggtcttgaactcctgaccttgtgatccactggccttggactcctaaagtgctgggattacaggtgtgagccaccgtgcctggcctcttttttcagtctttaataaactgctgccatcatttcagaccacttgctattttaggcacttagaaatttttcactggaattcatgtaaagaaagaccatgggtgtttgtactggatttagtattcatccttcgactgcatgactcacccctagtgccataattttactaatgaatttttcagatactactcagctggccactgaacctaaccagcaacccaccctcaaccattcagtggtcttttgttcttgtgtgttyctcctgaatgttgattactctcagaaggtgataaaaacttggatttctttttttttctttctagagacagggttttgttctgtcacccaggctgcagt

SEQ ID NO: 575882 - DNA, 542 bp, Homo sapiens
cctatcaacatttagcataagctacagcttatattgttaataattcttctatgtttatgtgatgatttgcaaataaatgggcctatatagtctttatctagtgttggattgggatcaaaagcttcatgaaatcattgtttttagtatacgtacagatggataattgtataaataagtacagatgtgtataaatgtgtgagtatacatacatatattttctagctcctctaacaaaagggcctagaaacaacatcatcccagtaacaatgagaacaccaytctccaattaaaggaaccaaggctccttgtggacatatttgatatcaggatcgggcagggaaaatacaagattagtttgaaatattttgtcatgttaggaagtaaggaaatgctcacaaaatggggaaaatgtgaaagggaaacagatccactttgaataaacttccatagccaaatttgagaaaattggggcaataaaatagataacaatagtaatatattacaatctacagaagaaaattttcaattaatccatgccgggt

SEQ ID NO: 575883 - DNA, 542 bp, Homo sapiens
cctatcaacatttagcataagctacagcttatattgttaataattcttctatgtttatgtgatgatttgcaaataaatgggcctatatagtctttatctagtgttggattgggatcaaaagcttcatgaaatcattgtttttagtatacgtacagatggataattgtataaataagtacagatgtgtataaatgtgtgagtatacatacatatattttctagctcctctaacaaaagggcctagaaacaacatcatcccagtaacaatgagaacaccactctccaattaaaggaaccaaggctccttgkggacatatttgatatcaggatcgggcagggaaaatacaagattagtttgaaatattttgtcatgttaggaagtaaggaaatgctcacaaaatggggaaaatgtgaaagggaaacagatccactttgaataaacttccatagccaaatttgagaaaattggggcaataaaatagataacaatagtaatatattacaatctacagaagaaaattttcaattaatccatgccgggt

SEQ ID NO: 575884 - DNA, 542 bp, Homo sapiens
cctatcaacatttagcataagctacagcttatattgttaataattcttctatgtttatgtgatgatttgcaaataaatgggcctatatagtctttatctagtgttggattgggatcaaaagcttcatgaaatcattgtttttagtatacgtacagatggataattgtataaataagtacagatgtgtataaatgtgtgagtatacatacatatattttctagctcctctaacaaaagggcctagaaacaacatcatcccagtaacaatgagaacaccactctccaattaaaggaaccaaggctccttgtggacatatttgatatcaggatygggcagggaaaatacaagattagtttgaaatattttgtcatgttaggaagtaaggaaatgctcacaaaatggggaaaatgtgaaagggaaacagatccactttgaataaacttccatagccaaatttgagaaaattggggcaataaaatagataacaatagtaatatattacaatctacagaagaaaattttcaattaatccatgccgggt

SEQ ID NO: 575885 - DNA, 185 bp, Homo sapiens
aagcaatagcaaagggggtctgtgcaacacgtgcaatattgggagtaatatcctcccccaacatggatattagaaacagtatcacaaggggttgtacaccacctgtgatattggggagtactatcattttcyttccccatggatatgtagaacaatatcacaaaggtggtgtacaacccctgcta

SEQ ID NO: 575886 - DNA, 600 bp, Homo sapiens
ccacaatgggacatcacttctaacccaacagatagtaacaagtgcaggtgaaactgaaacccttgaacactgttggtggaaatatgaactggctcctcaaaaaaaaataaaataaaatgaccatatgatccagccatccaacttctacagagacagaataactagtagcaggaactcaaacagatatgtgcacacctatgttcacaggagcattacacagccacaagtggaagaaaccaaaacgtccatccaggaatagatggataaacaaaaggatatatatatakagagagagagagagagaaaaatatatatatatatatatgaagaaatattattcagcaatagaaaggaagaaaatcctgacacttctgacacataacatggaacctacttacaaaacaacaaatattatataaccctaggtatataagccaaagttttagaaatacaaagtagaatagtacttgccaggaggtggaaggaacgggaaattaatagttgttgaatgagtatagagttttccaagataaaaaaacatctagaaatctgctacacaacactgtaaatattcttaactctacaaaactgtacacttac

SEQ ID NO: 575887 - DNA, 533 bp, Homo sapiens
tgggcctgggaggcagaggttgcagtgagccaagattgcaccattgcactacagtctgggtgacagagtaagaccctgtcttaaaaaaataaacaaacaaatagaaaataagtagaaaaatggcagacctaaatccaaccttagcartgattagttacaatgtaactggacaaatactctacttaagacagagactgccagacctgagaggaaggcaagacccaacaatatggcatccacagagacacaatttaaacacaaagacacaaacaaagtatgagaaaaaatatgctatgcagacactaatcttaaaaatatgctatccagacactaatcataaaaagcttcaacagagatgttaacactagatgaaagaggcttcagagcaaaatatatcaccagaaataaacagggtaatttaataaaaataaaataatcagagaggatgatgttacaattataaattgtgcctcaaagtgcacacaaattacacacacacacagagcctcaaagtatgtgaatcaaaaacaaca

SEQ ID NO: 575888 - DNA, 533 bp, Homo sapiens
tgggcctgggaggcagaggttgcagtgagccaagattgcaccattgcactacagtctgggtgacagagtaagaccctgtcttaaaaaaataaacaaacaaatagaaaataagtagaaaaatggcagacctaaatccaaccttagcagtgattagttacaatgtaactggacaaatactctacttaagacagagactgccakacctgagaggaaggcaagacccaacaatatggcatccacagagacacaatttaaacacaaagacacaaacaaagtatgagaaaaaatatgctatgcagacactaatcttaaaaatatgctatccagacactaatcataaaaagcttcaacagagatgttaacactagatgaaagaggcttcagagcaaaatatatcaccagaaataaacagggtaatttaataaaaataaaataatcagagaggatgatgttacaattataaattgtgcctcaaagtgcacacaaattacacacacacacagagcctcaaagtatgtgaatcaaaaacaaca

SEQ ID NO: 575889 - DNA, 533 bp, Homo sapiens
tgggcctgggaggcagaggttgcagtgagccaagattgcaccattgcactacagtctgggtgacagagtaagaccctgtcttaaaaaaataaacaaacaaatagaaaataagtagaaaaatggcagacctaaatccaaccttagcagtgattagttacaatgtaactggacaaatactctacttaagacagagactgccagacctgagaggaargcaagacccaacaatatggcatccacagagacacaatttaaacacaaagacacaaacaaagtatgagaaaaaatatgctatgcagacactaatcttaaaaatatgctatccagacactaatcataaaaagcttcaacagagatgttaacactagatgaaagaggcttcagagcaaaatatatcaccagaaataaacagggtaatttaataaaaataaaataatcagagaggatgatgttacaattataaattgtgcctcaaagtgcacacaaattacacacacacacagagcctcaaagtatgtgaatcaaaaacaaca

SEQ ID NO: 575890 - DNA, 416 bp, Homo sapiens
gcctggacaacaagagtgaaactctgtctcaaaagaaaaaaaattaaaaataaaagaacaaggaaacaaaagtaacaaggcttgacaccagatgagcctgaatctaagcaagaaaagcccagaagaaatcccattttggrtcactggctgcatggtagtaataccatacacataaaggaagagaagaggatgtggctttcactttgaattttttgagcttaaggtaaattttgtgtagctacaaagaagcattcaacagagagttaaacctatgatggaaagactgaaggggtccaagctgtagagaaacaggactgcaaaccacaaagggctgaatcagtcaaggagagctgcagggcgggatgaacagggaccaatggaacatttggacaagctgttgagaagaaaggaaaatt

SEQ ID NO: 575891 - DNA, 416 bp, Homo sapiens
gcctggacaacaagagtgaaactctgtctcaaaagaaaaaaaattaaaaataaaagaacaaggaaacaaaagtaacaaggcttgacaccagatgagcctgaatctaagcaagaaaagcccagaagaaatcccattttggatcactggctgcatggtagtaataccatacacataaaggaagagaagaggatgtggctttcactttgaattttttgagcttaaggtaaattttgtgtagctacaaagaagcattcaacagagagttaaacctatgatggaaagactgaaggggtccaagctgtagagaaacaggactgcaaaccacaaagggctgaatcagtcaaggagarctgcagggcgggatgaacagggaccaatggaacatttggacaagctgttgagaagaaaggaaaatt

SEQ ID NO: 575892 - DNA, 461 bp, Homo sapiens
caaggatttcaagaccaagaacccaaaygcaaatgcaataaaaacaaagataaatagctgggacttaattaaactaaacagcttttgcatggcaaagggaacagtcagcagagtaaatggacaactcaaagagtgggacccctgaacctgaccctgacccctgaccctgatccctaacccctgaccctgaccactaacccctgaccctaaccctaacccctaaccctaacccttaaccataacccctaagcctaacccctaaccacaaccctcaccctcacactaatccaaccctaaccccttatccctaacccctaacctctcttaacctctaactctaaaggttgactcttaactcttaactctgacctcaacccctatctccaacccctaaccctaaacttaacccctaacccctaaccctaacaccaaccttaaccctaggttcgttactacgtttg

SEQ ID NO: 575893 - DNA, 461 bp, Homo sapiens
caaggatttcaagaccaagaacccaaacgcaaatgcaataaaaacaaagataaatagctgggacttaattaaactaaacagcttttgcatggcaaagggaacagtcagcagagtaaatggacaactcaaagagtgggacccctgaacctgaccctracccctgaccctgatccctaacccctgaccctgaccactaacccctgaccctaaccctaacccctaaccctaacccttaaccataacccctaagcctaacccctaaccacaaccctcaccctcacactaatccaaccctaaccccttatccctaacccctaacctctcttaacctctaactctaaaggttgactcttaactcttaactctgacctcaacccctatctccaacccctaaccctaaacttaacccctaacccctaaccctaacaccaaccttaaccctaggttcgttactacgtttg

SEQ ID NO: 575894 - DNA, 461 bp, Homo sapiens
caaggatttcaagaccaagaacccaaacgcaaatgcaataaaaacaaagataaatagctgggacttaattaaactaaacagcttttgcatggcaaagggaacagtcagcagagtaaatggacaactcaaagagtgggacccctgaacctgaccctgacccctgaccctgatccctaacccctgaccctgaccactaacccctgaccctaaccctaacccctaaccctaacccttaaccrtaacccctaagcctaacccctaaccacaaccctcaccctcacactaatccaaccctaaccccttatccctaacccctaacctctcttaacctctaactctaaaggttgactcttaactcttaactctgacctcaacccctatctccaacccctaaccctaaacttaacccctaacccctaaccctaacaccaaccttaaccctaggttcgttactacgtttg

SEQ ID NO: 575895 - DNA, 461 bp, Homo sapiens
caaggatttcaagaccaagaacccaaacgcaaatgcaataaaaacaaagataaatagctgggacttaattaaactaaacagcttttgcatggcaaagggaacagtcagcagagtaaatggacaactcaaagagtgggacccctgaacctgaccctgacccctgaccctgatccctaacccctgaccctgaccactaacccctgaccctaaccctaacccctaaccctaacccttaaccataacccctaagcctaacccctaaccacaaccctcaccctcacactaatccaaccctaaccccttatccctaacccctaacctctcttaacctctaactctaaasgttgactcttaactcttaactctgacctcaacccctatctccaacccctaaccctaaacttaacccctaacccctaaccctaacaccaaccttaaccctaggttcgttactacgtttg

SEQ ID NO: 575896 - DNA, 514 bp, Homo sapiens
aacggaatggaattcaatgtaatggaaacaaaccgattggaatgtaatggaatggaaaggactggaatgtaatggaatggattggaatcaacccgattacaatccaacggaatggaatggaatggaatggaatggaaaggaatggaatggaatggaaaggaatggaaagaactggaatggaatggaatttattggaatggaatggaatggaatggaatcaacccgagtggagtgsaatggaatggaaaggaaatgaatggaatggaatggaatggaatggaacggaacgaaatggaatgtacccgagtagaatggaatggaatgtaatggaatggaatcaacccgagtggaatggattgtaataaatacgagtggaatggaatggaatggaatggaatggaatggaatggaatggaattaacccgagtggaatgcaatggaatggaatgaaatggaatggtaagaaatgaacccgaatggaatggattggaatagagtggaatggaatggaatg

SEQ ID NO: 575897 - DNA, 571 bp, Homo sapiens
gtaatggaatggaaaggactggaatgtaatggaatggattggaatcaacccgattacaatccaacggaatggaatggaatggaatggaatggaaaggaatggaatggaatggaaaggaatggaaagaactggaatggaatggaatttattggaatggaatggaatggaatggaatcaacccgagtggagtgcaatggaatggaaaggaaatgaatggaatggaatggaatggaatggaacggaacgaaatggaatgtacccgagtagaatggaatggaatgtaatggaatggaatcaacccgagtggaatggattgyaataaatacgagtggaatggaatggaatggaatggaatggaatggaatggaatggaattaacccgagtggaatgcaatggaatggaatgaaatggaatggtaagaaatgaacccgaatggaatggattggaatagagtggaatggaatggaatggcatggaatgcaatgaaatccactagaatggaatgaaatggaatggaatgaacaggaatggaatggaatggaatggagtggaatggactagaatggaatg

SEQ ID NO: 575898 - DNA, 405 bp, Homo sapiens
gaacattaagcttttatcagatacacattttgattttatcagatacatattttctcacatattatgggttgtcttttcactcccttgatagtaycctttgatacataaagggttttttattttgattaaatctaattttcgtgtattttcttttgttatctgtgcttttctgtcatatttcaaaatacgcttaaaactcaaaggtcataaaggtttaccatgtgttttcttctaagagttacatatttttagtccttacatttaagtcttttattaatttagaattaatttttgtatatactgcaaagtaggggtctaacttctctcttgtgcactgacatccagttgttgaagagactgttctttcctcccttgactagacttggccaccttgttgaaccgtca

SEQ ID NO: 575899 - DNA, 405 bp, Homo sapiens
gaacattaagcttttatcagatacacattttgattttatcagatacatattttctcacatattatgggttgtcttttcactcccttgatagtaccctttgatacataaagggttttttattttgattaaatctaattttcgtgtattttcttttgttatctgtgcttttctgtcatatttcaaaatacrcttaaaactcaaaggtcataaaggtttaccatgtgttttcttctaagagttacatatttttagtccttacatttaagtcttttattaatttagaattaatttttgtatatactgcaaagtaggggtctaacttctctcttgtgcactgacatccagttgttgaagagactgttctttcctcccttgactagacttggccaccttgttgaaccgtca

SEQ ID NO: 575900 - DNA, 597 bp, Homo sapiens
gtcagagcataatatgagggcttggatagaaggaaaggtgttattgggaaacatgagtagaatggggtactgcaggaaatatatattatgtacattttaaaaaacgtaattgtaggccaaaattgctggtttgcaagatgcactttccatgatgttcaggtatagaaaarcaagaggtactgtcatgggaacactcatatgaagttatttgtggaatctacatattaataggaaaataatacagcccagtatatttctataacatttattttagtgaacttataatgtttctttgtattaaattattagattatatctttagataatattgttactaaattagtaggtaatacatatttttattcaaaaataaattgtgcatctaatgtctaccaattaatgtacttgtctatgtatctcctctcaaattgagcctctgctgcacccacgcggcgtgaaggactcttctcccacggggaagtttttctttttcaggagggaggagggctttcccaggtaatgtgtctagagtgttgggcagaagaatctgggacctcaccacaccaattctctccttaatccacgtcatttgccttc

SEQ ID NO: 575901 - DNA, 597 bp, Homo sapiens
gtcagagcataatatgagggcttggatagaaggaaaggtgttattgggaaacatgagtagaatggggtactgcaggaaatatatattatgtacattttaaaaaacgtaattgtaggccaaaattgctggtttgcaagatgcactttccatgatgttcaggtatagaaaaacaagaggtactgtcatgggaacactcatatgaagttatttgtggaatctacatattaataggaaaataatacagcccagtatatttctataacatttattttagtgaacttataatgtttctttgtattaaattattagattatatctttagataatattgttactaaattagtaggtaatacatatttttattcaaaaataaattgtgcatctaatgtctaccaattaatgtacttgtctatgtatctcctctcaaattgagcctctgctgcacccacgcggcgtgaaggactcttctcccacggggaagtttttctttttcaggagggaggagggctttcccaggtaatgtgtctagagtgttgggcagaagaatctgggaccwcaccacaccaattctctccttaatccacgtcatttgccttc

SEQ ID NO: 575902 - DNA, 597 bp, Homo sapiens
gtcagagcataatatgagggcttggatagaaggaaaggtgttattgggaaacatgagtagaatggggtactgcaggaaatatatattatgtacattttaaaaaacgtaattgtaggccaaaattgctggtttgcaagatgcactttccatgatgttcaggtatagaaaaacaagaggtactgtcatgggaacactcatatgaagttatttgtggaatctacatattaataggaaaataatacagcccagtatatttctataacatttattttagtgaacttataatgtttctttgtattaaattattagattatatctttagataatattgttactaaattagtaggtaatacatatttttattcaaaaataaattgtgcatctaatgtctaccaattaatgtacttgtctatgtatctcctctcaaattgagcctctgctgcacccacgcggcgtgaaggactcttctcccacggggaagtttttctttttcaggagggaggagggctttcccaggtaatgtgtctagagtgttgggcagaagaatctgggacctyaccacaccaattctctccttaatccacgtcatttgccttc

SEQ ID NO: 575903 - DNA, 536 bp, Homo sapiens
catggacagtgaaggccaggctgagggggcctcagataaaaataagaagctttctggaaaatgtctcccttttggatatggaaagcttacacaatgyctgtaccatcattgtaccttagacacagtgaacttgctttttatttcagagactcgtaggcaaaagagaatgtagccttgacccagatgagactttggactttgtaactttgagttaatgctgaaatgagttaagactttgggagactgctggcaaggcatgactgtatcttgcaatgtgagaaggacatgagatttgtggggtcagggacagaataatacggtttttctctatgccccttccaaaactcatgtgaaagtacactccctaatgttagagtcggggcctaggtggaaaaagctttaatcataaaggagtgggagtggatccttcacaaatggcaaagcaccaagcccttaatgccatcctcctgatagtgagtgagttctcatgagatctagtagtttaaaaggctgtggaacctctttcctctctctgt

SEQ ID NO: 575904 - DNA, 536 bp, Homo sapiens
catggacagtgaaggccaggctgagggggcctcagataaaaataagaagctttctggaaaatgtctcccttttggatatggaaagcttacacaatgcctgtaccatcattgtaccttagacacagtgaacttgctttttatttcagagactcgtaggcaaaagagaatgtagccttgacccagatgagactttggactttgtaactttgagttaatgctgaaatgagttaagactttgggaractgctggcaaggcatgactgtatcttgcaatgtgagaaggacatgagatttgtggggtcagggacagaataatacggtttttctctatgccccttccaaaactcatgtgaaagtacactccctaatgttagagtcggggcctaggtggaaaaagctttaatcataaaggagtgggagtggatccttcacaaatggcaaagcaccaagcccttaatgccatcctcctgatagtgagtgagttctcatgagatctagtagtttaaaaggctgtggaacctctttcctctctctgt

SEQ ID NO: 575905 - DNA, 536 bp, Homo sapiens
catggacagtgaaggccaggctgagggggcctcagataaaaataagaagctttctggaaaatgtctcccttttggatatggaaagcttacacaatgcctgtaccatcattgtaccttagacacagtgaacttgctttttatttcagagactcgtaggcaaaagagaatgtagccttgacccagatgagactttggactttgtaactttgagttaatgctgaaatgagttaagactttgggagactgctggcaaggcatgactgtatyttgcaatgtgagaaggacatgagatttgtggggtcagggacagaataatacggtttttctctatgccccttccaaaactcatgtgaaagtacactccctaatgttagagtcggggcctaggtggaaaaagctttaatcataaaggagtgggagtggatccttcacaaatggcaaagcaccaagcccttaatgccatcctcctgatagtgagtgagttctcatgagatctagtagtttaaaaggctgtggaacctctttcctctctctgt

SEQ ID NO: 575906 - DNA, 570 bp, Homo sapiens
tgccatcctcctgatagtgagtgagttctcatgagatctagtagtttaaaaggctgtggaacctctttcctctctctgtcttgttccaacttytgccatatgaaacatgtcattgccgcttggatttccggtgtggttaggagggacctgatcagtgtgggcctggtcagtggacctaggtcagtgaggactatttagtgggatcgtggtcagcaggggtctgcttagagagggtctcattagtggggtctagtagtggggttttggtgagtggggacctattggctgccagttgtttggtgtctggtcagtgcaaacctgggctgtggggcttgatcagtggagacctggtcagctggggcttagtgctggcctggtcagcatgggctggggcactggtgaccaggtcaaggggtgctattcagtggaggactgggcacatgggacctagtcagcagaccctggtgggcgtgtcctcatcagtgaggtccttgtcagtggggccctggtcagggcagccttgtcagcgggacctaatctgtagcgtcctggtcagagaggacttggtca

SEQ ID NO: 575907 - DNA, 570 bp, Homo sapiens
tgccatcctcctgatagtgagtgagttctcatgagatctagtagtttaaaaggctgtggaacctctttcctctctctgtcttgttccaacttctgccatatgaaacatgtcattgccgcttggatttccggtgtggttaggagggrcctgatcagtgtgggcctggtcagtggacctaggtcagtgaggactatttagtgggatcgtggtcagcaggggtctgcttagagagggtctcattagtggggtctagtagtggggttttggtgagtggggacctattggctgccagttgtttggtgtctggtcagtgcaaacctgggctgtggggcttgatcagtggagacctggtcagctggggcttagtgctggcctggtcagcatgggctggggcactggtgaccaggtcaaggggtgctattcagtggaggactgggcacatgggacctagtcagcagaccctggtgggcgtgtcctcatcagtgaggtccttgtcagtggggccctggtcagggcagccttgtcagcgggacctaatctgtagcgtcctggtcagagaggacttggtca

SEQ ID NO: 575908 - DNA, 570 bp, Homo sapiens
tgccatcctcctgatagtgagtgagttctcatgagatctagtagtttaaaaggctgtggaacctctttcctctctctgtcttgttccaacttctgccatatgaaacatgtcattgccgcttggatttccggtgtggttaggagggacctgatcagtgtgggcctggtcagtggacctaggtcagtgaggactatttagtgggatcgtggtcagcaggsgtctgcttagagagggtctcattagtggggtctagtagtggggttttggtgagtggggacctattggctgccagttgtttggtgtctggtcagtgcaaacctgggctgtggggcttgatcagtggagacctggtcagctggggcttagtgctggcctggtcagcatgggctggggcactggtgaccaggtcaaggggtgctattcagtggaggactgggcacatgggacctagtcagcagaccctggtgggcgtgtcctcatcagtgaggtccttgtcagtggggccctggtcagggcagccttgtcagcgggacctaatctgtagcgtcctggtcagagaggacttggtca

SEQ ID NO: 575909 - DNA, 469 bp, Homo sapiens
tggaaacaaaccgagtggaatgtaatggaattgaaacgactggaatataatggaatggattggaatcaacccgattccaatgcaacggaatggaatggaatgcaatgtaaagaaatcaacccgaatggaatggataggaatagagtggaatggaatgcaatggcatggaatgsaatgaaatcaactagaatggaatggaatggaatgaacaggaatggaatggaatgcaatggagtggaatggactagaacgtaatggattggaatgaaatcaacccgattggaatggaatggaatgcaatggaatgtaatggaatcaactggaaaggaatcaaatcgaacggaatggaatggaatggaatggaatggaatggaatggaatggaatggaatcaaccccagtggaatggaatggaatggaatggattataatggaatggaatggaatcaatccgggtggaatggaatgga

SEQ ID NO: 575910 - DNA, 469 bp, Homo sapiens
tggaaacaaaccgagtggaatgtaatggaattgaaacgactggaatataatggaatggattggaatcaacccgattccaatgcaacggaatggaatggaatgcaatgtaaagaaatcaacccgaatggaatggataggaatagagtggaatggaatgcaatggcatggaatgcaatgaaatcaactagaatggaatggaatggaatgaacaggaatggaatggaatgsaatggagtggaatggactagaacgtaatggattggaatgaaatcaacccgattggaatggaatggaatgcaatggaatgtaatggaatcaactggaaaggaatcaaatcgaacggaatggaatggaatggaatggaatggaatggaatggaatggaatggaatcaaccccagtggaatggaatggaatggaatggattataatggaatggaatggaatcaatccgggtggaatggaatgga

SEQ ID NO: 575911 - DNA, 469 bp, Homo sapiens
tggaaacaaaccgagtggaatgtaatggaattgaaacgactggaatataatggaatggattggaatcaacccgattccaatgcaacggaatggaatggaatgcaatgtaaagaaatcaacccgaatggaatggataggaatagagtggaatggaatgcaatggcatggaatgcaatgaaatcaactagaatggaatggaatggaatgaacaggaatggaatggaatgcaatggagtggaatggactagaacgtaatggawtggaatgaaatcaacccgattggaatggaatggaatgcaatggaatgtaatggaatcaactggaaaggaatcaaatcgaacggaatggaatggaatggaatggaatggaatggaatggaatggaatggaatcaaccccagtggaatggaatggaatggaatggattataatggaatggaatggaatcaatccgggtggaatggaatgga

SEQ ID NO: 575912 - DNA, 469 bp, Homo sapiens
tggaaacaaaccgagtggaatgtaatggaattgaaacgactggaatataatggaatggattggaatcaacccgattccaatgcaacggaatggaatggaatgcaatgtaaagaaatcaacccgaatggaatggataggaatagagtggaatggaatgcaatggcatggaatgcaatgaaatcaactagaatggaatggaatggaatgaacaggaatggaatggaatgcaatggagtggaatggactagaacgtaatggattggaatgaaatcaacccgattggaatggaatggaatgcaatggaatgkaatggaatcaactggaaaggaatcaaatcgaacggaatggaatggaatggaatggaatggaatggaatggaatggaatggaatcaaccccagtggaatggaatggaatggaatggattataatggaatggaatggaatcaatccgggtggaatggaatgga

SEQ ID NO: 575913 - DNA, 562 bp, Homo sapiens
caatggaattcaaaggaatggaatggaatgaaatcagcccgaatggaatggattgcaatagagtggaatggaatgaaacggcatggaatgcaatggaatcaactagaatggaatggattggtatggaatggacagtaatggaatggaatggaatggaatggaatggaatggaatggagtggaacggactagaatggaatggaatcaactcgagtggaaagcaatggaatggaaaggaatggaatggaatsgaatggaatggactagaatggaatggaatggaatggaatggaatagaatggaatggactggaaaggaatggaatggaaggaaatcaacctgattggaatggaattgaaagcaatggaagggaatggaatcaactggaaaggaatgaaatggaatggaatggaatggaatggaatggaatggaattaacccgaggggaatggaatggaatggaatggaatggaatggaatggaatggaatggaatggaatggaatcaacccgagtggaatgcaatggaatggaatggaatggaatggaatcaacccgagtgga

SEQ ID NO: 575914 - DNA, 586 bp, Homo sapiens
caaggcctttggacttcatgaagagaattctttttattactgaataaacatggtaattttaggtacaaaacagatttaactaattctaaccctgaattacaaaaaacactgaagaatctctcaacttgctcagtggttataactaacattctctagaacagctccaattttatgtctcagacccatggtttcactgcatattattatcacctggggagcttttataattcctgatgccctgcttgctccccrtgccaattaaattagaatgtgtagagatgagataaaagcattagaaatatattgccagggaaatacaatacatagcaaagtttgagaatcatggtgttgatagaggcaggaggcagacaaaggcctatgcagatagggaagggtccccggagaatctccgacccaccccacaagtgtttatgccagatattttgtacagatgagggaacctgcacagggggcttgcctgggcatgcccacagcagacagaagcccacatgcactggggaaatcgggtggagccaccaggaattcatgccttatgcaggggtatagcctggcctcttcagctcat

SEQ ID NO: 575915 - DNA, 586 bp, Homo sapiens
caaggcctttggacttcatgaagagaattctttttattactgaataaacatggtaattttaggtacaaaacagatttaactaattctaaccctgaattacaaaaaacactgaagaatctctcaacttgctcagtggttataactaacattctctagaacagctccaattttatgtctcagacccatggtttcactgcatattattatcacctggggagcttttataattcctgatgccctgcttgctccccatgccaattaaattagaatgtgtagagatgagataaaagcattagaaatatattgccagggaaatacaatacatagcaaagtttgagaatcatggtgttgatagaggcaggaggcagacamaggcctatgcagatagggaagggtccccggagaatctccgacccaccccacaagtgtttatgccagatattttgtacagatgagggaacctgcacagggggcttgcctgggcatgcccacagcagacagaagcccacatgcactggggaaatcgggtggagccaccaggaattcatgccttatgcaggggtatagcctggcctcttcagctcat

SEQ ID NO: 575916 - DNA, 545 bp, Homo sapiens
aaaccagtgaatcactgagatggtgatacaaaygtatatttgtttattaacattattttcaacattttaacattgacatctcaataatattgaaaactgagggaattttaccatgaacatttaaatatgtatcacccagactccactattaacagtttactctctttgtttcatcagctttttcctgcctcagctgagtagctgaaaccacagatgtgcacctctatgcctggctaaattttttatttttatttttgtagagatggggtcttgctatgtttcacagacttatctcaaactcctggcctcaagcaatcctcccacctcaacttcccaaagtcctgggattataagcatgagccactacagctggcataaagttctgaatgtaacaagcatttaatatatacttatcctggataatgatcaagggctagaatataaaatcgttgtgttgtcttcttattgtgagtggggagtatcacctcactcctcatacagcatgcattcatctaaaatctaccctgagttttctcccaaacttt

SEQ ID NO: 575917 - DNA, 545 bp, Homo sapiens
aaaccagtgaatcactgagatggtgatacaaacgtatatttgtttattaacattattttcaacattttaacattgacatctcaataatattgaaaactgagggaattttaccatgaacatttaaatatgtatcacccagactccactattaacagtttactctctttgtttcatcagctttttcctgcctcagctgagtagctgaaaccacagatgtgcacctctatgcctggctaaattttttatttttatttttgtagagatggggtcttgctatgtttcacagacttatctcaaactcctggcctcaagcaatcctcccmcctcaacttcccaaagtcctgggattataagcatgagccactacagctggcataaagttctgaatgtaacaagcatttaatatatacttatcctggataatgatcaagggctagaatataaaatcgttgtgttgtcttcttattgtgagtggggagtatcacctcactcctcatacagcatgcattcatctaaaatctaccctgagttttctcccaaacttt

SEQ ID NO: 575918 - DNA, 626 bp, Homo sapiens
ttaaggttatctctcttattccctgaacattgctgttatcctgttcttttttcaaggkgcccagatttcatattgttcaaacacacatgctctacaaacaatttgtgcagttaacgcaaccatcacagggtcctgaagtgacatacatcctcctcagctgacaggattaagagattaaagtaaagacaggcataggaaatcacaagggtattgattggggaagtgataagtgtccatgaaatcttcacaatttatcttcagagattgcagtaaagacaggtgtaagaaattataaaagtattaatttggggaactaagaaatgtccatgaaatcttcacaatccatgttcttctgccatggcttcagccagtacctctgttccaggtccctgacttcccacaacattcacagaacttctcaaacctaaagaaagatatcaacattcaagtacaagaagtttatagaacaccaagcagattaacccaaatactatctcaaggcatctagtaatcaaactcccaaaggctaacaataaagaatcccaaaagcagccagagaaaagaaataaataacatacaatgaagctccaatatgtttggcagcagacttttcagtggaaaactta

SEQ ID NO: 575919 - DNA, 597 bp, Homo sapiens
aaaaaaattaaagacaccaaaaaatggaaagatattttatgtttatggattgaaaaaaattaatattgttaaaattttcacactccccaaagcaatctacagattcaatgcaatctctatcaaaataccagtgatattcttcacagaaatataaaaaaaaatcccaaaatttatatggaatcacaaaagactcagaatagctgaagccattctaagcaaaaagagctatagtaaccaaacagcacattactggcataaaaacatattcatagaccartcgaatagaatagagaacccagaaacaaatgcacacacctatagtgggctcatttttgaccatagtgtcaagaacatacactgggagaaagatagttttcaatgaatggtactgggaaaactggacatccatttgcagaagaatgacactagacccgtatctctcacccaaagtcattataaaaatttaaatcaaaatggattaaagacgtaaatctaaggcctcaaactatgcagttactgaaagaaaatattggggaaactcctagacatggtcttgtcaaaattttcttgagtcatatccccacaggcaaccaaagc

SEQ ID NO: 575920 - DNA, 641 bp, Homo sapiens
gcctcttcgaagccagcaagggagagggagaatctttgctgcttagtctctgaccccaggaccctcttttaaaggacttccctgattaggtcaggcccacctatgataatctcttttgattaaagccacctgctgagagattttaattatatctacaaaatcttgtcaycattgctatattctgttaataagaagcaagtaacaggttccacacccattcaaaaggagggagttatatgagagtgtgactcattgagtgtcacctatgggtgtgtcctccatacctcatcaatgctccaagatgcccagggtccccaaaaatgtcaccgttaactccaccctattattttaagctattaaatgtggtgaaaggaacaggaaaagaagtgtctttcagaatagcttacatttccttcctgcttggcagaatcatttgtgagttcacataaatgggttcatgcagataataaccaagaaatgggaagacattaattagaattgatttacaattacacacctcactcaagcccattagttacattctgtttttcaaaattgctttcattttgtgagtgtgccagacttttaaagatttggtaagacttgatgtcagccttctccaaggcctttaatacatgata

SEQ ID NO: 575921 - DNA, 406 bp, Homo sapiens
caaggagaactcagtgaaataatcatagattggtacttttgtctgggaagcacaatgaagttgatctctgtgtccaagcacatcctcaagcctcctgtgcaactgggtgctccttacgtggggcactgaggtcaatggtacaccgtggagctagtaattgctatgcagtcaattaccaatggcatagcaatgtctgagattcccttttaatagtgtagcctgggaaagtatctcccaatggcaaygatagctgaggccagaaccaagatttctcagtctcagcactactgacactttgggctggatagttctttgttgaggagtggggcaaggggtcttgtacactgtaggatatttggcatcatctctagtttctgcctactagatgctggtagcaatcaccacc

SEQ ID NO: 575922 - DNA, 583 bp, Homo sapiens
tatttatcttttcaaagaaccagctttttgtttcatttatcttttgtatttttttgtttcaatttcatttagttctgctctgatcttggttatttcctttcttctgctgggtttgggtttgttcttgtttctctagttccttgaggtgtgaccttagattgtctgctgtgctctttcagacttcttgatgtagacatttagggctatgaactttccccttagcactgcctttgctgtatcccacaggtttttatargttgtgtcactactgtcgttcagttcaaataatttttaaatttccatcttgatttcattgttgacccactgataattcaagaacaggttacttaattcccacatatttgcatggtttcgaaggtttcttttggagttgatttccagttttattccactgtggtctgagagagtgattgatataatttcaattctcttaagtttattgaggcttgttttgtggcctatcatatggtctatcttggagaaagttccatgcactgatgaacagaatgtatattctgtggttgttgggtagaatgttctgtaaatacctgttaagtccatt

SEQ ID NO: 575923 - DNA, 583 bp, Homo sapiens
tatttatcttttcaaagaaccagctttttgtttcatttatcttttgtatttttttgtttcaatttcatttagttctgctctgatcttggttatttcctttcttctgctgggtttgggtttgttcttgtttctctagttccttgaggtgtgaccttagattgtctgctgtgctctttcagacttcttgatgtagacatttagggctatgaactttccccttagcactgcctttgctgtatcccacaggtttttataagttgtgtcactactgtcgttcagttcaaataatttttaaatttccatcttgatttcattgttgacccactgataattcaagaacaggttacttaattcccacatatttgcatggtttcgaaggtttcttttggagttgatttccagttttattccactgtggtctgagagagtgattgatataatttcaattctcttaagtttattgaggcttgttttgtggcctatcatatggtctatcttggagaaagttycatgcactgatgaacagaatgtatattctgtggttgttgggtagaatgttctgtaaatacctgttaagtccatt

SEQ ID NO: 575924 - DNA, 450 bp, Homo sapiens
aacagaaatggtcttgaatggaatttattcgagtataatttaatcgaatggaatgcaatagtatggaatggaatcgaatggaatggaatcgaatggattggtacgaaatcgaatggaacggaatagaacagactcgaatgtaatggattgctatgtaattgattcgaatggaatggaatcgaatggaatgcaatccaatggaatggaatgyaatgcaatggaatggaatcgaatggaatgcactggaagggaatggagtggaatcaagtggaatcgaatggaatggaatggaatcgaatggaatggactggaatggaatggattcgaatggaatcgaatggaacaatatggaatggtacccaatggaatggaatggaatggaatggaacagaatggaatggaatggaatggaatggaacagaatggaatggaatggaatggaatggaacg

SEQ ID NO: 575925 - DNA, 628 bp, Homo sapiens
ggaatcatgcacatatcattcaatccatggaaaatgtctatatagactctcctttaaaattcatgccatatgtgaatgcttatcaccaccttcaccaaaagccctcccaatctatcatctacacctggactattgcaatatagtaaattctctttactttcttcttataacccactttatttcccttatgrccttctatacacaactaaagttttaaaataataaatcagatcatattacttacccatcccaaatagttttattcctttttacccttaaaaagtaattcaaataacctaatttgcaagcctctaatttctgcctaatgacttatcactctgtctgatattgtctccactccagtaatacaaaatttcttgttatttctcaaaggcacttagtaaggtttttatgtttgtgttactctctgcattgtctcttctcagattttcctgtggattttacctttgtgtggcccaaaactctactcaaatagtatctcactggaatagattttccatcattctccttactttttaattttcttacagagcacatattattgattttcttttttacttttgtggtaactttttcatttgtctttaaattttaaattaaaaaaaaa

SEQ ID NO: 575926 - DNA, 628 bp, Homo sapiens
ggaatcatgcacatatcattcaatccatggaaaatgtctatatagactctcctttaaaattcatgccatatgtgaatgcttatcaccaccttcaccaaaagccctcccaatctatcatctacacctggactattgcaatatagtaaattctctttactttcttcttataacccactttatttcccttatggccttctatacacaactaaagttttaaaataataaatcagatcatattacttacccatcccaaatagttttattcctttttacccttaaaaagtaattcaaataacctaatttgcaagcctctaatttctgcctaatgacttatcactctgtctgatattgtctccactccagtaatacaaaatttcttgttatttctcaaaggcacttagtaaggtttttatgtttgtgttactctctgcattgtctcttctcagattttcctgtggattttacctttgygtggcccaaaactctactcaaatagtatctcactggaatagattttccatcattctccttactttttaattttcttacagagcacatattattgattttcttttttacttttgtggtaactttttcatttgtctttaaattttaaattaaaaaaaaa

SEQ ID NO: 575927 - DNA, 630 bp, Homo sapiens
tttatatttcaaattctgatacaaaataatgttgaaatgactgaggggaatcatttgtagcagttttattaactcacattggagaaaatagcaaaataaatcaacaaagcaaatgtgtactaaagcaagtgcaaacaacacttatgaatgatgaaagtaatggcacaggatctaaagctacttatctctataatgactttttaatagcaattctaacacctgcccattgagggtgaatggaaacaaaagtcacctctgaacaatcctcttttcattaktatttatgcctgtggtttagaaaaggtcctagtttatggtatgtatttttagatgtaaaattttctgaagtttgctttgttttgcttcctgtgaaaatcatgaaattatatgagtttccttttgctaaaagaaccattttcacaggtggcaaacagagatatttttacctatattttccactttcaatattgcgtccactattataattgtgacttattccaaaaaacagcaaaaacaaatcatgtacatgtttgtttttacactcatcagttataatttgttgacatgcacatattatgtgaaataactgtacataatttcctaaggagtgactgtaaaatttgcagaaaa

SEQ ID NO: 575928 - DNA, 630 bp, Homo sapiens
tttatatttcaaattctgatacaaaataatgttgaaatgactgaggggaatcatttgtagcagttttattaactcacattggagaaaatagcaaaataaatcaacaaagcaaatgtgtactaaagcaagtgcaaacaacacttatgaatgatgaaagtaatggcacaggatctaaagctacttatctctataatgactttttaatagcaattctaacacctgcccattgagggtgaatggaaacaaaagtcacctctgaacaatcctcttttcattagtatttatgcctgtggtttagaaaaggtcctagtttatggtatgtatttttagatgtaaaattttctgaagtttgctttgttttgcttcctgtgaaaatcatgaaattatatgagtttccttttgctaaaagaaccaytttcacaggtggcaaacagagatatttttacctatattttccactttcaatattgcgtccactattataattgtgacttattccaaaaaacagcaaaaacaaatcatgtacatgtttgtttttacactcatcagttataatttgttgacatgcacatattatgtgaaataactgtacataatttcctaaggagtgactgtaaaatttgcagaaaa

SEQ ID NO: 575929 - DNA, 630 bp, Homo sapiens
tttatatttcaaattctgatacaaaataatgttgaaatgactgaggggaatcatttgtagcagttttattaactcacattggagaaaatagcaaaataaatcaacaaagcaaatgtgtactaaagcaagtgcaaacaacacttatgaatgatgaaagtaatggcacaggatctaaagctacttatctctataatgactttttaatagcaattctaacacctgcccattgagggtgaatggaaacaaaagtcacctctgaacaatcctcttttcattagtatttatgcctgtggtttagaaaaggtcctagtttatggtatgtatttttagatgtaaaattttctgaagtttgctttgttttgcttcctgtgaaaatcatgaaattatatgagtttccttttgctaaaagaaccattttcacaggtggcaaacagagatatttttacctatattttccactttcaatattgcgtccactattataattgtgacttattccaaaaaacagcaaaaacaaatcatgtacatgtttgtttttacactcatcagttatmatttgttgacatgcacatattatgtgaaataactgtacataatttcctaaggagtgactgtaaaatttgcagaaaa

SEQ ID NO: 575930 - DNA, 453 bp, Homo sapiens
tctccctctcatacttcttcacattgaaatgttgatcttttcttttatcacctttcttattctctttttggtcccattttttccacttcatctattctgcgatgattttttttctttggtttgtttcccaaggacttcttgttattttacttattattttgtaatcaaatatttttcctccaacgtttatgttcggggatgcacgtatcaacttgttacatgggcaaactctgtgttgctggggttggtgtccaaatgatttcattacccaggtagtcagcatagtacccaagaggtagtttttcgatcctcaatctcttcccactccccaccctgaaataagccctggtgtctrtccttctctgtgtgtacacatgtactcaatttttaaccctcactgatgagaacatgtgatacttggtcttctgttcctgagttaatttctttaggatg

SEQ ID NO: 575931 - DNA, 623 bp, Homo sapiens
catcatgtgatgaattctagtcaaaactcagtcagtactttgtttcatgcacaaattgtttaaaatattgtataaaactacctccaggttatgatataaggtgaatataaaacataaataaatgttgtgtttagatttgggtcccaccctattccaaaatttaaaaaaatccaaaatctgaaacacttcagcatttcaaataagggattctcaacctgtgttaagccatttactatgtctcaattagattagccaaaacagcctctttgaagccactgtttagaatattacaccttccataacttggaattatttgaattccaagcctttaaatgttgggttttttaaaattaagtacttaattaagtactttgaattaagtactgtaagtacttaattttttacttaagtactatactataatatacttaattcaaaaaaattaagtactataagtactttgaattaagtattagagcatagaaaaactttcaaccatgcccactgtcttagctcagatttcctagaagcagatcctaaaatgaggatcttattcagtgacttattggcttgtaccctcagaaaaggccgggyacagtggctcacgcctataatcccaatgg

SEQ ID NO: 575932 - DNA, 606 bp, Homo sapiens
aagtctcttgaagatctctctttcttgctgctcacaaagttccatcaactccaaggtgacagatttaccagtttttccaaaaggttgagtgacgtctaaatttcttgttggaaagtactacccatacttggtattttatccatcctgaaatgaatgaatcactgaatcacaagggaatggcaatgtgtgatcatcacacattgaatggcttccccgaggttgaaatattgatttatctgtgtagcgagggagcccaagctcatctcccatccttactcacgtaagctttgcacacggactggagagaattgtatctgttagtctgaaaaccagaacccaaaagcagcaagaagcaggaggagattcaacccaaataacctctgcctactctttcagctcagaaattggccaacaagtgcaaaaaaaaaaaaaaaaaaaaacctaaaaatgtgagcacgcattgctttgcaatgtgccatcgaagtcacagcacaaccatttggaaaaagtgaaatgggtcctcattttctctttgtatggctagttcaaaagcaaaaaagttttttttwaaatttttttctttctaagactacgtgagagtaaaca

SEQ ID NO: 575933 - DNA, 467 bp, Homo sapiens
tgtatttatatctctctatatatcctttwatttttgctctgaagacacctttggtagaattgctgcatacagttacttcaacttgataggacaactggttctgcccttaagtgtcaccataagcttgcatttcaggatgcttgaacagttttttgttttataaacaagtttataatcttgtttcataaaatattaaaatctcactataacttttcatggcttttaactttttttgtattgccttattataagcagaagagaagtgggattcttttgtctcttatttattagtcaacaatgtctcagtttcaaatttaaaagtcagaaaatagcttctgaaatacagagaactacttttcaagggatggttagcctgcagatcttatgtgactaaaacttagatgtttatatttttatgctaatatatttcatgtatatttggagctgtttcatttcttggagaattc

SEQ ID NO: 575934 - DNA, 427 bp, Homo sapiens
catttcctctgttggaaaggtgttcagtttccggattagccttccgggttccctcactgattgtctgaagggcccatgctgacctccccctgcacagctcctggaagtgggtctgcaacttcagtgtgacctcttcctcctgtctcttgacaactccataaatggcccgccctgcaccctcttgctgttgggattcccttgctcagcaggcagcccagtggggtgttggggtggaattaatacaaatcagaaagcttaagcctcagaggctttakcattgcaggcttgatccacaggaaatgcactttgctaggcaggctgccgcctggtgccccgactcaggctccaccatctcctgactgtctcatttttcaaggatcattagtgtctccactgcttcaatagcttggtaactttcaggcaagaa

SEQ ID NO: 575935 - DNA, 452 bp, Homo sapiens
tagaattcactcattacataaacagttttaaggatttctcttctcttactaacactggaatgagcacatgagaagctctccaaagtgcttattaaaagaacaagtaaacagcattctcttatgaagcagccttaggggggccagttcatagttattgaagaaacaacaagtgaagacattttgaataacagttataggtattcagggaggctatagtattttcattcttttaccttttttaaaatttcttttccatttaarattttgtgaaaaagcctaattctgaaaatgtagatatttgcaaatcattgattcctagttataaatgcataacccaattacattccattcaaaagtaatgccaaaggaaaaaatgcaggattttaaagtttaaaagtaaaataattatgctcaacacacatattcaataaagaagaaactataaatccaaa

SEQ ID NO: 575936 - DNA, 452 bp, Homo sapiens
tagaattcactcattacataaacagttttaaggatttctcttctcttactaacactggaatgagcacatgagaagctctccaaagtgcttattaaaagaacaagtaaacagcattctcttatgaagcagccttaggggggccagttcatagttattgaagaaacaacaagtgaagacattttgaataacagttataggtattcagggaggctatagtattttcattcttttaccttttttaaaatttcttttccatttaagattttgtgaaaaagcctaattctgaaaatgtagatatttgcaaatcattgattcctagttataaatgcataacmcaattacattccattcaaaagtaatgccaaaggaaaaaatgcaggattttaaagtttaaaagtaaaataattatgctcaacacacatattcaataaagaagaaactataaatccaaa

SEQ ID NO: 575937 - DNA, 591 bp, Homo sapiens
cctcgactatcaatccagcactttcttcacttcagtaaaatggtatgtgtcacgctgcctggtattcatgccactaagaaagtgtaccaaattactgcgtgcctgtagtattgctggcactgagctaaataaattagacacatattttctatgaatcttctcaatgacccactatttttttwaaaaaaaaactgagtactgggatacagatagtataagagccagttacattactcactatgtaagtaatgaagtagcataatgcgtttcataagtaaagaggaataacttaaaactaggtttctaactccagcatctgagctgtttccaccttattgtacttttccaccttattgctctatctcacacagtaagagcttcaaatatagcttaaagtctatctctgcctatacccaatagacttttaataagtggactgacttgtaatagacatttaataaacatttattgataattgagttcaataaaaataatagaatgacttttatgggattctgattaaatttattcttgtaccttagaaagatggaaataatttagcagcaggagggtcaatagaagtgaaaaatg

SEQ ID NO: 575938 - DNA, 591 bp, Homo sapiens
cctcgactatcaatccagcactttcttcacttcagtaaaatggtatgtgtcacgctgcctggtattcatgccactaagaaagtgtaccaaattactgcgtgcctgtagtattgctggcactgagctaaataaattagacacatattttctatgaatcttctcaatgacccactatttttttaaaaaaaaaactgagtactgggatacagatagtataagagccagttacattactcactatgtaagtaatgaagtagcataatgcgtttcataagtaamgaggaataacttaaaactaggtttctaactccagcatctgagctgtttccaccttattgtacttttccaccttattgctctatctcacacagtaagagcttcaaatatagcttaaagtctatctctgcctatacccaatagacttttaataagtggactgacttgtaatagacatttaataaacatttattgataattgagttcaataaaaataatagaatgacttttatgggattctgattaaatttattcttgtaccttagaaagatggaaataatttagcagcaggagggtcaatagaagtgaaaaatg

SEQ ID NO: 575939 - DNA, 604 bp, Homo sapiens
ctgagagtatctagggggtccatgggtaatttttttgttaatatcactattatttctttgtaaattacctctttagtctctcttggagcatttatgattttccctctacatttttagaattaaaaattctttaaaaatttacagttccttgttacaaattctggttaaagcaacagctcaagtgtcaaatacgtctttgcaaatcattcacaaagtcaacaagtaattttatatacwtatttataatctaaacaacatatatatattgtttgtcgctatgggttataatattgaacaatatatatagctccatcctggctaagtccacaatttcctgatagtgacacacaataaactagtaattcaaatatgtgtatattatactttgggtaagggctacaaaggcaaaacacaatataggaagagtatgaaatggcctgggcagaacagagtgaggattaggggacaagtcagagaaagtttccccaaagaaataatataaaacaccacttctgaaacagagaaggtatgcaggtaggtagttaggtaaggggaagagaagatgaggagatctttatcattaactttacccagtaaatgtata

SEQ ID NO: 575940 - DNA, 542 bp, Homo sapiens
tgatatgtccccctatagaagtgccaaggtctytaagctgactcttcacatctaatttcttatctttccaatccatcatttttattgcaaccacctattttcctaaaacactaatgagatcgtatcttttgcctccgttaacaatttttaatggattataaagcatacgtacccacaccccccgtccaaacactttagctttttttttgacaaccacactaatctggttccaatctctttttccgcttttcccgctaaatattaaactatgccagaggtcttcaatctatggcagatgttccaaagttggcctgccatgagctatgaaaagtttttacatttttaaatgtttgaacaaaaaatcaaaagaaaaataatatttcataacattaaaaattatataaaattaaaagttcagtaaccgtaaataagatgttattgaacagagccatgcccattcctttatctgtgagatatatctgcttttttttgttttcttctagatggagtcttgctctgtcacccaggctggagtgcagtgg

SEQ ID NO: 575941 - DNA, 542 bp, Homo sapiens
tgatatgtccccctatagaagtgccaaggtctttaagctgactcttcacatctaatttcttatctttccaatccatcatttttattgcaaccacctattttcctaaaacactaatgagatcgtatcttttgcctccgttaacaatttttaatggattmtaaagcatacgtacccacaccccccgtccaaacactttagctttttttttgacaaccacactaatctggttccaatctctttttccgcttttcccgctaaatattaaactatgccagaggtcttcaatctatggcagatgttccaaagttggcctgccatgagctatgaaaagtttttacatttttaaatgtttgaacaaaaaatcaaaagaaaaataatatttcataacattaaaaattatataaaattaaaagttcagtaaccgtaaataagatgttattgaacagagccatgcccattcctttatctgtgagatatatctgcttttttttgttttcttctagatggagtcttgctctgtcacccaggctggagtgcagtgg

SEQ ID NO: 575942 - DNA, 234 bp, Homo sapiens
tatcttggctcactgcaacctctgtctcccaggttcacgcgattctcctgcctcagtctccggagtagctgggattataggtgcacaccaccatacgccactaatttttttatttttagtagagatggggtttygctatgttggccagactgacctcgaactcctgacctcttgatccaccggcctcagcctcacaaagtgctgggattacaggcctgagccaccgtgcctggc

SEQ ID NO: 575943 - DNA, 569 bp, Homo sapiens
ttgctgggctattttcagcaatcagtcatgtaaaatgctgtcctaaacacaatgttaggaattttttttaattaaattcatacttgacttattatgattcattaatttttaaatactacattgttgagcaaacaagaagtgagctgcagcatacacaatcagcccttatagaagagtatttatttgagaaaattcacagtgataggactcttgcagaggtgttgccccgacactctggggcagcacacagcaatatagcagtatcatatgccaatgcagactcttaagagagagaacctttgggctgggacttttaagctgaatgattagggaaagactagttcttaccctgcgatgatcaggagatgaatgaacattcctcaaagatggaaaaggaactttacatactcttttcagttgcacataagatggtcatatcactttagaaagaaacatgacttggccaggcacagtggctcacgtctgtaatcccaccactttgggacgccgaggcgggyggatcacctgtggtcaggagttcgagaccagcctgactaacatggtgaaac

SEQ ID NO: 575944 - DNA, 624 bp, Homo sapiens
tctctttccgtaacatctatggagcaaaaaatgaactttgtttttactatttaattccaatatttaatttgggatataacatggcatgttaatcttatgtgttattttttaatctgctaagagttgatattttattaatttttaggttattttacctatttattatgtgttagaattttcttagccctatttgatgtaaaatatgatgggatacttgaaaatgtggtgtagagaagaagtcttgctgggatgtcagacaagtacgatagttcatagccagactgcaagtctggctgaggattctgagctatgtacttcccttgctctcaacatgtgggaaagtagcagatttttaactatacattcataatcttttataaatgaagcaggaaaatgcaaggattgggtgggagtcagctgcacgggaagttttctgcattgtttccctacactcactcctgcgaagccttcatgatagatgcgcccatttagggccacsccaaatgttgatgtggattgcaccctacaaaatggcacctggcaagggagtgagaaggggcttacattgagtgtgcattttgtgctcactaagctgtgtgctctggcttagaggaagaaagtttt

SEQ ID NO: 575945 - DNA, 548 bp, Homo sapiens
agaataattgcagatctctctcttgyttcgatcctgagatgagtgttgagtaccaaatggctccaagccaggctgaaacatgacctagacacagatgctggaattttcctagcatgctttaaagaaacgagtatggtggctgtactagtcagttctcacactgctataaagaaatgcccaagactgggtaatttataaaagaagtttaattgactcacagctcaacatgcctggggaggcctcaggaaacttacattcatggcggaaggggaagcaggcatgtcttacaaggtggcaggagagagagagcaagcatgagcgcaagaggaactgtcaaacacctataaaaccatcagatgtggtgagaacatactcatcatgagaacagcatgggggaaactgccccccatgatccaatcatctcctgccaggtccctcccttgacacacagggattatgggaatcacaatttgagatgaggtttgggtggggaaacagagccgaaccatatccctggcttaatgagatgggaatgctggagggaattc

SEQ ID NO: 575946 - DNA, 647 bp, Homo sapiens
actggctttcctcccttatcctacacgcagctctcaggagcctcttacatagtacgggtgcatatctggcagtgacatctttcctgagagctgtcagacccttgagggtatcatctatgtctgatttgctcttccagccccactcagtaagcctaacacactacactgcacatgggagatcttactttttaaagttttgaatgaatgaaagaatgagaatgctctgaattaaccaagcttgatggttaattacataattacatggatcattcttattctcttctctccctcctttcctctcttccatttcccccagggcgtggaaaaacaaggcactaaacgaatgtgctgccaaaggagaaagaagaaaggtaacagggcatttgaatcacagacccttccaggccgatattatattgttagatggagaagaaattttgaatttttccaaagtaccattaatactttttaaaaataaatttcttgcatatcaaaaccacagtcatctatcacttcacaccttaagatggctgtgatgaaaaagtcaaaaatatcaagtgttgtcgaggacttggagaaaagggaatccatatacattgttgataggagtgtaaaytggtatagccattatggaaaacagtattgag

SEQ ID NO: 575947 - DNA, 593 bp, Homo sapiens
gaggttagaactcagcacaccatatggtagctcttctttctcacaatccaccatccagtgagcccatgtattgcacagggtatcaatattttccctgggtcttctctagaaaaggggccggtgactgcttgacacacacaaccaatagccacacagtaagagttgtttctctgaacttaacattagtcacagtttttgctggaatcaagatatgtgattcattataaagtacacagataagtccaggctacaacatacaacagggtcactttgatgaggacccaacccttggttctaaatgccagttattaaaagatctgatgtagattggttaaaactgtgataacttggaaaaactcagaaaatgcagcacaaagcagcatagctytaagtgcaagtttgccagcagacagcagagccagttaccaagagaaaacaagagaagaaagacctctagtggttgtagtcatcacttagacatcttcctcattgcattcattgttgtagtcactctgcagttggtttggacttctttttttctctttctttgagacagagtcttactctgttgcccaggctggattgcagtggca

SEQ ID NO: 575948 - DNA, 427 bp, Homo sapiens
atgattgctctgttgggtttcagacttgtgtggagaatattgaccctttctttgggccaatttatcacttttggaatgggaatgtttacccaatgcctgcactactattgtatcttgggagtaaataacttgttttgattttataggctgatgggtggaagtgcatgagtctcagatggaacttatgactttggatttcatgctggaatgatttaagacttttgagaactattagcaggggatgattgtatttttcaatgtgagaaggatataagatatgaggggccaggggcagaatgatagtgtttggatgtttgtccacttcaaatctcatgttggaatgtaatcctcaatattggaggtggggccaggtaggaggtgtttgggtcatgggggmaaatccctcatgaatggcttggtgctatcc

SEQ ID NO: 575949 - DNA, 432 bp, Homo sapiens
atgtgggatttgggagaggcygggggtggaatgatatggtttggctgtgtccccacccacatctcatcttgaattcccatgtattgtgggaggaacccagtggcaggtaattgaatcatggagcaagtctttcccatgctgttcttgtgacagtgaataagtctcacaagatctgacggtctttaaaagaggaattcccctgcacaagttccctctctttgcctgctatcatctatgtaagacgtgacttgctgtactttgccttctgccatgattgtgaggcttcaccagccctgtggaactgtaagtccagttaaacctcttactttgtaaattgcccagtctctggtatgtctttatcagaagcatgaaaccagactaatacaattgctatgctgactaccgaggtgatgagattattcataccccaaa

SEQ ID NO: 575950 - DNA, 432 bp, Homo sapiens
atgtgggatttgggagaggccgggggtggaatgatatggtttggctgtgtccccacccacatctcatcttgaattcccatgtattgtgggaggaacccagtggcaggtaattgaatcatggagcaagtctttcccatgctgttcttgtgayagtgaataagtctcacaagatctgacggtctttaaaagaggaattcccctgcacaagttccctctctttgcctgctatcatctatgtaagacgtgacttgctgtactttgccttctgccatgattgtgaggcttcaccagccctgtggaactgtaagtccagttaaacctcttactttgtaaattgcccagtctctggtatgtctttatcagaagcatgaaaccagactaatacaattgctatgctgactaccgaggtgatgagattattcataccccaaa

SEQ ID NO: 575951 - DNA, 432 bp, Homo sapiens
atgtgggatttgggagaggccgggggtggaatgatatggtttggctgtgtccccacccacatctcatcttgaattcccatgtattgtgggaggaacccagtggcaggtaattgaatcatggagcaagtctttcccatgctgttcttgtgacagtgaataagtctcacaagatctgacggtctttaaaagaggaattcccctgcacaagttccctctctttgcctgctatcatctatgtaagacgtgacttgctgtactttgccttctgccatgattgtgaggcttcaccagccctgtggaactgtaagtccagttaaacctcttactttgtaaattgcccagtctctggtatgtctttatcagaagcatgaaamcagactaatacaattgctatgctgactaccgaggtgatgagattattcataccccaaa

SEQ ID NO: 575952 - DNA, 563 bp, Homo sapiens
catactacagccattaaaatgaatgaactagatctcaaaatattaaaatgaatgaatctcaaaactgtaatgttggcaaacattagcctaggcctccacagggtcgggatcatcaatatcactgtcttcaacctccacatcttgtccctctggaagatcttcaggggcaataatacgcttggaactgccatcatctcctgtgatgacagtgccttctggaatgcctcctgaagcacctgcctgaagctgttttacagttaacattttttttaagaygtagaaggagtacaatctaaaataacaataaaaatcagagtagagtaagtatataaatcagtaacaaagtctaaattaattagttaatcatttaaaaatttaagcaatttatagaggacacatgcaatataataccatttatacagatgttaaaatcccaacgtgtcatggaaacctacatatacagtgaaagtgaaatacatgcccatgactgacccccaccaactttgtcgggatggttgctcttagaggctgaggaaggaaatgtcaggggtggggcagctgga

SEQ ID NO: 575953 - DNA, 517 bp, Homo sapiens
ccatctctactaaaaatacaaaaatcagctggacrtagtggctggtgcccataatcccagctactcaggaggctgaggcaggagaatcacttgaacctaggaggcagaggttacagtgagctgagactgtgacagtgtactccagcctgggtgacagagcaagactccgtccgtctcaaaaaataaaaagtaacaacaaattattaagatttgttaaatctggtgatgagtacctatgatgatatttattgtacttttcagtatatttgacatattttgtaattaaaaaataacataataatgaagtaatgattcaaaattcagattaaaatatggatgccatgtagtaatggcaaggggatggtggtgtcagggatgatgctgcagggctgagagggtgccccattaatatccccatgtctgcctcctcctcacctccccacctctagccccagtgactcaaatttgtctctgacaaaaccactctgaatggttttgttggcagaattcccaagca

SEQ ID NO: 575954 - DNA, 531 bp, Homo sapiens
agccaaaatctgagttttaaatgaaatttcataacttttaaatgttgacaatcagtccaggagcagtggctcatgcctgtaaccaactccagcactttgggaggctgaggcgagcggatcatctgaggtcaggagtttgagaccagcctggccaacatagcgaaaccccatctctactaaaaatacaaaaattagctaggctactccgaaggctgaggcacaagaatcgcttgaacctgggcggtagaggttgcagtgaaatgaaatcacggcactgcactctagcctgggcgacagagtaagactcagtctcaaaaaaaaaaaaaaaaaaaaaaaaaaaaaaaaaaaaatcagccctccacgaataagtttactgaragtctgaaggaactccccaaacctccatgatttagcaggagtatggtccctgcgatcatggactatgtttttgtgcactaactcctgccgcagctcgataactgatggatgcacaaatgagtggatgcgtgaatgaatgaaagccagcgcaaa

SEQ ID NO: 575955 - DNA, 531 bp, Homo sapiens
agccaaaatctgagttttaaatgaaatttcataacttttaaatgttgacaatcagtccaggagcagtggctcatgcctgtaaccaactccagcactttgggaggctgaggcgagcggatcatctgaggtcaggagtttgagaccagcctggccaacatagcgaaaccccatctctactaaaaatacaaaaattagctaggctactccgaaggctgaggcacaagaatcgcttgaacctgggcggtagaggttgcagtgaaatgaaatcacggcactgcactctagcctgggcgacagagtaagactcagtctcaaaaaaaaaaaaaaaaaaaaaaaaaaaaaaaaaaaaatcagccctccacgaataagtttactgaaagtctgaaggaactccccaaacctccatgatttagcaggagtatggtccctgcgatcatggactatgtttttgtgcactaactcctgccgcagctcgataactgatggatgcacraatgagtggatgcgtgaatgaatgaaagccagcgcaaa

SEQ ID NO: 575956 - DNA, 604 bp, Homo sapiens
tttttgtattttgttttttatttttattttttatttttgagagagtcttgctctgtcacacaggctggaatacaggggtgcaatcagctcactacagccttgatttcctgggctctggcaattctctggcctcagcttcccccgagtacctgggaccacaggtacaagcgaccatgcctggctactttttgtatcattggtaaaaatggggtttcaccattttgctcaggctggtctcaaactcctgagctcatccaatccacctgcctaggcctcccaaagtgctgggattaccctgcccggctgccaaattttattcttaaagaatactacttgaaagtcaaaattactccatgatccatggactgcagaatggatattgtgttagcaaacttgaaaagtttaatatccttgtacatctccatcagagctcttgggcgactatgtgcattgtcaataagcactaaatgttttgaaaatatttytttttctgagcattaggtctcaacagtgagcttaacatagtcagcaaaccatgctgtaaataggtgggctgttgtccaggctttgtcgtttcacttataaagcacaggaagagtagatt

SEQ ID NO: 575957 - DNA, 622 bp, Homo sapiens
tccaataaatgtggtctcatgaccagtactgacctggagctggcttataccagatgtcaaaagccaattattaaatactcagaatttctgttggtagtatgaaatcacccatgatgggagtatttataccttggaaatctgcaaaggaggaaaaacagtgctctagtcctctggtcttaccaccccttttagggagtaccagcccaccagcaccagtttactgacacagattcaacccaggttggtactatacaaaaagcacattttcattcctttctttcaagatgacaaacttttggattcytaaagaattaagaactgttacccagaaaaaatgggttttattcttttggtgagtaacaaaggtctttctggagacatggatgatgctggaaacatcattctcagctaactaacacaggaacagaaaaccaagcaccgcatgttctcacccataagtgggagttgaacaatgagaacacatggaatcagggaggggaacatcacacactggggcctgtggggggtgaggggctaagggagggagagcattaggagaaatacttaatgtaggtgacgggttgatgggtgcagcaaaccaccatggcacatgtatacttat

SEQ ID NO: 575958 - DNA, 626 bp, Homo sapiens
gccaataatttgattcgccaggccattcttaaatgttctatgggattttatagcttccatacaggggtaatagatccacaggtaatggggatggggaaagacaatggatggcaaacaattagaatcttcggtggagctggttcaaggtccagrtgctctctttgtgtcctttgtacaaagctggcggaaatatataatttcttaagtgaataaatgcaaaaaagagatattagcatgaaataatgagataggcaacttggaaattctttctttgtaaacaatcatattgtacttatactttttcagatataaagcacttttgtaacttcagtaaataaaacattaataaaaccccaatgtcttgaccacagttacggaatcagttctgagttcttttttcctaagaacacattttactcttcgtgtagtcccttgtttctttcatatttgggttatgaaaatgtcatcactattttcaagcacaagttattatttcctcctgtgatactgtttgaacactaggtctttgatgtttctgtcagatatacccagcaatcatcatcataactcatactcttgaatttttaatatcactccacacacagaagtgtcaagtacccagttct

SEQ ID NO: 575959 - DNA, 626 bp, Homo sapiens
gccaataatttgattcgccaggccattcttaaatgttctatgggattttatagcttccatacaggggtaatagatccacaggtaatggggatggggaaagacaatggatggcaaacaattagaatcttcggtggagctggttcaaggtccagatgctctctttgtgtcctttgtacaaagctggcggaaatatataatttcttaagtgaataaatgcaaaaaagagatattagcatgaaataatgagataggcaacttggaaattctttctttgtaaacaatcatattgtacttatactttttcagatataaagcacttttgtaacttcagtaaataaaacattaataaaaccccaatgtcttgaccacagttacggaatcagttctgagttcttttttcctaagaacacattttactcttcgtgtagtcccttgtttctttcatatttgggttatgaaaatgtcatcactattttcaagcacaagttattatttcctcctgtgatactgtttgaacrctaggtctttgatgtttctgtcagatatacccagcaatcatcatcataactcatactcttgaatttttaatatcactccacacacagaagtgtcaagtacccagttct

SEQ ID NO: 575960 - DNA, 580 bp, Homo sapiens
tgctgagacacactccatatttctgaccataaatctggcctctgctcagctagcatatttgctccagctttgttgtggtagttttactgcattggttgcctttaaaaaaaaattatagttggcaataagcattgagaaaggtttaagggtagaaagaggttttctttttttccagtctatatgagctgaatctttaatttcttccttaaataaaataataaaaggtagttttcttaacaactttgcccaacatggatctctgtaggttccacttaaacagaatatgagagcaacatgagcctgtggtcttttttacagaggtttacaaaagctctgctgagttcgattaattgcctggagtttcacaggggtccgtgtcagttacaagagggttttaatgtggaaaagttaagatgataggcatgtgaggaggagggagaggagaggcttgagtgagaagaaggagctagggaggaaaataaaggtgtttgagaagcagtgggaaaaaagccttcagtggataatgagaaagtgggttggaagactyagcatattcctctagattatggtacaggctaca

SEQ ID NO: 575961 - DNA, 444 bp, Homo sapiens
ggtatacacgccccagtgtaatcccttccccatggctggaggccmagctgcaaatctgatggccttcctgctagtgatgagggtgcaaaggtgaagaaccttgcagatgtaatttgcagatgtaatgaagctccttaatgagttgcctttgagatgatcaaaagggaaatcccctgagcctttaaaatagccaggatcttcctaaagagagagattccaaacaggagagggacgcccctgctggtcttggggaagtaagcgtcgtgtcccgaggggccctgcctgggtggaaccagggagggaggtgtgtggcctcttggtgtggcagggagcaggtgtggcctctaggtgctgagaggagcctctggccatcgcctggcaagaaagctgggacttgctcattccattgcaaggaactaaatttggccaagaaccacaggaact

SEQ ID NO: 575962 - DNA, 444 bp, Homo sapiens
ggtatacacgccccagtgtaatcccttccccatggctggaggccargctgcaaatctgatggccttcctgctagtgatgagggtgcaaaggtgaagaaccttgcagatgtaatttgcagatgtaatgaagctccttaatgagttgcctttgagatgatcaaaagggaaatcccctgagcctttaaaatagccaggatcttcctaaagagagagattccaaacaggagagggacgcccctgctggtcttggggaagtaagcgtcgtgtcccgaggggccctgcctgggtggaaccagggagggaggtgtgtggcctcttggtgtggcagggagcaggtgtggcctctaggtgctgagaggagcctctggccatcgcctggcaagaaagctgggacttgctcattccattgcaaggaactaaatttggccaagaaccacaggaact

SEQ ID NO: 575963 - DNA, 372 bp, Homo sapiens
ctccagacccaggatggtagatccactgacagcttacaygatgcacctggaaaaaccacacacattcaatgccagcccatgaaagcagccaggagaagggctgtatcctgcaaagcaacagggagaaagctgcccaaggccatgcgagcacacctcttgcatcagtgtgacctggatgtgagacatggagtcaaaggaggtcattttagaacttgaaagctcataggcaggagaaacttgcctgtctcaaatgagattttggacttggacttttgaattaatgctggaattaactaagactttggggaactgttgggaaggcatgattgttttgaaattttaggacatgaaatttgggaggggccagggatg

SEQ ID NO: 575964 - DNA, 554 bp, Homo sapiens
ggtgacaggcaatagagtgtgtgcaggggaactgcctttataaaaccatcagatctcatgagatttattcactgtcatgataacagcatgggaaaaacctgcccccatgattcaattacctctcacagggtccctcccatgacacttggggattatgggaactacgattcaagatgagattttagtgagggtacagccaaactatttcaccccctaaagtgtgaataggatatattaattctcatataaatttgttttagtcacccagacaagcattcatgttttcctcattgaaagtgggtatgttttktgtaattcccatttttataaatgatataattttgtgtctttctacatattttagttaagttgcagatttttttgtgacaaatatcggcaaatatagagcaaatatatacaggcatacttcagaggtattgtgagttcaattttaacccattgcaataaagtgaatatagcaataaaaggaggaaaatgattttttttggtttcacaatgtatataaaagttacatttacactatactatagtct

SEQ ID NO: 575965 - DNA, 494 bp, Homo sapiens
tgaaaaacaagggagttctcagagtgatgctctatatctttgtcttcattgtctatgttcacacatatacaattagaggatctttaccctcttacagaatatctgtagcagacaaaataacaaaaatgaaattatcttttgaaaggctacartgtagccaatgtatcactatatgaggcaatctccatgtattatgttaatacccacaacaaagagaggttattgcctctcatccacagacagatgtagattgaggtttaagattacaggactggccagtaactggaatgcaatttaccacaggtttattagatgccaatttcaagtagcattttgaattgtgggattatatgactcctttctttgctcttctctcttctttcttttttctttctttcttctcttttcctttcttcctttctttggctactatactacttctttctttctctcttccttccttccttctttccctccttccttctttctttcct

SEQ ID NO: 575966 - DNA, 613 bp, Homo sapiens
gctcacacctatgatctcagcactttgggagaggtagaaggatagcttgaggccaagagttcaagatcaacctgttcaacagagccagatcccatctctaccaaaaaaaaagaaaaaaaagccaggtgcggtagtgtgtgcctatagtcccagctacccaagaggctaaggcagaaggatcacttgagcccaagastttgtgaccagcctgggcaacatgagatcctattatgcgtgcacatgggcacacataggtgcgagagagagagagagagagagagaaagagggaacagaaagagagagggagggaaggaaagagggagggaaggagagaggggagggaaggaaaggaaggaagaaaagaggagctagggcctgccacagtgattcacgcctataatcccagcactttgggaggtcgagcgggtggattgcctgagctcaggagttcaagaccaccctgggcaacatggtgaaaccacatctctattaaaatacaaaaacttagctgggtgtggtggcgcacacctgtagtcccagctacttgggaggctgaggcatgagaatcacttgaaccccagaggtggaggtagcagagagccgagatcacgc

SEQ ID NO: 575967 - DNA, 613 bp, Homo sapiens
gctcacacctatgatctcagcactttgggagaggtagaaggatagcttgaggccaagagttcaagatcaacctgttcaacagagccagatcccatctctaccaaaaaaaaagaaaaaaaagccaggtgcggtagtgtgtgcctatagtcccagctacccaagaggctaaggcagaaggatcacttgagcccaagagtttgtgaccagcctgggcaacatgagatcctattatgcgtgcacatgggcacacataggtgcgagagagagagagagagagagagaaagagggaacagaaagagagagggagggaaggaaagagggagggaaggagagaggggagggaaggaaaggaaggaagaaaagaggagctagggcctgccacagtgattcacgcctataatcccagcactttgggaggtcgagcgggtggattgcctgagctcaggagttcaagaccaccctgggcaacatggtgaaaccacatctctattaaaatacaaaaacttagctgggtgtggtggcrcacacctgtagtcccagctacttgggaggctgaggcatgagaatcacttgaaccccagaggtggaggtagcagagagccgagatcacgc

SEQ ID NO: 575968 - DNA, 582 bp, Homo sapiens
gtcctgtgaggtgtcccttgtcacaygtgccactccccacactgtttctgtcctgctctgagacacagtgactgctctgaagaggacaagcttttctggacccagagcatacagaagaatgaccatccctgggttgttactacagactgaattttgtctctctaaaactgaaaccccaacccccaaagcaatgacatttggaaatgaggcctttgggagataactaggtttaaataagtaataagggtggggtcctcatgatgggattagtgcctttaggaggagagatatcagagctttctctctctcttgctctctttctctctctgccatgtaaggacacagaaggcggccatctataagccagaaagtgagccctcatcagaaaccagccatgcctgcaccctgatctcagatttcagcctccagaacagtgagaaaatacatttctattgtttgagtcattcagtctgtggtattttgttatgggagccagggcaggctaatacagttgttttttccaattccttctttttactttgaaggattaaagagttctttagggatagaagaaaataaatg

SEQ ID NO: 575969 - DNA, 170 bp, Homo sapiens
cgtgtataagtcaggggaaacgattgtggtcacctgtgctgtttttaacaatgaggtggttgaccttcaatggacttaccctggagaagtggtaggtaccctcaaaacgtgcaatggcttggagcagagcaacagggctcaraaaacctgcatttgagctcggtctgtca

SEQ ID NO: 575970 - DNA, 170 bp, Homo sapiens
cgtgtataagtcaggggaaacgattgtggtcacctgtgctgtttttaacaatgaggtggttgaccttcaatggacttaccctggagaagtggtaggtaccctcaaaacgtgcaatggcttggagcagagcaacagggctcaaaaracctgcatttgagctcggtctgtca

SEQ ID NO: 575971 - DNA, 581 bp, Homo sapiens
acggtgggagagtgcaggtctgggagctcacacagctttggcactgcctgttttttttttcgttttgtttttgtttaatgctacaataataaatatttcacaaattaggaatggtgaagggcatgacaaaaaaagaaaacgttttgatttcttggtatgtcagggttcaggggtaaatttttctttccataaaatgtctggtcatgttgcttgttataattttttttttttttttggtaacaaataatttccttttaagttggaggaaaaaagagaatgtcttacttttgcctatgtctctaaatggtgaccatattttcaaagctccaaaccaggacacagagcctgatacacagccttacaggacatttgaaatggggggctgccaggacagagtatttggagtggaggtatctggcctcctagctgctgtgcccaatgccttargagtaacatcatttctaaattacagatgcagtgaggccaatttggatatccagtggggaaacctggggaccatatatgttctaaattgatatctgcctatctatctaactatctatctatctatctatctatct

SEQ ID NO: 575972 - DNA, 679 bp, Homo sapiens
aggcaggcacatttacatctatgtgccaggtgagttggctgggtctccaggaccaagcttcttctcttcctgtctctcctgttaaatgtactaaggttttaaacatatatataaataattaatatttattgcgggaagtttgaaaaatgtaagcgaacacacacaaaaatcatttgtaatattatcaagaaatattcattgttagcatttcagagctgtattaagtttggaaagtcatctttgttatgacatgtcctgtattgatactgtataaacaatctgaaatatactcatctctattcagttcattcaagttgcacacatactcacagtgtgtccagcactgggctaagtgttgagtacacaaaaattaataggtaagccctgtcttggagttgctgatagttcattataatatcttccaaataaacactcgatttttcagattcactatcaacatacatttattcttggagagttggaaggaattttctttttccttttaaaaaagttacatatatatatatatatatatatatatatatatatwttttttttttttggtaacagggtctcactctgttgcccaggctggaatgcagtggcatgatcatcatagcttactgcaatctcaactcccttggttcaagcgattctcccacttcagcctccccagtag

SEQ ID NO: 575973 - DNA, 608 bp, Homo sapiens
gatatgtgatttattctttcaacagccacggccagaatccagtgaaaaaacaagctctcatgtctgaactgaagataatgactcacctggggccacatttgaacattgtaaacttgctgggagcctgcaccaagtcaggtgggctcactgacctggagtgaggattttcactggacacatgtggttgtgaaaactgttcaatcaggcttaaatcctccactctccatccccacacatggcagggaatagaagtcccttgaatggagctgactggtcccttgaattgatggaagctcattggtttttgagcaaaatctgttgccagtccagtcatagccattcatggctctttattaaaaaaaaaaaaaaaaaaaaaaaaaaaaascttttttggtatcttatttttttctgtgccatatggtctgcaggacaattcatggcttttctgttcttcattttcatacccatctcctaacggcttttgtccccataggccccatttacatcatcacagagtattgcttctatggagatttggtcaactatttgcataagaatagggatagcttcctgagccaccacccagagaagccaaagaaagagctgga

SEQ ID NO: 575974 - DNA, 560 bp, Homo sapiens
gatggaagctcattggtttttgagcaaaatctgttgccagtccagtcatagccattcatggctctttattaaaaaaaaaaaaaaaaaaaaaaaaaaaaaccttttttggtatcttatttttttctgygccatatggtctgcaggacaattcatggcttttctgttcttcattttcatacccatctcctaacggcttttgtccccataggccccatttacatcatcacagagtattgcttctatggagatttggtcaactatttgcataagaatagggatagcttcctgagccaccacccagagaagccaaagaaagagctggatatctttggattgaaccctgctgatgaaagcacacggaggtgggtgcaaagagagatgttgctgtctatcattatcttacaggcatcacaaatggaaagacccatgtcctgatagatatcatgtctgcagattcagtgcccaaggtagcaagacttagagtcaaaccaccctgtccagtctttccatggtcatgcagagagatgcatgatgtctaaaggtgttttggactggggtgt

SEQ ID NO: 575975 - DNA, 631 bp, Homo sapiens
tgcatcttacatttataacgtatcttaatttggactggccacatttcaagtgcttggtaaccttgtggggctgtggctacatgttgaataccaggtctggactctaaaataaacctaaatagaaattggaactagaggatcatggcggatgggaggcaggactagattgcacctctggagagagcagcgtgtggaggcttgcattgtgaattttagctccggattgactgcaagaacaaaccagcaatcccgagaggacccacagaccctctgaaagaggtggactactcctgcaggaccggggagacactccaaatactgtgagtgccccaactgcagaagtgggaaaggtagaccctcttctcccgaaagcacacccscattggagaagctgaaagtttgtttgcgggagaagtttccgactttacctggaactgagtcaagttagacagctgagcaaaatacaggggtagaggaagcagcagaaaagccctgggagctcgctgggtccccaagcagccaattcctgactggcaccacggggatccatagggagggcggccagaggggcaggtggtaaaactccacagggagaaagaattctctagctgaactttgtaacaattggaac

SEQ ID NO: 575976 - DNA, 553 bp, Homo sapiens
ctcttcccagcctctggcaaccaccattctaccttctgtctatgaagttgaatattctaggcccctcatttaaatggaatcatgcagtatttgtttttgtgacaggcttatttcacctagcataatgtactcaaggtgcatccatgttatagcatatgtctatatgctatatagacattttcttccttttggaagctgaataatattccactgtatgtatgtatatgtcagattttgtttttccattcatccctcaatgaatgcttagattatttcccttttggctattgtgtctaatgctgctatgaacaygggtgtacagatatctctttgagaccctgctttcaattattttggtattccacccagaagtggaaatgctggatcatagggtaattctgtttctaatttcttgaggaatcaccgtattgttttccatactagatgtacggttttatattcccaccaacaggaatataagcattccaaacatgaattttgtgggaacatatttcaaaccatagcagtcaccaaaagctcaagcaacaaaaca

SEQ ID NO: 575977 - DNA, 553 bp, Homo sapiens
ctcttcccagcctctggcaaccaccattctaccttctgtctatgaagttgaatattctaggcccctcatttaaatggaatcatgcagtatttgtttttgtgacaggcttatttcacctagcataatgtactcaaggtgcatccatgttatagcatatgtctatatgctatatagacattttcttccttttggaagctgaataatattccactgtatgtatgtatatgtcagattttgtttttccattcatccctcaatgaatgcttagattatttcccttttggctattgtgtctaatgctgctatgaacacgggtgtacagatatctctttgagaccctgctttcaattattttggtattccacccagaagtggaaatgctggatcatagggtaattctgtttctaatttcttgaggaatcaccrtattgttttccatactagatgtacggttttatattcccaccaacaggaatataagcattccaaacatgaattttgtgggaacatatttcaaaccatagcagtcaccaaaagctcaagcaacaaaaca

SEQ ID NO: 575978 - DNA, 385 bp, Homo sapiens
tcattattagggaaatgcaaatcaaaacacaatgatacaccacgtcaccccaaygagataactaaattcaaaagacaaacaataaggagtgtcagcaagaacaggaaactggataataaccttcattcaatgctgagggaatgtaaaaccttttctgttttggaaaacattttggtagtttctcaaaaattaaaacagagttatcatatgatccagtaattacactccaaggtatatacttaaaagaaatgaaaccacacaaaaacgtatacctgaatgttcacagcagcattattcatcatagccaaagtggaaacaagaccactcaagccagccctgcctcggaacctgacaaagttaaatggaagcctacacagctgagccg

SEQ ID NO: 575979 - DNA, 385 bp, Homo sapiens
tcattattagggaaatgcaaatcaaaacacaatgatacaccacgtcaccccaatgagataactaaattcaaaagacaaacaataaggagtgtcagcaaraacaggaaactggataataaccttcattcaatgctgagggaatgtaaaaccttttctgttttggaaaacattttggtagtttctcaaaaattaaaacagagttatcatatgatccagtaattacactccaaggtatatacttaaaagaaatgaaaccacacaaaaacgtatacctgaatgttcacagcagcattattcatcatagccaaagtggaaacaagaccactcaagccagccctgcctcggaacctgacaaagttaaatggaagcctacacagctgagccg

SEQ ID NO: 575980 - DNA, 529 bp, Homo sapiens
tcgatccctgacctactcggttatgttatctatagattacagacattgtatagaaaagcactgtgaaaatccctgtcctgttttgttctgatctaattacctgtgcatgcagcccccagtcacgtaccctctgcttcctyaatccatcaagaccctctcacgcggacccccttagagttgtaagcccttaagagggacaggaattgctcactcggagagcttggtttttggagacgtgagtctgcggatgctcccagctgaataaagcccttccttctacaactcggtgtctgaggggttctgtctgcagctcctcctgctgcagaaggagagcaagggagagagggatggagaaatagaaccagagggagagagagagacagcgatagagagagagagagagagacagaaaaggggggaggagagagagaggggggaagagagagcaccacagtagagcgcgaggtggagggggaagtagagaaagggagagggtgaggcagttgtggagcgacaccgacagagcctt

SEQ ID NO: 575981 - DNA, 586 bp, Homo sapiens
cattacacttggttctctttctctgtaagaatatctaatgcaacaattcaagtgtttctttccctcctggtaatgcggggaactccttttggctgagaccaagacttaaaaccttgttctttcaacrttaatgaagatctatttagaaagcctccatttttgcagaaaagatatataaacaccaatgaaaatcaatatgaaattatatgacatacaattatattgtggaaagactgaataaataagtgaactaagctctaagaaaaaaagatgatgatataaaatgatatagaagtaaaaacctgggctggtatagcataattaatgtatcagtaaagtatgtacattgtagaagtggcaggaagacagcatagagagtgagacctgaccaaaagctttaaggaaagttctatacccttaaacgagattaaagtggactcaggaaaacatgggccacatgaggggaaggacacatgttccagatgagccaaagctcagagcatctctaccttctccaggaggaaaggggaggcaaagcagcaggcagaagacagcacggccaggtcagcacagggcacccaggcca

SEQ ID NO: 575982 - DNA, 586 bp, Homo sapiens
cattacacttggttctctttctctgtaagaatatctaatgcaacaattcaagtgtttctttccctcctggtaatgcggggaactccttttggctgagaccaagacttaaaaccttgttctttcaacattaatgaagatctatttagaaagcctccatttttgcagaaaagatatataaacaccaatgaaaatcaatatgaaattatatgacatacaattatattgtggaaagactgaataaataagtgaactaagctctaagaaaaaaagatgatgatataaaatgatatagaagtaaaaacctgggctrgtatagcataattaatgtatcagtaaagtatgtacattgtagaagtggcaggaagacagcatagagagtgagacctgaccaaaagctttaaggaaagttctatacccttaaacgagattaaagtggactcaggaaaacatgggccacatgaggggaaggacacatgttccagatgagccaaagctcagagcatctctaccttctccaggaggaaaggggaggcaaagcagcaggcagaagacagcacggccaggtcagcacagggcacccaggcca

SEQ ID NO: 575983 - DNA, 586 bp, Homo sapiens
cattacacttggttctctttctctgtaagaatatctaatgcaacaattcaagtgtttctttccctcctggtaatgcggggaactccttttggctgagaccaagacttaaaaccttgttctttcaacattaatgaagatctatttagaaagcctccatttttgcagaaaagatatataaacaccaatgaaaatcaatatgaaattatatgacatacaattatattgtggaaagactgaataaataagtgaactaagctctaagaaaaaaagatgatgatataaaatgatatagaagtaaaaacctgggctggtatagcataattaatgtatcagtaaagtatgtacattgtagaagtggcaggaagacagcatagagagtgagacctgaccaaaagctttaaggaaagttctatacccttaaacgagattaaagtggactcaggaaaacatgggccamatgaggggaaggacacatgttccagatgagccaaagctcagagcatctctaccttctccaggaggaaaggggaggcaaagcagcaggcagaagacagcacggccaggtcagcacagggcacccaggcca

SEQ ID NO: 575984 - DNA, 371 bp, Homo sapiens
ttttattccttgcttaaagcagtgactagataaaggccactagaatagtctccaatgtttctttagaagcgtgtgcctgagaacatcttccataaacactcccttgtctctgcccaaaatcaccttaggtaggaaaatcaaaactcagcaagctgagggatccaaggggatcactgagctctgagtcttatgagagaagagagagaggtctaagactttttgtrtataaatttatgggttccaagtgtaattttgctgtaagcatggatggcatagtggtgaagtcagggcttttaggtatccatcaccagaataatgcacattgtacccattaagtaatttctcactgttcaccccttccatcccctcac

SEQ ID NO: 575985 - DNA, 371 bp, Homo sapiens
ttttattccttgcttaaagcagtgactagataaaggccactagaatagtctccaatgtttctttagaagcgtgtgcctgagaacatcttccataaacactcccttgtctctgcccaaaatcaccttaggtaggaaaatcaaaactcagcaagctgagggatccaaggggatcactgagctctgagtcttatgagagaagagagagaggtctaagactttttgtgwataaatttatgggttccaagtgtaattttgctgtaagcatggatggcatagtggtgaagtcagggcttttaggtatccatcaccagaataatgcacattgtacccattaagtaatttctcactgttcaccccttccatcccctcac

SEQ ID NO: 575986 - DNA, 371 bp, Homo sapiens
ttttattccttgcttaaagcagtgactagataaaggccactagaatagtctccaatgtttctttagaagcgtgtgcctgagaacatcttccataaacactcccttgtctctgcccaaaatcaccttaggtaggaaaatcaaaactcagcaagctgagggatccaaggggatcactgagctctgagtcttatgagagaagagagagaggtctaagactttttgtgtataaatttatgggttccaagtgtaattttgctgtaagcatggatggcatagtggtgaagtcagggcytttaggtatccatcaccagaataatgcacattgtacccattaagtaatttctcactgttcaccccttccatcccctcac

SEQ ID NO: 575987 - DNA, 371 bp, Homo sapiens
ttttattccttgcttaaagcagtgactagataaaggccactagaatagtctccaatgtttctttagaagcgtgtgcctgagaacatcttccataaacactcccttgtctctgcccaaaatcaccttaggtaggaaaatcaaaactcagcaagctgagggatccaaggggatcactgagctctgagtcttatgagagaagagagagaggtctaagactttttgtgtataaatttatgggttccaagtgtaattttgctgtaagcatggatggcatagtggtgaagtcagggcttttaggtatccatcaccagaataatgcacattgtacccattaagtaatttctcackgttcaccccttccatcccctcac

SEQ ID NO: 575988 - DNA, 412 bp, Homo sapiens
catcccctcaccctgctgagtctccattatcattccactctctacgtcaatatctacacatcttttagcacccgcttatgagtgatacaatatgatgtttactctgtgtctggcttgcttcacttacaacaatggcctccagttccatccatgtgtctgcaaaagttatrattctattgttttttatgcctgaatggtatttcattgtgtatattttctacattttctttctccaatcatttgttgatgggtatttagtttcattttatgtctgtgctactgtgaatagtgttgcaacaaatacacaagtacagttatctttctgatacattgatttcttttcctttgcataaatactcagtggtgggattgctgaatcagacagagccaatagatgatcagtaatggtggc

SEQ ID NO: 575989 - DNA, 412 bp, Homo sapiens
catcccctcaccctgctgagtctccattatcattccactctctacgtcaatatctacacatcttttagcacccgcttatgagtgatacaatatgatgtttactctgtgtctggcttgcttcacttacaacaatggcctccagttccatccatgtgtctgcaaaagttataattctattgttttttatgcctgaatrgtatttcattgtgtatattttctacattttctttctccaatcatttgttgatgggtatttagtttcattttatgtctgtgctactgtgaatagtgttgcaacaaatacacaagtacagttatctttctgatacattgatttcttttcctttgcataaatactcagtggtgggattgctgaatcagacagagccaatagatgatcagtaatggtggc

SEQ ID NO: 575990 - DNA, 412 bp, Homo sapiens
catcccctcaccctgctgagtctccattatcattccactctctacgtcaatatctacacatcttttagcacccgcttatgagtgatacaatatgatgtttactctgtgtctggcttgcttcacttacaacaatggcctccagttccatccatgtgtctgcaaaagttataattctattgttttttatgcctgaatggtatttcattgtgtatattttctacattttctttctccaatcatttgttgatgggyatttagtttcattttatgtctgtgctactgtgaatagtgttgcaacaaatacacaagtacagttatctttctgatacattgatttcttttcctttgcataaatactcagtggtgggattgctgaatcagacagagccaatagatgatcagtaatggtggc

SEQ ID NO: 575991 - DNA, 412 bp, Homo sapiens
catcccctcaccctgctgagtctccattatcattccactctctacgtcaatatctacacatcttttagcacccgcttatgagtgatacaatatgatgtttactctgtgtctggcttgcttcacttacaacaatggcctccagttccatccatgtgtctgcaaaagttataattctattgttttttatgcctgaatggtatttcattgtgtatattttctacattttctttctccaatcatttgttgatgggtatttagtttsattttatgtctgtgctactgtgaatagtgttgcaacaaatacacaagtacagttatctttctgatacattgatttcttttcctttgcataaatactcagtggtgggattgctgaatcagacagagccaatagatgatcagtaatggtggc

SEQ ID NO: 575992 - DNA, 563 bp, Homo sapiens
caggttccaagttttaaggtgattcttcagtaaaaaaaagtattacagttcacaaataatctacttccctttttacaaatgggatcaattttaatcttatctcctaataacattactttcatttactctgatctaaatatactgtcctaagagagcaataagaaagagagttgaagctggagtttgaagaattgtacatggtcctgtgataccctaccttgttttaacctgagtgactctctcctagcggagagagagccggacagactccattttagtttcttcacgtgcagccccctttaccttccacccttaattgcataactagtrtaaactgactcaaagcaggtccaggaatgcacttagtgataagatattgaggcaagctgcaccagctgctcctgggtacgcactcggtgaatgtcacgcaaaacccctgcatttctctctttgtgatagtttaagcccctgcacctggaactgtttatttgttttgtaactgctattgtaaccaattaatattttaactatttgccagctctgcttctgtaaaacttgtttca

SEQ ID NO: 575993 - DNA, 563 bp, Homo sapiens
caggttccaagttttaaggtgattcttcagtaaaaaaaagtattacagttcacaaataatctacttccctttttacaaatgggatcaattttaatcttatctcctaataacattactttcatttactctgatctaaatatactgtcctaagagagcaataagaaagagagttgaagctggagtttgaagaattgtacatggtcctgtgataccctaccttgttttaacctgagtgactctctcctagcggagagagagccggacagactccattttagtttcttcacgtgcagccccctttaccttccacccttaattgcataactagtgtaaactgactcaaagcaggtccaggaatgcacttastgataagatattgaggcaagctgcaccagctgctcctgggtacgcactcggtgaatgtcacgcaaaacccctgcatttctctctttgtgatagtttaagcccctgcacctggaactgtttatttgttttgtaactgctattgtaaccaattaatattttaactatttgccagctctgcttctgtaaaacttgtttca

SEQ ID NO: 575994 - DNA, 485 bp, Homo sapiens
tgtggcagcaggtcctagctctctcgaccaggyccactgacaaagccactttgctgagtggccaatttgctgatgactattttgttaaatttgtttctgctatttaaggttgacatattttcttgtgtcatagtctcagcaaaagtgaagggatggctggtctatctctgacctggctttctgctttgacagatggaagctaaaagaaaaaaggaaaaactgatggtgcaaaagataaacatatttatatgaatttattcgtgaataaaatgatttatttttaaaatatattcttgatatgatttggctgtgtccccactcatcttaacttgtggttcccataatccccatgtgttgtgggaaggacccagtgggaggtaattgaatcatgggggcggttacttccatgctgctgttctcataatggtgagtgagttctcacgagaactgatggttttataagggccttttctccgtttgctcag

SEQ ID NO: 575995 - DNA, 440 bp, Homo sapiens
ggttaaggataaagaaatgattctaaaagcatcgagagaagagaaacaaataacattcagcggaactccaatacatctgacagcagacttttcaggggaaaatttacaggctgtgagattggcatgacatattaaaaaactgaaggaaaaaaagacttttactttagaataatgtatctggcaaaaacgtcctttaaacttgacggaaaaataagaactttttccaacaaacaaaaactgagggatttcattaacaccagacctgtcctacaagaaatgcttaagggatatcttaatctaaaagaaaacaagttagtgagcaataagaaatcatctgaaggtacasaactcactagcaatagcacatggaaaaacactgaatattataatatggtaattatggggtgcaaaaatctcaaatagaaagagtaaacaataaa

SEQ ID NO: 575996 - DNA, 568 bp, Homo sapiens
aaataaatctccaagaagataccataattaaaatatgcacatgaatcagcaactattccaaacacataacacaaataatgacagaattaaaaggagaaataggctgagtacagtggctcacgcctgcttgtaatccctgcatcttggcgggggcagaggcaggaggatggcttgagcccaggatttgagactaacctgggcaagatagcaacacttcgtctgygtaagaaacaaaattataaataaaaataaagggaggaatagagaccaccaccaaaatgataggagactttaataatggagaggacaacctgggagaccaaatgaagacagaggattgagcaaggagtgattccaccaaatccaacagacttttagaaacggtcttctcaacaacagaatgcgcatgattctggtgtgcacatggaacattcttgagactatatcacaaatcggaccacaaagaaatcaattcaagaaaattaaaatcatacgaagtatcatttacaactaaaatggaatggaactagaagtgaataccagaagaaaaatttaaaaatttgcaaat

SEQ ID NO: 575997 - DNA, 602 bp, Homo sapiens
gaattttatacccattgaacagctaccccmatttcccctccttccagaccctggcaaccagtattctactctatttctaggagtttaactattttagatatcttatgtaagtggaatcaggcagtattaaaacatactttcaattagtaatgactataattcggataatttaaataagagaaagcaaacatcactactactagcttttgggggaaaatattacaaatagggatattgtgataaaagtgtacaatattttttatatttgtgcacttagatccgtgttcaaactttgccacctatacatgtatagcacatttgaatatgtgctacagtatgccatttataaagactgaaaataacattttataaaatattattatttatttggcaacctcatgagctttggcttcaaaaatacctgatttacaaagcataatcctagtgctggagaacagatcagtggctgccaaaggttagggttggttggaagatgtgattagtgagggataacatgaaaacatgtactttctttgtggtgatagagcagttctgcatccagattatggtgatggttacataaatccgcacttcatagatct

SEQ ID NO: 575998 - DNA, 602 bp, Homo sapiens
gaattttatacccattgaacagctaccccaatttcccctccttcmagaccctggcaaccagtattctactctatttctaggagtttaactattttagatatcttatgtaagtggaatcaggcagtattaaaacatactttcaattagtaatgactataattcggataatttaaataagagaaagcaaacatcactactactagcttttgggggaaaatattacaaatagggatattgtgataaaagtgtacaatattttttatatttgtgcacttagatccgtgttcaaactttgccacctatacatgtatagcacatttgaatatgtgctacagtatgccatttataaagactgaaaataacattttataaaatattattatttatttggcaacctcatgagctttggcttcaaaaatacctgatttacaaagcataatcctagtgctggagaacagatcagtggctgccaaaggttagggttggttggaagatgtgattagtgagggataacatgaaaacatgtactttctttgtggtgatagagcagttctgcatccagattatggtgatggttacataaatccgcacttcatagatct

SEQ ID NO: 575999 - DNA, 609 bp, Homo sapiens
agatctctaaaacttattcatctgttataactgaattttatacccattgaacagctaccccaatttcccctccttccagaccctggcaaccartattctactctatttctaggagtttaactattttagatatcttatgtaagtggaatcaggcagtattaaaacatactttcaattagtaatgactataattcggataatttaaataagagaaagcaaacatcactactactagcttttgggggaaaatattacaaatagggatattgtgataaaagtgtacaatattttttatatttgtgcacttagatccgtgttcaaactttgccacctatacatgtatagcacatttgaatatgtgctacagtatgccatttataaagactgaaaataacattttataaaatattattatttatttggcaacctcatgagctttggcttcaaaaatacctgatttacaaagcataatcctagtgctggagaacagatcagtggctgccaaaggttagggttggttggaagatgtgattagtgagggataacatgaaaacatgtactttctttgtggtgatagagcagttctgcatccagattatggtgatggtt

SEQ ID NO: 576000 - DNA, 623 bp, Homo sapiens
gaatgaccatgctattttcaggcaactttccccaatgattatatctaacttaacctagtacattgccaaaatcaggaaattgacattgtttccataccattaacttaggttcagaccctattcatatttctaaggattttacatgtacagatgtgtttgaatgtatgtgtgatgtgtgtgtatagatctatgaagtgtggatttatgtaaccattaccattatctggatgcagaactgctctatcaccacaaacaaagtacacgttttcacgttatccctcactaatcacatcttccagccaaccctaacccttggcagctactgttctgttctccagcactgggattatgctatgtaattcaggtatttttgaaaccaagcttatgaggttgctaaataaataataatgtttataaactattattttcagcctttataaatggcatactgtagcacatattccaatgtgctatrcatgtataggtgagccaaagtttgaacatggatctaagtgcacaaacataaaaaatattgtatgcttttatcataatatctctatttgtaatctttttccccaaatactagtagtagtgatgtttgctttctcttatttaaactatca

SEQ ID NO: 576001 - DNA, 546 bp, Homo sapiens
tcatatatatgtgtgtgtatatatttatatatatgtcagtcatatatatgtgtgtatatatttatatatatcacatacacacatatatagatggagttaggtctatgatctctgtatatatttatatacacacatgtatttttaaactattacatgaagcaaatagtacagttgatttcatataacaagagttattggatttatatgggcaaaagttaatgcatakgggcaaataaattgatgaacttacagactcatttatttgacatatatttattgtgtggtctctattgaatgctgggtatcttccaggagcctaaaattcagcagtgaatgtaacaggctcaaatccttgtactcaagtagctaatattctaatcgagggagaagacaataaacaaagttaataagcaaaatattcaacatactagttgataggaagctctgtggtgaaaaataaagtaagaggaaaagaatgagaggaagctctaaaagcaactgaagatttacatgaagaagctgcccaggcgttggcccagagtgaga

SEQ ID NO: 576002 - DNA, 546 bp, Homo sapiens
tcatatatatgtgtgtgtatatatttatatatatgtcagtcatatatatgtgtgtatatatttatatatatcacatacacacatatatagatggagttaggtctatgatctctgtatatatttatatacacacatgtatttttaaactattacatgaagcaaatagtacagttgatttcatataacaagagttattggatttatatgggcaaaagttaatgcataggggcaaataaattgatgaacttacagactcatttatttgacatatatttattgtgtggtctctattgaatgctgggtatcttccaggagyctaaaattcagcagtgaatgtaacaggctcaaatccttgtactcaagtagctaatattctaatcgagggagaagacaataaacaaagttaataagcaaaatattcaacatactagttgataggaagctctgtggtgaaaaataaagtaagaggaaaagaatgagaggaagctctaaaagcaactgaagatttacatgaagaagctgcccaggcgttggcccagagtgaga

SEQ ID NO: 576003 - DNA, 554 bp, Homo sapiens
ttcagaccatggaacctctgatccaagcagcccagctcctgcaattaaagaagaaaacccaggaggatgcagaggccatctgctccctgtgtgcctctctcagcacccagcagattgtcaaaattttaaacctttagcctcccctgaatgaatttgaagaacaggtaacagtgrcctttatacaaatgatccaggcacaactacaagagcagaatggccctcagcaactgctattagatgccaagcaaatgtttcctgttttgtttccatttcatccatcttccctaaccatggagtcaatcccagcatgtctcaatctggagttcctcaatgaagtagacgcatgtttagtctgattcccaatgtgagcaaaaaggaagtatagacagtaaagtaaattcaaggatctgttaaatctggtaaaagtagatcaaatcagagattgacagcctgtggagggtgcctgaactatacagaattaacacaactatggcgttattttttgtacatactgctcagaataaaaacacttgaaatgtggaagattttaagtt

SEQ ID NO: 576004 - DNA, 533 bp, Homo sapiens
ttaaaaacttggattgtaccrtgtaatgaagagaaatacacttaattttgtattctgcaattttgctaaatgcaactattagttctaacaggtattgttttcagcatataggattttttgtatataacatcatatcataagtaacaggtaattttacttcttcctttagaatgtggatcttttctttttttcattgcctagttgttttgccaggactttcactgatatttttgaatagatgtgacaacagtgaatatcttgccttattcttaaccttagaggataaactttccacacttcagaattcagtgtaatattagtgatgattgtttttgtttttttgtttttgttgttgtttttgtttttctgagataggatcttgctctgtcaaccaggctggagtgcagtggcatgatctgggctcactgcaacctccacctcccgagttcaagctattctcatgcctcagcctccctggtagctgggactacaggcacataccacaaagtcaagctaatgttaatattttttgt

SEQ ID NO: 576005 - DNA, 392 bp, Homo sapiens
actattattatttaaactgtaaactacatgtctcccaaagctagcccatcctaagcccagtaataattaaggcaacatgaaggtaaaatataagagggaagttggctatattagatcttccccactgccataatttyctcactgttataattattgcaaatgcagtttcaatatgagttgtttttcaattcaacctctggctttctaattaaaaatgattagttaaacacacgtgcatcttcttcctattctaccaacatcctattgaaatgaccatgtgatggacaaaagagaagatatgtgtccatgctgagaacaggatgcaaaaccttcagcaccctagagggcaggaggagatgggaacacattgggatgtgtagcccgaacgatgc

SEQ ID NO: 576006 - DNA, 392 bp, Homo sapiens
actattattatttaaactgtaaactacatgtctcccaaagctagcccatcctaagcccagtaataattaaggcaacatgaaggtaaaatataagagggaagttggctatattagatcttccccactgccataatttcctcactgttataattattgcaaatgcagtttcaatatgagttgtttttcaattcaacctctggctttctaattaaaaatgattagttaaacacaygtgcatcttcttcctattctaccaacatcctattgaaatgaccatgtgatggacaaaagagaagatatgtgtccatgctgagaacaggatgcaaaaccttcagcaccctagagggcaggaggagatgggaacacattgggatgtgtagcccgaacgatgc

SEQ ID NO: 576007 - DNA, 635 bp, Homo sapiens
ttgttttcagcatataggattttttgtatataacatcatatcataagtaacaggtaattttacttcttcctttagaatgtggatcttttctttttttcattgcctagttgttttgccaggactttcactgmtatttttgaatagatgtgacaacagtgaatatcttgccttattcttaaccttagaggataaactttccacacttcagaattcagtgtaatattagtgatgattgtttttgtttttttgtttttgttgttgtttttgtttttctgagataggatcttgctctgtcaaccaggctggagtgcagtggcatgatctgggctcactgcaacctccacctcccgagttcaagctattctcatgcctcagcctccctggtagctgggactacaggcacataccacaaagtcaagctaatgttaatattttttgtagagacagggattcaccatgttggtcaggctggtctggaactcctgacctaaaatcatccacccacctcagccacccaaactgctgggactataggcatgagctgttgaacacagttggtgatgagttatttacatatcttttgctatgttagtttccttttatttctactttattgagtgtttttttatcttgaa

SEQ ID NO: 576008 - DNA, 635 bp, Homo sapiens
ttgttttcagcatataggattttttgtatataacatcatatcataagtaacaggtaattttacttcttcctttagaatgtggatcttttctttttttcattgcctagttgttttgccaggactttcactgatatttttgaatagatgtgrcaacagtgaatatcttgccttattcttaaccttagaggataaactttccacacttcagaattcagtgtaatattagtgatgattgtttttgtttttttgtttttgttgttgtttttgtttttctgagataggatcttgctctgtcaaccaggctggagtgcagtggcatgatctgggctcactgcaacctccacctcccgagttcaagctattctcatgcctcagcctccctggtagctgggactacaggcacataccacaaagtcaagctaatgttaatattttttgtagagacagggattcaccatgttggtcaggctggtctggaactcctgacctaaaatcatccacccacctcagccacccaaactgctgggactataggcatgagctgttgaacacagttggtgatgagttatttacatatcttttgctatgttagtttccttttatttctactttattgagtgtttttttatcttgaa

SEQ ID NO: 576009 - DNA, 635 bp, Homo sapiens
ttgttttcagcatataggattttttgtatataacatcatatcataagtaacaggtaattttacttcttcctttagaatgtggatcttttctttttttcattgcctagttgttttgccaggactttcactgatatttttgaatagatgtgacaacagtgaatatcttgccttattmttaaccttagaggataaactttccacacttcagaattcagtgtaatattagtgatgattgtttttgtttttttgtttttgttgttgtttttgtttttctgagataggatcttgctctgtcaaccaggctggagtgcagtggcatgatctgggctcactgcaacctccacctcccgagttcaagctattctcatgcctcagcctccctggtagctgggactacaggcacataccacaaagtcaagctaatgttaatattttttgtagagacagggattcaccatgttggtcaggctggtctggaactcctgacctaaaatcatccacccacctcagccacccaaactgctgggactataggcatgagctgttgaacacagttggtgatgagttatttacatatcttttgctatgttagtttccttttatttctactttattgagtgtttttttatcttgaa

SEQ ID NO: 576010 - DNA, 635 bp, Homo sapiens
ttgttttcagcatataggattttttgtatataacatcatatcataagtaacaggtaattttacttcttcctttagaatgtggatcttttctttttttcattgcctagttgttttgccaggactttcactgatatttttgaatagatgtgacaacagtgaatatcttgccttattcttaaycttagaggataaactttccacacttcagaattcagtgtaatattagtgatgattgtttttgtttttttgtttttgttgttgtttttgtttttctgagataggatcttgctctgtcaaccaggctggagtgcagtggcatgatctgggctcactgcaacctccacctcccgagttcaagctattctcatgcctcagcctccctggtagctgggactacaggcacataccacaaagtcaagctaatgttaatattttttgtagagacagggattcaccatgttggtcaggctggtctggaactcctgacctaaaatcatccacccacctcagccacccaaactgctgggactataggcatgagctgttgaacacagttggtgatgagttatttacatatcttttgctatgttagtttccttttatttctactttattgagtgtttttttatcttgaa

SEQ ID NO: 576011 - DNA, 627 bp, Homo sapiens
ttatttgacataaaatgcatcattctctgagaatataagatgaaatcattccacagaagaattacttatattcagagttatttatgtgtaatagtactccataaattccctttgagggccttgttccattcagcaagaagaatgtcttgatggtaggcaaaattgtacgtaagttaaaagtatgaaatttgaatcaagctctgccattgaattgtcacgtgaacctggaacaacataacctctccctgccttagtttctctatttatataatggtaagtataacaaaagtatacttcaagggcttttgcaagcactatatgaaccaatagatctaacacatttagaacrgtaacttgatattttaggcaccttgtaagttattgttattatctgcaattgtatctacccaaaagctagaatccctcttcctggcccccacattcctatcacatgtctataaatatcttgtaaatatatttgttcattttatgcatgcatttacttgtattctgaacgcctttacatgtgccaggcattgtctaggtgttggagaaactaagactgacttgaaggagatatttacttaaaagaaatagctgtaatgggtataatttgcagacggggag

SEQ ID NO: 576012 - DNA, 627 bp, Homo sapiens
ttatttgacataaaatgcatcattctctgagaatataagatgaaatcattccacagaagaattacttatattcagagttatttatgtgtaatagtactccataaattccctttgagggccttgttccattcagcaagaagaatgtcttgatggtaggcaaaattgtacgtaagttaaaagtatgaaatttgaatcaagctctgccattgaattgtcacgtgaacctggaacaacataacctctccctgccttagtttctctatttatataatggtaagtataacaaaagtatacttcaagggcttttgcaagcactatatgaaccaatagatctaacacatttagaacggtaacttgatattttaggcaccttgtaagttattgttattatctgcaattgtatctacccaaaagctagaatccctcttcctggcccccacattcctatcacatgtctataaatatcttgtaaatatatttgttcattttatgcatgcatttacttgtattctgaaygcctttacatgtgccaggcattgtctaggtgttggagaaactaagactgacttgaaggagatatttacttaaaagaaatagctgtaatgggtataatttgcagacggggag

SEQ ID NO: 576013 - DNA, 506 bp, Homo sapiens
ggaagaaaccagaacagaaaagctgaaaatcctacaaaccagagcatctcttttcttccaaaggattgcagctcctcaccagcaatggaacaaagctggagggagagtgactttgatgagttgacagaaggaggcttcagaaggctggtaataacaaacttctccaagctaaaagagcatgtttgaacacatcrcaaggaagctaaaaaccttgaaaaaaggtcagacaatggctaactagaataaacagtgtagagaataccttaaatgaccttatggagctgataaccatggcacaagaactctgtgacacatgcacaagcttcaatagctgattcaatccagtggaagaaaggatatcagtgatcgaagatcaaattaataaaataaagtgagaagacaagtttagagtaaaaagagtgaaaagaaatgaacaaagcctccaggaaaaatgggactatgtgaaaagaccaaatctatgtttgcttggtgtacctaaatgtgac

SEQ ID NO: 576014 - DNA, 441 bp, Homo sapiens
cacttctaactccaacctgtgctcctgaagcaagacgtttttggaccgtcagcaggcagatgaaggcctgagagtggtaggagagctattgtgggctttcctacctcagggctagaggagggcttggagaccggcaaaggaaaagatggaccatttcaagtctcagagcaaaaataytaagagacaaagatgggatggaaaataaaagtgacgtggtaatcgatagaggaaatttacacaaatctaaaaattctgaaaaagaaaaagaagcagagacaataaatatgcatccaaagagaagaaaactctgagcaaattaaaaatgtgagctgcacattcccgttactgggtatatacccaagggattataaatcattctactctaaagacacatacacatgtatgtttattgcaacactatttacaatagcaaagacttgg

SEQ ID NO: 576015 - DNA, 605 bp, Homo sapiens
ttgtatttctgtaaagttggtagtaatggctctgctttcatttattattttaataattagtcttccatcttttgctcagtcaatatagtgaaaggcttgatctttcaaataatctatgtttattcattctactgctctccaaacttctattttattgatttatgctctaattatgctctctattatttctttcatactgctagctttggatttagtcttattttgtcttcttccactgcctttaggtatagagtgaggatgttgatttcagatttttcttaaatgtagttrtttatatccatacattttcctttgaactctactttcactgcattcaataagttttggtatgttttgtttttattttaatttatctcaagatattttataattttgcttgtgatttatttttttcactcactggtagttgaagactgtattgtttaatttccacattttcgtgaattttccagttttcacttatttatctgttgtttcttccattgtggttgtaaattatattttgtatgatttcaaacttttaaaaatgattaggacatattttgtggacgaagatatggcccatcctagagaacttccatata

SEQ ID NO: 576016 - DNA, 605 bp, Homo sapiens
ttgtatttctgtaaagttggtagtaatggctctgctttcatttattattttaataattagtcttccatcttttgctcagtcaatatagtgaaaggcttgatctttcaaataatctatgtttattcattctactgctctccaaacttctattttattgatttatgctctaattatgctctctattatttctttcatactgctagctttggatttagtcttattttgtcttcttccactgcctttaggtatagagtgaggatgttgatttcagatttttcttaaatgtagttgtttatatccatamattttcctttgaactctactttcactgcattcaataagttttggtatgttttgtttttattttaatttatctcaagatattttataattttgcttgtgatttatttttttcactcactggtagttgaagactgtattgtttaatttccacattttcgtgaattttccagttttcacttatttatctgttgtttcttccattgtggttgtaaattatattttgtatgatttcaaacttttaaaaatgattaggacatattttgtggacgaagatatggcccatcctagagaacttccatata

SEQ ID NO: 576017 - DNA, 605 bp, Homo sapiens
ttgtatttctgtaaagttggtagtaatggctctgctttcatttattattttaataattagtcttccatcttttgctcagtcaatatagtgaaaggcttgatctttcaaataatctatgtttattcattctactgctctccaaacttctattttattgatttatgctctaattatgctctctattatttctttcatactgctagctttggatttagtcttattttgtcttcttccactgcctttaggtatagagtgaggatgttgatttcagatttttcttaaatgtagttgtttatatccatacattttcctttgaactctactttcactgcattcaataagttttggtatgttttgtttttattttaatttatctcaagatattttataattttgcttgtgatttatttttttcactcactggtagttgaagactgtattgtttaatttccacattttcgtgaattttccagttttcacttatttatctgttgtttcttccattgtggttgtaaattataytttgtatgatttcaaacttttaaaaatgattaggacatattttgtggacgaagatatggcccatcctagagaacttccatata

SEQ ID NO: 576018 - DNA, 597 bp, Homo sapiens
gatacttgctcatagtgttagaggaataatcccaaagagagaaattattcttcgaatatccaccatgactgaatacttagtaatactgaaacctacttataaaacaaaacagaaaacctccaaaaaaccaaataaacaacaaaaaaacttaaaaccaaaaaagtactggaagtctcagaagtatttagcagtttttcttgctccttcaaatgaaaagatgctttatcrtatcctctatggagagaattctgacagtatttatcaaagaccttacatttattcaccttttgccctaaaaatttcataacttaaaaatacatacaacaatttataatatagcattttttgtaaagggaaataatcagaaagagcctaagtgttcaacaatagggcacttgttgaattatgatacaatcacacaataaggtcttcatagagctcattaaaatgatgttattgatatttatttattaataggagaaatcatttagaatttttggttaagacctttaactaagcacaaagtctatgaaataatgtacacaacattccatattttcataaggggaatgacttttaaaactaccctgcaatcat

SEQ ID NO: 576019 - DNA, 597 bp, Homo sapiens
gatacttgctcatagtgttagaggaataatcccaaagagagaaattattcttcgaatatccaccatgactgaatacttagtaatactgaaacctacttataaaacaaaacagaaaacctccaaaaaaccaaataaacaacaaaaaaacttaaaaccaaaaaagtactggaagtctcagaagtatttagcagtttttcttgctccttcaaatgaaaagatgctttatcatatcctctatggagagaattctgacagtatttatcaaagaccttacatttattcaccttttgccctaaaaatttcataacttaaaaatacatacaacaatttataatatagcattttttgtaaagggaaataatcagaaagagcctaagtgttcaacaatagggcacttgttgaattatgatacaatcacacaataaggtcttcatagagcycattaaaatgatgttattgatatttatttattaataggagaaatcatttagaatttttggttaagacctttaactaagcacaaagtctatgaaataatgtacacaacattccatattttcataaggggaatgacttttaaaactaccctgcaatcat

SEQ ID NO: 576020 - DNA, 587 bp, Homo sapiens
acaaaaattaccgaactgctaaatatgtgtatcactctaggaaatgaaagacacctcttcaactgcttttgtgtcttgacttttttcccaaaggaagacctatattttgcttcatttctttctactctacatttctttttactctgcttgcatttagtttaaaagaaaaagctctctgttggtgatttctaatctattttaaagtaaataattgtactgtccaattagagactgagataactcatgaattatcacacaggttgttctcctgtacaatatatatgattttgagtactaatattacacagtgaattcagaattgtgtgtatgtacatacataccatagtcttataaataacttcaacttgcaataattaacttgcagttaattcttacagtagtatgagtttgggcctcttaaaaaaagaactaaaaccaactccctgcctgagaatagaaacacacacacacacacacacacacacacacacaccaaattgaataatcttgttttctcgcttacaattgtgggcattcatttatggarttcttggcagctatgttagcataaaaccccacctataatt

SEQ ID NO: 576021 - DNA, 455 bp, Homo sapiens
tctggctaactagatctcattgcaggcagtgagagagtggtggcaaatgtgaacatgtctgtgtggggtggtggcaggggaattggaatatacgaatccaaggaaaactgactcttggcaaattacttgttttggtgctcctcttcattttttttattatggtagaagactttgtatacaaatttctcactgtacawaaaacaagttcttcagttattgcatttctgcaatatattaaaatacatgagaaaatcacattaaaaagaggcatgattatagaaacaaaatgttattacaatacgatatcaacttataattcataattatatttgtaaatatcaaattataagtaatttatgagaaattagagccaaagcttttcatacttactttagtgtttttctaaaggaaatacatggtgaaagaactgtagagaagacatagcttatgattaa

SEQ ID NO: 576022 - DNA, 455 bp, Homo sapiens
tctggctaactagatctcattgcaggcagtgagagagtggtggcaaatgtgaacatgtctgtgtggggtggtggcaggggaattggaatatacgaatccaaggaaaactgactcttggcaaattacttgttttggtgctcctcttcattttttttattatggtagaagactttgtatacaaatttctcactgtacataaaacaagttcttcagttattgcatttctgcaatatattaaaatacatgagaaaatcacattaaaaagaggcatgattatagaaacaaaatgttattrcaatacgatatcaacttataattcataattatatttgtaaatatcaaattataagtaatttatgagaaattagagccaaagcttttcatacttactttagtgtttttctaaaggaaatacatggtgaaagaactgtagagaagacatagcttatgattaa

SEQ ID NO: 576023 - DNA, 404 bp, Homo sapiens
gattttgcccactttttaactagtttttttttcctattgttgtgttttcagtgttttttgtatatgttggatatattgatatattttttgcatatatgtatatgtcggtgtattttagtgatgtaaaatgaatggaatctatagccttaaacataatataaatatataatggttaagatttcccactcaacaatccaggcttgacagaaaatcataaaatgtatttaaatktaaatgtttttttctttgttgatactagttcttagttttaacatgccgaagagggtatatttgatcaaggacaagattaaatgttctgactggctaactatcaaaccgctgcctccacttttttttgcaacttgaaaatatttagttatcatgctagcacagccatattaata

SEQ ID NO: 576024 - DNA, 436 bp, Homo sapiens
ttggaggggtaggatttcatagttaataatttttttttttttttttttttttttttggtgagatagagtctagctcttgttgtccaggctggagtgcaatggtgaaatctcggctcactgcaacctccgcctcccaggttcaaatgattctcctgactcagcctcccgagtaactgggattacagacacccaccatcatgcctggctaatttttgtatttttagtagagatggggtttcaccatatttgccaggctggtcttgaactcctgacctcaggtgatccgcccgcgttggcctcccaamgtgctgggattacaggcgtgagacactgcgcccagcccatatttaacacttctataaatatttgtgcatattgaaaggaacatcactccccacactgcaactgaacaaaaaagtgataatgttaatttctt

SEQ ID NO: 576025 - DNA, 532 bp, Homo sapiens
gagtatgttagatttgattatctgataatgattatttaaatattcctatctgcttataaaatggctgctataataataataatgcagatgatgttatataaggtatatcagacctacaggctgctggcaggatttgtcagataatcaasccacactaactatggaaaatgagcagcattttaaatgctttctagtgaaaaattataatctacttaaactctaatcagaaaaaaagaatattctcaaaaaaatctattatgaaagtcaataaaatagataatttaacaaaagtacaggattagaacatgcttatacctattaacaagaacaaaatttctaatgctgctcaagtggaaagggtattgctaaaaggatgtttccaaaaatcttgtatataagatagcaacagtgattgatgataatactgtacttcatcttacttgccactaaataacattttataattcctcaaagtaaaattgagaaatctttaagtttttttcaagtaacataatctatctttgtataattc

SEQ ID NO: 576026 - DNA, 532 bp, Homo sapiens
gagtatgttagatttgattatctgataatgattatttaaatattcctatctgcttataaaatggctgctataataataataatgcagatgatgttatataaggtatatcagacctacaggctgctggcaggatttgtcagataatcaacccacactaactatrgaaaatgagcagcattttaaatgctttctagtgaaaaattataatctacttaaactctaatcagaaaaaaagaatattctcaaaaaaatctattatgaaagtcaataaaatagataatttaacaaaagtacaggattagaacatgcttatacctattaacaagaacaaaatttctaatgctgctcaagtggaaagggtattgctaaaaggatgtttccaaaaatcttgtatataagatagcaacagtgattgatgataatactgtacttcatcttacttgccactaaataacattttataattcctcaaagtaaaattgagaaatctttaagtttttttcaagtaacataatctatctttgtataattc

SEQ ID NO: 576027 - DNA, 532 bp, Homo sapiens
gagtatgttagatttgattatctgataatgattatttaaatattcctatctgcttataaaatggctgctataataataataatgcagatgatgttatataaggtatatcagacctacaggctgctggcaggatttgtcagataatcaacccacactaactatggaaaatgagcagcattttaaatgctttctagtgaaaaattataatctacttaaactctaatcagaaaaaaagaatattctcaaaaaaatctattaygaaagtcaataaaatagataatttaacaaaagtacaggattagaacatgcttatacctattaacaagaacaaaatttctaatgctgctcaagtggaaagggtattgctaaaaggatgtttccaaaaatcttgtatataagatagcaacagtgattgatgataatactgtacttcatcttacttgccactaaataacattttataattcctcaaagtaaaattgagaaatctttaagtttttttcaagtaacataatctatctttgtataattc

SEQ ID NO: 576028 - DNA, 532 bp, Homo sapiens
gagtatgttagatttgattatctgataatgattatttaaatattcctatctgcttataaaatggctgctataataataataatgcagatgatgttatataaggtatatcagacctacaggctgctggcaggatttgtcagataatcaacccacactaactatggaaaatgagcagcattttaaatgctttctagtgaaaaattataatctacttaaactctaatcagaaaaaaagaatattctcaaaaaaatctattatgaaagtcaataaaatagataatttaacaaaagtacaggattagaacatgcttatacctattaacaagaacaaaatttctaatgctgctcaagtggaaagggtattgctaaaaggatgtttccaaaaatcttgtatataagatagcaacagtgattgatgataatactgtacttcatcttacttgccacwaaataacattttataattcctcaaagtaaaattgagaaatctttaagtttttttcaagtaacataatctatctttgtataattc

SEQ ID NO: 576029 - DNA, 278 bp, Homo sapiens
gctaatggtcttctgcattttttkgtttttgatttgtattgagatatagcctttacatttctacacaaatgtgactatgtattggcaatgcacttcatacacaatgactaatctatactgtgatgatttgactcaaaaggagaaaagaaattacgtagttttcaattctgattcctattcaccttttgtttatgaatggaaagctttgtgcaaaatatacatataagcagagtaagccttttaaaaaattttctttgaaagataaaatacatgagttt

SEQ ID NO: 576030 - DNA, 278 bp, Homo sapiens
gctaatggtcttctgcattttttggtttttgatttgtattgagatatagcctttacatttstacacaaatgtgactatgtattggcaatgcacttcatacacaatgactaatctatactgtgatgatttgactcaaaaggagaaaagaaattacgtagttttcaattctgattcctattcaccttttgtttatgaatggaaagctttgtgcaaaatatacatataagcagagtaagccttttaaaaaattttctttgaaagataaaatacatgagttt

SEQ ID NO: 576031 - DNA, 278 bp, Homo sapiens
gctaatggtcttctgcattttttggtttttgatttgtattgagatatagcctttacatttctacacaaatgtgactatgtmttggcaatgcacttcatacacaatgactaatctatactgtgatgatttgactcaaaaggagaaaagaaattacgtagttttcaattctgattcctattcaccttttgtttatgaatggaaagctttgtgcaaaatatacatataagcagagtaagccttttaaaaaattttctttgaaagataaaatacatgagttt

SEQ ID NO: 576032 - DNA, 539 bp, Homo sapiens
aatagctcattaaaacttcatgtgtaactatttcagcattgttgtcagctactctttattccacttctatacagatcatgtcaycttcaaatagagacactttcacttcttttccaatttggatgccttttatttctttttcttacctaattgctctggctaggacttacagactttttcagaaaccccccaaagtaatctaggggagtccactatcactagatctgctttataagaaaccctaaagggagttcctcaaactgaaatgcaataagactaattagtatcatgaaaccatatgtagttataaaaagtcactggtaaaagtaactgtacagtcaaattcaaaatactcctaatactgtaatgatggagtataatcactttaacttttaaaaggttaaaagacaaaaaatactacaaataaatataattacaaaatatacaaagaaagaaactctgacatcaaaaaacataagtggaggggagtaaagtgtagggtttttgtatatgattgaagttaagttgttatcaactta

SEQ ID NO: 576033 - DNA, 538 bp, Homo sapiens
tgtgaatatcatagagtatacttacacaaaattagataataccacctaacacacacccgggctatttggtataacctattgtttccaggctacaaatctgtacagcattgtactatactgaatgctataggcaactgtaatayaatcataagcatttgtgtatctaatgtatctaaacatatgaaaggtacaataaaaatgttataaccttatgggaccaccgttgtatatgtggcccatcattgaccaaaacatccttgtgtggcacatgatagcatacaatgttttatgtaagcctcatgataaacacaaagacaaaacatgtaacagatacacaaatgagaattttaccacatgtttaaaaaagaattaatacaaaggcacagcaaagaatcaaagtataccactacagaaaataatcaacgtaatcaaatcacgcacagcaagagagaaataaaagaacaaaaaaactacaaaatgcctatcaatagttactttaaatatcagtggaccaaattagtgaaacaaaagacacaga

SEQ ID NO: 576034 - DNA, 538 bp, Homo sapiens
tgtgaatatcatagagtatacttacacaaaattagataataccacctaacacacacccgggctatttggtataacctattgtttccaggctacaaatctgtacagcattgtactatactgaatgctataggcaactgtaatacaatcataagcatttgtgtatctaatgtatctaaacatatgaaaggtacaataaaaatsttataaccttatgggaccaccgttgtatatgtggcccatcattgaccaaaacatccttgtgtggcacatgatagcatacaatgttttatgtaagcctcatgataaacacaaagacaaaacatgtaacagatacacaaatgagaattttaccacatgtttaaaaaagaattaatacaaaggcacagcaaagaatcaaagtataccactacagaaaataatcaacgtaatcaaatcacgcacagcaagagagaaataaaagaacaaaaaaactacaaaatgcctatcaatagttactttaaatatcagtggaccaaattagtgaaacaaaagacacaga

SEQ ID NO: 576035 - DNA, 538 bp, Homo sapiens
tgtgaatatcatagagtatacttacacaaaattagataataccacctaacacacacccgggctatttggtataacctattgtttccaggctacaaatctgtacagcattgtactatactgaatgctataggcaactgtaatacaatcataagcatttgtgtatctaatgtatctaaacatatgaaaggtacaataaaaatgttataaccttatgggaccaccgttgtatatgtggcccatcattgaccaaaacatccttgtgtggcacaygatagcatacaatgttttatgtaagcctcatgataaacacaaagacaaaacatgtaacagatacacaaatgagaattttaccacatgtttaaaaaagaattaatacaaaggcacagcaaagaatcaaagtataccactacagaaaataatcaacgtaatcaaatcacgcacagcaagagagaaataaaagaacaaaaaaactacaaaatgcctatcaatagttactttaaatatcagtggaccaaattagtgaaacaaaagacacaga

SEQ ID NO: 576036 - DNA, 538 bp, Homo sapiens
tgtgaatatcatagagtatacttacacaaaattagataataccacctaacacacacccgggctatttggtataacctattgtttccaggctacaaatctgtacagcattgtactatactgaatgctataggcaactgtaatacaatcataagcatttgtgtatctaatgtatctaaacatatgaaaggtacaataaaaatgttataaccttatgggaccaccgttgtatatgtggcccatcattgaccaaaacatccttgtgtggcacatgatagcatacaatgttttatgtaagcctcatgataaacacaaagacaaaacatgtaacagatacacaaatgagaattttaccacatgtttaaaaaagaattaatacaaaggcacagcaaagaatcaaagtataccactacagaaaataatcaacgtaatcaaatcaygcacagcaagagagaaataaaagaacaaaaaaactacaaaatgcctatcaatagttactttaaatatcagtggaccaaattagtgaaacaaaagacacaga

SEQ ID NO: 576037 - DNA, 540 bp, Homo sapiens
atctgttatcagtgatcattgatattactattgtcattgttttggggcatcacaagccatgctccaaaagacaatgagcttaattgatacatatgtgtattcraatggttccatcgatctgcccttcctccatctcaccctctcctcaggtctgttttctgagacacagcaatattgaaattaggccaattaataactctataaaggcctctatgtgttcaagtgaaagtaagagtcacacatctcttattataaatctaaagtgagaaatgattaagctgagtgaggaaggtatgttaaaagctgagacaggccaaaaggcccaggctggtctcgaactcctgacctcaagcaatccacctgccgcagcctcccaggtagctgagattaaaggcatgagccaccatgtccagcttctatgcattattttaaatggagtattgaagactctgttactgtagaactatttctaacttcaattctgtcaatatttgggtcacaggccttaatgtgattacacgctggtctgatgctcatggc

SEQ ID NO: 576038 - DNA, 522 bp, Homo sapiens
atctgttatcagtgatcattgatattactattgtcattgttttggggcatcacaagccatgctccaaaagacaatgagcttaattgatacatatgtgtattcaaatggttccatcgatctgcccttcctccatctcaccctctcctcaggtctgttttctgagacacagcaatattgaaattaggccaattaataactctataaaggcctctatgtgttcaagtgaaagtaagagtcacacatctcttattataaatctaaagtgagaaatgattaagctgagtgaggaaggtatgttaaaagcygagacaggccaaaaggcccaggctggtctcgaactcctgacctcaagcaatccacctgccgcagcctcccaggtagctgagattaaaggcatgagccaccatgtccagcttctatgcattattttaaatggagtattgaagactctgttactgtagaactatttctaacttcaattctgtcaatatttgggtcacaggccttaatgtgattacacgc

SEQ ID NO: 576039 - DNA, 591 bp, Homo sapiens
aggctggtctcgaactcctgacctcaagcaatccacctgccgcagcctcccaggtagctgagattaaaggcatgagccaccatgtccagcttctatgcattattttaaatggagtattgaagactctrttactgtagaactatttctaacttcaattctgtcaatatttgggtcacaggccttaatgtgattacacgctggtctgatgctcatggccaggacattttgttttcctgttggacataaacaatctcacagaatatcaacttcagaaggttaatctgagaccgtgataagtgcaaacaaaaacaagggcactttataatgttgtctaagtgcagataaaaaacaaggtcttgatgccacccacaaaatacttaataatcatattgctcctgctttctgacagcatccaatctaaagtcttcactttctgagatcctgtccgaaatcaaccaattaaagtccaaatcgtataatagtttctctctaactcctcccactgagatgacccatagtaccccattccttgctgcaatgtaattatatttacttacaagtgtgctcctggtggtctttaactgaagggca

SEQ ID NO: 576040 - DNA, 591 bp, Homo sapiens
aggctggtctcgaactcctgacctcaagcaatccacctgccgcagcctcccaggtagctgagattaaaggcatgagccaccatgtccagcttctatgcattattttaaatggagtattgaagactctgttactgtagaactatttctaacttcaattctgtcaatatttgggtcacaggccttaatgtkattacacgctggtctgatgctcatggccaggacattttgttttcctgttggacataaacaatctcacagaatatcaacttcagaaggttaatctgagaccgtgataagtgcaaacaaaaacaagggcactttataatgttgtctaagtgcagataaaaaacaaggtcttgatgccacccacaaaatacttaataatcatattgctcctgctttctgacagcatccaatctaaagtcttcactttctgagatcctgtccgaaatcaaccaattaaagtccaaatcgtataatagtttctctctaactcctcccactgagatgacccatagtaccccattccttgctgcaatgtaattatatttacttacaagtgtgctcctggtggtctttaactgaagggca

SEQ ID NO: 576041 - DNA, 591 bp, Homo sapiens
aggctggtctcgaactcctgacctcaagcaatccacctgccgcagcctcccaggtagctgagattaaaggcatgagccaccatgtccagcttctatgcattattttaaatggagtattgaagactctgttactgtagaactatttctaacttcaattctgtcaatatttgggtcacaggccttaatgtgattacacgctrgtctgatgctcatggccaggacattttgttttcctgttggacataaacaatctcacagaatatcaacttcagaaggttaatctgagaccgtgataagtgcaaacaaaaacaagggcactttataatgttgtctaagtgcagataaaaaacaaggtcttgatgccacccacaaaatacttaataatcatattgctcctgctttctgacagcatccaatctaaagtcttcactttctgagatcctgtccgaaatcaaccaattaaagtccaaatcgtataatagtttctctctaactcctcccactgagatgacccatagtaccccattccttgctgcaatgtaattatatttacttacaagtgtgctcctggtggtctttaactgaagggca

SEQ ID NO: 576042 - DNA, 591 bp, Homo sapiens
aggctggtctcgaactcctgacctcaagcaatccacctgccgcagcctcccaggtagctgagattaaaggcatgagccaccatgtccagcttctatgcattattttaaatggagtattgaagactctgttactgtagaactatttctaacttcaattctgtcaatatttgggtcacaggccttaatgtgattacacgctggtctgatgctcatggccaggacattttgttttcctgttggacataaacaatctcacagaatatcaacttcagaaggttaatctgagaccgtgataagtgcaaacaaaaacaagggcactttataatgttgtctaagtgcagataaaaaacaaggtcttgatgccacccacaaaatacttaataatcatattgctcctgctttctgacagcatccaatctaaagtcttcactttctgagatcctgtccgaaatcaaccaattaaagyccaaatcgtataatagtttctctctaactcctcccactgagatgacccatagtaccccattccttgctgcaatgtaattatatttacttacaagtgtgctcctggtggtctttaactgaagggca

SEQ ID NO: 576043 - DNA, 577 bp, Homo sapiens
cagtagtagagattctatgtgccctgatcgccagtggaggttttaaatacagagtattcatgagtttagcaatgttwttcgcctctcattatttaaataatttgaagttttccccaataactagtgtcttagaagtcatgaaaatttcagaaaatgacaggtcttctgagttcatgatgggagttgggcagcagtcgcatacgagcacctggagagtccttgccagttctttggggatggggagctcttaagactgccctgagaccgccctttgacctcattgtggtcctttctagattaaatgctgttttccatgaccgtctctgttcttcccatacgcgaatggcaggcattcagatctccaagaatagaggattaggagagactccaccacctatgtcctcacagttaattatcgatttgtgtcagttgcccattttctcacttcctgtttgtgtgtcaaggggtattaataaatctttgcctatttaaagatattagccttggattttcaaatattgcatattttgacatgtaaaaatttgttagttttattttttcaaccgatctgacctgt

SEQ ID NO: 576044 - DNA, 577 bp, Homo sapiens
cagtagtagagattctatgtgccctgatcgccagtggaggttttaaatacagagtattcatgagtttagcaatgttattcgcctctcattatttaaataatttgaagttttccccaataactagtgtcttagaagtcatgaaaatttcagaaaatgacaggtcttctgagttcrtgatgggagttgggcagcagtcgcatacgagcacctggagagtccttgccagttctttggggatggggagctcttaagactgccctgagaccgccctttgacctcattgtggtcctttctagattaaatgctgttttccatgaccgtctctgttcttcccatacgcgaatggcaggcattcagatctccaagaatagaggattaggagagactccaccacctatgtcctcacagttaattatcgatttgtgtcagttgcccattttctcacttcctgtttgtgtgtcaaggggtattaataaatctttgcctatttaaagatattagccttggattttcaaatattgcatattttgacatgtaaaaatttgttagttttattttttcaaccgatctgacctgt

SEQ ID NO: 576045 - DNA, 577 bp, Homo sapiens
cagtagtagagattctatgtgccctgatcgccagtggaggttttaaatacagagtattcatgagtttagcaatgttattcgcctctcattatttaaataatttgaagttttccccaataactagtgtcttagaagtcatgaaaatttcagaaaatgacaggtcttctgagttcatgatgggagttgggcagcagtcgcatacgagcacctggagagtccttgccagttctttggggatggggagctcttaagactgccctgagaccgccctttgacctcattgtggtcctttctagattaaatgctgttttccatgaccgtctctgttcttcccatacgygaatggcaggcattcagatctccaagaatagaggattaggagagactccaccacctatgtcctcacagttaattatcgatttgtgtcagttgcccattttctcacttcctgtttgtgtgtcaaggggtattaataaatctttgcctatttaaagatattagccttggattttcaaatattgcatattttgacatgtaaaaatttgttagttttattttttcaaccgatctgacctgt

SEQ ID NO: 576046 - DNA, 577 bp, Homo sapiens
cagtagtagagattctatgtgccctgatcgccagtggaggttttaaatacagagtattcatgagtttagcaatgttattcgcctctcattatttaaataatttgaagttttccccaataactagtgtcttagaagtcatgaaaatttcagaaaatgacaggtcttctgagttcatgatgggagttgggcagcagtcgcatacgagcacctggagagtccttgccagttctttggggatggggagctcttaagactgccctgagaccgccctttgacctcattgtggtcctttctagattaaatgctgttttccatgaccgtctctgttcttcccatacgcgaatggcaggcattcagatctccaagaatagaggaytaggagagactccaccacctatgtcctcacagttaattatcgatttgtgtcagttgcccattttctcacttcctgtttgtgtgtcaaggggtattaataaatctttgcctatttaaagatattagccttggattttcaaatattgcatattttgacatgtaaaaatttgttagttttattttttcaaccgatctgacctgt

SEQ ID NO: 576047 - DNA, 379 bp, Homo sapiens
tagaggattaggagagactccaccacctatgtcctcacagttaattatcgatttgtgtcagttgcccattttctcacttcctgtttgtgtgtcaaggrgtattaataaatctttgcctatttaaagatattagccttggattttcaaatattgcatattttgacatgtaaaaatttgttagttttattttttcaaccgatctgacctgtatagttgggcttgaggaagcttcctcattctacatgttactatggattttctaatattaacacagggttgtattttttccatataactttctattgaatttctttttccatatgataggtggtgaaggtttagcccagtaaagcagagaggttaagaggttagattgggg

SEQ ID NO: 576048 - DNA, 305 bp, Homo sapiens
agtgcattgtttttgaattgagaatcttggttcacaatgaagaggtctcagctggatcttgctaggcttccaagatgctkgttctcccaaaataccattaaaatgaactaataagaaaaatctaaatttattctgtgacaatggagaagactcatttgagagagtcttgctaaaatcttgaagtggaagagagtgaagttgggatttgtatgtatttttaagtctagtttaagatgatctttacatccagaaacttcattgggattgggtagtaattatgatataataatatttgtgatgataat

SEQ ID NO: 576049 - DNA, 305 bp, Homo sapiens
agtgcattgtttttgaattgagaatcttggttcacaatgaagaggtctcagctggatcttgctaggcttccaagatgctggttctcccaaaataccattaaaatgaactaataagaaaaatctaaatttattctgtgacaatggagaagactcatttgagagagtcttgctaaaatcttgaagtggaagagagtgaagttgggatttgtatgtatttttaagtctagtttwagatgatctttacatccagaaacttcattgggattgggtagtaattatgatataataatatttgtgatgataat

SEQ ID NO: 576050 - DNA, 619 bp, Homo sapiens
ctaccactagtgcctgaagcctgggccatctgtcttttcagtccccagcacaactttacaactgccttcactaataaccacaccttaaccctctaaataaatcacaggaagcatgaatgctgtttatagccaaagaaatcatacagagactacatactgtacgtatccagaatcaataccaaagtttcctatctaacygacactaaaaattaatttttaggaataagtccctccctatgaaaagaaattcaaaaatagggagaagtggctggtacactagattcaaggatattaacataaggacataggaataatgaaacagcatgaaaatgttacacctccaaaggaccacaacagttcttaaacaatagatatcaataaaagcttttgaaaccctgaattaaaaattcaaaatattcatttttaaaaaactcagtgagttacaagatgattctgaaaaaaattatacaaagaaatcagaaaacaatttaggatataaatgaaaaatttgccaaaaagatagattttttaaagtaccaaacaaatagaatttctgaaactgaaacattcattgaaaagaatacaaaatatgcttgaagacttcagcaatagactagaa

SEQ ID NO: 576051 - DNA, 575 bp, Homo sapiens
cattgattgctgaagggaaggctgaggattaattaatattcatttgctcataacagacttgatttatttacttggttgccctagaccaaaagattttatttttatcttcaacttcaaatagttttgttagtatatgtctgagttgaccattctgtgccaattttggagtaagcagcaattttttcaaaaatagtttttaggtacttataagaaatattttttgtctgccttatggatccctttagggcatattttatttcttgatttcattttaatttcttcaattttttaatttatataactcaactcatttatcatctcttagaagacttgtaatttagtatctgtttctgatatgatttagtcctttttaatacttttttcaaatttattaactcattccatgttcagctgttaggagtttgtgcattttgcatatctatagatggttgtttaaatacatgtaatctagattacagtgtttttctctgctcstagttattctttagaaagaattttcatcctgggagaaatgactggcccctgagcttgagccaggaaaaatacaaggttag

SEQ ID NO: 576052 - DNA, 515 bp, Homo sapiens
ggtggctcacacctgtagtcccagctactcaggaggctgaggcaggagaattgactgaacctgggaggcagaggttgcagtgagccaagatcatgccactgcactccagcctgggtgacagagcaagactccgtctcaaaaaaaacaaaaaaaaacaaaaaacaaacaaaaaaaaaacacacaaaaaaatactgacaatgtacagatacagagctttactgatttaaacccccaaagtcatttccaagtcctggtcrtcatttgcttgttttaatcgcaagaatttttgtctctgtttttcccccaatatacctcttgcagtttagaagtaagattattctcctttcctgatccactgtagaatagccacatgcctatagattttttcaatctatctttttttttcctcctcaaggacattggaaattttcataggccttagcagcaatagggaagagtgagtgaattttaaaggtgaaaagatcctcccaaaaggagactggcagtaatgctgg

SEQ ID NO: 576053 - DNA, 526 bp, Homo sapiens
tacaataactatatgcttgtagcctgggaaagatgctgcataacttattgaaatacaaaagccttgacaaaataccaagtgattatttatcaatgcacttgagaagatagraagtctacaggatcagtttaacagaggattttgctaggacataaaaactgatgattttaatatgaaaatgtgaatgtttcaaataagaatagctagaatgtagcagctgttagcaaatatgaataaatttgttatgagtttatttggaaaaaaagattatacattctatgcatttgaaccaatgggttttaattttactttttttctgttgtacaattttctacttgttgccactaatccatattatgcagtctggaagtaacacctccatacatcccaaataatcttaactgactgacgttcattctagccacatgcacatacaaactctgtctctctctctttctctatgtgatatggttttgctgtgttcccacccaaatcccatcttgaactgtaacttccacagttccca

SEQ ID NO: 576054 - DNA, 583 bp, Homo sapiens
aataacaaaaaagagtaaaggaagattaagaggcttatgtgacagtataagatggattactatatgcattatgggtatcccagaagaagaagcgaaaaagaagcaagaaaaacttattcaaagaaatattggctgaacaatttctaatcttggaaaggaaatggacatctgatccatgaatcccaagagtacacaaatacgatgatcacaaagaaatccacactgagacacaatcaaattttcaaagtcaaagacaaaaagagtattttgaaagcataaagactaaagtracttgtcatgcagacagtcacaccatataagtctatctattttataaagtgaatttctcagcagaaatattgcagatcagaaggaaggtgagtgggccaggcatggtggctcaagtctgtaatcccagcacttcaggcagccaaggtaggcagattgctcgagctcagtagtttgagacaaccccgggcaacatgaagaaaccctgtttcaacaaaaaatacaacattaactgagtgtggtggcacaagcctgtagtcctagctactcaggaggctgagtgggaggactgtta

SEQ ID NO: 576055 - DNA, 447 bp, Homo sapiens
ggctgaacaatttctaatcttggaaaggaaatggacatctgatccatgaatcccaagagtacacaaatacgatgatcacaaagaaatccacactgagacacaatcaaattttcaaagtcaaagacaaaaagagtattttgaaagcataaagactaaagtgacttgtcatgcagacagtcacaccatataagtctatctattttataaagtgaatttctcagcagaaatattgcagatcagaaggaargtgagtgggccaggcatggtggctcaagtctgtaatcccagcacttcaggcagccaaggtaggcagattgctcgagctcagtagtttgagacaaccccgggcaacatgaagaaaccctgtttcaacaaaaaatacaacattaactgagtgtggtggcacaagcctgtagtcctagctactcaggaggctgagtgggagga

SEQ ID NO: 576056 - DNA, 447 bp, Homo sapiens
ggctgaacaatttctaatcttggaaaggaaatggacatctgatccatgaatcccaagagtacacaaatacgatgatcacaaagaaatccacactgagacacaatcaaattttcaaagtcaaagacaaaaagagtattttgaaagcataaagactaaagtgacttgtcatgcagacagtcacaccatataagtctatctattttataaagtgaatttctcagcagaaatattgcagatcagaaggaaggtgagtgggccaggcatggtggctcaagtctgtaatcccagcacttcargcagccaaggtaggcagattgctcgagctcagtagtttgagacaaccccgggcaacatgaagaaaccctgtttcaacaaaaaatacaacattaactgagtgtggtggcacaagcctgtagtcctagctactcaggaggctgagtgggagga

SEQ ID NO: 576057 - DNA, 509 bp, Homo sapiens
catgggaaacatacattcttctttatgcctagaaatttatctctgaggctaaaggagcataatagttaaggtttgtttgaatattattttttaaagggagtcactatgaaactacattgatctctgtaatttaaattagtagagaataaaatttttactcactgatcatatttcaatttcaacttcttttttgctttttaagctgcatacattttggtaaacatgccaagaagtatattatatgttataccatagattgtcccatgagaacataatttctattctattggaaagaagawctgcactcagatcatcttgctcaaatttcgtgccccaatgggcaaaaagaaaaaagaaaaaagaaatagcgggtaaggcaagtttcagattccaacaaaacttttttatttattccaagagacatggatacatggaaaggtttttagatagagaatatacacaaactactcagatgtataatcaaaaatatcattaaacatttaaaaaat

SEQ ID NO: 576058 - DNA, 556 bp, Homo sapiens
cccattgtgtgtcttccaatcacaatctctgctttgctacttctatttaagcatttggggcaagttactcaattcctctatgcctcttgtttccttacatggaaagtaaagataataaaacagtattaaactctagagttgctataaagtttaaacagaatattgcttgaaaatcactyagcacagtctctgtcacgcagtaagaactcagtacatcctatttgtactataacaaggaggtagagtcagtacctccactgtcaatgaggtactatgtaagacatcagaaataccacgatgtggtctctgccttcaagaagcttacagtctattggagacttgctcctaatttacatatctaacattttgttgtgtctaacaaagtagttagcttaatattttacccttttacagttcagtctagaattttttttaaattttttgttcaacaagtcttaagcctatggttcataatagttttgtgaggttacaaagctttttctaattgtaatttttattcatttttattcccaagaatattcttatagttttgtta

SEQ ID NO: 576059 - DNA, 398 bp, Homo sapiens
gaattcaaactcacatagtttattttgtagggaggaagggaatgaagagaacacaggtagggragaagagaaataagacaaggaagagaagaaaattaataaagataggcttctcaagccaattaccacagtaggcaactgaaacttaatcctgcatgagcacgctaggggcccatgaaaaacacatgcctcagggtcccccaagggttaaaggagctgacgtatttatacaccaacatcatcatgcactactgccggaatcccaacagagccatccatcacttcttagatggactccctttggctcaaagcacttcacctagtatttacttttctcttactatttcatctttttttgtggatgacaggaaatcactggctaaccaataatcagataa

SEQ ID NO: 576060 - DNA, 398 bp, Homo sapiens
gaattcaaactcacatagtttattttgtagggaggaagggaatgaagagaacacaggtagggaagaagagaaataagacaaggaagagaagaaaattaataaagataggcttctcaagccaattaccacagtaggcaactgaaacttaatccygcatgagcacgctaggggcccatgaaaaacacatgcctcagggtcccccaagggttaaaggagctgacgtatttatacaccaacatcatcatgcactactgccggaatcccaacagagccatccatcacttcttagatggactccctttggctcaaagcacttcacctagtatttacttttctcttactatttcatctttttttgtggatgacaggaaatcactggctaaccaataatcagataa

SEQ ID NO: 576061 - DNA, 398 bp, Homo sapiens
gaattcaaactcacatagtttattttgtagggaggaagggaatgaagagaacacaggtagggaagaagagaaataagacaaggaagagaagaaaattaataaagataggcttctcaagccaattaccacagtaggcaactgaaacttaatcctgcatgagcacgctaggggcccatgaaaaacacatgcctcagggtcccccaagggttaaaggagctgacgtatttatacamcaacatcatcatgcactactgccggaatcccaacagagccatccatcacttcttagatggactccctttggctcaaagcacttcacctagtatttacttttctcttactatttcatctttttttgtggatgacaggaaatcactggctaaccaataatcagataa

SEQ ID NO: 576062 - DNA, 587 bp, Homo sapiens
ccctgactttaaaaagacacataaacagtaggyagtcttttttctgccataagaccacatcgtatgtgagggtaatagcttgcactgctggggcctttccatgaggaaatctcatcaaggtcaaagaccacatcctgagaatgatagaacctggttccttgaagacattgctgaggcaatgaattacccacctctgctgctgccctttctagacattttaatacgagatgtaactttttccttgttgtttatgtcatttggaattcagtttttgttacttgcaacagagagccacattgcttcccaaaaaccttgttcccaatctttgtggctatatcatgactccataggtaagacctggtttggcctcagaggtttgcccactctgagcatcaatttacttatttgtaaaatgggaaaaatacttttcttattgggttgtaaattgtcatatcctacaccctggagtattttctctggtagatattcctcctctcctcctcctcctcctcctcctcatcatcatcctcatcaccatcatcaaaaatatcatcatcatagtttatgtcagcatcctaaattattta

SEQ ID NO: 576063 - DNA, 587 bp, Homo sapiens
ccctgactttaaaaagacacataaacagtaggcagtcttttttctgccataagaccacatcgtatgtgagggtaatagcttgcactgctggggcctttccatgaggaaatctcatcaaggtcaaagaccacatcctgagaatgatagaacctggttccttgaagacattgctgaggcaatgaattacccacctctgctgctgccctttctagacattttaatacgagatgtaactttttccttgttgtttatgtcatttggaattcagtttttgttacttgcaacagagagccacattgcttcccaaaaaccttgttcccaatctttgtggctatatcatgactccataggtaagacctggtttggcctcagaggtttgcccactctgagcatcaatttacttatttgtaaaatgggaaaaatacttttcttattgggttgtaaattgtcatatcctacaccctggagtattttctctggtagatattcctcctctcctcctcctcctcctcctcmtcatcatcatcctcatcaccatcatcaaaaatatcatcatcatagtttatgtcagcatcctaaattattta

SEQ ID NO: 576064 - DNA, 596 bp, Homo sapiens
actaaacccagatttttgcgaatcttgtaactctagtttttacttcaccacataatcagtattattgaagaacataaataaacgtagaaatggttagaccttaacatctctttggcagttttctacatggacagtttttacatgcatagatatggaattgaaaatagtgttttgctacagggttctcccttaggcatgcaaaatagaaaaggcgaaataaaatgtttattgccagaggctaggaggaagaaatgcagaggtaatagttaaagggtacataaagaaaatgtggcagatatacaccatggaataccatgcagccataaaaaaggttgagttcatgtcctttacagagacatggatgaagctggaaaccatcattctcagcaaactaacacaagaacagaaaatcaaacaccacatgttctcactcataagtgggagttgaacaatgagaacacatggacacagggaggggaacatcacacactggggcctgttgggggtgtggggctargcgagggatagcattaggagaaatagctaatatagttgtcgggttgatgggtgcagcaaacctccatggcacgtgtata

SEQ ID NO: 576065 - DNA, 562 bp, Homo sapiens
ggcatttttttctttttctctttttagaagagtctcgctctgtcacccaggctggagtgcaatggcacaatctcggctcactgcagcctccacctcctgggttcttgcaattctcctgcctcatcctcccgagtagctggggctaaggcacactctgcccacacctggctaattttttgtattttagtagagatggggtttcaccattttgcacaggctggtctcaaactcctgagctcaggcaatccacccaccttggcctcccaaagtgctaggattacagatgtgagtcaccgcgcccggcctatggcatttttttcatactgagtctttgaagcccagtatattttttacagcacatccgaatatggactaatcatattttgtgtgctcactagccacgtgtggctagtggctgtcataytggacagtgtaggcttatagtaagacatcaaatgggacttttaatagagcctgctagtttcttataataccacgataacacaagaaatgcgaaactttcaagaatatatgaaaagatgtaattcacagcaagctatcg

SEQ ID NO: 576066 - DNA, 610 bp, Homo sapiens
cttcctcgggaaaaaataatatataaataatatacagagcattaaattctcactacaatttctcatctacaaatatgacaatcaaaaacaacttggtatttttaagtaaatatataaataaatatatataaatatatatatgtattttatgtaattagaacaagctatatcataagataagtaacaattgacccttgaacaatatgtgtttgaaacgtgtgtccacttctaaggggatttttttttaatcaataaatttatatcaagtgtgcctgcctctcctgccttgcctttcaactcccctacctcttccacctatgaaagaatcaacatgatcaacccctgagtcaacaagaccaacttctttctcctcctcctcagtctrctcagtgtgaagaagatgaagataaagacctttatgatgatccatttccgtttaatgtatagaaactatattttatcttccttataattttcttaacattttaacaacatgaatagcgttaccttgctgtaatctaaacgtggtatataggccaggcgtggtgactcatgcctgtaattccagaactttcggaggccgagacaggtggatctcctgaagtcagga

SEQ ID NO: 576067 - DNA, 634 bp, Homo sapiens
tgatttgattctcagcttggtcgctgttgatgtatagatctactgatttatgtacattaattttgtatctggagactgctgaattattttatcatttctagatgtttttttggaggagtcctttggttttctaggtatgcagtaatatcatcagcaaacagcaatagtttgacttcawctttactgatttgtatgaattttatttctttttcttctctgattgctctagctaggacttccagcactatgttgaacagaagtggtgagagtgggcatccttgtcttgtcccagttctcagagaaaaaatgtttttaatttttcctaatttagtattattttagctgtgggtttgtcatagatagcttttattatgttgtatgctgattttgctgagtgttttaatcataaaagaatgctttattttgtcaaatgcttttctgtttttgtggtgtatcacatttattgacttgctgatgttaaaccatccatgcatccctgatatgaaaaccacttgatcatggtggattatctttttgatatattgttggatagctagttatctagtattttgttaaggatttttacatctgtgtttatcagggatattggtctgtagttttgttgttgttgttg

SEQ ID NO: 576068 - DNA, 634 bp, Homo sapiens
tgatttgattctcagcttggtcgctgttgatgtatagatctactgatttatgtacattaattttgtatctggagactgctgaattattttatcatttctagatgtttttttggaggagtcctttggttttctaggtatgcagtaatatcatcagcaaacagcaatagtttgacttcaactttactgatttgtatgaattttatttctttttcttctctgattgctctagctaggacttccagcactatgttgaacagaagtggtgagagtgggcatccttgtcttgtcccagttctcagagaaaaaatgyttttaatttttcctaatttagtattattttagctgtgggtttgtcatagatagcttttattatgttgtatgctgattttgctgagtgttttaatcataaaagaatgctttattttgtcaaatgcttttctgtttttgtggtgtatcacatttattgacttgctgatgttaaaccatccatgcatccctgatatgaaaaccacttgatcatggtggattatctttttgatatattgttggatagctagttatctagtattttgttaaggatttttacatctgtgtttatcagggatattggtctgtagttttgttgttgttgttg

SEQ ID NO: 576069 - DNA, 634 bp, Homo sapiens
tgatttgattctcagcttggtcgctgttgatgtatagatctactgatttatgtacattaattttgtatctggagactgctgaattattttatcatttctagatgtttttttggaggagtcctttggttttctaggtatgcagtaatatcatcagcaaacagcaatagtttgacttcaactttactgatttgtatgaattttatttctttttcttctctgattgctctagctaggacttccagcactatgttgaacagaagtggtgagagtgggcatccttgtcttgtcccagttctcagagaaaaaatgtttttaayttttcctaatttagtattattttagctgtgggtttgtcatagatagcttttattatgttgtatgctgattttgctgagtgttttaatcataaaagaatgctttattttgtcaaatgcttttctgtttttgtggtgtatcacatttattgacttgctgatgttaaaccatccatgcatccctgatatgaaaaccacttgatcatggtggattatctttttgatatattgttggatagctagttatctagtattttgttaaggatttttacatctgtgtttatcagggatattggtctgtagttttgttgttgttgttg

SEQ ID NO: 576070 - DNA, 625 bp, Homo sapiens
acatgattgaaggttgaaggacatctaggttgtttccagttttgagctattatgaataaaactgttctaaattttgtgtatatggatatagcccacacctgaccataccaacaaggtgcttgtgtgtgtgtgtgtgtatacacaaatataatatatattacatatataataatgtgtgtttgtgtgtgygtctgtgtgtgtgttaatgtaagttttatttctatggaataaaagcccaggagtgcaatttatggtttctataaaaattgcatgtcttgttttttaagaaatgtctgaaatattttagagagcagctttaccactttacatcataaccagcaatatatgagtcatctaatttttcagggtccgcacaagcatttattgtcatcattttatttcagctgttctgattggtgtgtagtcaaatttcactgtggttttgatttgcacttacctagtggataatgatgttggacatcttaatatggcttattggacatatgtttgttttcttcagtgaaatatgtttgttttcttcttcttccatgactttttcccattttctaattggatcactgttgcttttttctgtcatggtttggaagttctttatgtattctag

SEQ ID NO: 576071 - DNA, 625 bp, Homo sapiens
acatgattgaaggttgaaggacatctaggttgtttccagttttgagctattatgaataaaactgttctaaattttgtgtatatggatatagcccacacctgaccataccaacaaggtgcttgtgtgtgtgtgtgtgtatacacaaatataatatatattacatatataataatgtgtgtttgtgtgtgcgtctgtgtgtgtgttaatgtaagttttatttctatggaataaaagcccaggagtgcaatttatggtttctataaaaattgcatgtcttgttttttaagaaatgtctgaaatattttagagagcagctttaccactttacatcataaccagcaatatatgagtcatctaatttttcagggtccgcacaagcatttattgtcatcattttatttcagctgttctgattggtgtgtagtcaaatttcactgtggttttgatttgcacttacctagtggataatgatgttggacatcttaatatggcttattggacatatgtttgttttcttcagtgaaatatgtttgttttcttcttcttccatgactttttcccattttctaattggatcactgttgyttttttctgtcatggtttggaagttctttatgtattctag

SEQ ID NO: 576072 - DNA, 629 bp, Homo sapiens
ggttgctagttactcatctgacttattttcttgctgtcttactcttctttctcttcactctgctctaggccacattgtttttcttgctgtcctttattttctttcttgtatttggtgaaacactcccctgtgctcttttactaaaatttcatttaaggttgaaattgagatcattatcytcttatattcccttagctatttattagatcttgaagaattatttaagttggatgatggaactgatacactacctccaccaaagcaaatgctaccagggctttcagtaatcatgagtacacaggcagatcagatgtgggaaaaacatttgaaaaagtagttagctatttttggtaggattgtcaaataaatatgatgatgtgttttatcattacattcaagtaaaaggtttgggagaaataaaagaagaacaaggctgtgcaaattaaaaaaaaaagaaacaaataccatgagaatatctagatggcatcaaattagagcctctgtgtctatgtctttggtttttatgatgtcattttttatgtaacaaacagagaaatttagatggcgtctagtatctttgttgtaatcttcactgtattttaatgtgctttttcttatatggacttatt

SEQ ID NO: 576073 - DNA, 546 bp, Homo sapiens
tattttaaaagttttaaattttaattattatggatacacattagttatacataatggttatatttatcgcatatatgtgatatcttgatacaagcttacaatgtacartgatcaaatctagcataattggaatatccatcacctcaagcattcatcaattctttgtgttaggaacatttcaatcccactcttttagttattttgaaatataataaattattatttactatagttgccctattgtgtccctctttttttgtggttgctgcaaatctcttccattactaactggtaagtgggtaaggtaatgttattttttgtatagtctttgtgttaatgggatgaaatacattgattttccttttagcttttgtcttttcatttttaaagtattatttgtatacaataaagtttacaattttataggtaaagtttgttgaattttggtaattgtgtataactgagtaatcaccaccacaaccatagagcagctcctacgcaataaaatattttttattcttcctttgaaatgaatctcttcctcaa

SEQ ID NO: 576074 - DNA, 485 bp, Homo sapiens
ctgcacatgtactttaaatttctttattgtggtaagaacatttacaatgagatctaacctcctaacaaatgattatgtgccattgttaattataagcacaatgttgcataacatatctctaaaacttactaattctgtataaatgaaaaattataagcrttgaacagcaagtccctgtctgttccagtctccccactgatccctgacaacaaccattctactcgctgtttctatgagtttaattgctttagatactttatgtaagtaaaattatgacaccattgatttttgatgaatattttactggataagaattatacatcgacagttttttaaaaatttattttctgaaaagtttaagaattttttacattgtcttttgttccatagttttatttttagtattttcccctgctttaaagattttttctttatagttggttgtcaacagtttgactatgaagtgccaaggagtggtttattca

SEQ ID NO: 576075 - DNA, 584 bp, Homo sapiens
acgttttgatatttcatcacagagctctaagactgtatatttttttcaaccttatttctctgtattaaatattaaagggatcctattgaccttaaagtttattggctgttttcctctatcatatccattctactgttaagctcatccaattttacaaattttatgtattatttttcagttaaaatttttattttacaaaatattgtagttttctggtgagtttctctaacttttcattcaatatgagtgtattttctttgtcatyattgaaggttgtaaagtctcatgtattgacatctaaatatacattatttcagggttcttctctgttaattatctttaatattgagaattagtcatagttttctgattctttacatgttgagtaaattggaattttatcttaaaatttttgaatgttgtgtttttgaaactacattttattatatcctttcaaagattaaagctgtgcttgttttagcaggcaatttatttgggtaggctcaaactgtaagctctgccccacctgcaatgagtttatttccctagtttcctaggccatgaagatagtgagttttttgttg

SEQ ID NO: 576076 - DNA, 604 bp, Homo sapiens
agatgcactttttaaaatgtaaattcatactctgacatttgcaacctgtacacagagtttctaataagcaaataaggtcacttggatgatttactgcagtgtgattgctgaaggcagagatgttgctatgagttgcttggtttacagaaggctttgaagtgtggtgatgtaacactgtgtttattagaatctatgctttttgcaacaaataaaaacaaaggacttaatttaggattagctaactaccacattctatccagattatatatgtaaaggataatttctggtctgactaaatagagcatctcaactttctagttttccaggttttagatactttggtaaaaaagcaaattcagggttttctccagaagttctacacagtgactttcaccagatacaggcatgtttctttttcctttatgttatgctgcaatttattgatgatgagctttatgagagctgagacagatgatcctactaacaattttatatttaatataggtcctccttttttaaaatagctttataatggatgcatgctcattgcttargttcactttctttagttttgaaatgactaatacttttaaacatagaggtc

SEQ ID NO: 576077 - DNA, 546 bp, Homo sapiens
ttcttaacttgttttaatgataatatttttcttcattaggtttgtgagctttgagctagtggaagatactaacaggcattttccagttttctctctcaggccttaagaatggttcactattatcccaaggtcactttgaaagtctttctgtgatttgcttccatttattttatgcttgtgtttatggktttgaaccaaatatgaaatttaatgttgcgtttgtctacattaaacttaatttgccccttgtcagctcgtttacaacagagaaaacattcagagccaccctgtagaatgttttgtctacaatcactgatacaatttttctgtctctctttgttgtatgcaactttctatatttttcagtctaaaaagaggcctctctgaaggaacattttcagaaaatctaaatgtctaatagagattaataaatgattttctaataaaatagaatcattaccgtattttgaattttttaaattaaagttctattttctaacttagaaatttaatttcatattacatattatatgaatatgcttcttg

SEQ ID NO: 576078 - DNA, 376 bp, Homo sapiens
ttcctcaagttcaaaaactaaccagtgataataaattgacttttcttgtaacagctgtaaaagaatgcaagtttttttttctttctctgactgaagcactccccttagcaataccaattcaacatttgtcacccatcagggttatagccattgctatggggatcatacaggaggttgtctgaataagaagcctgttcttcaaataatacagaagagagtggaagcragtgcagacagatcgtgggggaagcgatgaaaggccatgtgtttccctctcgcattcagctttcagtttctggaaaagtatcttttctgtctctggtcgtgaagccattgaatctggtgatgaaagcaatgtaaaattgcttccttattg

SEQ ID NO: 576079 - DNA, 388 bp, Homo sapiens
ttgttgtggcctataagagcaactggaaggtgttttagtttgctagggctgccctaataaaataccacagactgggtaacttaaatggtaggaattaattttctcctagtcttgaggctgaaagwccaagaccaagatgtcagtaggtttggtttcttctgagggctttttccttggcttgcagatgctagctttcctgctatgtgctcacatggtcttctctgtgcatacctgggtctggtatctcactctgtgtcctcatcatctcctactcttattagaacaccagtcacagtggattagggctcaccttaatggcctcatttaacttgactgccctatccctaaatgcaatcttattctgaggtactgaggcttagggcttcaa

SEQ ID NO: 576080 - DNA, 590 bp, Homo sapiens
gtcatctcttctgaattttccatgttcattttggaataaggaggtgtgaagtaatacatataaggaaatacaaattgctcaataaacagtaagcggcaaattagagaaggtacaatagaggacacaaagactaaaacgaaaataatttaaactggtagttctcaaaatgggaaagcatcaaaatcatacagaatgcatctccaaaataaataygtccagacggcacccagatccagtgaataaaaatgtcagggagtggaaaaaagagtacgatttttacaaagctccgtaagtgatttcgattctcaaccctatctaaagtcaccagctgaatgcagatagaatttgtaactgagcctgagcatttattttcgtggctattttccttctgttcattttgaaataaaaagtgtgcagtgatcaggtataaggaaacaaaaattatccaatgaatattaagcaatgagttaaattaaaattagaatgtgattcctatttttcattgactacattttcttcttggacatgtaaaacaattcttttaaaactcctttttagtttaagaaaacagaatacatgaagtttcacag

SEQ ID NO: 576081 - DNA, 596 bp, Homo sapiens
gaaaccccacctctactaaaatacaaaaaaattagctgggtgtggcagcgtgcacctgcaatcctagttacttgggagactgaagcaggagaattgcttgaacctgrgaggcggatgttgcagtgagtcgagattgcgccattgcactccagccttggggacagagtgagactctgtctcaaaaagaaacaatccatcaatcaataaaagtgctacacacacatgtatacatatgtaactaacctgcacattgtgcacatgtaccctaaaacttaaagtataataataataaaataaaaaaaagaaaaagaagctagaagaaaaaaaaaaggtgctactccagtgaacacagaaatacgagaaagtgaaacagccttattgctagtatgggaaagattttagtggtctggatagaagattaaaccagccacatcattcccttagacaaaagcctaatctagagcaaggcccaaactctcttcaattctatgaaggctgagagaggtaaggaagttgcagaagaaaagtttgaggctagcagaggttggttcatgaggcttaaggaaagcaaccatctccataacataaaagtacaa

SEQ ID NO: 576082 - DNA, 485 bp, Homo sapiens
tagtttgtttggctgtgcatagctctttagtttaattaggtcccacttgtcaattttggttttgtttgcaattgcttttggcatcttcattatgaaatctttgccagttcctatgtccggaatggtatttcctggtttcattctagggtctttgtagttttaggttttacatttaactcttttatccaccttgagttgatttttgtatatggcaaaaggtaggggtccagtttccatcttctacaaatggctaaccagctatcccagcaccagttattgaatggggattcctttccctgttgcttgcttttgtaagcattgttgaagatcagatggttttatttgtcaaagatcaacarctgtatttccagattctctaacatgttccattggtctatgtgtcggttagtgtcgtcctgtagtatagtttgaagttgggtactgtgatgcctccagctttgatctttttacttagcatttctttg

SEQ ID NO: 576083 - DNA, 642 bp, Homo sapiens
ggatatgttaaattcaacactattcaaaatagcaaagatatgaaatcgacccaaaagcccatcaacgatagattggataaacaaaatatggtacatatatgccatggaatactatgtagccataaaaagaaatgagatcatgtcctttgcagggacatagatggagcaagaagccattattctcagaaaactaatgcaagaacagaaaactaaacacatgttctcacttataagtgggaactgaacaatgagaacatatggacacggggaggggaacaacacacactggggcctgtcaygtgtggttggggaaggagagcattaagaaaaatagctaatgcatgctgggcttaattgctgggtgatgggttgataggtgcagcaacccaccatggcacacatttatctatgtaacaaacctgcacatcctccacaagtaccccagaactttaaaataaaataaaataaaataaaataaaaacttttaacactgctttattgttctggtatgttgtatctttgctttcattagtttcgactaatttattgatttctgccttaatgtcatggtttacccaaaagtcattcaggagcagattgtgtaattttcatttaattgtatggttttgagagagatatttg

SEQ ID NO: 576084 - DNA, 564 bp, Homo sapiens
gtagacatgggctcagagtgagataaaacctttgaaaaataagagacctgccatttctgttaagattttaggtatcccatgtcccccagtaaatagggtcatcccctttaaaaagtaaaagataaattgatttagcttgcatccctaccacaaagtaagaagcacaaaactttgtagctcttcaagctctgtatgcaagctattccatacctaagaatagtctttggcccatatgctgtgtaacacaaaaggctatcagttttgaacagaatgtgagcagataaaggctgtttagcagatccaggttacattgcaaacatccctgctgcttgggtcatataatccagcagactttgtgctcttggaagagttgattgtgggtaaaatctagagtacataccaagagttagtgggaaaattacaacattcatttattaagttctggaacaagatcattcctcctacagtagatgtattagtccatttctatactactataaataaatatccaagactgggtaatttataaaggaaagaggtttawttgactcacagttccacata

SEQ ID NO: 576085 - DNA, 616 bp, Homo sapiens
atctataatcagtgaacatatatacacatcttagaaatatatctactaggtaattactgagtcataaaatatcagtatattcaacttcagttaataccatcaaagaattttataaacagtgtaaaactaatttgcatacacaaaagtagtgaaaaatggcctactggctcaacactctcatcactatttggttgccatttttttttcatttttatatgaatgtagtatattaactttcgatttcctgatatataattgaaaatataaacacacacagacactcctcttcgatttcctcagttttgatagtttwttttctatttgattgcctgctttattgattaaaaagttcagttgtccatatattctgtattggagaaacatgtgaagatctgtatctcaaatatctgcttcaacttcgtggctttcatttttgctatttcaaggatatattttgataatcgaaagatattaattttttataaagtgcttaactttaatgtgatctaattaataatttttctttatagtaaacgctattttttgcccttttataaaaatacccacctgtttctaaaaatagttttgtaagtttccttctaaaaagttcattaat

SEQ ID NO: 576086 - DNA, 574 bp, Homo sapiens
tttttgcatcgcagagagaaataaattatctttacttcttttcattgctgataattctacctctacaaaaatagaatactgttaatttttcaattaggtttttctgtcatattatttttactaaatatctctggtatggctggcctcttcatatgagacaggcataatttttaaatcacatatcatcacattttgtatgatcggtatttcttcaaatatgattcttaaaacaaagggtgtctgcaaattctaagtaatatttctccccacagtttgaagttatgttagtctagattcaggctatatcttasttataaaaccattctgtcattataggggaggagaatttcttccttccattgagattgtaaaactccaacttgtccaacctattacatttgtggtaaggacaatggacttcatgttatcatgttcaaagtcaaaatgattattgttcaagtctctgtgtaccgtacaaataaaagcatgtttgtcaggacaataaatgctagctatcatttcaacaaatgctataaaatatgggtggtttcactcgctgaaattttatttctta

SEQ ID NO: 576087 - DNA, 594 bp, Homo sapiens
catattatttttactaaatatctctggtatggctggcctcttcatatgagacaggcataatttttaaatcacatatcatcacattttgtatgatcggtatttcttcaaatatgattcttaaaacaaagggtgtctgcaaattctaagtaatatttctccccacagtttgaagttatgttagtctagattcaggctatatcttagttataaaaccattctgtcattataggggaggagaatttcttccttccattgagattgtaaaactccaacttgtccaacctattacatttgtggtaaggacaatggacttcatgttatcatgttcaaagtcaaaatgattattgttcaagtctctgtgtaccgtacaaataaaagcatgtttgtcaggacaataaatgctagctatcatttcaacaaatgctataaaatatgggtggtttcactcrctgaaattttatttcttagtcaagtaaatcctgatatgaatcaggaaagcctttttccatttgtaattctatcttgtggaacgttaggtttctgaggtctcagtggaggcaaggtgacaaaatgaagtagaaggaagtggcacaa

SEQ ID NO: 576088 - DNA, 360 bp, Homo sapiens
tctagccaacgaccttggtgcgaaaataaccccttgacagtgaatctctacattagtggcagtaagaaggtgacttatcccatttcaacaattaaagggactttataacagtcacatttacccagatgtactgaacaagggtactgaaagaaaaygtttagtcagagaaaataaagcatgagagatgtagcttcacccacaaggggaatagtaatatgctagtccacttcttcacagccctgaacttcagattatattattactactcccaagcaaagaaggaggccctcattgttcaaatcctaacttcaaaactatgatgttaaaactctccaggcactggtctgattacatagacaa

SEQ ID NO: 576089 - DNA, 623 bp, Homo sapiens
gacttacgggcacattattttccacttattacagaaaatcttggtgcctctatctttggatcacgtggtgggaaaacatatcttaaaaacagtacctctgaaaagaaacagaggggatgaatccaatccactttgaccaataatggttaattggaatcaaaactgattcaatgttaaaatgctactattttaaaaaatcatcctagataataaaattattttatttatttttgctttaaatmaaaactggtcaatttactggtattcaacagttttagaaaataaaataaatgactttgatatcggaaaaatttcaaatcttattttttaatttttatatcgtgtcttatcttgttagtagtttcatggaaaagaatgaagcaatgttcattcaaatcattctgtttccataataataagctctgatgagatattttattgtatattttgtacaatattttattgtatatatcagtataattcaggtgtgttccccactcccatgtgtcaaagaaaggtccttatgcctgaaggaaaaatctctgttatcaatgtggaatagcttgttatatcagttctcatgatcataggacacaaaactgacatattttaacttttttttc

SEQ ID NO: 576090 - DNA, 553 bp, Homo sapiens
tccaggtgctctgtataatctaatatttggtatttggctcatgagtttcataaattagtaaataaatmcaaataagaaaaagctttgttataatcaaagtaatataaataagtaatagctagctgaaatgccattttatttcaaaataaagaaatatggaagagacttattatgaggaaataccatatgataaattgtttaaattcactagtgtttggtatattgactttcagaataatcaaatttgtagtcataaaatccaggccagtctttagataatgattaaataggtactacattttaaaagatgttttctcttttaatgtaaattggtaaagttttaagttcatttcttcttcaataacatacatgtgtgtgaaaataaccagtaattcaaccttgaatactttggttccttgcttgtaagccttaagtttcattgtcctttgacttctcctagcctgtctcagaaataaagcctttagaactcaagtttcgattactggtgtgagtggagtgtcagtaagaaagtgaaaaaaaggctgaaaataat

SEQ ID NO: 576091 - DNA, 238 bp, Homo sapiens
ttttccctacagaaatgttctcagtggagtaaaagygttgtttattcttcagaactattctcttaacaagagtgtagtgacaactggtatttaaataacatcaaaatacgtgaataataacagataaattactcagccataatgtttttgtttcttctaagagtagctcctattgaaataatcatcactcagataaaaattatgtaatctggaaaagatgttaaaaaagagaccaaca

SEQ ID NO: 576092 - DNA, 554 bp, Homo sapiens
attaatattctgcctctaattaagaacatagaaaaaagaagcagataatttagataagattgcattgaacccatctatatagggtacacaagagaaaaataagataactagttcaggtgagaactgtttccttagtcatacaggtaaagggttatcatgaaatccttagtgaggaggaactgaagactgatgccaaaatttactatatatccttgatagctcagtaaaatatagatcatggttttaatatagaattattaccttgctcttcataaattctttacacatattctcaaaatccaaaattataaattttttgaagtactatcatgggtagaaggcagcatcaaatatagataatggggtctagtactcaaatatggatattaaataagcaccttatttgtgaaattatctgtcaaaaaacctttattctctctgctttgctctattttaaagtctgcctggttgtgtgttgagtgttgtatgtggtagatatttcccccttttcatrctaagtttatgccatacaacattgctaggtattaagacac

SEQ ID NO: 576093 - DNA, 481 bp, Homo sapiens
gggaacaaagtttttgctgaagaatcttaacttctgagtctaaaccttctgccaggatgcattcattgtttggaaaattagtactcagggaatatgtagtggacatctgttgatttattctacttaacacccattttctccttctgttagaagcaactcccaccttaactctttgcccaattacacacagaagcacacacacatgcatgtttctttagaactgcttctccccattaaattccacgtcattctagtagagcttctaatcatagtatcatacgcaaaggccatggtaaacagccccartgattgggtttatcacagcaagctagctgttctttcttgagtttacatatattgaatcggaaaaataagtttctctcctcctatgagactgctaaattatagtaatacaagcttggggttaaccatagatattttctcccatcctcccacttcatatggagacagaaagaaagag

SEQ ID NO: 576094 - DNA, 515 bp, Homo sapiens
ttttactattctgcaaacagtgggaataaaattgggtaaaatttttagtgatacatcttaaccattttttacatctctactcgactgcaggtttgagtagagcatcttaatatttactcaaagatatggggttagaaaggacttgagggatccttttaataaaaaatcttttaataaaatatccagagttagtctggcattcctgccaaaaaacacctgagaataagctttagaagtctgtacaactcaggttccactacasaccttcccaatcttcaggaactgcctctaggaatgtgaattttgataaaaacctctgtcattctgatgatgttcacctctgattgacaacatcattcatgcatacattgattttctctgtcatgtgcctcagtaaacacactatgctctgagactagagaccccttgcagtcaacattaggtaatatgggactcgcacaaggaggcgcttaataaatttttgtatcataaataagtcaagctgctttgaattc

SEQ ID NO: 576095 - DNA, 584 bp, Homo sapiens
aataaatgagatcacaaaggtgcagccatatatacgaggatgcatgggaatacaattttttttaatgtaactggctatgatggaggtcagtttgcttgatttgtgggaaaataacactcttcttattgcagaaactatatttcacttaatgcatgtacatttttaacttgcacaaagaagtaggacaatacatagctgggtgttttgtttttcagcacccattcccccctttaccactttttttttttcctttagagaaggactgttctcctatcctctatctgtgtctttggactataaataataccactttactgatatgaggataaacatatcatgatgactaagattgccaaattggaatatctctactcctggccacaataattggtttggaaatgagcatrtagcctaaactatctcaataagaatcagcctccattttttattttattttatttttattttattttattttattttattatactttaagttttagggtacatctgcacaatgtgcaggttagttacatatgtatacatgtgccatgctatgtgtgggtgtgctgcacccattaatgc

SEQ ID NO: 576096 - DNA, 584 bp, Homo sapiens
aataaatgagatcacaaaggtgcagccatatatacgaggatgcatgggaatacaattttttttaatgtaactggctatgatggaggtcagtttgcttgatttgtgggaaaataacactcttcttattgcagaaactatatttcacttaatgcatgtacatttttaacttgcacaaagaagtaggacaatacatagctgggtgttttgtttttcagcacccattcccccctttaccactttttttttttcctttagagaaggactgttctcctatcctctatctgtgtctttggactataaataataccactttactgatatgaggataaacatatcatgatgactaagattgccaaattggaatatctctactcctggccacaataattggtttggaaatgagcatgtagcctaaactatctcaataagaatcagcctccattttttattttattttatttttattttattttattttattttattatactttaagttttagggyacatctgcacaatgtgcaggttagttacatatgtatacatgtgccatgctatgtgtgggtgtgctgcacccattaatgc

SEQ ID NO: 576097 - DNA, 596 bp, Homo sapiens
agttatttaaaaatatatgtcagatataatacacagaaagtgtctgcatacactgaataaaaaatatttaaaattcatgtaaatgtattcgccaatggttctgctctacctttgggaatgttttatactgcagggatattaatgtatactcttccatttatgagcaatakaactggagtcaacagctggtgcctcataagtttaaaggtagtgatacaaatggtatgggatttaatcactgttcctgtaactgaagcttttctctctattgagcttggttgtgttggtaaaaaaagatctactgactgattttactagggtttctgggaaatctttcagactaatagatagacttgtattaatagagtttcactggaaggttagcatcttgaattgatcacaattcctcattttgtaacttggcactgtagtaaaaaatgtcttgatgcagttctgatagctttctgagggatactgttataatatcaagagtttaagcctccaatttcttatttattgtaatgtgtcttctttcttaagaaaatcaggatatgatttctgaataaataaggcggattgaactgatgcttttactt

SEQ ID NO: 576098 - DNA, 557 bp, Homo sapiens
tatgttgatatcccagtttccaccaatccctacattcctgccttacataacgtaatcctgtagaggcttcctactctgagtctggattcaaccgtataatttcctttgttatatgaattgtaagcagttgtgacamgcaaaactaaaaaataaaaattgaagagtttccaaaatttgcctacactacgatacctctgccatggctatggaaacatgcccaggttagcctgctaggaaatggaagacacacggacgcattgtctctgtagtacatgtcaaggtctttcgaaataatctgataaacatctgacctctacatatgtgacgtaagccaacagtctttacagaactgcctggccaaacaacagcggattacagaaacatgaatgagctcagccagatttagccaagagcagcccaattcagcagaaccctagtgaaccatgaactgaataaaccttgattgttaaatgccacgaggttgcccaagatggttttcacccatcattaacgtggccctatatacttgatgaagagattagtgccaaaagtaaatg

SEQ ID NO: 576099 - DNA, 415 bp, Homo sapiens
ttcatgctctaaatttaatctcaggattttaaaacaagttataaagtactcaagagatgttcytgttatctacaacatcagcagaaaactctgaagtgagttacaaactttcaggtgcaataagactatcgatcactattctgtacataagcttcaagtgttttccaagtggcaggtaaaagcttttttataaaaaggaatgtatacaagaatgctttgctgtgagcattgcatataaaagcatgaatagcttggcagaaaatcacagaaaaataggctaacacttgcaaaaagagtgttttggagagtggatgtttatttacctaattcagttctacttagacttctcagactgaaaaataaaacaaccttgatacaacatctaatagccattgaaatatctagtggggcaagt

SEQ ID NO: 576100 - DNA, 476 bp, Homo sapiens
aataggaacttcaagttttaagtaggtagattaaaaatgtgtagaaataatgggagtctcagcttcaaccagtagcatcaggtaaaattataaagagtttataaaccatcttatactcaaattcatactggacctggaggaaaaaaaaccatatatataaaaacatatatatcaataaatatatatataaacatatatatatacacaaattatatgtgaacatatatatgaatatatatattcatatatatatgaacaaaacatatatatatatgttcatatatatactttaagttctgggatacatgtgcagaatgtgcaggtttgttaygtaggtatgcacgtgccatggtggttgatgggtgcacccatcaaccctacattaggtatttctcctaatgctatttctcccctagtccaccacccccagacaggccccagtgtgtgatgttccccttcctgtgtccatgtgttct

SEQ ID NO: 576101 - DNA, 476 bp, Homo sapiens
aataggaacttcaagttttaagtaggtagattaaaaatgtgtagaaataatgggagtctcagcttcaaccagtagcatcaggtaaaattataaagagtttataaaccatcttatactcaaattcatactggacctggaggaaaaaaaaccatatatataaaaacatatatatcaataaatatatatataaacatatatatatacacaaattatatgtgaacatatatatgaatatatatattcatatatatatgaacaaaacatatatatatatgttcatatatatactttaagttctgggatacatgtgcagaatgtgcaggtttgttacgtaggtatgcacgtgccatggtggttgatgggtgcacccatcaaccctacattaggtatttctcctaatgctatttctcccctagtccrccacccccagacaggccccagtgtgtgatgttccccttcctgtgtccatgtgttct

SEQ ID NO: 576102 - DNA, 519 bp, Homo sapiens
gttagattttataaatgcccatcaatgataatcagtatatcagtataactccaagaaacaagatgagagcaattgtcccttaaatttcacactgtaggtaccttacttggtttaccctacttctggccttttgatatgaagatgcaaagaaaacacatagtggatctctggggattcccaactgttaaaacatcctcctgttctctaaaggaactatgaaaacaaatccttgtgaataatttcatgctgtggtgttttctgtatattttaaggtttatttcaggaatttgtggaaattgaaaaaatgacagttgrtacatgctgcttgcattatattttaagaaatcttccctgcttttgctatatttgctagacatagtggttctaaatataactgcctggacaaagtgttgaactgcagaggtaacacacatgagaataatattcctactctagacagacttctcccattctcctatattttttcattagtgatttccttcaaattatttctgatca

SEQ ID NO: 576103 - DNA, 585 bp, Homo sapiens
tgaaatgagataattagtgaatatttagttgtttttattccaaaagaaaaaaaaataattaaaagacttacacaggaaattatagtgtgtttctaaaattgatttcatattaattatattaatgatttccatctgagagcctgccacagactatcaactctgcatgggcttatcctacttatttcatattgattgttgtaataaatatatcattccattrcaagagctagcatcagtgctaatcagaatgtcaccaagaataaaaataggaaatgaagagattatacttgagcaaaatgacatgattcatctgatatcataagaatcaatgaatagtagtagaagacagataacaccctttgttactgttgttggcaaggatttttcttgtgctcatcaaacggatttttttttcttttctttttttggaacatggaagaatcggagaattttgtgcagcacattccgctgcggctgacaaatggatcgagagttagcttcctataccaggatgataattggcttagaacttctctattaatagcagtaagtctggccagagattgatgtaggcacttcacccaa

SEQ ID NO: 576104 - DNA, 585 bp, Homo sapiens
tgaaatgagataattagtgaatatttagttgtttttattccaaaagaaaaaaaaataattaaaagacttacacaggaaattatagtgtgtttctaaaattgatttcatattaattatattaatgatttccatctgagagcctgccacagactatcaactctgcatgggcttatcctacttatttcatattgattgttgtaataaatatatcattccattgcaagagctagcatcagkgctaatcagaatgtcaccaagaataaaaataggaaatgaagagattatacttgagcaaaatgacatgattcatctgatatcataagaatcaatgaatagtagtagaagacagataacaccctttgttactgttgttggcaaggatttttcttgtgctcatcaaacggatttttttttcttttctttttttggaacatggaagaatcggagaattttgtgcagcacattccgctgcggctgacaaatggatcgagagttagcttcctataccaggatgataattggcttagaacttctctattaatagcagtaagtctggccagagattgatgtaggcacttcacccaa

SEQ ID NO: 576105 - DNA, 585 bp, Homo sapiens
tgaaatgagataattagtgaatatttagttgtttttattccaaaagaaaaaaaaataattaaaagacttacacaggaaattatagtgtgtttctaaaattgatttcatattaattatattaatgatttccatctgagagcctgccacagactatcaactctgcatgggcttatcctacttatttcatattgattgttgtaataaatatatcattccattgcaagagctagcatcagtgctaatcagaatgtcaccaagaataaaaataggaaatgaagagattatacttgagcaaaatgacatgattcatctgatatcataagaatcaatgaatagtagtagaagacagataacaccctttgttactgttgttggcaaggatttttcttgtgctcatcaaacggatttttttttcttttctttttttggaacatggaagaatcggagaattttgtgcagcacrttccgctgcggctgacaaatggatcgagagttagcttcctataccaggatgataattggcttagaacttctctattaatagcagtaagtctggccagagattgatgtaggcacttcacccaa

SEQ ID NO: 576106 - DNA, 585 bp, Homo sapiens
tgaaatgagataattagtgaatatttagttgtttttattccaaaagaaaaaaaaataattaaaagacttacacaggaaattatagtgtgtttctaaaattgatttcatattaattatattaatgatttccatctgagagcctgccacagactatcaactctgcatgggcttatcctacttatttcatattgattgttgtaataaatatatcattccattgcaagagctagcatcagtgctaatcagaatgtcaccaagaataaaaataggaaatgaagagattatacttgagcaaaatgacatgattcatctgatatcataagaatcaatgaatagtagtagaagacagataacaccctttgttactgttgttggcaaggatttttcttgtgctcatcaaacggatttttttttcttttctttttttggaacatggaagaatcggagaattttgtgcagcacattcygctgcggctgacaaatggatcgagagttagcttcctataccaggatgataattggcttagaacttctctattaatagcagtaagtctggccagagattgatgtaggcacttcacccaa

SEQ ID NO: 576107 - DNA, 642 bp, Homo sapiens
attaccatatcccaaatgtatttgagaaatggcagtgcatccaagttgtcattttccgtcctacaactgtggcagacatgtaatggatttttgtactcattttcttttgaggctgggcaaggtagtcactcccaaattactaacactggcttggtaaatggatctcatttaccatccctgttcaaagcggtgctgctgtattccaaacacatacttgtcctgagataattacatagcaaaattttggrttgtgaaatcttaaggtgaaaaacagattaccagtgaaatttgaaaataatatagaatcattaactttttttgttgttttttgactgagtctcgctctgtagcccagattggagtgcagtggtgtgatctcggctcactgcaacctctgcctcctgggttcaagagagaattactaactttttatatcaactcagaaggttttcttttctacatgtcaaactaaacaagtcttatgacccttcctattgctgaaacatagattcaaagacaaaaacaagaaaccaaacaaaaaagagaaacctaggtagctgcagcaaatattttgcatgggtactccatatattgtaggcattcaatggcttactatcaactatttgtgctgctgaggaatga

SEQ ID NO: 576108 - DNA, 642 bp, Homo sapiens
attaccatatcccaaatgtatttgagaaatggcagtgcatccaagttgtcattttccgtcctacaactgtggcagacatgtaatggatttttgtactcattttcttttgaggctgggcaaggtagtcactcccaaattactaacactggcttggtaaatggatctcatttaccatccctgttcaaagcggtgctgctgtattccaaacacatacttgtcctgagataattacatagcaaaattttgggttgtgaaatcttaaggtgaaaaacagattaccagtgaaatttgaaaataatatagaatcattaactttttttkttgttttttgactgagtctcgctctgtagcccagattggagtgcagtggtgtgatctcggctcactgcaacctctgcctcctgggttcaagagagaattactaactttttatatcaactcagaaggttttcttttctacatgtcaaactaaacaagtcttatgacccttcctattgctgaaacatagattcaaagacaaaaacaagaaaccaaacaaaaaagagaaacctaggtagctgcagcaaatattttgcatgggtactccatatattgtaggcattcaatggcttactatcaactatttgtgctgctgaggaatga

SEQ ID NO: 576109 - DNA, 642 bp, Homo sapiens
attaccatatcccaaatgtatttgagaaatggcagtgcatccaagttgtcattttccgtcctacaactgtggcagacatgtaatggatttttgtactcattttcttttgaggctgggcaaggtagtcactcccaaattactaacactggcttggtaaatggatctcatttaccatccctgttcaaagcggtgctgctgtattccaaacacatacttgtcctgagataattacatagcaaaattttgggttgtgaaatcttaaggtgaaaaacagattaccagtgaaatttgaaaataatatagaatcattaactttttttgttgttttttgactgagtctcgctctgtagcccagattggagtgcagtggtgtgatctcggctcactgcaacctctgcctcctgggttcaagagagaattactaactttttatatcaactcagaaggttttcttttctacatgtcaaactaaacaagtcttatgacccttcctattgctgaaamatagattcaaagacaaaaacaagaaaccaaacaaaaaagagaaacctaggtagctgcagcaaatattttgcatgggtactccatatattgtaggcattcaatggcttactatcaactatttgtgctgctgaggaatga

SEQ ID NO: 576110 - DNA, 642 bp, Homo sapiens
attaccatatcccaaatgtatttgagaaatggcagtgcatccaagttgtcattttccgtcctacaactgtggcagacatgtaatggatttttgtactcattttcttttgaggctgggcaaggtagtcactcccaaattactaacactggcttggtaaatggatctcatttaccatccctgttcaaagcggtgctgctgtattccaaacacatacttgtcctgagataattacatagcaaaattttgggttgtgaaatcttaaggtgaaaaacagattaccagtgaaatttgaaaataatatagaatcattaactttttttgttgttttttgactgagtctcgctctgtagcccagattggagtgcagtggtgtgatctcggctcactgcaacctctgcctcctgggttcaagagagaattactaactttttatatcaactcagaaggttttcttttctacatgtcaaactaaacaagtcttatgacccttcctattgctgaaacatagattcaaagacaaaaacaagaaaccaaacaaaaaagagaaacctaggtagctgcagcaaayattttgcatgggtactccatatattgtaggcattcaatggcttactatcaactatttgtgctgctgaggaatga

SEQ ID NO: 576111 - DNA, 556 bp, Homo sapiens
ttgaaaacaatatcttctgaagaagtcaattatcaaatgcttaatattaaaagtaagaaaatgtataaaatgtaaggctctgtaataactacctgaagcagaaatggacttacagatacacaaggcaacaaactatactgtagtagagtagttgaggaaaatcaagtgtagcagcaacaaaaacaggcaccaatatcagaaatgccaatttaaaaaataattattatttataaataaagaggtaaaaatgtatatacttctcttttcaagagtaaatttagccttttcagcaactattattatttttccttcctttataactttctgagttataaaagaccatgaaatgtcatggcctctacctgattgttacaatcagattctgcagttcaggctgagcaagtacaagtcaacaattcctcaagaacaatgattctttgaataccrttgtcttacacaaataccagtaaaggtagaattggtataagaagctggtgggaactaaattagatagagaaatatgaaatgagaatgagagtcttgaaacctgaaatct

SEQ ID NO: 576112 - DNA, 547 bp, Homo sapiens
ccacatccacatttatttttcatgataatcctttctctatgtttgggttattttgagatggctgaggggcctcaagattcctagaggccttacagtttgattgagaggatttgtgaagcmcacgcttagtctcttgaaagggccctctgtgactgaatattgtgaccttttgatctttctcaggtttgagaaaaaggttgtataggtacacccatttttctatgccacatttgtggaagaaatttcttaattttaacagcctttgccataaggacaggccaagaattttcaaaaccatcagtccttagatccttttgatttaatagttcgtcccttaattaacttctcttctttcacattttattataagcagcaagaagcaatcaggatggcacttgcacgttttgcttaggagtttctttagctgtataacaagttcaacacttacaagttctgcttttcacataacttcaggggacaattttgctaagttttgtgctactatttaacaaggacgtccttttctctagtttttaaaatatgttca

SEQ ID NO: 576113 - DNA, 666 bp, Homo sapiens
tttgtgctactatttaacaaggacgtccttttctctagtttttaaaatatgttcatccataacttcagagcgctcaacagcagtatcctctaggtccagattttcaccagccacttgttcaaggtaatatgggctttctctatcattcttcccaaaattacttaagtatttgtttaaaaagcacccatttccaggcatcaaaatatatgttagttttatattgctgcataataattaccacaaaattaacagcttaaaaataaatctattatctcacagtttctgtgggttttgagtcagagcactgcttaactgggtcttctgcttcaggttttcacaagtctgcaatcaaagtgccagcagggaccgcagtttcatatgagacagctgattattttttaaactcacacggttgtttgtgatcctcacagttgtaagactgaggcccttagatccgggagttaagtcacagtcctttgttgtggttgcctcccataatatgatggttttcttyatcaagccaataaagacaacaagtctgctataaggatggagaattataaaatgtcatgtagtcatgaaagtcatgtaccattactttttccatactcttttagttagtaatatatcacgggttccttccatgctgaaaaggaaggggtaata

SEQ ID NO: 576114 - DNA, 527 bp, Homo sapiens
gtcaccagggcatgtcagagacctttgtgtcagccccttctatcacaggcccagagacttaggaggaaaacatggttttgtgggcccggcccaggattcctctgctgtgggcagtctagagacttggtgtcctgcgtcccagctgctccagcagtgactaaaaggggccaaggtccagctcaggccatggattcaaagggtgcaagccccaggtcttggcagcttccacatggtgttgagcctgctagtacacagaagtcaagaattggggtttggaaacttccacataggtttcagaggatgtatggaaacactggatgtccaggcaaaagtttactgcaggggaaaggcactcatggagaacctctgctagggcagtgctaaagggaaatgtggggtgggaacacccacaccragccaccactggggcactgtctagtggagctgtgagaagagggccaccatcctctagaccccagaatggtaggtgtgccaacagcttgcaccatgcccctggaaaagccaca

SEQ ID NO: 576115 - DNA, 583 bp, Homo sapiens
taacatttgagtcagtgggctgggaaaagcagacccacccttaatttgggtgggcataatctagtcagctgccagtgtgaccagaataaaagcaggcagaagaaaatgaagagatcagactggcttcccctcccagcctacatctttcacccatgctggatgcttctgcccttgaacatcggactccaagttcttcagctttgggactcagcctggcttccttgctcctcagcttgcagatggcttattgtgggaccttgagatcatgtgagttaatactccttaatgaacacccctttattaacaggatagatatacatctattcttttagttctgtccttctagagaaccctaatacaggtggaagggacttgccttgtcktagatgagacattggactgtggacttttgagttaaggctgaaatgagttaagactttgaaggactgttgggaaggcatgattggttttgatatgtgaggacatgagatttgggaggggccaggggcagaatgatatggtttggctgtttcctcactctaacctcaccttgaattgtaactcccacaattttcatgtgtgg

SEQ ID NO: 576116 - DNA, 643 bp, Homo sapiens
acccagtgttgggtatgtctttatcagcagtgggaaaacagactaatacacatatgtttaagttactgcacttaatctcatgaatagtttgactaccttgaataccaagatttaacaatgtaaagtgactaaaataatacttttatgaagctactctgagtattaaattagatcaattctatgcctggtcagagaagaactcattaaatgctaataattatgaygattatcataattttaaaaatgttctcaaattctatatcaagacttagtaaagtcttggtacaggcatggctttcctatattatatctaagatcaaccttgagttctttattcatctatggtcttctttctttggagatcatggcttcctttcactacatgagagaaaaaagtggagacttactcttttattcttcactcccagagttctaaggaaatggaccctcactaagaatatgagcaagatgtggtagaagagtgtggcctgatagcaatttacagaatactccttccatgattatatccccctattctatttgttctaaacactttagatgctaaactaccttgagaatcaagtacaagaaagaccacagataaaatattctgtcttccaaagctttcagaatacattttagt

SEQ ID NO: 576117 - DNA, 522 bp, Homo sapiens
taagaagtggaagaatgtaagcaagaccataagaaaataagagaagaaaaaacccacaaatttaatacagaaggaaaagacctttaggagtggccaggaggtacaagaactcaacaaccatctgaacacaagtattgatgtacaaaagacaaaaaggttagggtttttttgttggtttccgggttttttttttctatttttttttttcttattctgttgatgcactagaggatttcaaactgtaatgaaccatgagcgtatttatatattaatatattcaagtaatctgctttggaatagctgagtaaccctagggawgtataattctttcaaatcatacatacatatttaagagaatggtctttaagtatatataaatatatgtctatgtcatttacaagttcttgtgtattctaatagtctctttacttttctatatacacagtcatatcatctgcaagtgaagatacatttaatccttctaccacacaatttatattttttttgccatggcgttagcta

SEQ ID NO: 576118 - DNA, 656 bp, Homo sapiens
ctgtgttgcttataacagaatacttgaaactaggtagtttataaagaaagtaaatttatttcttacagttttgaaggctgagaagcccaaggtcaagtggtgagggcctggtgagggctttcctactggtggggactctgcagtgttctgagctgacacagggtatcacatggcgacaggaataagcgttctatctcaggtctctctttctcctctgataaagccagtaatgccactctcataataaaccattaatcaatgaatggattaatctattcatgaaggcagagcccaatcgtctcttaaaagccccacctctcaatactgtcatakttcaacataagttttggaggggaacaatattcaagccacagcagtctctatttaaaaaatagtgggatttttttgtttttgtttttgttttttccttttagagacagggtctttctatgttgcccatattggactagaattcctggctcaaattatcctctcacatcagcctctggagtagctgagaagactacagatgtgtaccactacagctgacaaaatagccattttaaataaaatttgtattggtataattttagattcacatgcagttataagaaataataggaatatatcttatctaccatttactttaccatatt

SEQ ID NO: 576119 - DNA, 556 bp, Homo sapiens
agactacagatgtgtaccactacagctgacaaaatagccattttaaataaaatttgtattggtataattttagattcacatrcagttataagaaataataggaatatatcttatctaccatttactttaccatattcccctaaatataacattgtacaaaagtatagtataatatcataaccaagagatcgactttgatacaatccactagtcttactcaggtttctcctcttttacttttgcttggatgtatgcatgtgtatttagtgctatagacttttattacatgtgtacacagattaatgtatccacaaacacaatcaaaattcattttcaccagcaatgtatgagtgacactatttctctccatccttatcaggatttgttgttttttattttagtcattctgagaagggtgcagtgatagctccttgtgactttaatttgcatttctctgatggctaatgatcttgaacatcctttcatgcgattatttaccatctgtatatcttatttagtgaaaggtatagccatgtcttttgctcatttgctaatg

SEQ ID NO: 576120 - DNA, 555 bp, Homo sapiens
aaagccccacctctcaatactgtcatagttcaacataagttttggaggggaacaatattcaagccacagcagtctctatttaaaaaatagtgggatttttttgtttttgtttttgttttttccttttagagacagggtctttctatgttgcccatattggactagaattcctggctcaaattatcctctcacatcagcctctggagtagctgagaagactacagatgtgtaccactacagctgacaaaatagccattttaaataaaatttgtattggtataattttagattcacatgcagttataagaaataataggaatatatcttatctaccatttactttaccatattccyctaaatataacattgtacaaaagtatagtataatatcataaccaagagatcgactttgatacaatccactagtcttactcaggtttctcctcttttacttttgcttggatgtatgcatgtgtatttagtgctatagacttttattacatgtgtacacagattaatgtatccacaaacacaatcaaaattcattttcaccag

SEQ ID NO: 576121 - DNA, 618 bp, Homo sapiens
gatcttgaacatcctttcatgcgattatttaccatctgtatatcttatttagtgaaaggtatagccatgtcttttgctcatttgctaatgggaatacgtggttcttttactatggagttttgagaaatttttgtgtattccagccactaatcctatgttggatacgtggtttgcaaatatttctccaaatctgctttttgtcttcttgttttcttcacatggtctttcctggtattgtcagaagttctcccttttatatgggggaaaaacaaccttacctctgctgccttctcttattaggtttgggtaaagaagtgcaggactttaactgcytccttctgttgggtggggggacataaaacacagtactgctgtgatttcccccaagtccttccttgggtctcaaccagtattccttcctctcaaaatctcttaaagttcacctgtgattgcctcttccactatttccagtgtttatagttgtactatgtgaggacaaacagagaaacattatctccggactagaactataagcatttttgaagaatataaaacatgaaccaaaaaactagatgaacaagaacatgaaagagtggcaacaataaatattgaatgatt

SEQ ID NO: 576122 - DNA, 569 bp, Homo sapiens
ccattctattatctccttaaaatttctacaggccaaaaaatattttgcatccctcataaaactgattttacatttaaatgcaattcattctgctaaaaactaatccttgaataaagagtgattttgtcctggttgtaaatatagggctacagaattgtgtcaactaaatatcttaaakcatttaaattaaatgaaatacaatgctgcataatactatccatatacgcatagagagattatctttaatatatatttttaccaaactaagcccaattagtgtttcaaaatgttttaatgctaacaatctgggaaaaaaatgaaaagaacatagtcttccagaatagattacattttataaatgtacataagatgctgaaatgtagattttatagagaaatgtaaatcttgtgctattactagcataaatttacttatatcaattttagcttcatgtttaaataatttaaaacaatttattaccctgctacccatttaattgacctctttcctattgcttacatcaaattatatgcattaaaaatgataactgttatttaatttgatgtgaa

SEQ ID NO: 576123 - DNA, 572 bp, Homo sapiens
ctgttagtcaactaacagtgacatcttcttaactgagtacataagcaagaattgacacgtaaattggaggtaagatgtggtaaacacttttgctccagaacacaggagatgtaaattttttcaattcacggcttaaccacacaagtgatttttttgtttgttttggcgatccaggtatctagaggatgtggggacatactctctgaagtaaaggagaaatgattacatcttacatgtcataccactaaaaaagaaatgacacatctggtagtcttctggttctataggcaagcagcagcatatttcacacttgtaaataatactgtaccacttttaccaagagacataaaagattatcaggtttgagtaggacccaaaataggaaagggctttgagatccagataatgattctaacagccctgtcatttgatcagtataactcgacagacattagagatgtaagttttgtttttagaaaatattmtttgtgaagtttatggcaaccctagtatgaaaatcacagttttgaacttgttgactaatggaccagcttttgaaatatgcaacaaat

SEQ ID NO: 576124 - DNA, 577 bp, Homo sapiens
gtgaggatctttgaatcctatgctagtgttccctaaatagaattcactatggaagaggtactaaataatcaaatagacaaaattactaagtcaattgacatccactagcatctgccatcagcctgtctagttctagtataatgaatgcatgcaatgagtaagaatagagtcagggacaaaggctaaacgtagtcccaaawgtataagctttcatttaccaaggctgatttatgtagatatggttgcatgtctgttctgccagccatagaccaatgctgaactcctgacctataattatactttgaaggaatcaatacatttttggggggcaggttgataatatcaggtccattccacttgaaagatgaagtgattcatgtggattacaattgatttccattatggacatgagtttgcatttattggctgcagaactttggtgagaacttctctatccaagacctacagagtgttttgttttactgacataggatcctgtataatattatattgaaacaaggaatacactacataaaacacaagatgaagctctggatatataatggaatccactgaa

SEQ ID NO: 576125 - DNA, 616 bp, Homo sapiens
aatcatacttcaataaagtactttgaaaaaataaagtatttacaaagtttaaagagatagttataagctaaagtacattagtcctcttactctgggaaaagtgctaacaaatcctttcaatttattgacaaatttaatcttgtaataactttctaactccattcccctggaacctgattaaaaaatgaagtgtcatctttgttacaaggcaatattgattattttaaaatgaactctgattgggaaagtttatctggattgggagcactgtaaaaaaataaaatacctagttgagagctatatgttagaatatccttagtgacattggaatagagaatattcccaataatgatccctcagtatctatgtctgtgggattgttgtaataaattttggttcttatttggaacatgggcttctaggccaaggtgactctacatcacacccaactgagtctcatttactaactattgaactataacataagktgccataatataaccccaggactgctctacgggctgctctgagtatttccactaaggagaaattcctgctgttgccctgctgttgtgttctgattttttcatcatgtattattctaaatgaacttgct

SEQ ID NO: 576126 - DNA, 522 bp, Homo sapiens
ctcattttagcagtgattactggcaaccagtatttaagtaaaaacatcgtggagattctggggttagccagatataggaaagccaagtctaaatagcaaaggcagatggttaatgaccaaatcattgagaagcattgccggcaggtgcctaagatgcggtctattagaaatgcctaggatttccttggctatgcagggtcttttatggttctatacaaattttaaactagttttttctagttctgcgaagaatttcattggtagtttgataggaacagcattgwctatagattgctttgggcagtatagccattttaatgaaattgattcatcctatccataagcatgggatgtttttccatttgtttgtgtcctctgatttctttgaacgatgttttgtaattttcattgtagagatctttctcctccctggttggctgtactcctaggtattttattctttttgtggcaattgtgaatgtggttgctttcctgattaggctcttggtttggctgttggtg

SEQ ID NO: 576127 - DNA, 593 bp, Homo sapiens
gagagtcagtgttccctgcactgccacaactgtcagacactctgctctgagttcatcttgaaagggacattgacttttgagtttccttaaaattctgcttccagttgtctcaattttaaattgctgtacctcatgtatatgcrgggaggttattatatgtgtgtgtctgtgtgtgcacatgcaagcacagtaaattcgtccacaatactttgtagatgctaaaatgactttacaatatggtctttgactgtatttttgtctaaccattcaggcaaattttactattttcattcaaaatgagtagattttgctaagaatattaagagtttttctggagcagctgtgtttttaaaaatatctatacatatgtcaaatacaaatactgattctcatattaagtgtaaaactaactttttataaaaataatacataacactaatgctgcacatgtaatgaaaacttgttatgttgaaaatatcataaaaatactttattacattgtcaaattaaaagtatgataattttttcaatgtgtagtatatgacaatcacctggaataatttttgaaaatatataacattaacccatatgtc

SEQ ID NO: 576128 - DNA, 620 bp, Homo sapiens
ctcctgcaattgtgacttcagtaatgtgttttcactgtatcataaaatttgaactggttgtggttttcaattgctgtcttctgttttacaaaattacaaataattattcggtaatatttattaactatgtttaccttgtatggatagctgtttrttcctatagcgtgtacagatatatattttcagcaacagtatttttaaactgtaatcattagtaactatattaacccttcattaacatggatatacataaaattgttttaaaattcttaaggaataaaacttcactagtaatttgctacctgtgaatttgttgtaacataatgtcaaagcaatcatactttaagtatgtgggtattttttaaattcacaggtagttatttagtaatctgaggtcatatattaatttcatactaatgttttattatttattaaatatttatattgatacaaaatgttactgttagtatttatgttattgtgtttatggtatagtgttgatgtaattagtatttatgttattatgaattggtttctattatgggatgttgaggatggttgaagtagccaatgttctagtaggtaacatcaccctcaagcagctagaatagaattaacta

SEQ ID NO: 576129 - DNA, 620 bp, Homo sapiens
ctcctgcaattgtgacttcagtaatgtgttttcactgtatcataaaatttgaactggttgtggttttcaattgctgtcttctgttttacaaaattacaaataattattcggtaatatttattaactatgtttaccttgtatggatagctgtttattcctatagcgtgtacagatatatattttcagcaacagtatttttaaactgtaatcattagtaactatattaacccttcattaacatggatatacataaaattgttttaaaattcttaaggaataaaacttcactagtaatttgctacctgtgaatttgttgtaacataatgtcaaagcaatcatactttaagtatgtgggtattttttaaattcacaggtagttatttagtaatctgaggtcatatattaatttcatactmatgttttattatttattaaatatttatattgatacaaaatgttactgttagtatttatgttattgtgtttatggtatagtgttgatgtaattagtatttatgttattatgaattggtttctattatgggatgttgaggatggttgaagtagccaatgttctagtaggtaacatcaccctcaagcagctagaatagaattaacta

SEQ ID NO: 576130 - DNA, 620 bp, Homo sapiens
ctcctgcaattgtgacttcagtaatgtgttttcactgtatcataaaatttgaactggttgtggttttcaattgctgtcttctgttttacaaaattacaaataattattcggtaatatttattaactatgtttaccttgtatggatagctgtttattcctatagcgtgtacagatatatattttcagcaacagtatttttaaactgtaatcattagtaactatattaacccttcattaacatggatatacataaaattgttttaaaattcttaaggaataaaacttcactagtaatttgctacctgtgaatttgttgtaacataatgtcaaagcaatcatactttaagtatgtgggtattttttaaattcacaggtagttatttagtaatctgaggtcatatattaatttcatactaatgttttattatttattaaatatttatattgatacaaaatgttactgttagtatttatgttattgtgtttatggtatagtgttgatgtaattagtatttatgttattatgaattggtttctattatgggatgttgaggatkgttgaagtagccaatgttctagtaggtaacatcaccctcaagcagctagaatagaattaacta

SEQ ID NO: 576131 - DNA, 620 bp, Homo sapiens
ctcctgcaattgtgacttcagtaatgtgttttcactgtatcataaaatttgaactggttgtggttttcaattgctgtcttctgttttacaaaattacaaataattattcggtaatatttattaactatgtttaccttgtatggatagctgtttattcctatagcgtgtacagatatatattttcagcaacagtatttttaaactgtaatcattagtaactatattaacccttcattaacatggatatacataaaattgttttaaaattcttaaggaataaaacttcactagtaatttgctacctgtgaatttgttgtaacataatgtcaaagcaatcatactttaagtatgtgggtattttttaaattcacaggtagttatttagtaatctgaggtcatatattaatttcatactaatgttttattatttattaaatatttatattgatacaaaatgttactgttagtatttatgttattgtgtttatggtatagtgttgatgtaattagtatttatgttattatgaattggtttctattatgggatgttgaggatggttgaagtagccaatgttctagtaggtaacatcaccctsaagcagctagaatagaattaacta

SEQ ID NO: 576132 - DNA, 607 bp, Homo sapiens
tagcattaacagttttagaagagcttatttacccagaatgtttatgtacacattcatttttgctttgtaaattaaaacaaattaaaattattcaaatccaaccccgagattattaagtttttttctgaattattgtaccatacaaaataatataaagcactcttgggactttgccagagtttkccattgagatcttcctccaaaattactctagctttaaattgcttaacttgctatcggagaacattcatatcgaaagctgttaatcatgagcactatagtaatatgaaggcatttaatgttttttcccctctgtgggagattaggtgtcatgttatcacaccataatcattactttgagtgcatattttaattctcttctctccaccaatacacaacttcttctaggcttgtaacgtaacctctatgtgcctatttccatttctgggggaagttattgttattgaatttctactatggctcaattctagtggtttttagactcatacttgacctgatagaatgagtcatgaatgaacagaaacatgctgaaagtgtcatatgtgaatgttgcaaataattaagactcagtattaatgaaggggaa

SEQ ID NO: 576133 - DNA, 607 bp, Homo sapiens
tagcattaacagttttagaagagcttatttacccagaatgtttatgtacacattcatttttgctttgtaaattaaaacaaattaaaattattcaaatccaaccccgagattattaagtttttttctgaattattgtaccatacaaaataatataaagcactcttgggactttgccagagttttccattgagatcttcctccaaaattactctagctttaaattgcttaacttgctatcggagaacattcatatcgaaagctgttaatcatgagcactatagtaatatgaaggcatttaatgttttttcccctctgtgggagattaggtgtcatgttatcacaccataatcattactttgagtgcatattttaattctcttctctccaccaatacacaacttcttctaggcttgtaacgtaacctctatgtgcctatttccatttctgggggaagttattgttattgaatttctactatggctcaattctagtggtttttagactcatacttgacctgatagaatgagtcatgaatgaacagaaacatgctgaaagtgycatatgtgaatgttgcaaataattaagactcagtattaatgaaggggaa

SEQ ID NO: 576134 - DNA, 409 bp, Homo sapiens
tgagagagagagagagaaacagaaaagagagagagaaaaaggagagaaggtatcagaaatcraagaggggacatcactacagatccttaaggcattaaaaggtaataatgaaacaactgtgaacaacttatggcaacaatttttccatggcatttctgtggatacatatgtaaatatgtatatacatatctagctgtactgtatttttagctgtactagaaagctacacatactttttcttaagtggttgtacctttttatgcttctatcagctgcatgtgaaaggtctacttgccacacatcattgccaaaaacttagtgttgtcaatctctctgattttaccctttctgatgaatgtgtccagatatagcatggtgactttaatttgtgcttctcttattttaataa

SEQ ID NO: 576135 - DNA, 409 bp, Homo sapiens
tgagagagagagagagaaacagaaaagagagagagaaaaaggagagaaggtatcagaaatcgragaggggacatcactacagatccttaaggcattaaaaggtaataatgaaacaactgtgaacaacttatggcaacaatttttccatggcatttctgtggatacatatgtaaatatgtatatacatatctagctgtactgtatttttagctgtactagaaagctacacatactttttcttaagtggttgtacctttttatgcttctatcagctgcatgtgaaaggtctacttgccacacatcattgccaaaaacttagtgttgtcaatctctctgattttaccctttctgatgaatgtgtccagatatagcatggtgactttaatttgtgcttctcttattttaataa

SEQ ID NO: 576136 - DNA, 409 bp, Homo sapiens
tgagagagagagagagaaacagaaaagagagagagaaaaaggagagaaggtatcagaaatcgaagaggggacatcactacagatccttaaggcattaaaaggtaataatgaaacaactgtgaacaacttatggcaacaatttttccatggcatttctgtggatacatatgtaaatatgtatatacatatctagctgtactgtatttttagctgtactagaaagctacacataytttttcttaagtggttgtacctttttatgcttctatcagctgcatgtgaaaggtctacttgccacacatcattgccaaaaacttagtgttgtcaatctctctgattttaccctttctgatgaatgtgtccagatatagcatggtgactttaatttgtgcttctcttattttaataa

SEQ ID NO: 576137 - DNA, 409 bp, Homo sapiens
tgagagagagagagagaaacagaaaagagagagagaaaaaggagagaaggtatcagaaatcgaagaggggacatcactacagatccttaaggcattaaaaggtaataatgaaacaactgtgaacaacttatggcaacaatttttccatggcatttctgtggatacatatgtaaatatgtatatacatatctagctgtactgtatttttagctgtactagaaagctacacatactttttcttaagtggttgtacctttttatgcttctatcagctgcatgtgaaaggtctacttgccacacatcattgccaaaaasttagtgttgtcaatctctctgattttaccctttctgatgaatgtgtccagatatagcatggtgactttaatttgtgcttctcttattttaataa

SEQ ID NO: 576138 - DNA, 675 bp, Homo sapiens
ttttagctgtactagaaagctacacatactttttcttaagtggttgtacctttttatgcttctatcagctgcatgtgaaaggtctacttgccacacatcattgccaaaaacttagtgttgtcaatctctctgattttaccctttctgatgaatgtgtccagatatagcatggtgactttaatttgtgcttctcttattttaataacattgagagcctcttcatacatttattggtaatttggatatcctcttctggtctcttgctcattgtctgttagagttattgtcttttccttcttgatttgtagaagtctttttttttaattgttcatgatacaagtcctttgctaattatattcagtattttaaatattttctaattctgtaaattgcctttatactctccaaattgtgtcttttgatgaaaagaagtttctaattttagtatagtttattttatcaatgattttatttatagttactattttttatatcctgtttaggaaagttacgcctatcctaaagtcatgaaagccgtacagttctttttttacagctaaaaawcatgtttaattgatttttgtttatcattatgagaaaagggctgatgttgatattttgtttcatcttgacaatattattcttttttgactgctctgcagggccactatcatg

SEQ ID NO: 576139 - DNA, 612 bp, Homo sapiens
tgatgattatactataattggttttactatgtggaagatctatggtttaaaacagaggtcagcgtttcaaactgtctgtactgcatgccagaactgtagctttgggtaacttacttaaactctctaagccatagtttccttattagcaacaaagataaaaaaaaaaaaaaaaaaaaagaggttaaaactaactttctgtggttggtagagttattgggagcaaagattgagataattcctgtaaagcctcacgccaatgggaagactgtgcaatccacaattttggttcaaaatatggcctttttaaataaaatcttcaattccatctaagaataattttgtacatcttaaacatcagatcaattcaagagaatatttttctagaaattggcatgaattgaaaatacaaagaataattatatgtagtgggcatacagacataattacccacagtcaaacacacaaacaaaaacacaataccagcatgaagtttaagtaatgactaatatatgagccaagtgacttcaggcaaattattttactttatgaacttcagtgttatcatctgtaaatgaatggtcaatctactsataatttagctctgtttcaccc

SEQ ID NO: 576140 - DNA, 542 bp, Homo sapiens
ccttttggatacagataagaatataattacccctgttaaactgcattaataaactagacacattttctcatcccatctacctaaaagtttaattttaggtacctaaaagtttaattgcatgtgtcttttaattatttggtaatagctaatttttaacataattgagcttcataagtagagtcttctccatcatcaaatattaaaggccaattcatatttaactcacatcaaaaagatgcccttcmtgtgcaacacaccacactcattctcatgtctcgtagaacccttcaggctatgtattactatcctttcctttattttttattcatcccttttttctatcccatttataaaattttttttaatttacttggaaaacttatttatatcataattttttcttttctgcactatagccaatggcatagttaagtatatataaaatcttaaaaatcttactcttggaaagacttcacctttcaattactttgtggaaaactacaaaagactgtcactcccttgatctcatcaagggggaaaaa

SEQ ID NO: 576141 - DNA, 506 bp, Homo sapiens
gctgtggcaatttcttaaaataagactgcaatgatgcttgccacrttgattgactcttcctttcgcacaagatttatttgcagtgtgtgatgctgtttgatagcatgttaccatgatataacttctttcaaaatcaaaatcaactttttcaaaactctgccactacattatcaactaagtttatgtaatattctacttcgttattatttcaacaatgttcacaacattttcactaggggtagcttccatctcaagaaaccactttctcagctcattcataagcagcaattccttatccattcatattggactgatcatgagcttgcagcaatttagtcacatcttcagagtccacctctgattttagttctattaatatttccacgcatttgcagttacttcctccaccgtagtcttgaaccccttaaagtcgtccatgaggattggaatcaactttgtcccaacacctcttattgttggtataataactctcttccatgaatcac

SEQ ID NO: 576142 - DNA, 506 bp, Homo sapiens
gctgtggcaatttcttaaaataagactgcaatgatgcttgccacgttgattgactcttcctttcgcacaagatttatttgcagtgtgtgatgctgtttgatagcatgttaccatgatataacttctttcaaaatcaaaatcaactttttcaaaactctgccactacattatcaactaagtttatgtaatattctacttcgttattatttcaacaatgttcacaacattttcactaggggtagcttccatctcaagaaaccactttctcagctcattcataagcagcaattccttatccattcatattggactgatcatgagcttgcagcaatttagtcacatcttcagagtccacctctgattttagttctattaatatttccacgcatttgcagttacttcctccacygtagtcttgaaccccttaaagtcgtccatgaggattggaatcaactttgtcccaacacctcttattgttggtataataactctcttccatgaatcac

SEQ ID NO: 576143 - DNA, 503 bp, Homo sapiens
atagactaggttttggacagccatgatggctcatgtctgtaatctcagcactttgatccaccaacctgagcagatcacatgaggtcaggagtttgagactagcctggccaacatggcaagaccccatctttactaaaaatacaaaaattagccaggcatggtggtacacatctgcagtytcagctaccaaggaagctgaggccccatgagaattgcttgaacctgggaggcgaaggttgtagtgagctgagattgcaccactgcactccaatttgggcgacagagcaagacctcgtttcaaaaaaaataataaataaataaatatatatatatgtgtgtgtgtatgtgtgtatatacatacatacatatatatatatatatcccccccccctaggtattaagcagaattaataaatcaggaagataaatatatcaaacaagtacataattccacttttggctttttgagagaagctataaaacagggaaacttttgacccaaa

SEQ ID NO: 576144 - DNA, 503 bp, Homo sapiens
atagactaggttttggacagccatgatggctcatgtctgtaatctcagcactttgatccaccaacctgagcagatcacatgaggtcaggagtttgagactagcctggccaacatggcaagaccccatctttactaaaaatacaaaaattagccaggcatggtggtacacatctgcagtttcagctaccaaggaagctgaggcmccatgagaattgcttgaacctgggaggcgaaggttgtagtgagctgagattgcaccactgcactccaatttgggcgacagagcaagacctcgtttcaaaaaaaataataaataaataaatatatatatatgtgtgtgtgtatgtgtgtatatacatacatacatatatatatatatatcccccccccctaggtattaagcagaattaataaatcaggaagataaatatatcaaacaagtacataattccacttttggctttttgagagaagctataaaacagggaaacttttgacccaaa

SEQ ID NO: 576145 - DNA, 503 bp, Homo sapiens
atagactaggttttggacagccatgatggctcatgtctgtaatctcagcactttgatccaccaacctgagcagatcacatgaggtcaggagtttgagactagcctggccaacatggcaagaccccatctttactaaaaatacaaaaattagccaggcatggtggtacacatctgcagtttcagctaccaaggaagctgaggccccatgagaattgcttgaacctgggaggcgaaggttgtagtgagctgagattgcaccactgcactccaatytgggcgacagagcaagacctcgtttcaaaaaaaataataaataaataaatatatatatatgtgtgtgtgtatgtgtgtatatacatacatacatatatatatatatatcccccccccctaggtattaagcagaattaataaatcaggaagataaatatatcaaacaagtacataattccacttttggctttttgagagaagctataaaacagggaaacttttgacccaaa

SEQ ID NO: 576146 - DNA, 503 bp, Homo sapiens
atagactaggttttggacagccatgatggctcatgtctgtaatctcagcactttgatccaccaacctgagcagatcacatgaggtcaggagtttgagactagcctggccaacatggcaagaccccatctttactaaaaatacaaaaattagccaggcatggtggtacacatctgcagtttcagctaccaaggaagctgaggccccatgagaattgcttgaacctgggaggcgaaggttgtagtgagctgagattgcaccactgcactccaatttgggcgacagagcaagacctcgtytcaaaaaaaataataaataaataaatatatatatatgtgtgtgtgtatgtgtgtatatacatacatacatatatatatatatatcccccccccctaggtattaagcagaattaataaatcaggaagataaatatatcaaacaagtacataattccacttttggctttttgagagaagctataaaacagggaaacttttgacccaaa

SEQ ID NO: 576147 - DNA, 597 bp, Homo sapiens
gaatgcttcattacgcatactagacacttgttgattttttaaaaggaaatgaatttagaaagcaattttcctcgaaaccagtttttttcttctttggtaaaggataagtcattcttacaactctcaatgatgcaaggtgaaatttatccaattttaagtagggatgctaaataatgtagagaagacacaagcacttgttttggagacagaatatttgccctctgggcccagatgtgccatttaaaattgagtgttctttcattcatttattcattcttgcccttgtttggtaaaggrtattgggaaagatctgtaattaaagataaaagtgtaaaaagaaagaaaaattgccttgaaaacaaaacaaaagtgccagcaacggggctaaaaagataacataatgttatatgcccttgctataaataggtcataatttttgtttcaagatttctagcagccaatgcaaaaaaggaaatcctggtgaaattacacaagtttaggatatcttccagaccacgaatcaaccagtcacaaagaatatgaatacttattttcttaatattaggaacagaaatctcccatgggtcctagtaagga

SEQ ID NO: 576148 - DNA, 400 bp, Homo sapiens
taatggcatattccccttcttcacctggaaaattcctatgtaaatctcaaatattccatcctgttagaaatcttccccaactcaatcagagtttttcaggcaatccactgagctccccaaggaccagttatttgagaaacaactggtccttggagagctgcaaaacaaatttaagagatatagtctcagaaatgttgagaaggataccttttttttttttttttttttaagacggagtctcaccctgtcacccaggctggagtgcagtggtgtgatcttggcacactgcaacctctgcctcctgggttcaagtgattctcctgccccagcctcccgagtagctcggattacaggtgtgtgccascacaccaggctaatttttgtatttttagtagagaca

SEQ ID NO: 576149 - DNA, 321 bp, Homo sapiens
ggtcttaaactcctgtcgtcgggatccgcctgcctcggcctcccaaagggctggggttacaggcatgagccactgctcctggcctgattttgtatttagtacagtattttagttgttgattttatttctgcttttggctttatgtcttgcacgaaacaaatgttacttttgtccctcctctataccaatagatggkgacctcatggaggcatcaaactgctttattggtttcagtatttccaaagcctgtcacaacgtctagcactcagtaggcaactgctggattactgggaaaggaaaaggagaaaagaggaagggata

SEQ ID NO: 576150 - DNA, 345 bp, Homo sapiens
cctctcctcccctcgtctcccttcctmtcccttcctcttttctccttttcctttcccagtaatccagcagttgcctactgagtgctagacgttgtgacaggctttggaaatactgaaaccaataaagcagtttgatgcctccatgaggtcaccatctattggtatagaggagggacaaaagtaacatttgtttcgtgcaagacataaagccaaaagcagaaataaaatcaacaactaaaatactgtactaaatacaaaatcaggccaggagcagtggctcatgcctgtaaccccagcactttgggaggccgaggcaggcggatcacgacgacaggagtttaagac

SEQ ID NO: 576151 - DNA, 607 bp, Homo sapiens
tagctgagcgtggtggcgggcacctgtaatcccagctactagggaggcttaggcaggggaattgcttgaacctgggaggcggcagttgtggtgagccaagatcacgccattgcactccagcctgggcaaaaagagcaaaacaaaaaaaaaggccaggtgcggtggctcaagactgtaatcccagcagtttgggaggccgaggtgggcagatcacgaggtcaggaaatggagaccatcatggctaasagggtgaaaccccatctctactaaaaatacaaaaaattagctgggcgtggtggcaggcgcttgtagtcccagctactcgggaggctgaggcaggagaattgcttgaacccaggaggtagaggttgcagcgagccgagatcacaccactgcactccagtcttgcaacagagagagactctgtctcaaaaaaataaaatatataatatatgtatctatatatagtatttagtgtatgaatgtgtgtgtttggatatatatttcacgttgtaattatgctccatttgtatttgtcacccaataatattccttggatgactttctatatccatgcatatagctgcaaatcattatttttaactgt

SEQ ID NO: 576152 - DNA, 314 bp, Homo sapiens
ggtggcaggcgcttgtagtcccagctactcgggaggctgaggcaggagaattgcttgaacccaggaggtagaggttgcagcgagccgagatcacaccactgcactccagtcttgcaacagagagagactctgtctcaaaaaaataaaatatataatatatgtatctatatatagtatttagtgtatgaatgtgtgtgtttrgatatatatttcacgttgtaattatgctccatttgtatttgtcacccaataatattccttggatgactttctatatccatgcatatagctgcaaatcattatttttaactgtt

SEQ ID NO: 576153 - DNA, 465 bp, Homo sapiens
tgacacatttatttcaagttggcaagacataagttttctgttttttgtttttttagacagtctcactctgttgccaaggaggctggagtgcagcggcgtgatytcggctcactgcaacctccacctcctgggttcgagcgattctcatgcctcagcctcccaagtagttaggactgcaggtgcatgccaccatgcccagctaatttttgtatttttagtagagacagggtttcaccatattggccaggctggtctcgaactcttggcctcaagttatcagcctgcctcggcctcccaaagtgctgagattacaggcatgaactactatgcccggcctctattcctttgatattggaggacagattatgtctatcatttgacagttacaaattatcttgtttaaggaaatacagccatgttttgctctaggaagaattctgacatggtataaaaattaaacaacta

SEQ ID NO: 576154 - DNA, 315 bp, Homo sapiens
ttatattttctgacatgtttgaagaaagactccattaaatagagtaatagtgttaaaatatatgctgcakgtaaatacatattataacatctgtacagtttacaaatgtgaatctaaatgaaaggggacttcatttaatagacattatttagcttaacgtagtacctatgattgatcattaaaattcactctatgtttttgggtattcaaggggtaaaggaaaatgaaattgttatataattgtattgcttgatacataatttattatttcaagataaaccaatatcatttgggtattaaattctaaaattaata

SEQ ID NO: 576155 - DNA, 482 bp, Homo sapiens
cctggcagtgtttctgttgatatattatactcaagaaccatgtggatcttgcatgaattgctctgggtttcactccaacagaaaaaaaaaaaaatccaggcgtggtggctcacacctgtaatctcagcaatttgggacaccgaggcgggcggatcacgaggtcaggagatcaagaccatcctggctaacatggtgaaaccccgtctctactaaaaatacaaaaaaaaaaaaaaaattagccgggcgtggtggtgggcgcctgtagtccctgctactcgggaggccaaggcaggagaatggcgtgaaccctggaggtggagcttgcagtgagctgagatcgtgccactgcactccagcctgggcaacagagcgagactccatctcaaaaaawaataataataataataaaaaataaaaaataaaaaaaataaaataaattttaaaacctggcccacatatctttctgaaataatttcttacat

SEQ ID NO: 576156 - DNA, 616 bp, Homo sapiens
gaaactttaaaagtcaggagagagtggcatgacatatttaaagtgctgaaagaaaagcacttttaccctagaagagtatatctgtaaaaaatcgtcttcaaacataaaagaaaaataaagacttttccaaacaaacaaaagctgaggaatttcatcaacacaagacctattctacaagaaatgctaaagggagttcttcaatgttggggtgaccagacccaacaccaggycgtggggtcaacaaagtctggtggagtcaaaggattgagaaaagacagtttgagagagagaagtggtaccagggggccatcgccatcatggaggctgcaaaggcccagctcagggagcccacactatttattggtaatccaacaaagaaagaggtggttggagttcgaaagggcagctgcatgatctacagctgtgatggtttagcatttatatggaacatgttctgctacttgagaaaatgggaataggagcctaagagggctagaagcaaggagctagcaagtctagacacattccagaggacattatgtcattcatgcaagccccgcctcagctttcttcccaaccctcagcttttttcccaacatgccccccttctcttttt

SEQ ID NO: 576157 - DNA, 620 bp, Homo sapiens
tgatcaagggtattcacaagagataaaggtgaggtagttaaggttgttagatctgtagactctaagaaaggtccattcagctttaagtttctatgtgccatgattccattccattacaacaaagactttagtaaaaatctcatttaaaattgcaaakagatcttggcctttgctgtagaaaattgaggggagagtgccagatggatttattaagtagttttgactcatagtaataacctttctttcaccatctacctaagcatatatttatgttccttcttttgactgctcttcaggccacaagtacttttcagctacctagaactcttcattggccagagttaactcagccaaaccagccttaccaactgcaggctcttccttctcagacctttcaccctgatatagttcggatatttgtcccctccaagtttcatgtaaaaatttaatccaaaatgttaaaggtggggcttaggggggaagtgtttgggttatcggggcagatccctcatgaattacttggcgccatcctcacagtaacaagtgagttcatagtttgtgcaagaattgattgttaaaaagatcctggcacctcctctcccttgctccgtcttgccatg

SEQ ID NO: 576158 - DNA, 511 bp, Homo sapiens
tttttaattagctaggcatgatggtgcacacctgtagtcccagctactcgggaggctgaggtgggaggatcttttgagcccaggagtttgaggctgcagtgaggtgtggttgtacctctgcacttcagtctgggtgacagagagagtcaccatctcaaaagaaaaagataataaagtaatactatgaataactctatgctggcaaatttgataacctagatgaaatggagcaataccttgaaagacacaattttccaaaacmcacacaaaaagaaatagacaattgaaataagcttttatatattaacaaaattgaatcaataattaataaccttcaaaaacagaaaacaccagtcccaggtgggtttgccaaagaattctatcgaacatttaagtagcagattataccaattctctacaacctctttcagaggatagaagcagagggaatacttcctaactcatactagaagactagaattagacaaatacattaattacaagaaaaaaa

SEQ ID NO: 576159 - DNA, 598 bp, Homo sapiens
ttctctcaccacttttactcaacataattgtctgagttttctgttgcttataacagagtacttgaaatgcataatttataaagaaaggaatttatgtcttatggttatgagactgaaaagttcaaggttgaggagccacatctggtgagggccttcctgctggtgggggctctctggagtccagaggtgacaaaaagcatcacatggcgaggggctgaatgtactcatgtgctagctcaggtctctcttcctcttcttataaaactaccggttccctttccgtaataacacattgatactctaatccattcatgagggcagagccattgtgatccaattacctcttaaagccccacctctcaatactgccacattggggattaagtttcaatctgaattttggaggggayattcaaaccacagcaataatattggaagtttagccaaattatgaagcaggagagaaaaaatgtatgagaaaaaaataaataaaaggcacacagattggaaaggaaaattatacatcaccccaagttttttggagagaaagtagtaaaaatgggtatattttgtttagaaagtaatgcaaattaaaacc

SEQ ID NO: 576160 - DNA, 598 bp, Homo sapiens
ggcattgaaataaaacttttaagaagcactctgaaggttttggaatatgctcttgatgccagtgcatgacccctcaataatggggcctttaaaccctgttttttttctttcagaaggacacatgtgattgtccaagtgttctccatgcacacagataagtctgggtgggaatgtaaccgaaagactttttcaagtagagagaacaacttttccgcatcccttcaactatctagctttgcattggaagtgtctctgtgcttcaagaagcatcttctctacattcaggaagttcaccttgttctgcaggtaattggcttcaggctcagagctgccattgcagatgaaatatgactttttacacttactctcgagaataacatgatttacacatgtttttcttcttttacataatgaggttacaggatgagttggaccaattctcaccctaatcgtaagactcagaaaaggaaactttccccgcrtaccagtccactctttgcctaaagctcttggtcctcatgattagatatctaacctggcctaaaaagcaaacatggctccttgcacaaaacataaatctagatttaacagtttctta

SEQ ID NO: 576161 - DNA, 327 bp, Homo sapiens
atcttgggcatctaatatcctatcaatatttaatcaagaaagaagcaggcagatgacaggggtgggggggcaagcaagatggaacaataacttttattaaataatgactttgtaccaaaaacattactgacrttattacttgatccatataacaaataattttgggagtttagttccgccactaaactgtaaaagcattattcccattttatgcctgaggagtcagagctacagatctaaaaagtaattcgcccagtgtccacaggatttcaactcagatctacacaagaaaagctcatgttcattcttgtatggcaaagtgtgcaa

SEQ ID NO: 576162 - DNA, 608 bp, Homo sapiens
gtaatttaattttttgatttaattttaattacaaaattaaatcaaaatggattaaagacttaagtgtaagaactgacactatgaagctactagaagaaactataggagaaatgctttastacactggtctgtacaaagatttttttgggtaaattcaaaaatacaggcaaccaaagcaaaaataacaaatgggattatatcacactaaatggcttctgcaaatcaaggaaacaatcagcaaactgaagagacaacccacaggataggggaaaatatttgcaaactatacatttgacaagagattaatagccaaaatatataacgagctcaaacaactcaatagcaaaaaacctacaaatgatcttattttaaaaatgagcaaatgatctgaacagacatttctcgaaagaagacatatgaatggcctacaggtatgtaaaaaaaatgcttgaccaaacatggtggctcactcctgcaatcccagtgcttttgaaggccaaggtgagaggatcacttgaggccaggagttcaagactggcctgggcaaactagcaagatctgcatctctactaaaaaaaaaaaaaaaaaaaaaaattaaagaattagct

SEQ ID NO: 576163 - DNA, 662 bp, Homo sapiens
gtacagataccttttcagtatactgatttcagctgggcatggacactcatgcctataatcccagcaggttagaagaccaaggtggcaggattacttgagcttagcagctcaagaccagcctgggcagcatagtgagaccctgcctctactaaaagtctggaaaagacttatttctctttcatttatgaagcttagttttacaggatgcaaaattcttggctggcatttttttttctttaaggaggctaaaaataggccctcaatattttacagcttatatggtttctgctaagaaatctgctattagtctgatgggatttcctatattggtgatttgacacttctctctaggtgaytttaaaattcttttctttagcattggctttcaatagcctaatgactatatgccttggcaatgttcatgttttatagtatcttgcaggtattctctgaatttcttatatatagatgtctacctctatagcaagatcagagaaattttcaggaattattcccgcaaatatgctttccaaatttcttactttttcttctctttcaggaatgtctataaatcataggcttggccatattacatattctcatgttttttgaagcctttgtttttaaagttttgaatatttttaaattcttttttttttttt

SEQ ID NO: 576164 - DNA, 662 bp, Homo sapiens
gtacagataccttttcagtatactgatttcagctgggcatggacactcatgcctataatcccagcaggttagaagaccaaggtggcaggattacttgagcttagcagctcaagaccagcctgggcagcatagtgagaccctgcctctactaaaagtctggaaaagacttatttctctttcatttatgaagcttagttttacaggatgcaaaattcttggctggcatttttttttctttaaggaggctaaaaataggccctcaatattttacagcttatatggtttctgctaagaaatctgctattagtctgatgggatttcctatattggtgatttgacacttctctctaggtgactttaaaattcttttctttagcattggctttcaatagcctaatgactatatgccttggcaatgttcatgttttatagtatcttgcaggtattctctgaatttcttatatatagatgtctacctctatagcaagatcagagaaattttcakgaattattcccgcaaatatgctttccaaatttcttactttttcttctctttcaggaatgtctataaatcataggcttggccatattacatattctcatgttttttgaagcctttgtttttaaagttttgaatatttttaaattcttttttttttttt

SEQ ID NO: 576165 - DNA, 662 bp, Homo sapiens
gtacagataccttttcagtatactgatttcagctgggcatggacactcatgcctataatcccagcaggttagaagaccaaggtggcaggattacttgagcttagcagctcaagaccagcctgggcagcatagtgagaccctgcctctactaaaagtctggaaaagacttatttctctttcatttatgaagcttagttttacaggatgcaaaattcttggctggcatttttttttctttaaggaggctaaaaataggccctcaatattttacagcttatatggtttctgctaagaaatctgctattagtctgatgggatttcctatattggtgatttgacacttctctctaggtgactttaaaattcttttctttagcattggctttcaatagcctaatgactatatgccttggcaatgttcatgttttatagtatcttgcaggtattctctgaatttcttatatatagatgtctacctctatagcaagatcagagaaattttcaggaattattcccgcaaatatgctttccaaatttcttactttttcttctctttcaggaatgtctrtaaatcataggcttggccatattacatattctcatgttttttgaagcctttgtttttaaagttttgaatatttttaaattcttttttttttttt

SEQ ID NO: 576166 - DNA, 519 bp, Homo sapiens
ggcaattacttgaaccaggggggtggagcttgcagtgagccgagattgcaccactgcactccagcctgggcgacagagtgagactccatctcaaaaaaaaaaaaagaagaagaaaagaaaaaaataaaatgtaacagaagagtttattttttattcaaaaatattcaaatattttgagttcagaaattgttacttggtataggtcaaaccatatgaaaatgctgatatatacctactgtgtgccttacaagtatgggatttggagtcaaatagaacttgctttcagtactagatgcattactcccagctgtgtgcaagttacttagctctctgggcctcagtttcaacatctgtacaatgagggagataatatcaacttcatagggttgttgctacgtcaggtgctgtactaggtataggatatctcatctgacaccctaccaagtagggggcgaggggaaccttcagacattctgaaaaactgaagcttcttatcwctttctagagtttttctaggcc

SEQ ID NO: 576167 - DNA, 419 bp, Homo sapiens
aatgcctgggattggaattcggattttgaactaaaagaagacccagtgtttgctacacagctcaatctgtgttgaatcaggaattttaatggaattcagttttaatgactaatacaaacaattaattctatgtcactttaactacagaatcaaaaataataaccattgttctagtcattaatgatgcaactgataaaragcaattcatttggctgggcacagtggctcatgcctgtaatcctagcactttggtggctgaggtgggtggattgcctgagctcaggagttccagaccagcctgggcaacatggcaaaacccatctgtacaaaaaatacaaaagttacctgggcatggtggcatgtgcctgtagtcccagctacttagggggctgaggtaggaggactacttgagcctagaa

SEQ ID NO: 576168 - DNA, 419 bp, Homo sapiens
aatgcctgggattggaattcggattttgaactaaaagaagacccagtgtttgctacacagctcaatctgtgttgaatcaggaattttaatggaattcagttttaatgactaatacaaacaattaattctatgtcactttaactacagaatcaaaaataataaccattgttctagtcattaatgatgcaactgataaaaagcaattcatttggctgggcacagtggctcatgcctgtaatcctagcactttggtgkctgaggtgggtggattgcctgagctcaggagttccagaccagcctgggcaacatggcaaaacccatctgtacaaaaaatacaaaagttacctgggcatggtggcatgtgcctgtagtcccagctacttagggggctgaggtaggaggactacttgagcctagaa

SEQ ID NO: 576169 - DNA, 419 bp, Homo sapiens
aatgcctgggattggaattcggattttgaactaaaagaagacccagtgtttgctacacagctcaatctgtgttgaatcaggaattttaatggaattcagttttaatgactaatacaaacaattaattctatgtcactttaactacagaatcaaaaataataaccattgttctagtcattaatgatgcaactgataaaaagcaattcatttggctgggcacagtggctcatgcctgtaatcctagcactttggtggctgaggtgggtggattgcctgagctcaggagttccagaccagcctgggcaacatggcaaaacccatctstacaaaaaatacaaaagttacctgggcatggtggcatgtgcctgtagtcccagctacttagggggctgaggtaggaggactacttgagcctagaa

SEQ ID NO: 576170 - DNA, 589 bp, Homo sapiens
attgagctatcatatgatgcagcaatcccactgctgggtatatatgcaaaacaaaggaaatcagtatatcaaagaaatacctgcactcccaagtttgttgcagcactgttcacaatagccaagatttggaagtaacctaagaattcatcaacaggtgaatggatagagaaaatgtggtacttatagacaatgaaccactattcagccattaaaaagaatgagattctgtcttttgcaacaacattgatagaacaggagatcactatgttaagtgaaataagccaggcacaaaaaaaacaaatatcacatgttctcaccgtgtttgagggatctacaaaccaaaacaactgaactcatggacatagggagtagaaggatggttaccagaggatgggaaggatagtcagggcagggaagggatggcrtagtggggaggtgggatggtgaatgggtacaaaaaataatagagagaatgagtaagacctagtatttaatagcacaacgtggggactatagtcaatagtaatttaattgtacactttaaaataactaaaagagtataattggattgtttgtaacacaaaggata

SEQ ID NO: 576171 - DNA, 516 bp, Homo sapiens
ttttttttgtagaaattgacaagctgattgtaaaattcatgtataattgcaaggaaacaaacatagccagaaaaatcctgaaaaagaataaaataggaggactcacacttcccaacctcaaaacataccacaaagcaatggtaatgaagactggcaaaacaatagatatatggaccaatagaatagaatggagagtccagaaatagatgcatacacttatggtcaactgatttatgacaagggtgccatgacctttcaatgggaagataagaatcttctcaacaaatagtgctggtacaactggataactgcagatgaaggaatagagtcggactctcacctaacgccataaaaaaaaaamcagctcaaaatagatcaaagacctagatataagagctaaaatgataaaatcgttagaagaaaacatagtatatcttcatgaccttgaatttgacatagcattcttatatatggcaccaaaaccaaggacaacaaaagaaaaaataaattaattgg

SEQ ID NO: 576172 - DNA, 513 bp, Homo sapiens
ctgatgcctgtgttcttagagtgagcaagcaattggactgggacatcagtatgaatactgcattatgtatggtcactgaattgaattgtgtttttgattaaggactctcttaccctacagatgaataaatttctagctttctgctaagggaggggaggggcagttacctggcagttggggaagagctttggagcaacacctgtttttcagatagctctccccacaggcctttgctgacttaggattcattcagctttctgctacgtcaggcaccacatgtcagtcttctcttcagttcccaaaatttgtttctcttgtcctttctcctgttctccatattcttatgagtcaaaaaaaaaaaaaaaaaaaaaaacccaacaytttcttaagtctctttactgtggttttagtggagctttttgaagaagcaagattcgatgttcatcttaactctgatgttatcagagttatcagagacttgatgttatcaagtctcacctgatctgcaacctc

SEQ ID NO: 576173 - DNA, 403 bp, Homo sapiens
tttgctttataaatatagaatagagaatcctcagctcaacctcaatcctcagcgtatattaggaacacatttgagatgaggtaagaagtgagggtaccaggcccaaaccctaggatatgacactggcagatcaagacaagaggcagggccaagccagctcagtggtttgtttataaaggaaagtcactccatggacaccagtgctccagaggtgcagaaaaattccagatttgtgaaaacgctaagaaaaaatggtgaagtctttttgtgggacatagaatgtaggtggcgggctgggagaggccatggaagtgcctggcacagccactgtcaagaatagagcagcargaaaattctttcataaagatgtacagatcagaagctaactttatttcagacagag

SEQ ID NO: 576174 - DNA, 632 bp, Homo sapiens
ctataaagaacattattgggaccatggatgatatttaacatggactgtggattgtataattgcactgtatcaattttcctgaaattgaaaactgtaccacagacactcatccttatttttaggagatacacattgaactatttaggagcaaaagggcatgatgtcttcagcctaccttcatatggtaaacagctatcaactctgcaaagaatatatggaagctccttgtgccatttttgaaactttcctgtaagttcgaaattatacaacaattaaaattaccccctgcccaatgttgattggtatacagccatggcaattgatgaattctctgagattgtgtaaaatgagagktgcagggatctggggcacaaatgttggggaagcccatgattgggtccataaagaagccatgaaggacagacaaggagaggttaggagagagtgttgcaatgtcataggctctgaagagggagggaggctgaagaatgtggtggtaatcaacaattgctaagctccaaagaagcctaacccagagtagcatctgacaaaacacaacaatgtcaattaacctctagccacccttgagggtgcattttcagtgaagggttgggggagtcccataaaacatg

SEQ ID NO: 576175 - DNA, 632 bp, Homo sapiens
ctataaagaacattattgggaccatggatgatatttaacatggactgtggattgtataattgcactgtatcaattttcctgaaattgaaaactgtaccacagacactcatccttatttttaggagatacacattgaactatttaggagcaaaagggcatgatgtcttcagcctaccttcatatggtaaacagctatcaactctgcaaagaatatatggaagctccttgtgccatttttgaaactttcctgtaagttcgaaattatacaacaattaaaattaccccctgcccaatgttgattggtatacagccatggcaattgatgaattctctgagattgtgtaaaatgagaggtgcagggatctggggcacaaatgttggggaagcccatgatygggtccataaagaagccatgaaggacagacaaggagaggttaggagagagtgttgcaatgtcataggctctgaagagggagggaggctgaagaatgtggtggtaatcaacaattgctaagctccaaagaagcctaacccagagtagcatctgacaaaacacaacaatgtcaattaacctctagccacccttgagggtgcattttcagtgaagggttgggggagtcccataaaacatg

SEQ ID NO: 576176 - DNA, 641 bp, Homo sapiens
ccagaggatgggaaggggagaggggagggaagatggagagaggttggtcaatgaatacaaaggtgcggttggataggaagaataagtactagtgttctattacatggtagggtaactatagttaataaaaatatattatatatttcaagatagctacaaaagaggatcttgtaagctatcaccaaaaagaaatggtaaaggtttgagttgataggctgggtgtagtggctcacatctataatcccaacactttggagrctgaggtgagatgattgcttgatgccaggagtttgagaccaccctgtctctacataaacaaatttacaaacaaggtttgaggtgatggacatgctaactactctgatttaatcattatacaatgtatacatgtattgaaacatcacatacaccccataacattcactatcatgtgccaattattaacataatttaaaagtaataaaaagttttaacaattgtacttcaaccaaaaagagactatcaggccttcatttattacaagctacttattgcctgccaactggctgacaaatgatccatttctaaaatcccactttagagttgctttctaggaccattcctgatgctaattatcatagaatgagtagaaaacagattct

SEQ ID NO: 576177 - DNA, 594 bp, Homo sapiens
tagtgttatggacaatgaagtcctggctgaggtggtctcaaatggagatgaggaactcattgggaactggagcaaaggtgactcttgctgtgttttagcaaagagactggtgacttttgcccctgccctagagatctgtggaactttgaacttaagagacattatttgaaactggaacttatgtttaaaagggaagcacagcataaaagtttggaaaatttgcagcctgacaatgtgatagaaaagaaaaacccattttctggggagaaattcaagcctgctgcagaaattttcataagtaaagwtaaaccaaatgttaatcactaagacaatggggaaaatgtctccagggaatgtcagagatattggttatagcccctcccatcacaggtaaagaggcctaagaggaaaaatggttttatgggctgagctcagggccttcctgctctgtgtagcctcagggcattgtgccctgtgtctcagccacttcagctccagtagtggctaaaagggaccaaggtacagctcaggccattgcttcagagggtaacagccccaagccttggcagcttccacatggtgttgggcctgtgg

SEQ ID NO: 576178 - DNA, 579 bp, Homo sapiens
ggttgcagtgagctgagattgtgccactgcactccagcatgggcaacagagtgagactctatctccaaaaaaaaaaaaaaaaaaaaaaagtaaagaatctaaactgaaaatcttattccagatatttcctcttttacacatcccaacacacattgctggtttatttaaatagcaatttattcacatgctcattcatttaccttttcatgagtacatttgyttttagtactacctcttaaaaagaaaaggtaaaaaaagtatttattctgctgccaagcattttagcatgaagtagaaaagttatggcagggacaaaaataactcaagtataaagttcagagcaaaatgtggtttaagagctctattgataaaatgctttgggagatcagaaaggggagaaaaacctctggagaagagatggggttattagctatatagtttccccttcaaaaagcaaagaaggataggatgtgtgtgtgtgtatatacacatcaaggtgagggacaccatgagaaagtatacaaggagggaagtatggggaaattttatttttcttggaacataaaagacttcaaggag

SEQ ID NO: 576179 - DNA, 579 bp, Homo sapiens
ggttgcagtgagctgagattgtgccactgcactccagcatgggcaacagagtgagactctatctccaaaaaaaaaaaaaaaaaaaaaaagtaaagaatctaaactgaaaatcttattccagatatttcctcttttacacatcccaacacacattgctggtttatttaaatagcaatttattcacatgctcattcatttaccttttcatgagtacatttgcttttagtactacctcttaaaaagaaaaggtaaaaaaagtatttattctgctgccaagcattttagcatgaagtagaaaagttatggcagggacaaaaataactcaagtataaagttyagagcaaaatgtggtttaagagctctattgataaaatgctttgggagatcagaaaggggagaaaaacctctggagaagagatggggttattagctatatagtttccccttcaaaaagcaaagaaggataggatgtgtgtgtgtgtatatacacatcaaggtgagggacaccatgagaaagtatacaaggagggaagtatggggaaattttatttttcttggaacataaaagacttcaaggag

SEQ ID NO: 576180 - DNA, 516 bp, Homo sapiens
atgagcaaatgtcttagtgcgtgtgtgtgtgtgtgtgtgtgtgtgtgtgaaaggaaaagaagtaagaaagttcagcaagcatgtatgctagatggccaaaaacacataaagaaaatctagggtcaggmacagtggctcacacctgtaatctcacactttgggaggccaaggcaggaggatcacttgagcccaagaggttgaggctacagtgagccatggatatgccactgcactctagcctaggtgacagagtgagacttggtctgaaaaacaaaacaaaaaaataaataagaaaatttgatcaatcactttccattgaggcattatcagaaaaaaaaaaacccatcaaagataggtaattgggaagaatgcatctaatcaagtgacaaccatgaatcaggagttgatttagaaatattttctaatttaatttataatgcaacgagtagataatattttgtttctcttgtacagaaaggggcaacctgagagaaaaaagcctttgatggcccagcc

SEQ ID NO: 576181 - DNA, 487 bp, Homo sapiens
gtagcggcactgcagcctcaaactcctgtgcataaatgaaccttccacctcagcctcctgaatagattgaactacaggtgggtgccaccatgtccagctaattttattttattttattttattttattttttaagaattggagtcttgctatgtttcccaggctggtctcaaactcctgggctctactgattttcccaccttggcctcctaaaatgctgggatttataggcatgagccactgtgaccagcctggttayctttcttgattttttttttttttttttttttttgagatggagtctcactcttgttgcccaggctggagtgcaacggtgcaatcgcagctcactgcaacctctgcctcctgggttcaagcaattctcctgcctcagccgcctgagtagctgggattacaggtgcccaccaccacgcccagctaatttctgtatttttagtagggatggggtttcaccatgttggccaggc

SEQ ID NO: 576182 - DNA, 608 bp, Homo sapiens
cgtgggtacacaccagacattgaccatataaatgtgatcagtgcagccaagagttcatgaggtctgaccatctcaagcaacaccagaagactcattggccaggaccctcagacccacgggccaacaatggacagcaggacggtcctgttcctggtccttaggtgaatgaaggaagaggattctaggcagagaacactggacctggcaactgctcagaggagaggcagtcttcaagttctatattcattcagcaaatgttttttgagcctacaatactgagagcaccaaggctgtggggacccatggcgaggagcatggagataactaaagaatgtgtcagggaagaaagacttctcaaggaggtgcctcagtcagatccaaaggactcatggcggctagctgcacctcccatttcttggacatataccattggacatgtctctatcttctgaaaactatggcatggacagtaaggattcagaggtgtatgaaggcaccctgcctctgcagagcagaaagatcrtagacaaaatttctgaatgtgcccagtgctgccaaggagataagctggtcctctacaggcccaagcttatctgggcctctagaga

SEQ ID NO: 576183 - DNA, 608 bp, Homo sapiens
cgtgggtacacaccagacattgaccatataaatgtgatcagtgcagccaagagttcatgaggtctgaccatctcaagcaacaccagaagactcattggccaggaccctcagacccacgggccaacaatggacagcaggacggtcctgttcctggtccttaggtgaatgaaggaagaggattctaggcagagaacactggacctggcaactgctcagaggagaggcagtcttcaagttctatattcattcagcaaatgttttttgagcctacaatactgagagcaccaaggctgtggggacccatggcgaggagcatggagataactaaagaatgtgtcagggaagaaagacttctcaaggaggtgcctcagtcagatccaaaggactcatggcggctagctgcacctcccatttcttggacatataccattggacatgtctctatcttctgaaaactatggcatggacagtaaggattcagaggtgtatgaaggcaccctgcctctgcagagcagaaagatcatagacaaaatttctgaatgtgcccagtgctgccaaggagataagctggtcctctacaggcycaagcttatctgggcctctagaga

SEQ ID NO: 576184 - DNA, 587 bp, Homo sapiens
gtaaagaagatctgtcctcgccaatatgagtaggcatcacccaattcactgagggcccaaataccacaaaaaggtggaggaaggattgattctctctctttctaaactggtacatctatcttctgcccttggacatctgcactcttggttcttgggccttcagccctggactaaattatactaccagcttataaatggcagatcaggggacttcttggcctccataatagcatgaaccagttcccataatctctgtctctcctcgtgtgtgtgtgtgtattatataatatatatattatatatatatttwtatatatatatatatgtatgtatttatcctatactaggatatatagagatataccttgatatagtttgggcatttgtccccactcaaatctcatgttgaactgtgattccccagtgctggaggtggggcctggtgggaggtgtttgggtcatcagggtggatccctcgtagtttggtgctgccttcgagatagtgagttctcacaagacctggtcatttaaaaatgtgtggcacctcctcccaccctctcacttgctcctgcctttgccatgtggtg

SEQ ID NO: 576185 - DNA, 530 bp, Homo sapiens
aaaaaattttttaattgcatctggcaatgaaaaggtcattggtgaccgccaaagaagactgccagtaaaacaatgggggtgtgaccttgactgcaatggttaatgaggagtgggtgttgaggaagtggaggcagggaaagagcaggtgaaaggaagaagagagatctcagggcagctggagggtggtgagtaggtgtgcttggtttagggcagactgaaacgtggctgttagcagagggagtcatcttccctgaagctctgctataaatctaacttgctgatggtgtgggtgtttgggtcgtagaaattccatttccatctattcatgtctgtatttatttactgcttgcctggttccaaaagggatttcaataggctcggcctccagtctgtcagggactcactcgactcagcctctctcttgtcatccacgctgcagaggataatgcaggtcagtccatsaatcgccagcacctaagtatgatgtaggctgttgaagcacagagcaaggggaatcgtgaacagaacac

SEQ ID NO: 576186 - DNA, 582 bp, Homo sapiens
gcctggttgaaatgccaagccacctggctgtacctggaaccaatcttcagttcagaggacatcatagcccagatgccagaagaggggaggaaatttggcattgttgatagttactggaaatcacttatgtcccaagcggtaagtttttataccctaataactcttaccagcagaaatacaaatgtttcctcattatgcattctagtcaccttccttgaaacttgtaaatgaactagagttttggaaaatcaatctttttatatcttcttctaatttcagaagttgttattattaaaaatgcaaacatatgaccagtgcgatggctcatgcctataatcccatcactttgggaggccaaggcgggggtatcacttgaggtcargagttccagaccagcctggccaacatggtgaaacaccgcatctctactaaaaacacacacacacacacacaaaaatattagccaggcattgtggtgaatgcctgtaatcccagctactcggagggctgaggtgggaggatcgcttgaacttaggaggcggcggttgcagtgacctgggatcgtgccactgcactccaggc

SEQ ID NO: 576187 - DNA, 582 bp, Homo sapiens
gcctggttgaaatgccaagccacctggctgtacctggaaccaatcttcagttcagaggacatcatagcccagatgccagaagaggggaggaaatttggcattgttgatagttactggaaatcacttatgtcccaagcggtaagtttttataccctaataactcttaccagcagaaatacaaatgtttcctcattatgcattctagtcaccttccttgaaacttgtaaatgaactagagttttggaaaatcaatctttttatatcttcttctaatttcagaagttgttattattaaaaatgcaaacatatgaccagtgcgatggctcatgcctataatcccatcactttgggaggccaaggcgggggtatcacttgaggtcaggagttccagaccagcctggccaacatggtgaaacaccgcatctctactaaaaacacacacacacacacacamaaatattagccaggcattgtggtgaatgcctgtaatcccagctactcggagggctgaggtgggaggatcgcttgaacttaggaggcggcggttgcagtgacctgggatcgtgccactgcactccaggc

SEQ ID NO: 576188 - DNA, 576 bp, Homo sapiens
cctcctttcccttcccagttcctcactaccaggatttggaatgaaatgaggagaaagctttacattttacatttgtttctcacatgatattcagaaacggagatgaaccttacttcaagatctaaagctcaactcatgtcatcccttaacagagacagggacaacataatttggaaataacaaggccagacaagagcaatcctagatcacatgggagttctgtactctcagaagtatgttgtgggagtaactggcccgatgttctctcagcctctctcagctgagaacagcayttaagatttccttatcatctaaaaaaataaataatttatcttttgttagcagaagaatgaagtaaacacagtgactaacttttcctaatgcagtagttttatacaataaaacagtttcttaagaaggttatactgttattttggaaacaagccacccagtggatttggcctccaggaatactgaccacacattttgaaaatttataccggccaatcagttttgacacttccatcctgccctactggtttgctttacttcatctcatttagcaccgtgtctgta

SEQ ID NO: 576189 - DNA, 629 bp, Homo sapiens
tagtccattttcattctgctaataaaaacatactcaagactgggctatttacaaaagacagagtcttaatattgcttttgctgtatccctgatcataggtttaggatgttgtgtttccattatcatctgtttcaagacattttttagtttctttcttgatttctttattgattcactggacattcaggaatgcattggtttatatccatgtatttgtacagtttccaaaatwcctcttgttatcaatttctaattttatttcattgtgagttttaaaccttgttttgtgacctaacatatggcctgttttttgagaataattcatgtgctgagaaaaaatgtgtattctgcagccactgaatgaaatgttctgtaaatatctattagacccatttggtctttagtgaagactgagtatgacgtttctttgttgattttgtatctggaagatctgttcaatgctgaaagtggagtgttgaaatctccagctattattgtattggggcccatctctctttagctctaataatattttctttatacatataggttctctaatgttgggtacatatatatttaaagttgttatattctcttgttgaatttgccactttattattgtatagtga

SEQ ID NO: 576190 - DNA, 629 bp, Homo sapiens
tagtccattttcattctgctaataaaaacatactcaagactgggctatttacaaaagacagagtcttaatattgcttttgctgtatccctgatcataggtttaggatgttgtgtttccattatcatctgtttcaagacattttttagtttctttcttgatttctttattgattcactggacattcaggaatgcattggtttatatccatgtatttgtacagtttccaaaattcctcttgttatcaatttctaattttatttcattgtgagttttaaaccttgttttgtgacctaacatatggcctgttttttgagaataattcatgtgctgagaaaaaatgtgtattctgcagccactgaatgaaatgttctgtaaatatctattagacccatttggtctttagtgaagactgagtatgacgtttctttgttgattttgtatctggaagatctgttcaatgctgaaagtggagtgttgaaatctccagctattattgtattggggcccatctctctttagstctaataatattttctttatacatataggttctctaatgttgggtacatatatatttaaagttgttatattctcttgttgaatttgccactttattattgtatagtga

SEQ ID NO: 576191 - DNA, 513 bp, Homo sapiens
aatttgggaggctgaggcaagtggatcacttgagctcaggagcttgagaccagactgggcaacatggccaaaccctgtctctataaaaaagtacaaaaattagccaggtgmacatatgtagtcctagctacttgagaggctgaggtaggaagactccttgaacccaggaggttcaggctgcagtgaaccatgtatgcaccactgcactccagcctgaaggacaaagtgaaactatgtccaaaaaaaaaaaaagcttaaatagtctaatgatacatcttaaagaactagaaaaacaagagcaaaccaaatccaaaattagtacaaggaaagaaataataaatattacagtagaaataaatgaaaatgaaatttaaaaatacaaaaaactcaatgaaacaaaaaagttgttttgtgaaaagctaaacaaaattgacaaaccattaacccaactaactttgaataaaagagaaaagactcaaataaataaagtcagagattaaaagggaggcatta

SEQ ID NO: 576192 - DNA, 466 bp, Homo sapiens
acaacagggtgactactgtcaataataatttattgtacatttttaaacattgaaagtgtataattggattttttgtaatgccaagaggataaatgcctgaaatgatggataccacatttaccctgatgtgataattatgcattatatgcctgtatctcatataccycatgaatatatatatctattatgtacccacaaaaatttaaaaaaaggaaataagaggcatccaaattggaaagaaaaacgtaaaactatctctgtttacagaagacacgtcatatatttagaaaatgctaaaactacacacacacacacacacacacacacacacacacacacacacacaaactcttagaactaatccagtaaagggcaggatacaaaatctactgttactttttaaagactttaaagcaattctctgttttgttttttcagttatcatcaatatgctacctttaaaaaa

SEQ ID NO: 576193 - DNA, 505 bp, Homo sapiens
ttaggggtaattatccgagcgcggagggacagcgaattccctcgacttttaactgggcgcaataaaagctgtagattaggggcgtccagattagggaaaatgaattagagcgggaactttattatccggaagacgtccggggtctggcggcaggggtcgggctgcggacgccggagcgattggtagcctcccatctgtccacaggccgccgagatatgctgaggcctggggaagttcgggaataccggcatctgaattttacgcacatctccaggtttctaaaggacccaagactgcaactcaggcactgggcagtggttggggcttctagctcgagttgggccggctggacgcgcggtgcaccggggcctccggaggtttgcccgagagggtacaaggatagaagaccttaagacccaattttgaagmtcagctcgctgaggctgagcaaggctgtagggcaaataccttgctggtagcccagccaggacagcgaacaacagca

SEQ ID NO: 576194 - DNA, 594 bp, Homo sapiens
atctaattgtatttaatcaaaatataaagtttttgctttttgaaagacactcaaatgaaaaggtaagccacaaattcggcagagttttttgtgaaacatatatccagaaaaggactcatatctagactatataaagaattatcagaactctgtaagaaaaataaactaatttttaaatggacaaaagacttaaataagatatgtggatagcaaatactgacattaaaagatgcccaacatcattaatcattggggaattaaaactacaaggaggtagggcgaggtggctcatacctgtaatccttgtgcttcgggatgctggagccggaggatcacttgaggccaggagtttgagaccagcatgggcagcatagtgagactgtgtctttaatttttttttwaattagttggacatgatgatcagcgcctgtagtctgagctacttcagaggctgaggtgggagattcacttaagctcaggagttagaggctgcagtgcactaagatggagccactgtactccagcgtggttgacagagtgagactctgtctcaaataaaataaaaaataaaaccacaaggagataccaccacac

SEQ ID NO: 576195 - DNA, 575 bp, Homo sapiens
cagtaggaaacgaatgccatttttatccacttcgaggaaatcgtgcatctttgaaaactttgaaatttgctttgcagtcacagtgggagctggacgcatggttgatgttctgtgtctgcccctccagtcatcccacccaggccctcattctcctatgaatgtcacacagccaagtcctccctgggaactgccctctgcagaagatagcagcctcacccaaggttatgacccctctccactggggcagcctgcattgaatgaacagtcaatcccaggggacagagtctggccttgatttggatagtttcaggctcatcccagcttcagagctccaygtggtgctcagtggtggctgcatcacgttttagcttctcccctgtctaaggtgctcctctctctccctcctgggcattgctgcccagagcactctccaggaattttctgcatgcaaatcagctctcagacatgtttcttggtatactccatgtaagacagcaaacatttagattgtgttgcttgcagtcaagggagtcagatggcctcgggctggtctgcctggagcagagacaaggttt

SEQ ID NO: 576196 - DNA, 377 bp, Homo sapiens
ggggagtctggacttgagagccatagaagggttttaagcaagggagagatatgatcggctttatctggggggagggatctcttgtagcaatgtgcaggccaaagagtgagaggctgggggcaaagmgatcaggaaggaggcagttgcaatggcttaaatgggacttcattcctacactccgtgaatactttttgaacacctactgtaagccaagcactgcgcaggctctgggaaagtgtgagacaacgtttgcactctaatggggaagaagacaataaacataaatatgtcaggaagtgtcagatgctgacaagagctccagagaaaactcaagcagacgtgaaagggtccctggggtaggcaggcccttagcatcc

SEQ ID NO: 576197 - DNA, 552 bp, Homo sapiens
gaccttgataattagcagactttgagcaaagcagaggacctcccataacgggggtgagcctcatccaatcagttgaaggccttgagactcgagactgtggtttcccaaggaaagaactctcctcaagactgcaacctagaaagcctgcctgaatttccagcctgcagatttttactgaagaccatatgacatcarctctttcctcagttttcagcttgccagcttgtcttaaagatttcagatttaccagctcctaccattgcatgagccaattccttaaaatctctctgtcttgcccaggcgtggtggctcacgcctgtaatcacagcactttgggaggccgaggcaggcagattacgaggtcaggagatcgagaccatcctggctaacatggtgaaacctcttctctactaaaaacacaaaaaattatccaggcgcagtggtgggcgcctgtagtcccagctactcaggaggctgaggcaggagaatggcatgaacctaggaggcagagtttgcagtgagccgagatagcgctactgcactccagcctgg

SEQ ID NO: 576198 - DNA, 552 bp, Homo sapiens
gaccttgataattagcagactttgagcaaagcagaggacctcccataacgggggtgagcctcatccaatcagttgaaggccttgagactcgagactgtggtttcccaaggaaagaactctcctcaagactgcaacctagaaagcctgcctgaatttccagcctgcagatttttactgaagaccatatgacatcagctctttcctcagttttcagcttgccagcttgtcttaaagatttcagatttaccagctcctaccattgcatgagccaattccttaaaatctctctgtcttgcccaggcgtggtggctcacgcctgtaatcacagcactttgggaggccgaggcaggcagattacgaggtcaggagatcgagaccatcctggctaacatggtgaaacctctyctctactaaaaacacaaaaaattatccaggcgcagtggtgggcgcctgtagtcccagctactcaggaggctgaggcaggagaatggcatgaacctaggaggcagagtttgcagtgagccgagatagcgctactgcactccagcctgg

SEQ ID NO: 576199 - DNA, 571 bp, Homo sapiens
acacacaaacaaatggaggcacaggtcagtggggtgtgaataagggaatatccagatccacctgtgggggaggtyaagtctttataagagacttatagaggtcaagatttaaaactaggtcttcttcaaaccccaccattttgcacccactgttccatgagcacctactatatgcaggaaactatgccaggggtttcaggagaaactggtgagtcagacaaggtccagctctcagaatgatgcgcaggagccaggcatgtccacaggaattcaagagaaggaacaccaagagacaagagtgtcacatccagggtgggctaaacatagcattaaagaacctacttggtccaattctacttctggttatatggtgtgtaacaatgacattcatgcattcgtttgctcagcaacactctgaaaggtccccatgaccagaggtgagcaccaagagagaggaggctgatgtttcatgggcaaagtagattttaatggaggagcctccagaaagtgtgcaaggcatcactagaggacagtagaaagggttcccttgggagaggccagtgatgtttct

SEQ ID NO: 576200 - DNA, 571 bp, Homo sapiens
acacacaaacaaatggaggcacaggtcagtggggtgtgaataagggaatatccagatccacctgtgggggaggtcaagtctttataagagacttatagaggtcaagatttaaaactaggtcttcttcaaaccccaccattttgcacccactgttccatgagcacctactatatgcaggaaactatgccaggggtttcaggagaaactggtgagtcagacaaggtccagctctcagaatgatgygcaggagccaggcatgtccacaggaattcaagagaaggaacaccaagagacaagagtgtcacatccagggtgggctaaacatagcattaaagaacctacttggtccaattctacttctggttatatggtgtgtaacaatgacattcatgcattcgtttgctcagcaacactctgaaaggtccccatgaccagaggtgagcaccaagagagaggaggctgatgtttcatgggcaaagtagattttaatggaggagcctccagaaagtgtgcaaggcatcactagaggacagtagaaagggttcccttgggagaggccagtgatgtttct

SEQ ID NO: 576201 - DNA, 558 bp, Homo sapiens
taaaactaggtcttcttcaaaccccaccattttgcacccactgttccatgagcacctactatatgcaggaaactatgccaggggtttcaggagaaactggtgagtcagacaaggtccagctctcagaatgatgcgcaggagccaggcatgtccacaggaattcaagagaaggaacaccaagagacaagagtgtcacatccagggtgggctaaacatagcattaaagaacctacttggtccaattctacttctggttatatggtgtgtaacaatgacattcatgcattcgtttgctcagcaacactctgraaggtccccatgaccagaggtgagcaccaagagagaggaggctgatgtttcatgggcaaagtagattttaatggaggagcctccagaaagtgtgcaaggcatcactagaggacagtagaaagggttcccttgggagaggccagtgatgtttctttgagaagtgacatttaaacttcaacactagggatcagaggaagcctcaaagataaatccaaagtaagagttgatttataaccacaccccacggca

SEQ ID NO: 576202 - DNA, 558 bp, Homo sapiens
taaaactaggtcttcttcaaaccccaccattttgcacccactgttccatgagcacctactatatgcaggaaactatgccaggggtttcaggagaaactggtgagtcagacaaggtccagctctcagaatgatgcgcaggagccaggcatgtccacaggaattcaagagaaggaacaccaagagacaagagtgtcacatccagggtgggctaaacatagcattaaagaacctacttggtccaattctacttctggttatatggtgtgtaacaatgacattcatgcattcgtttgctcagcaacactctgaaaggtccccatgaccagaggtgagcaccaagagagaggaggctgatgtttcatgggcaaagtagattttaatggaggagcctccagaaagtgtgcaaggcatcactagaggacagtagaaagggttcccttgggagaggycagtgatgtttctttgagaagtgacatttaaacttcaacactagggatcagaggaagcctcaaagataaatccaaagtaagagttgatttataaccacaccccacggca

SEQ ID NO: 576203 - DNA, 568 bp, Homo sapiens
ttctacttctggttatatggtgtgtaacaatgacattcatgcattcgtttgctcagcaacactctgaaaggtccccatgaccagaggtgagcaccaagagagaggaggctgatgtttcatgggcaaagtagattttaatggaggagcctccagaaagtgtgcaaggcatcactagaggacagtagaaagggttcccttgggagaggccagtgatgtttctttgagaagtgacatttaaacttcaacactagggatcagaggaagcctcaaagataaatccaaagtaagagttgatttataaccacaccccacggcagggttatgcccctggcaattccaggatacttggtgatacggtttggatatttgttccctccaaatctcatgttgaagtgtaatacccagtgttggaggcagggcctggtgggaggtgttccagtcatggaggtggatctctcatgaaatgccttccctgtgtgtattagtccattctcatactgctaagaaagacatacstgagactgggtaatttataaaggaaagaggtttaattgactcacagttttgc

SEQ ID NO: 576204 - DNA, 580 bp, Homo sapiens
taaagggaaataaacagcagacgggggacacttgggacaagagctggggcaggaggaggctggggcggggaggtctccttggaacaggaggcacagactttgaaaccaaccatttgtgtggcctcaagcaaattatttaacatctctgtatctcatttgaaaaatggggatgacaatagcacatgctgtcacagggttgtccagagggttgaacaaggagcatgtgaagcacctgggacagggtctgttgctcaggaagcctcagcgcccattatcgcgatgctggcatggttggggaagtctctctcgggagtggcatttgarctctcctgggccactgtgtggatgagaagacagggaggcaagaatggaagcaaggacacaaagtaggagttgatggcagccatccaggcagcatccaatggcagctaggaccaggaaggaactgggtgacatgacctttgggggaagagctggcaagacttgttgagggatgaggaaatggagggaggcatccaagaatacccctgagattttggcctgaaagagtaaatgaagcaaaagtagtggcgtttattaa

SEQ ID NO: 576205 - DNA, 564 bp, Homo sapiens
aattagcgagccccaaacagtcctctttaatagaatgaatgtgctatgaaaaccgattacccggaacgatttattttggtgggaattcaccaatcgccaggagggcgacggagggggagagagaggaggtattttgtcccggggagggggtgggggttgacgggcagacagaaagcactgtcacggggtctcccaatctgcgaagggggcctcccgacccagccatctccactcttttggcctctgtcgcctagaagtgaggggctgggagtcaggttcagcaaactgggagtcactaacttcgggaggacttcacagcgttccagagaaaaactccgagccctgagaactccagggagtcttcagctactggttgaagatccacgacacagacctggagaaaaacagcgttctgctttccggagacctaggcagaacttgcgcttttcaggagttttggtacctccttttaacagcgaagtcaaaatacaaactctttgtgaaaatgwttcctccttcttgctaaatcctcctcaaagtgggtgcaacttgtgcggtggtaca

SEQ ID NO: 576206 - DNA, 481 bp, Homo sapiens
ccctccacagcaagcttttcttcttaaggagcggggttgtaacaagttcatactgcagctccagccagggaagacagaacctttgcccgagctgcagaggctggaggatccgaagcccakgacgccccggaatgtgcccggcgcccgtgcagaacctgcccagggcgcgttcccgcaaccctgggctcgctgggaattcctagaccgacctaagggtcctggggctagaaaccgcgcgctgcccttggggctctgtttttaacgtctctatctgtgaagctgttcacccctgttcaagtccaacgccaggtacccaggtttcgaaccatctttagtctactgacctccggcttaacggcttactgcagactgtccggcgctatcctgcgtggaatttggaggagcgggtcaccgcgggacagaggctgaaggaggagagggatgcgcaggtctgccgccgcccgaacacgaaagacaacag

SEQ ID NO: 576207 - DNA, 631 bp, Homo sapiens
tcttctgtcattgaggaagaaatattctttctctcttgcaaagctactctttccccatgtccttaattctgatcttattttcccaagtcctggctttcattcacccacccaccatccacccrtctctccacccacccatccaggcagcagacagtggctgagtgtctctgagccacatcctgtgctaggccaacagggccaagtcacactgggatcttggtccaaactagttctcactcagccttgtagaggtgtgggggcatgaacccaaatccgtgtgatgcacagtagaactcacaggctgtctcggagaatgggacatggcagaagaaggagaaattatgttccattcagaaatcaggggaagccagagcagacagcgacctctctttgaaggaggaggatttgggcacaagaagtgagcgaagaagcaactgggaaacacccttgtcttccacagccctcaccacatcctgatgtctcctctcctttgcagagccctcacatgggttcagagaggttaactaacttcctccaagtcacccagctcataagtggtagcgctgattggagaagctcgaatgttgatcttcacaaaggccttcctggaccacttctgtgtatctcactt

SEQ ID NO: 576208 - DNA, 631 bp, Homo sapiens
tcttctgtcattgaggaagaaatattctttctctcttgcaaagctactctttccccatgtccttaattctgatcttattttcccaagtcctggctttcattcacccacccaccatccacccatctctccacccacccatccaggcagcagacagtggctgagtgtctctgagccacatcctgtgctaggccaacagggccaagtcacactgggatcttggtccaaactagttctcactcagccttgtagaggtgtgggggcatgaacccaaatccgtgtgatgcacagtagaactcacaggctgtctcggagaaygggacatggcagaagaaggagaaattatgttccattcagaaatcaggggaagccagagcagacagcgacctctctttgaaggaggaggatttgggcacaagaagtgagcgaagaagcaactgggaaacacccttgtcttccacagccctcaccacatcctgatgtctcctctcctttgcagagccctcacatgggttcagagaggttaactaacttcctccaagtcacccagctcataagtggtagcgctgattggagaagctcgaatgttgatcttcacaaaggccttcctggaccacttctgtgtatctcactt

SEQ ID NO: 576209 - DNA, 484 bp, Homo sapiens
tgctattttggggctatttaccgggacttctctgggcctcagtttccrcatctctaaaatgggtatcttcatgggtcctttaggagcatgctttgagctttgagtatagcttcatcctcaattttcttttctccatcctccctgctgactctctttcatcttttgtctgttctttatcttcctgattatttttctcagttatccaattaatatttactcacacactttgttccaggcttagcctaatttctgatgatgcaaggataaaccagctattttcccattccccttgaggatgaggaaaggccttgatgagccaggacaggccaggggtcttggagtcagccactcctcattgtcagcacaccacaagttctccctgtcacaccaggaagatgcagtccgactggaaggtagaatgagctgtaggggctggcccacaagatctgcacccctcatcctccttccacgaagggagctggga

SEQ ID NO: 576210 - DNA, 318 bp, Homo sapiens
cctccttccacgaagggagctgggaatgccaaggatggatgcataattctggggtaagagggactcaggaaagggcagacatctgatccaggtctggaaagctaagcaggggtttaatcaacagggaaaatgcagggaagagggaacagcastgttaaaggcctggggtttagacctgcactttgtgcagcataactaattctggatggagaggaaggaggacatgagggtggcacctggagatggctggggatttgagggatgagtgtagataggggcaggaaccacttcccaaagtgcttgtaggtgagggtgaac

SEQ ID NO: 576211 - DNA, 556 bp, Homo sapiens
ccactactaactagctgtgtgaccctgagcaagacacttaacctctctgattctgttctttcatctgagggggagcggggggaaatctgacaataatacctacctcccagagtacagagtagagaggattataaagagataaagtttgtgaaacctctgacaaggggcctgacacccaactcaatacaagtcagttatcttcctcgcattccctcccaccccctgccggaactgagatggggcccacggcgggctgcgcagggcagagctggaggggagaagggccagccttcctccgccggggtgggcagagccagaatggaagacgtttggtcgaccctggagcctcggggtctgcctgacatctccgggcttaaataaccgtgcgcctttgttattcgtcrgcagcaaagtggttcgttacgcctgattggtctaattgctttgaaatgggatatattatctataattatagagctctaggagagccggccggcctctcctttcatcttcccaagtgcaccctcacgtcgcgatcacattaatttgggccatt

SEQ ID NO: 576212 - DNA, 337 bp, Homo sapiens
ggaaagccaaacatcgtatgttctctgtcataaattggagctaagctatgaggatgcaaaggcataagaatgatacaatagrttttgaggactcgggggaaagggtgggaggggtgggagggataaaatactacacattaggtacagtgtatactgcttggatgatgagtgcaccaaaatctcagaaatcactgctgaagaacttctccatgtaaccaaccaccacctgtacatatacccgtacaccacattttctttatccactcattgattgatgagcacttgggctggttccatatttttgcaattgtgctgctacaaacttgcctgtacaagt

SEQ ID NO: 576213 - DNA, 337 bp, Homo sapiens
ggaaagccaaacatcgtatgttctctgtcataaattggagctaagctatgaggatgcaaaggcataagaatgatacaataggttttgaggactcgggggaaagggtgggaggggtgggagggataaaatactacacattaggtasagtgtatactgcttggatgatgagtgcaccaaaatctcagaaatcactgctgaagaacttctccatgtaaccaaccaccacctgtacatatacccgtacaccacattttctttatccactcattgattgatgagcacttgggctggttccatatttttgcaattgtgctgctacaaacttgcctgtacaagt

SEQ ID NO: 576214 - DNA, 570 bp, Homo sapiens
aaaactaaataaatggaggcattccatgttcatagataggaagattccattttgtgaagatgtaagttatttcaaacttaatgtgtagattcagagcaatctcaktcgaagcctcggcaagttctcttgtagctactgacaagctgattctaaagtttatatggagaggcaaaagactcagaaatagccaacacaatattgaaggaaaagaacaaagttggaggattgacactattctactttaagacttgctataaagctgtaataatcaagaaggtgtggcattggcaaaagaataaacaaatagagcaatgtaacagcatagagagtccagaaatagagccacataaatacagtcactgatctttgactagggggaaagtcaatacaataaagatcatcttttcaacacatggtactggaacaaccagacatccacaagcaaaaaaaaaagaaaaaagaaaagaaaagaaaaagaaaaattaactcaaaatgtatcataaacctaaatgtaaaatacaaaagtgtgaacctcctagaagataacttaggagaaaacctagatggcct

SEQ ID NO: 576215 - DNA, 570 bp, Homo sapiens
aaaactaaataaatggaggcattccatgttcatagataggaagattccattttgtgaagatgtaagttatttcaaacttaatgtgtagattcagagcaatctcagtcgaagcctcggcaagttctcttgtagctactgacaagctgattctaaagtttatatggagaggcaaaagactcagaaatagccaacacaatattgaaggaaaagaacaaagttggaggattgacactattctactttaagacttgctataaagctgtaataatcaagaaggtgtggcattggcaaaagaataaacaaatagagcaatgtaacagcatagagagtccagaaatrgagccacataaatacagtcactgatctttgactagggggaaagtcaatacaataaagatcatcttttcaacacatggtactggaacaaccagacatccacaagcaaaaaaaaaagaaaaaagaaaagaaaagaaaaagaaaaattaactcaaaatgtatcataaacctaaatgtaaaatacaaaagtgtgaacctcctagaagataacttaggagaaaacctagatggcct

SEQ ID NO: 576216 - DNA, 604 bp, Homo sapiens
atctcactaaagaaaatacagagatggcaaataagcatatgaaaagatggtccacatcatgtgtcattagggaaatgtaaatttaaacaacaaggagataacattgtccatctattagatggataaaatttagaacactgaaaagaccaaatcctgtaagagtgtggggtaacggtgtattaatccattttcatgctggtgataaagacatacctgagactaggtaatttataaggaaaaacaggttcaatggactcacagttctgtgtggctgaggaggcctcacaattatggtggaaggtgaaagccrcatctcataaggtggcagacaagagaagagaacttgtgcagggaaactcccctttataaaaccatcagatctcatgagacttattcactatcatgagaatagcatggaaaagacctgcccccatgattcagttatctcccactgggcccctcccacaacacaagataattatgggaactaacaatttgagatgagatttgggtagggacacagccaaaccgtctcaaacaggaactctcattcattgttggtggaaatgcaaaatggtacagccatttgccaacacagttcagc

SEQ ID NO: 576217 - DNA, 604 bp, Homo sapiens
atctcactaaagaaaatacagagatggcaaataagcatatgaaaagatggtccacatcatgtgtcattagggaaatgtaaatttaaacaacaaggagataacattgtccatctattagatggataaaatttagaacactgaaaagaccaaatcctgtaagagtgtggggtaacggtgtattaatccattttcatgctggtgataaagacatacctgagactaggtaatttataaggaaaaacaggttcaatggactcacagttctgtgtggctgaggaggcctcacaattatggtggaaggtgaaagccgcatctcataaggtggcagacaagagaagagaacttgtgcagggaaactcccctttataaaaccatcagatctcatgagacttattcactatcatgagaatagcatggaaaagacctgcccccatgattcagttatctcccactgggcccctcccacaacacawgataattatgggaactaacaatttgagatgagatttgggtagggacacagccaaaccgtctcaaacaggaactctcattcattgttggtggaaatgcaaaatggtacagccatttgccaacacagttcagc

SEQ ID NO: 576218 - DNA, 194 bp, Homo sapiens
ggcccagggcttgcttttggagctttctcctgatatctgtggctgtggctgattgggtaataaacttatcttttagaatcaattgaccctcgagtgattcrgctgacaggggagtatattttcttaaggcctcccatagctgctcgaggaaggcagaaggattttcttcctttccctgagttatggtggacatc

SEQ ID NO: 576219 - DNA, 194 bp, Homo sapiens
ggcccagggcttgcttttggagctttctcctgatatctgtggctgtggctgattgggtaataaacttatcttttagaatcaattgaccctcgagtgattcggctgacaggggagtatattttcttaaggcctcccatagcygctcgaggaaggcagaaggattttcttcctttccctgagttatggtggacatc

SEQ ID NO: 576220 - DNA, 558 bp, Homo sapiens
gttaaaaataaataggactatagcaggggaagtcggaggagacatgtttttctggcacgactgtaaaggtgcctggtgcttggatgtatgtatggtggctgatttgaagtgactgttttgagataacggtaatagtctgacagaagctatttggaaggaagcaaactccttttacagcctggcctggttctacaggtggtcacgtgacagtgacttgatttgttgagtgcttttctccctaaattaaaaataaaggtttctgggttgtgagatgcttcgtccttgtgggaaaatctggttcaaaacaagctctgctgcaggctttgggaatgtaggtcaggacttccttaattccatgtgctaaaccagaggtcccctgcacccaggtgaggggcctaggcagctctgcctttgcaggctgcctcagtgctggaaagatctgcttctccaccgtggaacttgggcagtgagttttaaaaaattttccaaagcattccttcaactgcggtgcagcatactttgacgktttttttttttttttttttttttttttttaaa

SEQ ID NO: 576221 - DNA, 510 bp, Homo sapiens
tgaatggcagggctgaaagarctgtaacacgaacagggataaaacatgccccttgcttgccatgttgcaggcaacaagaaggagagaagaagagaagagctgcagcccttcagggagtccagacccaggagctccctgagccatggctgtggcaccctcttaggggacctgcggttcgtggtgtctccaagcttctaggcaccactgtgcttcctggtgccagccatggaagttgtttgtgatatgcctgttccagccacaccctcacagggagctggcgcccactctggaccccacacttgcttgctcacacacccaccgctgctctatgcctggcttgcctttggcaagtgtgggaaccaagttggtagcatgagctgagtgcagcctgccaggccaagtgggcagaacaagccccatgggcccaagcaaaactcaggcaaaggtgccacctgccacagagagttttggccaggaaagcaacacccgaaggatcctgtgacatcacca

SEQ ID NO: 576222 - DNA, 591 bp, Homo sapiens
tggctctggggcccgtccaatctctttcagttcaaaatagttaacatgccaaagcaacatatttgggtattatgttctgaccttcagtactgtgtaactgcacaattaataccatttgtcatttgacactgggcaagttttccacaatctgtgtcttaattatcctttctgtaaagtgaaaataaaaacactcttacctcataagaaaattttggggataagttgacttaatatgtataagatacttagaataatgtttggcactttgaaactactcagtagaggctattattattctacatttataaggaataatgcaaatttatcacgtaattataatagccttaattttcttccctccctcccttccttctttcattccttccttcctttccttccttccttccttccttccttcctycctcccttctttccttccttccatttctttcaaatatactaatatccaagatacagtattaatactaactgcaacttcattttactcaatgtattggcatttttgtatttacgtgttttagggtttttttttttctccactgaaatttcatatggttatatgtttgaaga

SEQ ID NO: 576223 - DNA, 591 bp, Homo sapiens
tggctctggggcccgtccaatctctttcagttcaaaatagttaacatgccaaagcaacatatttgggtattatgttctgaccttcagtactgtgtaactgcacaattaataccatttgtcatttgacactgggcaagttttccacaatctgtgtcttaattatcctttctgtaaagtgaaaataaaaacactcttacctcataagaaaattttggggataagttgacttaatatgtataagatacttagaataatgtttggcactttgaaactactcagtagaggctattattattctacatttataaggaataatgcaaatttatcacgtaattataatagccttaattttcttccctccctcccttccttctttcattccttccttcctttccttccttccttccttccttccttccttcctcccttctttccttccttccatttctttcaaatatactaatatccaagatacagtattaatactaactgcaacttcattttactcaatgtattggcatttttgtatttacrtgttttagggtttttttttttctccactgaaatttcatatggttatatgtttgaaga

SEQ ID NO: 576224 - DNA, 525 bp, Homo sapiens
aaagcagtttggggttttctcaaataaattaaaacagaactaccatgtgaccccgcaatcccattactggtatatatcccaaagaaaatatatcattctactgaaaacacatgcactagcatgttaatctcagcactattcacaataacaaagacatagaatcaacctaggcacccatcaatggttgattggttaacaaatatgtggtacatatacactgtgaaataccatgcagccattaaaaaacgatgaaagcatgtcctttgtagcagcaggaatgcagctasaggacattatcctaagcaaatcaaagcaggaacagaaaactaaatgctgcatgttctcacttataagtgggagctaaatcctgagtatactcttggacataattggaacaacagacactgggaactactataggggctagagttagagcaggacaagggtttaaaaagtagctcttgggcactatgctcattacctgggtgatgggatcatttgaaccccaaacctctgcatcaaaca

SEQ ID NO: 576225 - DNA, 359 bp, Homo sapiens
ctgataacctcaggatatgtttcaaaaactgaaaacatacctttccttttytgaacgttgatggactaaaataacatgaaaaactttcatatttccatagaaattctgacaggaggaaatataagaaccaaaaatttgaccttgtggataaaattgcaagaaagaaagatactagaaataaatagtatatttcacattttgcctcagacagtcctgttgtctgagtgtcatacttgcaaaaacatcttggtttggatgattccaaaaattgtaaagtggaactagaagcccattaactatcaatgcacctggtcctggtatagggggtgaagtgtgatggaaataaggttagtaatttt

SEQ ID NO: 576226 - DNA, 563 bp, Homo sapiens
gacatatgcaagaacattacagccactaccaacataatacacaattttcctaagtgcatgtgggacattgtccatgatagtttatatattagtccacaaattaaatctcagtagattttaaaaggtagatatcatacaaaatattttctctaacaatccttggatgaagttagacatgaataattgaaggaagactggaaaatatcctgcaactctgtggaaatgaaacaacacattcttaaaccaccaatggatcaaaaaayaaataacaagggaaatcagaaaatacttggagacaaatgaaaatgaaaacagcataccaaaatttatgtgatacagtgacaaatgcttacattaaaacagagatctcaaattaacaacccaacattataagttgttgaattagaaaaagaaaacaaaccaaaggagagttcatataaatctatctgaaacttaaaaatatatatttaataggaaggaacttctttaaatgccctcactttaggagtctattattaatcagataccaaagtcaaatacactgcaagaaaactgtagaccac

SEQ ID NO: 576227 - DNA, 510 bp, Homo sapiens
ttttgggaaaaagggagtcatcaactatttcaaatgctgctatatgttaaataagatgaggatggaggatttgacactggatttaacagtgtgaagatgattcctggcatacctaaaagtagttgtggtggaatggtagagtcaaaagcctaattggaatgagatcaagaagaaatggaaggggaagaatagaagacagtaagtagacaacttttgcaaaccagtgctagtatcctctgatagacaaaggccttcttaagcaagcacccattctttctttgtacttacaaacaaaaggaaatggagtcttgacttgggaactttttttttttttttttttgagatsaagtttttgcttttgttgcccaggctggagtgcagtggcgcgatctcggctcaccacagcctcctcctctagattaaagcgattctcctgtctcagcctctcgagtagctgggattacaaatatgcgccaccacacctggctaattttgtacttttagtagaga

SEQ ID NO: 576228 - DNA, 504 bp, Homo sapiens
  misc_feature 320, 391, 419, 456, 475, 476, 492: n = A,T,C or G
ttataaattcctaaggcctttattttttcctcgtattttagatttacaatttcttcataacctattttattgccctaggcarttgtcatctagatagccctaaatgtgcatattaaaggaactcttaggtaaaaaaaatcagatagtgaaatttacatgtcaaagcacagagagaaagagtcgggcgatgttagagggagattaaacatggatgccaaatcaaacacaaaattgtagaaatatattataggattgtataaggagaccagttgtatttagatagggactacctgtcttttaactggatctctgagctctgngcagagcccacactgaatcctaggtctccaaaaagggagaattactatgaggctacaccaagtgacggttntacagtgtcctttttttttttttaacanagacatttctaagtgttcaagctactttcttccttanaaatccaagaataaactanntacagttttagttaanaaatcaaagtac

SEQ ID NO: 576229 - DNA, 504 bp, Homo sapiens
  misc_feature 320, 391, 419, 456, 475, 476, 492: n = A,T,C or G
ttataaattcctaaggcctttattttttcctcgtattttagatttacaatttcttcataacctattttattgccctaggcagttgtcakctagatagccctaaatgtgcatattaaaggaactcttaggtaaaaaaaatcagatagtgaaatttacatgtcaaagcacagagagaaagagtcgggcgatgttagagggagattaaacatggatgccaaatcaaacacaaaattgtagaaatatattataggattgtataaggagaccagttgtatttagatagggactacctgtcttttaactggatctctgagctctgngcagagcccacactgaatcctaggtctccaaaaagggagaattactatgaggctacaccaagtgacggttntacagtgtcctttttttttttttaacanagacatttctaagtgttcaagctactttcttccttanaaatccaagaataaactanntacagttttagttaanaaatcaaagtac

SEQ ID NO: 576230 - DNA, 504 bp, Homo sapiens
  misc_feature 320, 391, 419, 456, 475, 476, 492: n = A,T,C or G
ttataaattcctaaggcctttattttttcctcgtattttagatttacaatttcttcataacctattttattgccctaggcagttgtcatctagatagccctaaatgtgcatattaaaggaactcttaggtaaaaaaaatcagatagtgaaatttacatgtcaaagcacagagagaaagagtckggcgatgttagagggagattaaacatggatgccaaatcaaacacaaaattgtagaaatatattataggattgtataaggagaccagttgtatttagatagggactacctgtcttttaactggatctctgagctctgngcagagcccacactgaatcctaggtctccaaaaagggagaattactatgaggctacaccaagtgacggttntacagtgtcctttttttttttttaacanagacatttctaagtgttcaagctactttcttccttanaaatccaagaataaactanntacagttttagttaanaaatcaaagtac

SEQ ID NO: 576231 - DNA, 504 bp, Homo sapiens
  misc_feature 320, 391, 419, 456, 475, 476, 492: n = A,T,C or G
ttataaattcctaaggcctttattttttcctcgtattttagatttacaatttcttcataacctattttattgccctaggcagttgtcatctagatagccctaaatgtgcatattaaaggaactcttaggtaaaaaaaatcagatagtgaaatttacatgtcaaagcacagagagaaagagtcgggygatgttagagggagattaaacatggatgccaaatcaaacacaaaattgtagaaatatattataggattgtataaggagaccagttgtatttagatagggactacctgtcttttaactggatctctgagctctgngcagagcccacactgaatcctaggtctccaaaaagggagaattactatgaggctacaccaagtgacggttntacagtgtcctttttttttttttaacanagacatttctaagtgttcaagctactttcttccttanaaatccaagaataaactanntacagttttagttaanaaatcaaagtac

SEQ ID NO: 576232 - DNA, 563 bp, Homo sapiens
  misc_feature 96, 167, 195, 232, 251, 252, 268: n = A,T,C or G
cacaaaattgtagaaatatattataggattgtataaggagaccagttgtatttagatagggactacctgtcttttaactggatctctgagctctgngcagagcccacactgaatcctaggtctccaaaaagggagaattactatgaggctacaccaagtgacggttntacagtgtcctttttttttttttaacanagacatttctaagtgttcaagctactttcttccttanaaatccaagaataaactanntacagttttagttaanaaatcaaagtacacaatacaaaagcaggcagcttaagaatctgaaagaacttgtstgtttacactcttgggaaaaaagaggtttctccccaaagggagtgtggcatcttctccattttctttaaggaatgcaggcaattataaactattttacgtccctcatgcaacagtgggtagcaaaataaaggagagacagcagaagtaaatgaagaaaacagaatgtcatcgtctgagaagaaaaaaaaaaaaacttttgctcaaaaaagacaaggtcctaggagagaagatgtagaaag

SEQ ID NO: 576233 - DNA, 563 bp, Homo sapiens
  misc_feature 96, 167, 195, 232, 251, 252, 268: n = A,T,C or G
cacaaaattgtagaaatatattataggattgtataaggagaccagttgtatttagatagggactacctgtcttttaactggatctctgagctctgngcagagcccacactgaatcctaggtctccaaaaagggagaattactatgaggctacaccaagtgacggttntacagtgtcctttttttttttttaacanagacatttctaagtgttcaagctactttcttccttanaaatccaagaataaactanntacagttttagttaanaaatcaaagtacacaatacaaaagcaggcagcttaagaatctgaaagaacttgtctgtttacactcttgggaaaaaagaggtttctccccaaagggagtgtggcatcttctccattttctttaaggaatgcaggcaattataaactattttacgtccctcatgcaacagwgggtagcaaaataaaggagagacagcagaagtaaatgaagaaaacagaatgtcatcgtctgagaagaaaaaaaaaaaaacttttgctcaaaaaagacaaggtcctaggagagaagatgtagaaag

SEQ ID NO: 576234 - DNA, 563 bp, Homo sapiens
  misc_feature 96, 167, 195, 232, 251, 252, 268: n = A,T,C or G
cacaaaattgtagaaatatattataggattgtataaggagaccagttgtatttagatagggactacctgtcttttaactggatctctgagctctgngcagagcccacactgaatcctaggtctccaaaaagggagaattactatgaggctacaccaagtgacggttntacagtgtcctttttttttttttaacanagacatttctaagtgttcaagctactttcttccttanaaatccaagaataaactanntacagttttagttaanaaatcaaagtacacaatacaaaagcaggcagcttaagaatctgaaagaacttgtctgtttacactcttgggaaaaaagaggtttctccccaaagggagtgtggcatcttctccattttctttaaggaatgcaggcaattataaactattttacgtccctcatgcaacagtgggtagcaaaataaaggagagacagcagaagtaratgaagaaaacagaatgtcatcgtctgagaagaaaaaaaaaaaaacttttgctcaaaaaagacaaggtcctaggagagaagatgtagaaag

SEQ ID NO: 576235 - DNA, 572 bp, Homo sapiens
acctccacattcaccatccttcaaatccatgtgagacctgatttttcctggatgctggacaagagtttgggatacagaaagctgtcacactggctttctgcccttgtgaaaaggcagagggtccattaagctgtttaacacttaagccatccgtggatggcaaagctaaaagagcacactgtaatatacacccacttgggctttgggcttcacaggcacccacccctggatgctgccatgggtctagagcccaggagtgcttgccccagcttctgcacctgcctgtctgtgtgttccctttcccatgaggggtttgaacatgcatggcagccagaggagccacacgcctgtcgcacactttttgatggggttgtttgttttttttcttgtgaatttgtttargttccttgtagattctggatattagccctttgtcagatggatagattgcaaaaattttcatccattttgtaggttgcctattcactgatgatagtttattttgctatgcagaagctccttagtttaattagatcccatttgtcaattttggcttttgttgccattgcttt

SEQ ID NO: 576236 - DNA, 488 bp, Homo sapiens
atgcggcaaatgaaatttgtttttttgaaattttataataaaagtttaatcatcttgagtataaaatataatttctataaaccttgtaacctttatcattttgcattaaggagtgagttaatgctccaagaaagccttgttaaactgacacagcaacctagatactggttttgctttagtgtgcctttgatattaatggttaattcctagagaaactgagctacttttctcttaatatcagcccttacaatctcacatgcccacctgttccacgatagtccttgggccttgaggagttgaatagttttaatttctgaccctgcatctcatgaacgcagtttactttgattagcatcttctactgkgcctgaagatgaggctgtaattgatgtcagtgtttaagatatagcagaacttggtgtcctttttagacccagaagtcaaagccctatagctcaatggcacaaggactttaaaagcacatacag

SEQ ID NO: 576237 - DNA, 576 bp, Homo sapiens
aaaatagatttcaagacacaaaatgtaagaggaaaaaaagtcactatataataatgaagggatcagttcaacaaaaggctataagaactttacatatatgtgcacccaascctgtagcaccaaggtatataaaggaaacactattacaactaatgggagagataggtcccaatagcataatggctgggggcttcaacaccctactttcagcattggacagttcttccagacataaaatcaacacagaaacatcacacttaatgtacattacagaccaaatggatgtaacagacatttacaaaacacttcttccaaggactgcaaaatacaccttcttttacccagcacgtggatcattctcaaggttagaatatatgttaggtcataaaacaagtcttaaaacatcaacattcaaataaattgaaataatttcaagcttcttctctgaccaccaaaaaacaaaaaaagaaaatcccgaaaataacaaggggaactttgaaaattatacaaatccatagaattaaaaaaaaaaaaatgctcctgaatgacccacaggtcaatgaagaaattaaaaac

SEQ ID NO: 576238 - DNA, 576 bp, Homo sapiens
aaaatagatttcaagacacaaaatgtaagaggaaaaaaagtcactatataataatgaagggatcagttcaacaaaaggctataagaactttacatatatgtgcacccaacyctgtagcaccaaggtatataaaggaaacactattacaactaatgggagagataggtcccaatagcataatggctgggggcttcaacaccctactttcagcattggacagttcttccagacataaaatcaacacagaaacatcacacttaatgtacattacagaccaaatggatgtaacagacatttacaaaacacttcttccaaggactgcaaaatacaccttcttttacccagcacgtggatcattctcaaggttagaatatatgttaggtcataaaacaagtcttaaaacatcaacattcaaataaattgaaataatttcaagcttcttctctgaccaccaaaaaacaaaaaaagaaaatcccgaaaataacaaggggaactttgaaaattatacaaatccatagaattaaaaaaaaaaaaatgctcctgaatgacccacaggtcaatgaagaaattaaaaac

SEQ ID NO: 576239 - DNA, 500 bp, Homo sapiens
aaaaaaaaaaaacttaaaaaaaattagcagagtgtggtggtgcacacccatagtcccagctacccagctgaggtgggagaatcacttgagcccaggaggtccaggctgcagtgggccatgattgggccactgcattctagcctgctagcctgggcaacaagctgagaccccatctcaaaaaaaaaaaaaaaaaaaaaaaaaaaaaaaaaaaaaagcatataccttaattcaaaaaatactttattgctaaaaaaaaaaaaactaatgatcacctgagcctttagctagttgtcatctttttgctagtggagggtctagccttaatgttgatcgctactgactgactgatcagggtggtggttgccgaaraatgggatggctgtggcaatttcttaaaataagacaacaatgaagtttcctgtattgatcaattcttcctttcataaaagatttctctgtagcatacaatggtatttgacagcattttatccacagcagag

SEQ ID NO: 576240 - DNA, 486 bp, Homo sapiens
tccagtgtttttttttttagcttttattttaggtttgggggtacatgtgcaggtttgttgtatagatagattacatatcactggggtttagcatacagattattttgtcacccaggttataagcatagtacctgatgggtgtttttttgtttctcaccctcctcctaacgtccaccctmaagtaggcccaggtgtctgttgttcccctcttcctttccatatgtactcagagttttaaatacgagtttttcatgttcctaatttagctattctattgtcatagctttcttttctttccccataagttattggggtacaggtggtatttggttacatcagtaagttctttagtggtgatatgtgagattttggtgtacccatcacctgagcagtacacactgcaccatatttgtagtcttttatcccctgccttcttccccaaagtccactgtatcattcttaggccttttcatcctcatagcttag

SEQ ID NO: 576241 - DNA, 654 bp, Homo sapiens
taaatattttaagcccactgttgagacctactgctcagaaaaaaaaagattattttcaamatattactgcttattcacaatacatgtggtcacccaagagctctgatggagatgtacaaggagattcatgttgttttcatgccagctaacacaacatccattttggagcccatgaatcaaggagcaatttcaaccttcaagtcttattatttaggaaatgcattttgtaagactatggctgccatagatactgattcctctgattgatttgagcaacataaattgaaaaccttctggaaagcattcactattctagaagccattaagaacatctgtcatccgtggaaggaggtcaaaataccaacatcaacaggagtttgaaagaagtaaattctaaccctcatggatgactttgagaggttcaagatgttaatggaggaagaaattgcagatgtggtgaatatggcaaggaaactagaattagaagtaaagcctgaaaacgtgactgaattgctgcaatttcatgataaaaactgaacaaatgaggagttgctacttaggatggatgagcaaagaaagtggtttgttgagatggaatctactcctggtgaagatgctgtgaacattgttgaaatgacaataaagggtttagaa

SEQ ID NO: 576242 - DNA, 577 bp, Homo sapiens
ttgctcaactcctgatatttcttctcacctaaaaaaagaaaaaaaatacaatgtacagtaaccttttaatcaaaacgcagccttgtaggtggagcctgaaagcttgccattgtttatacagctgtttaacagctgatgcaggtattctggtgatgctactgtgttgcttattattttttactgtattaatggcatgtcatatttttacttatgtgtgaataattgtgtgaaaatgattgctcatcagtagcatataaattcagagtcagaaatgatggtcagtgaygtcagacagccacagattttccacatggaagctgagatagtgacacctttgctttctgatggttccatgtacacaaactttgtttcattcacaaaattatttgaaatattatataaaattacctgtaggctatgtgtataagatatatgaaacataagtgaatttcacatttagacttgggtctcatcgccaagatatctcacgtagatgcaaatattataaaatccaaaaaaaaattccgaaaccctaaacacttctggttccaaacatttcagataagggatactcaat

SEQ ID NO: 576243 - DNA, 577 bp, Homo sapiens
ttgctcaactcctgatatttcttctcacctaaaaaaagaaaaaaaatacaatgtacagtaaccttttaatcaaaacgcagccttgtaggtggagcctgaaagcttgccattgtttatacagctgtttaacagctgatgcaggtattctggtgatgctactgtgttgcttattattttttactgtattaatggcatgtcatatttttacttatgtgtgaataattgtgtgaaaatgattgctcatcagtagcatataaattcagagtcagaaatgatggtcagtgatgtcagacagccacagattttccacatggaagctgagatagtgacacctttgctttctgatggttccatgtacacaaactttgtttcattcacaaaattatttgaaatattatataaaattacctgtaggctatgtgtataagatatatgaaacataagtgaatttcacatttagacttgggtctcatcgycaagatatctcacgtagatgcaaatattataaaatccaaaaaaaaattccgaaaccctaaacacttctggttccaaacatttcagataagggatactcaat

SEQ ID NO: 576244 - DNA, 524 bp, Homo sapiens
agatctgaaaatgtgtgtgtgtgtgtgtgtgtgtgtgtgtgtgtgtctgtctgtgtgtgtttgtgtgtgtgtgaagcagggagaaagagcaagagtgaaagtgagcaagagagagaggagagagagggagagaatcagacagatacagaaagagattgacagagctacagagacagaattgaaaggggacaccaagaatattgagctgagaaactataaaatgggagttgccrttaaacagaatggggaagagcaaatttggggagtttcagtggctcaatatagacatattaattttgagattcctaactgacatccacgtggataagtcagggagtgttgggtgtagtgtccagtgtttaggtgtaatatgaaatatcaggaaattaatgacacaaacattagtaagaaagcaaagataagaagtcgaagtcctgagcctaatggtcctctaacatttaaaaaatagaaaagatgaaacctgcaataaaggactaggggtaattatcaaaaacatggtgggg

SEQ ID NO: 576245 - DNA, 410 bp, Homo sapiens
gtgtgtgtgtgtgtgtgtgtgtgtgtgtgtgtgtctgtctgtgtgtgtttgtgtgtgtgtgaagcagggagaaagagcaagagtgaaagtgagcaagagagagaggagagagagggagagaatcagacagatacagaaagagattgacagagctacagagacagaattgaaaggggacaccaagaatattgagctgagaaactataaaatgggagttgccattaaacagaatggggaagagcaaatttggggagtttcagtggctcaatatagacatattrattttgagattcctaactgacatccacgtggataagtcagggagtgttgggtgtagtgtccagtgtttaggtgtaatatgaaatatcaggaaattaatgacacaaacattagtaagaaagcaaagataa

SEQ ID NO: 576246 - DNA, 516 bp, Homo sapiens
gtgtgtgtgtgtgtgtgtgtgtgtgtgtgtgtgtctgtctgtgtgtgtttgtgtgtgtgtgaagcagggagaaagagcaagagtgaaagtgagcaagagagagaggagagagagggagagaatcagacagatacagaaagagattgacagagctacagagacagaattgaaaggggacaccaagaatattgagctgagaaactataaaatgggagttgccattaaacagaatggggaagagcaaatttggggagtttcagtggctcaatatagacatattaattttgagattcctaactgacatccacgtggataagtcagggagtgktgggtgtagtgtccagtgtttaggtgtaatatgaaatatcaggaaattaatgacacaaacattagtaagaaagcaaagataagaagtcgaagtcctgagcctaatggtcctctaacatttaaaaaatagaaaagatgaaacctgcaataaaggactaggggtaattatcaaaaacatggtggggggaa

SEQ ID NO: 576247 - DNA, 477 bp, Homo sapiens
gaaaggggacaccaagaatattgagctgagaaactataaaatgggagttgccattaaacagaatggggaagagcaaatttggggagtttcagtggctcaatatagacatattaattttgagattcctaactgacatccacgtggataagtcagggagtgttgggtgtagtgtccagtgtttaggtgtaatawgaaatatcaggaaattaatgacacaaacattagtaagaaagcaaagataagaagtcgaagtcctgagcctaatggtcctctaacatttaaaaaatagaaaagatgaaacctgcaataaaggactaggggtaattatcaaaaacatggtggggggaaagtaggttaagtattctggaattctataaaaaagttttacaaagagaaggtggagatcaactgtgtgaaatgctgctgatatataaattaagacgaaggccgaggagttatggttcaatttatagttta

SEQ ID NO: 576248 - DNA, 477 bp, Homo sapiens
gaaaggggacaccaagaatattgagctgagaaactataaaatgggagttgccattaaacagaatggggaagagcaaatttggggagtttcagtggctcaatatagacatattaattttgagattcctaactgacatccacgtggataagtcagggagtgttgggtgtagtgtccagtgtttaggtgtaatatgaaatatcaggaaattaatgacacaaacattagtaagaaagcaaagataagaagtcgaagtcctgagcctaatggtcctctaacatttaaaaaatagaaaagatgaaacctgcaataaaggactaggggtaattatcmaaaacatggtggggggaaagtaggttaagtattctggaattctataaaaaagttttacaaagagaaggtggagatcaactgtgtgaaatgctgctgatatataaattaagacgaaggccgaggagttatggttcaatttatagttta

SEQ ID NO: 576249 - DNA, 477 bp, Homo sapiens
gaaaggggacaccaagaatattgagctgagaaactataaaatgggagttgccattaaacagaatggggaagagcaaatttggggagtttcagtggctcaatatagacatattaattttgagattcctaactgacatccacgtggataagtcagggagtgttgggtgtagtgtccagtgtttaggtgtaatatgaaatatcaggaaattaatgacacaaacattagtaagaaagcaaagataagaagtcgaagtcctgagcctaatggtcctctaacatttaaaaaatagaaaagatgaaacctgcaataaaggactaggggtaattatcaaaaacatggtggggggraagtaggttaagtattctggaattctataaaaaagttttacaaagagaaggtggagatcaactgtgtgaaatgctgctgatatataaattaagacgaaggccgaggagttatggttcaatttatagttta

SEQ ID NO: 576250 - DNA, 329 bp, Homo sapiens
agctctgctaggtggtgagggaatctgggtcctttttctggtatttgaattcagtgctacataggttactggctgggttgacaatctgaaattgtaaatcatgagtattctatgtagatagactgtcacgatttacaataaaacattgayatgtcaaagatcatggtgatgtgaggttgggtactgtctgtgagaattaattgaggaaattaaaattatatggttttatttacatagagtgtataacaactagttaagggatagatgtcttcttatctgactttcaagtatctaagagtggattattgtgcttgttaaagttctgggaa

SEQ ID NO: 576251 - DNA, 527 bp, Homo sapiens
tattggagtggttgctgaaatgaaagtctgatctctggattcttaaggaaaaattttattggactgcagagacataaattggatttttaattctggagtcaggatgtgctcagtaaacatgtgcccattaatgcctcctcrcatttttttagctcggtattctgttatcttttaataatataataatgacttgcaaaacctacacccattttgcagcaaaccgtgacacatgtatacctgtgtaacaaacctgcatgttctgcacatttatcccagaacttaaagtatatatatacactttatatatatatatatattctctctctctctctctctctatctctctatatatatatagagagagacagagagagagacagacagacagacagagagagagagaaagaaatcccagccaagtgcggtggctcatgattgtaatcccagggctttgggaggctgagacaggtcgaccatctgaggtcaggattgagaacagcctggccaacatggtgaaaccctgtctt

SEQ ID NO: 576252 - DNA, 386 bp, Homo sapiens
ctgatattctttctcctgcttgattgattcagctattgatacttgtgtatgcttcatgaagttcttgtgctgggtttttcagctccatcaggtcatttatattcttctctaaactggttattctagttaacaattcgtcctacctttttttttcaggctcttagcttccttgcattgggttagaacaygctcctttagcttggaggagtttgttattacccgccttctgaagcctacttctgtcaatccatcaaactcattgtctgtccagttttgttcccttgctggtggggagttgtgatcttctggaggagaagaggcattctggcttttggagttttcgcctttttgcactggtttctccccatctttgtggatttatctac

SEQ ID NO: 576253 - DNA, 386 bp, Homo sapiens
ctgatattctttctcctgcttgattgattcagctattgatacttgtgtatgcttcatgaagttcttgtgctgggtttttcagctccatcaggtcatttatattcttctctaaactggttattctagttaacaattcgtcctacctttttttttcaggctcttagcttccttgcattgggttagaacacgctcctttagctyggaggagtttgttattacccgccttctgaagcctacttctgtcaatccatcaaactcattgtctgtccagttttgttcccttgctggtggggagttgtgatcttctggaggagaagaggcattctggcttttggagttttcgcctttttgcactggtttctccccatctttgtggatttatctac

SEQ ID NO: 576254 - DNA, 386 bp, Homo sapiens
ctgatattctttctcctgcttgattgattcagctattgatacttgtgtatgcttcatgaagttcttgtgctgggtttttcagctccatcaggtcatttatattcttctctaaactggttattctagttaacaattcgtcctacctttttttttcaggctcttagcttccttgcattgggttagaacacgctcctttagcttggaggagtttgttattacccgccttctgaagcctacttctgtcaatccrtcaaactcattgtctgtccagttttgttcccttgctggtggggagttgtgatcttctggaggagaagaggcattctggcttttggagttttcgcctttttgcactggtttctccccatctttgtggatttatctac

SEQ ID NO: 576255 - DNA, 386 bp, Homo sapiens
ctgatattctttctcctgcttgattgattcagctattgatacttgtgtatgcttcatgaagttcttgtgctgggtttttcagctccatcaggtcatttatattcttctctaaactggttattctagttaacaattcgtcctacctttttttttcaggctcttagcttccttgcattgggttagaacacgctcctttagcttggaggagtttgttattacccgccttctgaagcctacttctgtcaatccatcaaactcattgtctgtccagttttgttcccttgctggyggggagttgtgatcttctggaggagaagaggcattctggcttttggagttttcgcctttttgcactggtttctccccatctttgtggatttatctac

SEQ ID NO: 576256 - DNA, 511 bp, Homo sapiens
aaaaaataaaagttagctgaccatggtggtgtatgcctgtaattaacagmtacatgggaggctgaggtgggaggatcccttgagcgcagaaggtcaaggttgcagtgagctgtgatcatgccactgcacttcagcatgggtgacagacagagacactgtctcaaaaaaatttcaaaaatacattaagatgtcttgtatagacatttatccatttacatttacttatttttgacagtttatctagagtatttgtgagaactgaggtattagacaaagctagtcatcatttctaggttattttcttgttaaccatgttatagcctgtgaatatcaggtgttcacgtaagtgaggacttcaaagttaaatacatgggtattttaccaataactcagaaaattccattatttttgttcaacaaaccatattaaattggtcttatgtatttaaaaaatcacataaagaaatattcttttttcctgtgtttatagctttataaccttcatgccaaac

SEQ ID NO: 576257 - DNA, 511 bp, Homo sapiens
aaaaaataaaagttagctgaccatggtggtgtatgcctgtaattaacagctacatgggaggctgaggtgggaggatcccttgagcgcagaaggtcaaggttgcagtgagctgtgatcatgccactgcacttcagcatgggtgacagacagagacactgtctcaaaaaaatttcaaaaatacattaagatgtcttgtatagacatttatccatttacatttacttatttttgacagtttatctagagtatttgtgagaactgaggtattagacaaagctagtcatcatttctaggttattttcttgttaaccatgttatagcctgtgaatatcaggwgttcacgtaagtgaggacttcaaagttaaatacatgggtattttaccaataactcagaaaattccattatttttgttcaacaaaccatattaaattggtcttatgtatttaaaaaatcacataaagaaatattcttttttcctgtgtttatagctttataaccttcatgccaaac

SEQ ID NO: 576258 - DNA, 511 bp, Homo sapiens
aaaaaataaaagttagctgaccatggtggtgtatgcctgtaattaacagctacatgggaggctgaggtgggaggatcccttgagcgcagaaggtcaaggttgcagtgagctgtgatcatgccactgcacttcagcatgggtgacagacagagacactgtctcaaaaaaatttcaaaaatacattaagatgtcttgtatagacatttatccatttacatttacttatttttgacagtttatctagagtatttgtgagaactgaggtattagacaaagctagtcatcatttctaggttattttcttgttaaccatgttatagcctgtgaatatcaggtgttcacgtaagtgaggacttcaaagttaaatacatgggtattttacmaataactcagaaaattccattatttttgttcaacaaaccatattaaattggtcttatgtatttaaaaaatcacataaagaaatattcttttttcctgtgtttatagctttataaccttcatgccaaac

SEQ ID NO: 576259 - DNA, 546 bp, Homo sapiens
acatgggtattttaccaataactcagaaaattccattatttttgttcaacaaaccatattaaattggtcttatgtatttaaaaaatcacataaasaaatattcttttttcctgtgtttatagctttataaccttcatgccaaaccctagcaccttaaaatatctagcaaatgtaaatataaaacacagtcaaaaatgtatgctgacaagtctgaagagatttctattttttatttttattttatcaatactttttaaattatttgtatttataaaagaactcttttgtctgggcacagtggttcatgcctgtatgccagcactttgagaggctgaggcaagaggatcacttgagctcaggagtttgagaccagcctgggcaacatagtgagacccaatctctactaagaataagataaaaaattgccaggcatggtggtgcatgcctattgtcccagctactagagaggatgaggcaggaggattgcttgagcctgggaggttgagataacagtgagctatgatcccactactgcactccagtctg

SEQ ID NO: 576260 - DNA, 486 bp, Homo sapiens
ccactcaccaaaacctccactactagaccccactaatgagaccctctctaagcagacgccygctgaccacaatcccactaaatagtcctcactgacctaggtccactgaccaggcccacactgatcaggcccctcctaaccacaccggaaatccaagcggcaatgacatgtttcatatggcaaaagttggaacaagacagagagacgaaagaggttccacagccttttaaactactagatctcatgagaactcactcactatcaggaggatggcattaagggcttggtgctttgccatttgtgaaggatccactcccacccctttatgattaaagctttttccacctaggccccgactctaacattagggagtgtactttcacatgagctttggaaggggcatagagaaaaaccgtattattctgtccctgaccccacaaatctcatgtccttctcacattgcaaaatacagtcatgccttgccag

SEQ ID NO: 576261 - DNA, 436 bp, Homo sapiens
ctgatttggtgttcactaacaagcacagaagctttgttacatttacagtgtcattcttggcaaaacctgaagttttgcctcctggrttcacgccattctcctgcctcagcctcctgagtagctgggactataggcgcccgccacctcacccagctaattttttgtatttttagtagagacggggttttgccgtgttagccaggatggtctcgatctcctgaccttgtgatccgcccacctcggccttccagagtgctgggattacaggcgtgagccaccgcgcccagccagaagctctaatttcaatgatgattgtgctttttctctcttcctcagcatctggctcatgataaaatttcaggtgtcttgatggtatctaaatcagttgttgattcagtcctggagaaacacaagcataacctctatgccaagtcat

SEQ ID NO: 576262 - DNA, 568 bp, Homo sapiens
actcaccaaaacctccactactagaccccactaatgagaccctctctaagcagacgcccgctgaccacaatcccactaaatagtcctcactgacctaggtccactgaccaggcccacactgatcaggcccctcctaaccacaccggaaatccaagcggcaatgacatgtttcatatggcaaaagttggaacaagacagagagacgaaagaggttccacagccttttaaactactagatctcatgagaactcactcactatcaggaggatggcattaagggcttggtgctttgccatttgtgaaggatccactcccacmcctttatgattaaagctttttccacctaggccccgactctaacattagggagtgtactttcacatgagctttggaaggggcatagagaaaaaccgtattattctgtccctgaccccacaaatctcatgtccttctcacattgcaaaatacagtcatgccttgccagcagtctcccaaattcttaactcatttcagcattaactcaaagttacaaagtccaaagtctcatctgggtcaaggctacattttc

SEQ ID NO: 576263 - DNA, 296 bp, Homo sapiens
taactgtgtggaatgacccatgtatgaagaatcagaaatcacattaacaggcatatcaaaagcagtcaacacctcaattacagctacaagctccrctttttgagctgaagtatagggtgtctggaaaactttagcttttgatccagaataagaacctttaccattactagacccatctgtgaaacaatgaaaacgcttagcaggctgcaggttgtttactgcaggaattgtaaatgcaaaccgttcacagtcttgctcagcgaaaagggtagtaaagaaacagtcttttaaatctg

SEQ ID NO: 576264 - DNA, 525 bp, Homo sapiens
tttgatttacccaataagctgccttgccttttttatttgtgcttccaaatcctccagttcatttaatttcactttttcccattcccacatayggctcactcaggagctgtgctatgcgcactcctggctgtgctttccagggaacagaactaaatatcacaatttgaatttcctcattgtaatctgaatcaatgactccagtgtgtatttgtaccccttttaaacttaaactagaccttcctaaaagtaatcccattgtccctgctcgcaacggtccacagactcctgttgggaccttttgcgggggttccccaggcagaaggctcacagcttttgtgcagcatagatctactgcagcactatgggctgtggtggggaaagataacgtatgggggtgagggaatggcctgagatggaaatgccctggtttagaacagggcctgggatgggcccctcagggagttttccaaaatcgggttcccttctttatcaaacttagagtgacactgattagcccaaagtttt

SEQ ID NO: 576265 - DNA, 525 bp, Homo sapiens
tttgatttacccaataagctgccttgccttttttatttgtgcttccaaatcctccagttcatttaatttcactttttcccattcccacatacggctcactcaggagctgtgctatgygcactcctggctgtgctttccagggaacagaactaaatatcacaatttgaatttcctcattgtaatctgaatcaatgactccagtgtgtatttgtaccccttttaaacttaaactagaccttcctaaaagtaatcccattgtccctgctcgcaacggtccacagactcctgttgggaccttttgcgggggttccccaggcagaaggctcacagcttttgtgcagcatagatctactgcagcactatgggctgtggtggggaaagataacgtatgggggtgagggaatggcctgagatggaaatgccctggtttagaacagggcctgggatgggcccctcagggagttttccaaaatcgggttcccttctttatcaaacttagagtgacactgattagcccaaagtttt

SEQ ID NO: 576266 - DNA, 525 bp, Homo sapiens
tttgatttacccaataagctgccttgccttttttatttgtgcttccaaatcctccagttcatttaatttcactttttcccattcccacatacggctcactcaggagctgtgctatgcgcactcctggctgtgctttccagggaacagaactaaatatcacaatttgaatttcctcattgtaatctgaatcaatgactccagtgtgtatttgtaccccttttaaacttaaactagaccttcctaaaagtaatcccattgtccctgctygcaacggtccacagactcctgttgggaccttttgcgggggttccccaggcagaaggctcacagcttttgtgcagcatagatctactgcagcactatgggctgtggtggggaaagataacgtatgggggtgagggaatggcctgagatggaaatgccctggtttagaacagggcctgggatgggcccctcagggagttttccaaaatcgggttcccttctttatcaaacttagagtgacactgattagcccaaagtttt

SEQ ID NO: 576267 - DNA, 406 bp, Homo sapiens
ttctgtccctgaccccacaaatctcatgtccttctcacattgcaaaatacagtcatgccttgccagcagtctcccaaattcttaactcatttcagcattaactcaaagttacaaagtccaaagtctcatctgggtcaaggctacattytcttttgcctacgagtctctgaaataaaaagcaagttcactgcgtctaaggtacaatgatggtacaggcattttgtaagctttccatatccaaaagggagacattttccagaaaccttcttatttttatctgaggccccttcagtctggccttcactgtccatgtttttgtcagcattcttgtcacagccatttaaccagtctctaagatggtccaaaaatgttctcatttgtctgtcttctttggagccctccaaac

SEQ ID NO: 576268 - DNA, 519 bp, Homo sapiens
agaggtgtgaagtgggaaatcgggggggggggcgggtcttacagccttcagagcagagccctgaacagagatttacccacgtatttattaacagcaagccagtcattagcattgtttctatagatattagattaactaaawgtatcccttattcttaaggcacagatcactcatgctattgtttgtggcttaagaatgcctttaagtggttttccaccctggacgggccaggtattccttgttctcattccagtaaacccacaaccttccagcgtgggtgttatggccatcatgaacatgtcacagtgctgcagagattttgtttatggccagttttggggccagtttatggccagatttggggaggcttgttcccaacagttcctcagggtaagggtgccctaactcctgtggggaccttctttggtggctccccaggaagtaaggagatgggaattgtgctgtagaggtctacagcagcactgcttgctgaggcgggggacaattgctgtacatatg

SEQ ID NO: 576269 - DNA, 519 bp, Homo sapiens
agaggtgtgaagtgggaaatcgggggggggggcgggtcttacagccttcagagcagagccctgaacagagatttacccacgtatttattaacagcaagccagtcattagcattgtttctatagatattagattaactaaaagtatcccttattcttaaggcacagatcactcatgctattgtttgtggcttaagaatgcctttaagtggttttccaccctggacgggccaggtattccttgttctcattccagtaaacccacaaccttccagcgtgggtgttatggccatcatgaacatgtcacagtgctgcagagattttgtttatggccagttttggggccagtttatggccagatttggggaggcttgttcccaacagttcctcagggtaagggtgccctaactcctgtggggaccttctttsgtggctccccaggaagtaaggagatgggaattgtgctgtagaggtctacagcagcactgcttgctgaggcgggggacaattgctgtacatatg

SEQ ID NO: 576270 - DNA, 519 bp, Homo sapiens
agaggtgtgaagtgggaaatcgggggggggggcgggtcttacagccttcagagcagagccctgaacagagatttacccacgtatttattaacagcaagccagtcattagcattgtttctatagatattagattaactaaaagtatcccttattcttaaggcacagatcactcatgctattgtttgtggcttaagaatgcctttaagtggttttccaccctggacgggccaggtattccttgttctcattccagtaaacccacaaccttccagcgtgggtgttatggccatcatgaacatgtcacagtgctgcagagattttgtttatggccagttttggggccagtttatggccagatttggggaggcttgttcccaacagttcctcagggtaagggtgccctaactcctgtggggaccttctttggtggctccycaggaagtaaggagatgggaattgtgctgtagaggtctacagcagcactgcttgctgaggcgggggacaattgctgtacatatg

SEQ ID NO: 576271 - DNA, 625 bp, Homo sapiens
tagtgcttgattctctaatcaaccccagttagggccaactcatattaactgatcaaagaaaacaggcacaggtggctgcacttgtgtgttttcttttgcctgagtttgagcttcatcagcctaccaagttttaaactgcaagtactgagatggagtgagaacaggttttgtcaaagtatcctaattatatggtagtaatctattatcaagagccatatttttaaataaagtttgcacaaaaagagagttcagtccatattgactaatggcttgcttaaattctttagtaacttaaaagagaaagcagcctaattagctatattctgtcctacttgctggattatagtaacgggaaattgccatgcttcaaggtctcccttggctttagctttttgaatagaattttgtctaccaccaccaattgctccaggttttaatgttgtaactacaggagcagtaagtttttcagctaattkattttctcacccatttagaggagagagaggaggtggccattcacttaattcagcaggtggagccaacgggctagtaaaacatacttttaaaagtttttctttcttttctttaatctcctctggtagctgctccccacactcagaatttg

SEQ ID NO: 576272 - DNA, 533 bp, Homo sapiens
ggaatgttggggtgatcagacccaacactaggtcatgggggtgatgaagtccggcagagtcaaaggaatgagaaaaagacagtttgagagagaaagtgggaccaggagaccatcacgagtgtggagtctgcaaagtccccaagctctgggagcccacgctatttgttggtgctcaaacaaacaggtggtgaggatttaggggttgaaaggaaacggtgtatcaagtgaatgagaaacatatggccctgcctcagcttctcttccaacactcagcttttctcccaacacattccccttatgaacaggaataaaatagggatgsctgttctcaccactcctgtttaacaagtcctagccagagcaatcaggcaagagaaagctataaaaggcatccaaataggaaatgaagtcaaattatctctcttcactgatgatatgattctacacctagaaatccctaaagactgtgccaaaaggctcctagaactgataaaaaaaacttcagcaaactttgaggattaaaaaaaatcaac

SEQ ID NO: 576273 - DNA, 533 bp, Homo sapiens
ggaatgttggggtgatcagacccaacactaggtcatgggggtgatgaagtccggcagagtcaaaggaatgagaaaaagacagtttgagagagaaagtgggaccaggagaccatcacgagtgtggagtctgcaaagtccccaagctctgggagcccacgctatttgttggtgctcaaacaaacaggtggtgaggatttaggggttgaaaggaaacggtgtatcaagtgaatgagaaacatatggccctgcctcagcttctcttccaacactcagcttttctcccaacacattccccttatgaacaggaataaaatagggatgcctgttctcaccactcctgtttaacaagtcctagccagagcaatcaggcaagagaaagckataaaaggcatccaaataggaaatgaagtcaaattatctctcttcactgatgatatgattctacacctagaaatccctaaagactgtgccaaaaggctcctagaactgataaaaaaaacttcagcaaactttgaggattaaaaaaaatcaac

SEQ ID NO: 576274 - DNA, 533 bp, Homo sapiens
ggaatgttggggtgatcagacccaacactaggtcatgggggtgatgaagtccggcagagtcaaaggaatgagaaaaagacagtttgagagagaaagtgggaccaggagaccatcacgagtgtggagtctgcaaagtccccaagctctgggagcccacgctatttgttggtgctcaaacaaacaggtggtgaggatttaggggttgaaaggaaacggtgtatcaagtgaatgagaaacatatggccctgcctcagcttctcttccaacactcagcttttctcccaacacattccccttatgaacaggaataaaatagggatgcctgttctcaccactcctgtttaacaagtcctagccagagcaatcaggcaagagaaagctataaaaggcatccaaatargaaatgaagtcaaattatctctcttcactgatgatatgattctacacctagaaatccctaaagactgtgccaaaaggctcctagaactgataaaaaaaacttcagcaaactttgaggattaaaaaaaatcaac

SEQ ID NO: 576275 - DNA, 510 bp, Homo sapiens
gggagacattttccagaaaccttcttatttttatctgaggccccttcagtctggccttcactgtccatgtttttgtcagcattcttgtcacagccatttaaccagtctctaagatggtccaaaaatgttctcatttgtctgtcttctttggagccctccaaactcttccaacctctacccattacccagttccgaagttgcttccacattttcaggtatctttatagcaatgctccagtcctcatttgycatttttggtaagatttattttgaaaaagaggtttaattggctcatggttctgcagagtggacaggaagcttagtgcttctgcttctggggggcctcagaaatctttcaatcattgtgcaaggtaatgaaagagtgaattgtctcatatggcaagaggaaatcacggagagtagggagtgatatagagttttcagtggccagatctcacgagaattcactcatgattgtgaggagagtaccaaggggatagtgctgaacca

SEQ ID NO: 576276 - DNA, 531 bp, Homo sapiens
cagacaaccaaaggaaacctaagcaagaagaacaaagctggagacatcacattacttgacttcatactatamcctaaggccacaatagacaaaatagcatggtagcgatatgaaaacagacacaaagaccaatgaaacagaatagagaacccgaaaataaacatgcacctatagccatcagctttcccaggataacacaaagagagccaagtggcacctgcacattacgctgtggaagaaaaacccaagctcaagaaacctcaacttgtattatgggaagttcacttggctgtacccttcccaagagggagaaattatctgcattatactagacagtaaataaacttttcctttgttccagaaggaggtactggttttctattccaaggctgttttctatacaaacatgcttgaaaacaatcatttggaacaagaaagtcagcgtccatacttgcaaaatgtgcggaaatcaaagagacccaaaaactgtttctctaccaatttctatttttttaaaatcacattttcccc

SEQ ID NO: 576277 - DNA, 510 bp, Homo sapiens
gggagacattttccagaaaccttcttatttttatctgaggccccttcagtctggccttcactgtccatgtttttgtcagcattcttgtcacagccatttaaccagtctctaagatggtccaaaaatgttctcatttgtctgtcttctttggagccctccaaactcttccaacctctacccattacccagttccgaagttgcttccacattttcaggtatctttatagcaatgctccagtcctcatttgccatttttggtaagatttattttgaaaaagaggtttaattggctcayggttctgcagagtggacaggaagcttagtgcttctgcttctggggggcctcagaaatctttcaatcattgtgcaaggtaatgaaagagtgaattgtctcatatggcaagaggaaatcacggagagtagggagtgatatagagttttcagtggccagatctcacgagaattcactcatgattgtgaggagagtaccaaggggatagtgctgaacca

SEQ ID NO: 576278 - DNA, 519 bp, Homo sapiens
aaatgagttcaaatgaattgtcaaacgtatgtgggaaaagtggaatcagtttgtgagaaaaaggaaaaaaactcaacagaaatgctgataaagcatcatcccttcatggctagagctgccaggacactagaacaccaaaatcagctagggaaattttgtagaagtcccagatgtactagatgttctgtgaatacacagagatataattataactgttacctgcatgtagagtaaagatgagaaggcattggtcatggtggcagctacctcaggagttacaaagcagacgtggttccaggacagtgtatgtcagggcaaagctgtcctaggaggctattaggagttggttatggcayagacattgtaagtcagatggtctcattactttcaatgacaaaaccaaaattacttttgtatcagcctaatacaacggcctggcaagagcacagaaaaagtccctgtgctgttaggtggggacctctgatgcagcacaattccttcattcccttctccaaaacc

SEQ ID NO: 576279 - DNA, 510 bp, Homo sapiens
gggagacattttccagaaaccttcttatttttatctgaggccccttcagtctggccttcactgtccatgtttttgtcagcattcttgtcacagccatttaaccagtctctaagatggtccaaaaatgttctcatttgtctgtcttctttggagccctccaaactcttccaacctctacccattacccagttccgaagttgcttccacattttcaggtatctttatagcaatgctccagtcctcatttgccatttttggtaagatttattttgaaaaagaggtttaattggctcatggttctgcagagtggacaggaagcttagtgcttctgcttctggggggcctcagaaatctttcaatcattgtgcaaggtaatgaaagagtgaattgtctcatatggcaagaggaaatcayggagagtagggagtgatatagagttttcagtggccagatctcacgagaattcactcatgattgtgaggagagtaccaaggggatagtgctgaacca

SEQ ID NO: 576280 - DNA, 510 bp, Homo sapiens
gggagacattttccagaaaccttcttatttttatctgaggccccttcagtctggccttcactgtccatgtttttgtcagcattcttgtcacagccatttaaccagtctctaagatggtccaaaaatgttctcatttgtctgtcttctttggagccctccaaactcttccaacctctacccattacccagttccgaagttgcttccacattttcaggtatctttatagcaatgctccagtcctcatttgccatttttggtaagatttattttgaaaaagaggtttaattggctcatggttctgcagagtggacaggaagcttagtgcttctgcttctggggggcctcagaaatctttcaatcattgtgcaaggtaatgaaagagtgaattgtctcatatggcaagaggaaatcacggagaktagggagtgatatagagttttcagtggccagatctcacgagaattcactcatgattgtgaggagagtaccaaggggatagtgctgaacca

SEQ ID NO: 576281 - DNA, 548 bp, Homo sapiens
caaaactgtcagtaatctttaaaaagaaaagaaaaaacctggacaaatagattcagagaaggccttgaagagagggttctcatgcttctaggcctgatacaaactgtcacaaaataccacaaaatccacaaccttgcacaaaggccatagcaaccttacacaaaatacacttctgtgaggacatctatccaacaaccacctgctcaaacttcagctgacatcgaccttgttgttgatctttatagtcaaagataactataacaaaacaattatataagcctcttcatttttcctttatttttttctactcccccataattccaggttgatcgcttttcttttaaagaccttgtcttcctttaccatttgaatctacacagtttgctttgtcatgcatattcccattgcagtgycctcctccctaagatgtgtctttttcctttaaagaacctttctctgtttgttatttaggtttacaatgagaaggcgtgtaaagtaattttactgtcttcctaggaaaaaatcactgacttatatttatatttatt

SEQ ID NO: 576282 - DNA, 622 bp, Homo sapiens
agtgcttctgcttctggggggcctcagaaatctttcaatcattgtgcaaggtaatgaaagagtgaattgtctcatatggcaagaggaaatcacggagagtagggagtgatatagagttttcagtggccagatctcacgagaattcactcatgattgtgaggagagtaccaaggggatagtgctgaaccactcatgagaaatttgccttcatgattcaatcaccttataccaggatccacctccaacattaggaagcataactcaacatgagatttggtggggacacatattcgaattgcctcatcagtctttgagtataaagacatccatagcaggctttatccagccagcttctttgggattctttatagggtttcaggtctatagcatatccactaaaatattcctacttcaaaargcaataaagtaagtggtattatcattcttcaaaaagttataatggtagtgtaggcattcatagtatgatttagttcatttgctactgtttctattctatcaccatattaacactttcctacacaattctatattcagctgggtttcagttgagcacaaagtcatccttgtactaccaccgatagctggcactagctctttgata

SEQ ID NO: 576283 - DNA, 603 bp, Homo sapiens
gatgttcactgataaaactgattcttccatctgagggtggtawttgtagttacagtaatgtagatcacaatctaagttatgttctataaactgtgtcactgacatctcaatctacagctaactttgattttttaaaagcagaggagtgggttgtataggtttagaaatacatccatcaagctagttaagtgagatggattcaagccttcaactcactggaatatttaccaaattgactattcattagctaaaggagccatataaacaaggtactttttaaaattcaaaattatgtaaggttttatttcctttttatgttgttatgaattggattgtagaggttataaggtaaaataagattacttttacagtaaaacatacaacacattgtcgcaagagggcagcctttgaacacgaattgcttctcaggcattccttgaaattttgagagttactttaattaacacaacaaaataataaaacactacagaggatctaagaagatactttgacttatgcatattgttacttttttattactgctagtggaagatgtaatcgacaagaaaggtaagggctgaatttgttttatgtaaaaagaca

SEQ ID NO: 576284 - DNA, 603 bp, Homo sapiens
gatgttcactgataaaactgattcttccatctgagggtggtatttgtagttacagtaatgtagatcacaatctaagttatgttctataaactgtgtcactgacatctcaatctacagctaactttgattttttaaaagcagaggagtgggttgtataggtttagaaatacatccatcaagctagttaagtgagatggattcaagccttcaactcactggaatatttaccaaattgactattcattagctaaaggagccatataaacaaggtactttttaaaattcaaaattatgtaaggttttatttcctttttatgttgttatgaattggattgtagaggttataaggtaaaataagattacttttacagtaaaacatacaacacattgtcgcaagagggcagcctttgaacacgaattgcttctcaggcattccttgaaattttgagagttactttaattaacacaacaaaataataaaacactacagaggatctaagaagatactttgacttatgcatattgttacttttttattactgctagtggaagatgtaatcgacaagraaggtaagggctgaatttgttttatgtaaaaagaca

SEQ ID NO: 576285 - DNA, 622 bp, Homo sapiens
agtgcttctgcttctggggggcctcagaaatctttcaatcattgtgcaaggtaatgaaagagtgaattgtctcatatggcaagaggaaatcacggagagtagggagtgatatagagttttcagtggccagatctcacgagaattcactcatgattgtgaggagagtaccaaggggatagtgctgaaccactcatgagaaatttgccttcatgattcaatcaccttataccaggatccacctccaacattaggaagcataactcaacatgagatttggtggggacacatattcgaattgcctcatcagtctttgagtataaagacatccatagcaggctttatccagccagcttctttgggattctttatagggtttcaggtctatagcatatccactaaaatattcctacttcaaaaggcaataaagtaagtggtattatcattcttcaaaaagttataatggtagtgtaggcattcatagtatgatttagttcatttgytactgtttctattctatcaccatattaacactttcctacacaattctatattcagctgggtttcagttgagcacaaagtcatccttgtactaccaccgatagctggcactagctctttgata

SEQ ID NO: 576286 - DNA, 622 bp, Homo sapiens
agtgcttctgcttctggggggcctcagaaatctttcaatcattgtgcaaggtaatgaaagagtgaattgtctcatatggcaagaggaaatcacggagagtagggagtgatatagagttttcagtggccagatctcacgagaattcactcatgattgtgaggagagtaccaaggggatagtgctgaaccactcatgagaaatttgccttcatgattcaatcaccttataccaggatccacctccaacattaggaagcataactcaacatgagatttggtggggacacatattcgaattgcctcatcagtctttgagtataaagacatccatagcaggctttatccagccagcttctttgggattctttatagggtttcaggtctatagcatatccactaaaatattcctacttcaaaaggcaataaagtaagtggtattatcattcttcaaaaagttataatggtagtgtaggcattcatagtatgatttagttcatttgctactgtttctattctatcaccatattaacactttcctacacarttctatattcagctgggtttcagttgagcacaaagtcatccttgtactaccaccgatagctggcactagctctttgata

SEQ ID NO: 576287 - DNA, 495 bp, Homo sapiens
ggatatcttgagtttctggattgtaaaccttattaaggcccatttttcctagaattggagcctctactttgttcttgytactttagttcacccagaaagcacgatctctgcctaaatttcaaagtgttggctagtttaaatatccttttgtgagacttttgtcttcctgcggggtgattttttcatcttacatatcattgctaatctttttaccttgaatgtaattgaaatagttttaatctgtgttaccagcaacaagaaccccttttatgagatgaagaggccaggtcagtctcataacgtgtgtccccctccgtgtgttgaatttatgtcagagccaggttctttcctatttgatgtctctcacaaaattccagtgtttatgtcctaggaggtgcccaataaattctagagttgatacaagctgtaattttagagaaattaaattagcaagtagaattagattatatacaacctaatcaacttttttttttt

SEQ ID NO: 576288 - DNA, 495 bp, Homo sapiens
ggatatcttgagtttctggattgtaaaccttattaaggcccatttttcctagaattggagcctctactttgttcttgctactttagttcacccagaaagcacgatctctgcctraatttcaaagtgttggctagtttaaatatccttttgtgagacttttgtcttcctgcggggtgattttttcatcttacatatcattgctaatctttttaccttgaatgtaattgaaatagttttaatctgtgttaccagcaacaagaaccccttttatgagatgaagaggccaggtcagtctcataacgtgtgtccccctccgtgtgttgaatttatgtcagagccaggttctttcctatttgatgtctctcacaaaattccagtgtttatgtcctaggaggtgcccaataaattctagagttgatacaagctgtaattttagagaaattaaattagcaagtagaattagattatatacaacctaatcaacttttttttttt

SEQ ID NO: 576289 - DNA, 495 bp, Homo sapiens
ggatatcttgagtttctggattgtaaaccttattaaggcccatttttcctagaattggagcctctactttgttcttgctactttagttcacccagaaagcacgatctctgcctaaatttcaaagtgttggctagtttaaatatccttttgtgagacttttgtcttcctgcggggtgattttttcatcttacatatcattgctaatctttttaccttgaatgtaattgaaatagttttaatctgtgttaccagcaacaagaaccccttttatgagatgaagaggccaggtcagtctcataacgtgtgtccccctccgtgtgttgaatttatgtcagagccaggttctttcctatttgatgtctctcacmaaattccagtgtttatgtcctaggaggtgcccaataaattctagagttgatacaagctgtaattttagagaaattaaattagcaagtagaattagattatatacaacctaatcaacttttttttttt

SEQ ID NO: 576290 - DNA, 651 bp, Homo sapiens
tagttttgctatcaggattctgactcataaaacaagtttggaatttcccccttcttctgaaataatttaaaaattttatttttttaaaacgtttgaaagaattcaccagyaaaactctttggatgtggagtttgcttattttttaatttctttagttttatgtttttatgtgcaggtatttgacaatttaattactttaataaatgtcaattacttcatatattccatttaatcttgtgaatttttttataagtttcttttcaaggaattcaccctttcatccaagtaatgaaaattagtataaaatgtttcacaatattccattatcttgttaatgtctcttgtgtctacaactgtacaatcttattaatccctgatatttataatttgcgttttctttctttctcacagaactaacttttggccatgttaattttctcctgtgtctgttttctgtctcattgatttctaatttctgttttattttctttcttctacttgttttggacttaatttgctctcttgttttagattttctttttaaggtagaaaattagtgcacttgttttgaacttctcttttttagaataagcatttatacaaaaaatttactctgggtctgcttaacttatcccacatattttgatatag

SEQ ID NO: 576291 - DNA, 651 bp, Homo sapiens
tagttttgctatcaggattctgactcataaaacaagtttggaatttcccccttcttctgaaataatttaaaaattttatttttttaaaacgtttgaaagaattcaccagtaaaactctttggatgtggagtttgcttattttttwatttctttagttttatgtttttatgtgcaggtatttgacaatttaattactttaataaatgtcaattacttcatatattccatttaatcttgtgaatttttttataagtttcttttcaaggaattcaccctttcatccaagtaatgaaaattagtataaaatgtttcacaatattccattatcttgttaatgtctcttgtgtctacaactgtacaatcttattaatccctgatatttataatttgcgttttctttctttctcacagaactaacttttggccatgttaattttctcctgtgtctgttttctgtctcattgatttctaatttctgttttattttctttcttctacttgttttggacttaatttgctctcttgttttagattttctttttaaggtagaaaattagtgcacttgttttgaacttctcttttttagaataagcatttatacaaaaaatttactctgggtctgcttaacttatcccacatattttgatatag

SEQ ID NO: 576292 - DNA, 651 bp, Homo sapiens
tagttttgctatcaggattctgactcataaaacaagtttggaatttcccccttcttctgaaataatttaaaaattttatttttttaaaacgtttgaaagaattcaccagtaaaactctttggatgtggagtttgcttattttttaatttctttagttttatgtttttatgtgcaggtatttgacaatttaattactttaataaatgtcaattacttcatatattccatttaatcttgtgaatttttttataagtttcttttcaaggaattcaccctttcatccaagtaatgaaaattagtataaaatgtttcacaatattcyattatcttgttaatgtctcttgtgtctacaactgtacaatcttattaatccctgatatttataatttgcgttttctttctttctcacagaactaacttttggccatgttaattttctcctgtgtctgttttctgtctcattgatttctaatttctgttttattttctttcttctacttgttttggacttaatttgctctcttgttttagattttctttttaaggtagaaaattagtgcacttgttttgaacttctcttttttagaataagcatttatacaaaaaatttactctgggtctgcttaacttatcccacatattttgatatag

SEQ ID NO: 576293 - DNA, 452 bp, Homo sapiens
  misc_feature 436, 437, 438, 439, 440, 441, 442, 443, 444, 445, 446, 447,448, 449, 450, 451, 452: n = A,T,C or G
aaatcctgttcctgtgataatgacgccatcagcctctgcacctctgtcttcccttctgccacatgttgcctgttctccgtgactttggtaagagcttccttgtgtatgaggatgatgtccaggatgttggtctggtgtccctgagacagcactaacaggtccatggctgggtccaggtccttcctggactcattggcaaagagcttactgatgttcttgaaggcatctctggtgaagtggatggcctagtctagttccaaggcctggctgaggctgaagaaaaactggccaccctctccccctctttctaaaagcctgtcactgtaatatgcttgcttgtcaactcattggctgtgaggatgagctgagtggcctgtgtccatcttcttgrggaagcatttgaagccatcagtcttgctctcccacccctaaaggnnnnnnnnnnnnnnnnn

SEQ ID NO: 576294 - DNA, 521 bp, Homo sapiens
tgttctttctttcatgcctttttatattaactgaacaatattcagcgttccattttaattcctttattggcattttagaagaatatcttcatataatgtggtggttctctagggattgtaataaayatcctgggcttatcgcagtccacttactgttaatagtcaacattttcatgtaacataaagaaaagttgtggcaaaattgttgcgtttagtctcctgtcagagctattaatttagaatattttactctacatacattattaatagtactcttaattttttatttaaaccatcaggtgtttgttataaaactaaaagaaaaaagccttagtttttcctgtttatgcacatgccattcctagagcttctccttacttcctgtaggtcagaatttccatctgttgttatctttctttagtctaaaaaatttccgtttgcatttcttgtatctaggtctgctaatgacaattgttcgaagctttcttttatctgaataaatctttattttcgcaagaatt

SEQ ID NO: 576295 - DNA, 521 bp, Homo sapiens
tgttctttctttcatgcctttttatattaactgaacaatattcagcgttccattttaattcctttattggcattttagaagaatatcttcatataatgtggtggttctctagggattgtaataaatatcctgggcttatcgcagtccacttactgttaatagtcaacattttcatgtaacataaagaaaagttgtggcaaaattgttgcgtttagtctcctgtcagagctattaatttagaatattttactctacatacattattaatagtactcttaattttttatttaaaccatcagktgtttgttataaaactaaaagaaaaaagccttagtttttcctgtttatgcacatgccattcctagagcttctccttacttcctgtaggtcagaatttccatctgttgttatctttctttagtctaaaaaatttccgtttgcatttcttgtatctaggtctgctaatgacaattgttcgaagctttcttttatctgaataaatctttattttcgcaagaatt

SEQ ID NO: 576296 - DNA, 422 bp, Homo sapiens
attaaataaatgaaactgaaaattcaacaattctgcttcataaaaaagtagaaagtttctactgtttttcattattttcaaagctatatcattaaatgaaatttctgcctcatggaaggtttttagaactatgtaataataccatacagaccattaggagagaaatgaataaagactgaaagaagtaagcactgtgtggtaacatagatgrcgcacagttgtgtgcgtggagccctaatacatttgaccatggaatttatacaataaatgtcagtttcctgtgaacctgataatttatatgactttcgcagacctttccttaacctaaactgtttaggtttcctgtcgacagactgcatgtattctcacctttaacctttccataatcttccctaattacagatgtcattgattcttaatag

SEQ ID NO: 576297 - DNA, 422 bp, Homo sapiens
attaaataaatgaaactgaaaattcaacaattctgcttcataaaaaagtagaaagtttctactgtttttcattattttcaaagctatatcattaaatgaaatttctgcctcatggaaggtttttagaactatgtaataataccatacagaccattaggagagaaatgaataaagactgaaagaagtaagcactgtgtggtaacatagatgaygcacagttgtgtgcgtggagccctaatacatttgaccatggaatttatacaataaatgtcagtttcctgtgaacctgataatttatatgactttcgcagacctttccttaacctaaactgtttaggtttcctgtcgacagactgcatgtattctcacctttaacctttccataatcttccctaattacagatgtcattgattcttaatag

SEQ ID NO: 576298 - DNA, 611 bp, Homo sapiens
aggttccatgttatgtgtcagatgtgtcacgattttcttcctttctatggctgaataatatttcttcatatatatattatatatatattacatatatattatatacatacattatatatattatatatattatatattatatatatatataatatatatcatatatatatatgcttttgtttatccacctattcctggayggacgtttttgtttcttccaccttgtggctgtgtaatgctgctgtgagcttaggtgtgcacatatctgtttgaggtcctgctactagttattctgtctctgtagtagttggatggctggatcatatggtcattttattttatttttttttgaggagccagttcatatttccaacaacagtgttcaagggtttcagtttcacctgcgcttgttactttctattgggtttgaagtgatgtcccattgtggtttctttttgcatttctctaatgactagtgatgttacacatcttctcatatatctcatgtatctgttggctatttgtatatcatctttgcatctttggataaatgttgtttgtccattttttaatcactttattttgttgttgggttgtagcggggttttttg

SEQ ID NO: 576299 - DNA, 611 bp, Homo sapiens
aggttccatgttatgtgtcagatgtgtcacgattttcttcctttctatggctgaataatatttcttcatatatatattatatatatattacatatatattatatacatacattatatatattatatatattatatattatatatatatataatatatatcatatatatatatgcttttgtttatccacctattcctggacggacgtttttgtttcttccaccttgtggctgtgtaatgctgctgtgarcttaggtgtgcacatatctgtttgaggtcctgctactagttattctgtctctgtagtagttggatggctggatcatatggtcattttattttatttttttttgaggagccagttcatatttccaacaacagtgttcaagggtttcagtttcacctgcgcttgttactttctattgggtttgaagtgatgtcccattgtggtttctttttgcatttctctaatgactagtgatgttacacatcttctcatatatctcatgtatctgttggctatttgtatatcatctttgcatctttggataaatgttgtttgtccattttttaatcactttattttgttgttgggttgtagcggggttttttg

SEQ ID NO: 576300 - DNA, 611 bp, Homo sapiens
aggttccatgttatgtgtcagatgtgtcacgattttcttcctttctatggctgaataatatttcttcatatatatattatatatatattacatatatattatatacatacattatatatattatatatattatatattatatatatatataatatatatcatatatatatatgcttttgtttatccacctattcctggacggacgtttttgtttcttccaccttgtggctgtgtaatgctgctgtgagcttaggtgtgcacatatctgtttgaggtcctgctactagttattctgtctctgtagtagttggatggctggatcatatggtcattttattttatttttttttgaggagccagttcatatttccamcaacagtgttcaagggtttcagtttcacctgcgcttgttactttctattgggtttgaagtgatgtcccattgtggtttctttttgcatttctctaatgactagtgatgttacacatcttctcatatatctcatgtatctgttggctatttgtatatcatctttgcatctttggataaatgttgtttgtccattttttaatcactttattttgttgttgggttgtagcggggttttttg

SEQ ID NO: 576301 - DNA, 575 bp, Homo sapiens
atgttgtttgtccattttttaatcactttattttgttgttgggttgtagcggggttttttgtcatgatcattcatttatctcacagttcattctcattacttgggccagggtcatgatcattcattatctctcagttcatcctcattacgttgggcaaacagtcatgctgcagggtatagattatgttattctgttactttcaggtagaattggggtctaggttataattgtttctaagtttagattctgaatgagaatcagcagaggtagaccaccactgctggggcctggggattgctgggaaaaaggcaggaaacaaatacagacctgaccatggagggtttgygtttcatggctcccatctgggtacccaaggaacctacatgtaggtcgtgtgtggagagcctacattgcccactcaaagcaattgaggatggaacagtcttggggctggagctcattatttggaatgataaccacatctgcacagagaggacctgataagatgttgtccttccatgtatatctgggaatcctgtgtagggtctctctgtaaggacaggggcagtgtcgg

SEQ ID NO: 576302 - DNA, 320 bp, Homo sapiens
ctctgtaggagtactttacgtattctgaatgttcacttcttatgagatacatgatgtgcaactataggttgaatgtctctgatccaaaaatctgaaatcccaaatgctccaaaktctgaaactttttgagtgccaacatgacactcaaaggaattgcttattggagcatcgcagactcaggtgtttgaattcgagatgctcaaccagtaagaataatgcaaatattacaaaatctgaaacacatcccaagcatttcaaataagggacactcaactggtattttatttattctacagtttgccttttaccctgttgtttgt

SEQ ID NO: 576303 - DNA, 519 bp, Homo sapiens
agaactagcacttactctgccgtaattggaatccgagagagataggaggtgccctagtatgaaaatgtgtctgctcctctctgcttctggtagtctctctgtaggagtactttacgtattctgaatgttcacttcttatgagatacatgatgtgcaactataggttgaatgtctctgatccaaaaatctgaaatcccaaatgctccaaagtctgaaactttttgagtgccaacatgacactcaaaggaawtgcttattggagcatcgcagactcaggtgtttgaattcgagatgctcaaccagtaagaataatgcaaatattacaaaatctgaaacacatcccaagcatttcaaataagggacactcaactggtattttatttattctacagtttgccttttaccctgttgtttgttacctttgtggtacagaagtttttaggtttgatatatttttgcttttactgcctgagcttttaatgtcatatcctaaaaattattgacaaattcatcatcata

SEQ ID NO: 576304 - DNA, 638 bp, Homo sapiens
aagattccttattaaaaatttccaacaaagccaattttaagaagcctatatggccaataaatattcttgctgccctttatggaaataatcaggcccggtatgataagactaaaacttattttgcatacaaaattggtcctactatgatttgtctttgataaaatgatggactagagagaaaatttatgttccaaaagaaaactatgacatatgctattagattccaaccctgatcattgttttagagtttttattatttgcctataatttgggctgaatcctgaattatttcctggctccaagtgttccctagtgaatctgaatataatatattttttaaaacttgttttatcctgtcaggaatgagatgtatttttgaaggactacttaaactagcaattacaattygattattatgattatagaatctcgggatttctcttccttcttgtcaaggactttacctgatgtttgtctcattaaaaaaaaatgagactgattacactctactcaagactgaagacatgtactttaacctgtctctgttaccagtaaaccaaagccttaactttcagagtctgtcagggaccctgtgtggtccctggatcaaccacccatgggcttatgaatgtgttgac

SEQ ID NO: 576305 - DNA, 638 bp, Homo sapiens
aagattccttattaaaaatttccaacaaagccaattttaagaagcctatatggccaataaatattcttgctgccctttatggaaataatcaggcccggtatgataagactaaaacttattttgcatacaaaattggtcctactatgatttgtctttgataaaatgatggactagagagaaaatttatgttccaaaagaaaactatgacatatgctattagattccaaccctgatcattgttttagagtttttattatttgcctataatttgggctgaatcctgaattatttcctggctccaagtgttccctagtgaatctgaatataatatattttttaaaacttgttttatcctgtcaggaatgagatgtatttttgaaggactacttaaactagcaattacaatttgattattatgattatagaatctcgggatttctcttccttcttgtcaaggwctttacctgatgtttgtctcattaaaaaaaaatgagactgattacactctactcaagactgaagacatgtactttaacctgtctctgttaccagtaaaccaaagccttaactttcagagtctgtcagggaccctgtgtggtccctggatcaaccacccatgggcttatgaatgtgttgac

SEQ ID NO: 576306 - DNA, 365 bp, Homo sapiens
agagatctttcacttcttttgttacatttattcctagatattttattttatttgtagctattgtaaatgggattacgttcttgattttcttctttagattgttcagttttggcayttagaaatgttactgatttttgcattttgattttgtatcatgtgactgaatttgttgatcagttctgatagttttttggtggagttcttaggtttttccaaatataagatcaaatcacctgcaaacaagaaaacaataataattttacttctttcaatttggatgccctttactgtttttcaattttcttgattgctctagctaggacttccagtactatgttgagtaacattgttggaagtggacattc

SEQ ID NO: 576307 - DNA, 436 bp, Homo sapiens
agcaagtcacttgatgagtcttgcagtctacagagggggtagggaatggcaggagttggcataggagtgagaggggaggaggcaaggtgagggrggccaggtgaggagggtggcacttgaaggggagttcaagactagcctgggcaacatggtgagaccactgcccctcaccaccgccatttttgttctcactctggtctcacacacatgcacaaattaaatttaatttaaaaattaaaaaattgttttaaaataagtgaagtatttacatggattatgtatacattcattttgtagaactatagatcccatgtaactgggaactctttactcttctaacacaacatttatttagccacaaataaaagaagaccagtgatgtagcctgtacacaaaaaagtaagaaaacactggttaggctggggcaggggtgggg

SEQ ID NO: 576308 - DNA, 436 bp, Homo sapiens
agcaagtcacttgatgagtcttgcagtctacagagggggtagggaatggcaggagttggcataggagtgagaggggaggaggcaaggtgaggggggccaggtgaggagggtggcacttgaaggggagttcaagactwgcctgggcaacatggtgagaccactgcccctcaccaccgccatttttgttctcactctggtctcacacacatgcacaaattaaatttaatttaaaaattaaaaaattgttttaaaataagtgaagtatttacatggattatgtatacattcattttgtagaactatagatcccatgtaactgggaactctttactcttctaacacaacatttatttagccacaaataaaagaagaccagtgatgtagcctgtacacaaaaaagtaagaaaacactggttaggctggggcaggggtgggg

SEQ ID NO: 576309 - DNA, 296 bp, Homo sapiens
aacaagccaaacccaatcccagcaaacamaggaaataaccaagatcagagcagaactaaatgaaattgacacaacaacaaaaaatacaaaacataaataaaacaaaaagttggttatttgaaaagataaataaaattgatagaccattagcaagattaaccaagaaaagaagagagaaaatccaaataacctcactaagaaatgaaacaggggatattacaactgacaccactgaaataataaagattattcaagggtactatgaacaccttttggcacataaactacaaaaccta

SEQ ID NO: 576310 - DNA, 547 bp, Homo sapiens
gtactgatgttcacctttgacctgatgtccacctgtggactgtttatccacccatggcctgatgttcacctggggctgaatgtccaactgtgacctgttgtgcacctggaacctaggcatccacctgcagcctgatgttcagctgggctgggacccggagttcacctgaggcatgatgtccacctgaagcttgatgttcacctgggggctgggtgtccacttgrggcctaatatccacctggactaggtacccacctgggatctggtgttcactcaagattggtgttcagctgtggcctaatgaccacctgggtcatgatgtctaccttggactgggtgcttacctggagccagtgttcactggggacctagtgtgcacctgagaccaggggatgtacctggggcctggtgtctacctggtgcctaggtatccacttgaggcctaatgttcatctggaatctggtatccacctggggccttgtaattacctggggtctgggcatccacctagggcttgagtatcctcctggggccttgagttttact

SEQ ID NO: 576311 - DNA, 407 bp, Homo sapiens
cttgtttttcctttttttttttttttttggtagtttatttaaaaggcaaacaaatttttcattattttttaatattacctgaacatcttctttaaagagagaaagccaaatgtcacccacwttttcataaaaccttatagacaaacctattattctttcttttttttttttcagatggattttccctcttgttgcccaggctggagtgcaatggtgtgatctcggttcactgcaaccccctgcctcccgggttcaagcgattctcctgccccagcctcctgagtagctgggattagaggcatgtgccaccatgcccagctaattttgtgtttttagtagagacggggtttttccttgtaggtcaggctggccctgaactcctgacctcaggtgatccacctgcctca

SEQ ID NO: 576312 - DNA, 541 bp, Homo sapiens
ggagggaggtgctgccctgcaggccccgtctaacagttggtcattmccatggggcgcctgttacagttctgtgattagtgcccagtccaggtccctgagaacggcgcccagtccttgtccctgagaacggcgtttgtgtccttttactcctccctctgggcttttgtcattctccatgttctttttccttcagtgcctgggttgccgttgaccaactttctctgcctttttcttatggtcaatagggtattcaatggcttctttataattttttttttcttttttttttctttggccttttgagacaagaaattatttctttatattttctctaaattttgtttgaaaactgaacttccttctttagatcatgtccctctcctgtcatgtttattcagtgacagttaggggaggctgatagcactttccatgttcttcccagatgtctccttaggcagatccctgagatggtgcagtgccctttcagtttccatgttgtggccatagttttctcacagtccctcagcacataactctcagg

SEQ ID NO: 576313 - DNA, 541 bp, Homo sapiens
ggagggaggtgctgccctgcaggccccgtctaacagttggtcattaccatggggcgcctgttacagttctgtgattagtgcccagtccrggtccctgagaacggcgcccagtccttgtccctgagaacggcgtttgtgtccttttactcctccctctgggcttttgtcattctccatgttctttttccttcagtgcctgggttgccgttgaccaactttctctgcctttttcttatggtcaatagggtattcaatggcttctttataattttttttttcttttttttttctttggccttttgagacaagaaattatttctttatattttctctaaattttgtttgaaaactgaacttccttctttagatcatgtccctctcctgtcatgtttattcagtgacagttaggggaggctgatagcactttccatgttcttcccagatgtctccttaggcagatccctgagatggtgcagtgccctttcagtttccatgttgtggccatagttttctcacagtccctcagcacataactctcagg

SEQ ID NO: 576314 - DNA, 496 bp, Homo sapiens
agataaaataattcagcagcaataaaagtcacacttcttaaagttgcagtctcaccaatgcaccacaatgtagcagtctctcttgtgaggtatcacgtggagttcttcatctcaccaccaagatgattaaggaacagggacacacgggtgaggttggagtgaaagtttaataagaaaaaggaggaagctctctgcagcagacaarggagtccaactggattgccgtttttactgttgaatcaaaaagcttttataagaaactcctctcagctctatataaaactgtctgcacaattccctttatatatccagctgtgggtatgtgtctagtcaagcataaagtgggcttctcttgtttgtataactgtgggtttgttttaggtaagcccccctcctccctgtgcaagttcccacagaggccgccatgtatatgcctgaaaaagggaggaaaattttacctgggagcttgccaattacacaaagacagaaggcatgt

SEQ ID NO: 576315 - DNA, 255 bp, Homo sapiens
cagcttaaaacaactcattattacttgttttttggcttagagagtcttggtggccagctcatctcacacacagttgcagccaagctggattgtgtgaaagcacagcggggtggtgtgcagggtggctcactagtggttgggagtggatgttgctgaaggctcactagtggttgggagtcggtgttgctrgagggtcaatgggggatgtcaatgcatgtagctagtcatggactggccgtgtggtttccatcatgg

SEQ ID NO: 576316 - DNA, 496 bp, Homo sapiens
agataaaataattcagcagcaataaaagtcacacttcttaaagttgcagtctcaccaatgcaccacaatgtagcagtctctcttgtgaggtatcacgtggagttcttcatctcaccaccaagatgattaaggaacagggacacacgggtgaggttggagtgaaagtttaataagaaaaaggaggaagctctctgcagcagacaaaggagtccaactggattgccgtttttactgttgaatcaaaaagcttttataagaaactcctctcagctctatataaaactgtctgcacaattccctttatatatccagctgtgggtatgtgtctagtcaagcayaaagtgggcttctcttgtttgtataactgtgggtttgttttaggtaagcccccctcctccctgtgcaagttcccacagaggccgccatgtatatgcctgaaaaagggaggaaaattttacctgggagcttgccaattacacaaagacagaaggcatgt

SEQ ID NO: 576317 - DNA, 578 bp, Homo sapiens
tccactctgaatacttgtattattggatttcttagaaaaaaatatttgggatcataatttaratgccatcaaacaatgaacaaaaacatgctacttcgtttcccttctcttctcttgttaccagacaatagctagttttcttttctctccaatcccttttttctgtgcttctacctgatttttgaaaaaacttctacacatttccaatcttagtatagcagacatcatatatgtggtcaaactacatacgtaggaagaatagaattatataattatattcaagcattttaaaataattacccttcagtttgttttgcagttattttacataatcaaatgtcttcctgatatactttccaacccagtggttgtcaagctctgctttgttttctaattgcatcagaattatccacaagtctttttttttttttttgagatggagtcttactgttgcccaggctctagtgcaggggcatgatctcagctcactgtcatctctgcctccctgattcaagtgattctcctgcctcagcctcccaagtagctgggactacaagtgtgtaccaccatgcctggct

SEQ ID NO: 576318 - DNA, 443 bp, Homo sapiens
tagggaattcattatattctttttttttttgagtcggagtctcgcttctttgcccaggctggtgtccaatggcacaatcttggctcactgcaacctctgcctgccgggttcaagcaattctcctacctcagcctcccaagtagcttggattayaggcaggtgccagcgtgcctggctaatttttgtatatttagtagagagggggtttcaccacgttggccaggctggtctcgaactcctgacctcaagtgatctgcccgcctccgcctcccaaagtgctgggattacaggtgtgagccaccgcgcccagcctatgttgtttattatatatcataagttatatatatatatatatatatatatatatatatatatatattactgatacgtatacatatataccagatataatatgtcatatatatcagttatatatacacatt

SEQ ID NO: 576319 - DNA, 420 bp, Homo sapiens
cattttatagggaattcattatattctttttttttttgagtcggagtctcgcttctttgcccaggctggtgtccaatggcacaatcttggctcactgcaacctctgcctgccgggttcaagcaattctcctacctcagcctcccaagtagcttggattataggcaggtgccagcgtgcctggctaatttttgtatatttagtagagagggggtttcaccacgttggccaggctggtctcgaactsctgacctcaagtgatctgcccgcctccgcctcccaaagtgctgggattacaggtgtgagccaccgcgcccagcctatgttgtttattatatatcataagttatatatatatatatatatatatatatatatatatatatattactgatacgtatacatatataccagatataata

SEQ ID NO: 576320 - DNA, 420 bp, Homo sapiens
cattttatagggaattcattatattctttttttttttgagtcggagtctcgcttctttgcccaggctggtgtccaatggcacaatcttggctcactgcaacctctgcctgccgggttcaagcaattctcctacctcagcctcccaagtagcttggattataggcaggtgccagcgtgcctggctaatttttgtatatttagtagagagggggtttcaccacgttggccaggctggtctcgaactcctgacctcaagtgatctgcccgcctccgcctcccaaartgctgggattacaggtgtgagccaccgcgcccagcctatgttgtttattatatatcataagttatatatatatatatatatatatatatatatatatatatattactgatacgtatacatatataccagatataata

SEQ ID NO: 576321 - DNA, 578 bp, Homo sapiens
tccactctgaatacttgtattattggatttcttagaaaaaaatatttgggatcataatttaaatgccatcaaacaatgaacaaaaacatgctacttcgtttcccttctcttctcttgttaccagacaatagctagttttcttttctctccaatcccttttttctgtgcttctacctgatttttgaaaaaacttctacacatttccaatcttagtatagcagacatcatatatgtggtcaaactacatacgtaggaagaatagaattatataattatattcaagcattttaaaataattacccttcagtttgttttgcagttattttacataatcaaatgtcttcctgatatactttccaacccagtggttgtcaagctctgctttgttttctaattgcatcagaattatccacaagtctttttttttttttttgagatggagtcttactgttgcccaggctctagtgcaggggcrtgatctcagctcactgtcatctctgcctccctgattcaagtgattctcctgcctcagcctcccaagtagctgggactacaagtgtgtaccaccatgcctggct

SEQ ID NO: 576322 - DNA, 420 bp, Homo sapiens
cattttatagggaattcattatattctttttttttttgagtcggagtctcgcttctttgcccaggctggtgtccaatggcacaatcttggctcactgcaacctctgcctgccgggttcaagcaattctcctacctcagcctcccaagtagcttggattataggcaggtgccagcgtgcctggctaatttttgtatatttagtagagagggggtttcaccacgttggccaggctggtctcgaactcctgacctcaagtgatctgcccgcctccgcctcccaaagtgctgggattacaggtgtgagccacygcgcccagcctatgttgtttattatatatcataagttatatatatatatatatatatatatatatatatatatatattactgatacgtatacatatataccagatataata

SEQ ID NO: 576323 - DNA, 443 bp, Homo sapiens
tagggaattcattatattctttttttttttgagtcggagtctcgcttctttgcccaggctggtgtccaatggcacaatcttggctcactgcaacctctgcctgccgggttcaagcaattctcctacctcagcctcccaagtagcttggattataggcaggtgccagcgtgcctggctaatttttgtatatttagtagagagggggtttcaccacgttggccaggctggtctcgaactcctgacctcaagtgatctgcccgcctccgcctcccaaagtgctgggattacaggtgtgagccaccgcgcccrgcctatgttgtttattatatatcataagttatatatatatatatatatatatatatatatatatatatattactgatacgtatacatatataccagatataatatgtcatatatatcagttatatatacacatt

SEQ ID NO: 576324 - DNA, 443 bp, Homo sapiens
tagggaattcattatattctttttttttttgagtcggagtctcgcttctttgcccaggctggtgtccaatggcacaatcttggctcactgcaacctctgcctgccgggttcaagcaattctcctacctcagcctcccaagtagcttggattataggcaggtgccagcgtgcctggctaatttttgtatatttagtagagagggggtttcaccacgttggccaggctggtctcgaactcctgacctcaagtgatctgcccgcctccgcctcccaaagtgctgggattacaggtgtgagccaccgcgcccagcctatgttgtttattatatatcataagttatatatatatatatatatatatatatatatatatatatatwactgatacgtatacatatataccagatataatatgtcatatatatcagttatatatacacatt

SEQ ID NO: 576325 - DNA, 571 bp, Homo sapiens
gatctgcccgcctccgcctcccaaagtgctgggattacaggtgtgagccaccgcgcccagcctatgttgtttattatatatcataagttatatatatatatatatatatatatatatatatatatatattactgatacgtatacatatataccagatataatatgtcatatatatcagttatatatacacattagatgaaaagcacattttcatttgacagggaattctttcaaatcaaatcatcaaacactctaaaattgggcaaagtacacttttccagatctgcaagttacttgtgtacataggaaaaagtccttcgcatttctggtataagaatttaaattaaaagaggaatgaarcagttttctatccacaatatttgtgaggatgttttatactcctgcttaaagtttaagttgctgattacttttcaaatagataatttggtggtaagtactacaattaaaaaatatgtatgccctttacccatcaattccatttactaaaacacccttaggaaataaagatacatgcactttatttttcacctcacttattttaaaaagaacc

SEQ ID NO: 576326 - DNA, 626 bp, Homo sapiens
aattaaaagaggaatgaagcagttttctatccacaatatttgtgaggatgttttatactcctgcttaaagtttaagttgctgattacttttcaaatagataatttggtggtaagtactacaattaaaaaatatgtatgccctttacccatcaattccatttactaaaacacccttaggaaataaagatacatgcactttatttttcacctcacttattttaaaaagaacccaaagaatggatccyataaataaacttcagttgcatccacaggatggaataatatgtgaccattgaaggtggcaatagatacagaagtatattgatgtgcgaagatgtattttgttatagctagtgagaaaaaaatcaattaagttatacatacaaacatactatggtcttgttttatcaaaaaatatgtacaaaatataaaatttgtaatttctgagcatttgtattttaagtaaagttcttttcctttttcttatctgtgattgctgcagtgagcatgtacaaaacttctagtaaagtttattaataaagaaataatccttgggaagacaggaatatgaatcttacaatattaaaaataatttctcactttctattttttatcattattgagtg

SEQ ID NO: 576327 - DNA, 626 bp, Homo sapiens
aattaaaagaggaatgaagcagttttctatccacaatatttgtgaggatgttttatactcctgcttaaagtttaagttgctgattacttttcaaatagataatttggtggtaagtactacaattaaaaaatatgtatgccctttacccatcaattccatttactaaaacacccttaggaaataaagatacatgcactttatttttcacctcacttattttaaaaagaacccaaagaatggatcctataaataaacttcagttgcatccacaggatggaataatatgtgaccattgaaggtggcaatagatacagaagtatattgatgtgcgaagatgtattttgttatagctagtgagaaaaaaatcaattaagttatacatacaaacatactatggtcttgttttatcaaaaaatatgtacaaaatataaaatttgtaatttctgagcatttgtattttaagtaaagttcttttcctttttcttatctgtgattgctgcagtragcatgtacaaaacttctagtaaagtttattaataaagaaataatccttgggaagacaggaatatgaatcttacaatattaaaaataatttctcactttctattttttatcattattgagtg

SEQ ID NO: 576328 - DNA, 537 bp, Homo sapiens
atagctttatgaatatatttttaagtgataagacttgaaagttgaaattattctttgatccaagggcaccagaatgaatgttgggttagtaggcatgaaaacaatattcagctctttatacatctctgtaaaagcccttgagtaccagcggcattgtcattgagcrgtaatactttgaaaggaatcttatttcttgagcagtagttgtcgacagtgggcttaagatattcagtaaaccatatttgtaaaccaatagtctgtcatccaggctttgttcccatttgtagagtacaggcagagctgtgttttatcataattcttcagggcccttggattttcagaatagtaaatcatcattggtttcaagttaacatcaccaattgcattaggccttaacaaaagagtcagcatgtcctttgaagccttaaagccaggcatcaactcctctctagctgggaacatcctggatggcatctccttctagtagaaggctgttttgtctccattgcaaatctgtttagtgtagccatcttaatc

SEQ ID NO: 576329 - DNA, 525 bp, Homo sapiens
tatagctttatgaatatatttttaagtgataagacttgaaagttgaaattattctttgatccaagggcaccagaatgaatgttgggttagtaggcatgaaaacaatattcagctctttatacatctctgtaaaagcccttgagtaccagcggcattgtcattgagcagtaatactttgaaaggaatcttatttcttgagcagtagttgtcracagtgggcttaagatattcagtaaaccatatttgtaaaccaatagtctgtcatccaggctttgttcccatttgtagagtacaggcagagctgtgttttatcataattcttcagggcccttggattttcagaatagtaaatcatcattggtttcaagttaacatcaccaattgcattaggccttaacaaaagagtcagcatgtcctttgaagccttaaagccaggcatcaactcctctctagctgggaacatcctggatggcatctccttctagtagaaggctgttttgtctccattgcaaatctgtttagtgt

SEQ ID NO: 576330 - DNA, 496 bp, Homo sapiens
ctttatgaatatatttttaagtgataagacttgaaagttgaaattattctttgatccaagggcaccagaatgaatgttgggttagtaggcatgaaaacaatattcagctctttatacatctctgtaaaagcccttgagtaccagcggcattgtcattgagcagtaatactttgaaaggaatcttatttcttgagcagtagttgtcgacagtgggcttaagatattcagtaaaccatatttgtaaaccratagtctgtcatccaggctttgttcccatttgtagagtacaggcagagctgtgttttatcataattcttcagggcccttggattttcagaatagtaaatcatcattggtttcaagttaacatcaccaattgcattaggccttaacaaaagagtcagcatgtcctttgaagccttaaagccaggcatcaactcctctctagctgggaacatcctggatggcatctccttctagtagaaggctgttttgt

SEQ ID NO: 576331 - DNA, 477 bp, Homo sapiens
atcaattttgaataaatacatgtttttattgtaccacaattcctccctcccatccttccattccattccttgtattagtgttactcatttaacttctgtataagcatacataatctatctgtgtgtatttgttattgtctatgaacttcttggtcagatcaattaagaataaatacataggtttttattgtaccacaattctttaatgctctttttaaaaaaatgttgatccaggtttcagttatatatcttttgtttccctctaaagaatttcatttaacatttcttgcaagacaggtctcctggcaayaagtttcttgaatttttatttttctgaggaaggccttaattctccttcacttttgaagggtggtttcagtgggtacagaaacttaggttggtgggtttttttctgtcaacagtttgaatttttcatttcactgtcttcttgctttcacagtttctgcattgttgaat

SEQ ID NO: 576332 - DNA, 559 bp, Homo sapiens
tgaatgcagttcttatctttgtgtctctgtaggtaaggtgttttctgccccacctctggtttctttcagagttttcctttatcttttatttcatatagtttgaaaattatatgtccaagtgtaggttgttggcatttattctgcctggtgttctcggagcttcctggatctttggtttggtgtctgacattaatactggaagttctcagacatggttgttgcagaactttcttctatttcttctcctcctggtattctcattactctgtttcaccttttgtagttgtcccacagtcttggatatcatcttctgttcttttcagtgtttcttttctttagttttygaagtttctgatgataaatcctcaagctcagagattcttaactcagctgagtccagtctactaataagccatcagaggtattcttcagttatttaccacattttttaccactacattatgttgaagtttcttacgatgtctgtctttctgattacattacccatctacacttgaatgctgtctacttcattcattaggcccttagcatattctcc

SEQ ID NO: 576333 - DNA, 559 bp, Homo sapiens
tgaatgcagttcttatctttgtgtctctgtaggtaaggtgttttctgccccacctctggtttctttcagagttttcctttatcttttatttcatatagtttgaaaattatatgtccaagtgtaggttgttggcatttattctgcctggtgttctcggagcttcctggatctttggtttggtgtctgacattaatactggaagttctcagacatggttgttgcagaactttcttctatttcttctcctcctggtattctcattactctgtttcaccttttgtagttgtcccacagtcttggatatcatcttctgttcttttcagtgtttcttttctttagttttcgaagtttctgatgataaatcctcaagctcagagattcttaactcagctgagtccagtctactaataagccatcagaggtattcttcagttatttaccacattttttaycactacattatgttgaagtttcttacgatgtctgtctttctgattacattacccatctacacttgaatgctgtctacttcattcattaggcccttagcatattctcc

SEQ ID NO: 576334 - DNA, 360 bp, Homo sapiens
attgctcacagatctggaggctggaaagtccaagactaaaggggcaggatatttagtgtttggtgaaggtcaaacattcagacactcgcaacgactatagtgacagcagcagtcttcaggaatcctatgtgagggaaaaacattcagaccacagcaggagtgctcgggaatcctatgtgagggacaaacattcagatcacagcaggagtgttgtggaatcctatgtgaggggaaaactttcaaacccttgtagcagtgttctgcaatcctatgtgaggggcaaaaattcagaacctcgtagcagtgttctgraatcctatttgaggaacaatcagaccacagcaggaatgttctggaatc

SEQ ID NO: 576335 - DNA, 404 bp, Homo sapiens
tgaacaagttactcaggcaaacgtagaatttaagcttggaccaagctgaatcaagagctgcaattaaaggtttccctaagcccagaggggaccagcgaatacttatagaagattttggatttcctctgaatgcataaggctctgggtaacctaattctayagaccaaatgttattgtccccctcaaattcaagtgctgatatctaattccctatgtgatatttggaggtagggccttggggaatgattagctcatgaaggcaggggccacaggagtgggattaatagcccctattgaaggcaccatagagagctctctcatcccttctgtcatgtgaggacgtgggagaaacatggctgtctatgaaccacaaagcaagcccacaccagacatggaatctgcta

SEQ ID NO: 576336 - DNA, 404 bp, Homo sapiens
tgaacaagttactcaggcaaacgtagaatttaagcttggaccaagctgaatcaagagctgcaattaaaggtttccctaagcccagaggggaccagcgaatacttatagaagattttggatttcctctgaatgcataaggctctgggtaacctaattctatagaccaaatgttattgtccccctcaaattcaagtgctgatatctaattccctatgtgatatttggaggtagggccttggggaatgattagmtcatgaaggcaggggccacaggagtgggattaatagcccctattgaaggcaccatagagagctctctcatcccttctgtcatgtgaggacgtgggagaaacatggctgtctatgaaccacaaagcaagcccacaccagacatggaatctgcta

SEQ ID NO: 576337 - DNA, 404 bp, Homo sapiens
tgaacaagttactcaggcaaacgtagaatttaagcttggaccaagctgaatcaagagctgcaattaaaggtttccctaagcccagaggggaccagcgaatacttatagaagattttggatttcctctgaatgcataaggctctgggtaacctaattctatagaccaaatgttattgtccccctcaaattcaagtgctgatatctaattccctatgtgatatttggaggtagggccttggggaatgattagctcatgaaggcaggggccacaggagtgggattaatagcccctattgaaggcaccatagagagctcyctcatcccttctgtcatgtgaggacgtgggagaaacatggctgtctatgaaccacaaagcaagcccacaccagacatggaatctgcta

SEQ ID NO: 576338 - DNA, 464 bp, Homo sapiens
cattcagactccagcagcagtgttctgtaatcctatgtragtgacaaacattcagaccccaagagcagtgttctgaaatcctatgttaagggaaacattgagaccccagcatgaatgttctggaatcctatgtgagggacaaacattcagaccacggcaggagtattctggaatcctatgtgaggaacaaacattcagaccacagcaggagtgttctggaatcctatatgagggataagcattcagaccctcgtagcagtgttctggaatcctatgtgagggagaagcattcagagcacagcaggagtgccctgaaatcctatgttagggacaaacattcagaacctcgtaacattgttcaggaaacctatgtgagggacagacatttagaccctcgcagcagtgttctggaatcccatgtgagggtcaaacattcagatcctcacagcagtgttttggaattc

SEQ ID NO: 576339 - DNA, 464 bp, Homo sapiens
cattcagactccagcagcagtgttctgtaatcctatgtaagkgacaaacattcagaccccaagagcagtgttctgaaatcctatgttaagggaaacattgagaccccagcatgaatgttctggaatcctatgtgagggacaaacattcagaccacggcaggagtattctggaatcctatgtgaggaacaaacattcagaccacagcaggagtgttctggaatcctatatgagggataagcattcagaccctcgtagcagtgttctggaatcctatgtgagggagaagcattcagagcacagcaggagtgccctgaaatcctatgttagggacaaacattcagaacctcgtaacattgttcaggaaacctatgtgagggacagacatttagaccctcgcagcagtgttctggaatcccatgtgagggtcaaacattcagatcctcacagcagtgttttggaattc

SEQ ID NO: 576340 - DNA, 370 bp, Homo sapiens
gtaagtgacaaacattcagaccccaagagcagtgttctgaaatcctatgttaagggaaacattgagaccccagcatgaatgttctggaatcctatgtgagggacaaacattcagaccacggcaggagtattctggaatcctatgtgaggaacaaacattcrgaccacagcaggagtgttctggaatcctatatgagggataagcattcagaccctcgtagcagtgttctggaatcctatgtgagggagaagcattcagagcacagcaggagtgccctgaaatcctatgttagggacaaacattcagaacctcgtaacattgttcaggaaacctatgtgagggacagacatttagaccctcgcagcagtgt

SEQ ID NO: 576341 - DNA, 310 bp, Homo sapiens
gaattctatgtgactgacaaacattcagactccagcagcagtgttctgtaatcctatgtaagtgacaaacattcagaccccaagagcagtgttctgaaatcctatgttaagggaaacattgagaccccagcatgaatgttctggaatcctatgtgagggacaaacattcagaccacggcaggagtattctggaatcctatgtgaggaacaaacattcagaccacagcagragtgttctggaatcctatatgagggataagcattcagaccctcgtagcagtgttctggaatcctatgtgagggagaagca

SEQ ID NO: 576342 - DNA, 370 bp, Homo sapiens
gtaagtgacaaacattcagaccccaagagcagtgttctgaaatcctatgttaagggaaacattgagaccccagcatgaatgttctggaatcctatgtgagggacaaacattcagaccacggcaggagtattctggaatcctatgtgaggaacaaacattcagaccacagcaggagtgttctggaatcctatrtgagggataagcattcagaccctcgtagcagtgttctggaatcctatgtgagggagaagcattcagagcacagcaggagtgccctgaaatcctatgttagggacaaacattcagaacctcgtaacattgttcaggaaacctatgtgagggacagacatttagaccctcgcagcagtgt

SEQ ID NO: 576343 - DNA, 464 bp, Homo sapiens
cattcagactccagcagcagtgttctgtaatcctatgtaagtgacaaacattcagaccccaagagcagtgttctgaaatcctatgttaagggaaacattgagaccccagcatgaatgttctggaatcctatgtgagggacaaacattcagaccacggcaggagtattctggaatcctatgtgaggaacaaacattcagaccacagcaggagtgttctggaatcctatatgagggataagcattcagaccctcgtagcagtgttctggaatcctatgtgagggagaagcattcagagcacagcaggagtgccctgaaatcctatgttagggacaaacattcagaacctcgtaacattgtkcaggaaacctatgtgagggacagacatttagaccctcgcagcagtgttctggaatcccatgtgagggtcaaacattcagatcctcacagcagtgttttggaattc

SEQ ID NO: 576344 - DNA, 370 bp, Homo sapiens
gtaagtgacaaacattcagaccccaagagcagtgttctgaaatcctatgttaagggaaacattgagaccccagcatgaatgttctggaatcctatgtgagggacaaacattcagaccacggcaggagtattctggaatcctatgtgaggaacaaacattcagaccacagcaggagtgttctggaatcctatatgagggataagcattcagaccctcgtagcagtgttctggaatcctatgtgagggagaagcattcagagcacagcaggagtgccctgaaatcctatgttagggacaaacattcagaacctcgtaacattgttmaggaaacctatgtgagggacagacatttagaccctcgcagcagtgt

SEQ ID NO: 576345 - DNA, 370 bp, Homo sapiens
gtaagtgacaaacattcagaccccaagagcagtgttctgaaatcctatgttaagggaaacattgagaccccagcatgaatgttctggaatcctatgtgagggacaaacattcagaccacggcaggagtattctggaatcctatgtgaggaacaaacattcagaccacagcaggagtgttctggaatcctatatgagggataagcattcagaccctcgtagcagtgttctggaatcctatgtgagggagaagcattcagagcacagcaggagtgccctgaaatcctatgttagggacaaacattcagaacctcgtaacattgttcrggaaacctatgtgagggacagacatttagaccctcgcagcagtgt

SEQ ID NO: 576346 - DNA, 541 bp, Homo sapiens
acagccaaccccttcacaatctagaatctgatgactggatcttctgagaacatcagaggactgcccttgccattcacatgacagcaaaactttaaaaccttaaactttgggttcatagtcttacaactcagaagggtccctccacaattggaaccatacaccccttggaaccsttaatgtaaagctaacaaggacagttcccccccagaagaagatggcatccttaatgtgaacagcttttcccaagatcacagatcaagacttctctactattatgagactcttatcttaagtatctgtgcagctgctaacatggcatatggagaaaacatcgggtattataaagatttggttgtagggaattaacaaaaaaacccacttagttaagcaagtaaactctttatctaattcattctttaatctatttgattttaggtggtttgatttatggggaccctgagtaaggagcatataccaaattcttggtgttatcccaatagtcataagagtctccctggtgcactgtacttactcaaatgtt

SEQ ID NO: 576347 - DNA, 435 bp, Homo sapiens
ttcttgatttttaaaagtcaatgtactctcaaagaaacaaaactcttattcgtggattctgttatttgaaaayatttactgatcatttaccttacagcaagtgatctccagctcgtggaaaaatatgtaaagttgcccagctgcattaagcttaaactcttctgaaggagaaaagaagcaatggagtagggacattaaagcaggagtgtggtgatatggctgagacttctacttgcacactgtggtagctgtgtggagaatggattaaaaaagggcaatgacagaagcttaaattagtatcaaatatggcaatcctgtaaatttaggtgtccttgaaataagaaaaatgtataatagttctcattatttccccaagaaatctctgcacttggccttgtgagggaagcgctatagttaccaagtggtgggggtggg

SEQ ID NO: 576348 - DNA, 435 bp, Homo sapiens
ttcttgatttttaaaagtcaatgtactctcaaagaaacaaaactcttattcgtggattctgttatttgaaaacatttactgatcatttaccttacagcaagtgatctccagctcgtggaaaaatatgtaaagttgcccagctkcattaagcttaaactcttctgaaggagaaaagaagcaatggagtagggacattaaagcaggagtgtggtgatatggctgagacttctacttgcacactgtggtagctgtgtggagaatggattaaaaaagggcaatgacagaagcttaaattagtatcaaatatggcaatcctgtaaatttaggtgtccttgaaataagaaaaatgtataatagttctcattatttccccaagaaatctctgcacttggccttgtgagggaagcgctatagttaccaagtggtgggggtggg

SEQ ID NO: 576349 - DNA, 603 bp, Homo sapiens
ccttgctttctcagacgcctagattacaggcctctctcttgaacacctattggtaaggtatccggggatcctttaaatacacaatgattggcagggtttacataggggaaatcagtgtctgacaattcgccttccaggatatggattgtcattccctctctttgtgggccccagtctcctatacataaaagtagagattgtaatactcatttgacttgcagatacctcaccccgaacccacctactataatgtaaaagccaagaatgcaaaccctttcctcaccccgtgaaggtaaagtcctcagagccaaggagagaaggctcagggatggtacctrggtgtttccaacactaaccatgcattgtagtttttagtgttcaagtttaagcttcttatgttaaagttaccccagctttaattatattgtaacaagatttatttttgtaattccatttttggattcttgatttcttggtaaagaaatacagttatttttgtataccaatcttatatagtgttacattccaaaatttgttcatgagtcctaacactttttagtaaatttcttatgattttctaaatgcaagatcatgtcatctgta

SEQ ID NO: 576350 - DNA, 336 bp, Homo sapiens
ttaaattttccaacaccacagggttataagcaaaataaagccaagaatcaaggtatcagrctgggcacagtggcttatacctgtaatctcagcactttgggcggccaaggtgggaagccagttcaagaccagcctgggcaacatagcaagactccaactctacaaaaaaaaaaaaaaaaaaaaaaaaaaaagcatagattaacatggtggcacaatcctgtagtcctagctactgaggagactgaagctgaactgttttgagcccaggagtttgaggttgtggtgatcaatcacatcaccactgcagtccagcctgggtcacaaagtgacaaaaag

SEQ ID NO: 576351 - DNA, 608 bp, Homo sapiens
tttggaagtatgctacctctagaatcagatttatttttttattttaatttttttaggaatcttgaggaaaaaaatattttattctgtctttgaaacattggagaacaaatcatagaggtgagtgatagccaaactactcagtgtttctgtatcttggtttctttagtttccaaatactataattatttacttatcacctactagaaagagcatgaacttcagaggcagttaatcttttttttaatttccaacttttattttaagtttaggggtacatgtgcaggatgtgcaggtttgttacgtagttaaatgtgtaccatggtgattagctgcacagattatcacatcgcctaggtattaacccagcatccattaactattcttcctgatgctctcctcctcccactccccatcctytgccaggccccagtgtgtattgttccccaagatgtgtccatgtgttctcatcattcagctcttacttataagtgaggacatgtggtatttggttttctcttcccgcattagtttgctgaggataatggcttccagctccattcacatccttgcaaaggacataatcttgttcctttttatggctgcatagt

SEQ ID NO: 576352 - DNA, 576 bp, Homo sapiens
ggattacaggtgtgcaccaccacccccagctaatttttgtatttttagtaaaaacggrgtttcaccatgttggtcaggctggtctcgttcttcaaaagtgggtgagtaggcaagcacactttttctctcttgactcttgcataaaattgacttttggtttaatctgtccagtgcaaaaaatggcccttagcttttattaataaaaatctctactttgaaaaaaatctgggcaacctctgggtaaactccctaaaagaaataaatccataactgatacaaatttcagaagactgaaattttcatgaatgacaattctgatttagtaaaatgacatttagtaaatgaatactgatttagtaaaaaccaaaagagtaacaccttcactcaaaaaccctgagtttctgagtctgaagctatgagtcttgcattgggttctttctcattagatttgtttttatacaacttgtgtgtgtgtgtttttaattataatactggagacgtgttgagatctggactatgaagtattctaataaataatgtagtactgttgtgtaaaataataatgtcgtactgttt

SEQ ID NO: 576353 - DNA, 576 bp, Homo sapiens
ggattacaggtgtgcaccaccacccccagctaatttttgtatttttagtaaaaacggggtttcaccatgttggtcaggctggtctcgttcttcaraagtgggtgagtaggcaagcacactttttctctcttgactcttgcataaaattgacttttggtttaatctgtccagtgcaaaaaatggcccttagcttttattaataaaaatctctactttgaaaaaaatctgggcaacctctgggtaaactccctaaaagaaataaatccataactgatacaaatttcagaagactgaaattttcatgaatgacaattctgatttagtaaaatgacatttagtaaatgaatactgatttagtaaaaaccaaaagagtaacaccttcactcaaaaaccctgagtttctgagtctgaagctatgagtcttgcattgggttctttctcattagatttgtttttatacaacttgtgtgtgtgtgtttttaattataatactggagacgtgttgagatctggactatgaagtattctaataaataatgtagtactgttgtgtaaaataataatgtcgtactgttt

SEQ ID NO: 576354 - DNA, 576 bp, Homo sapiens
ggattacaggtgtgcaccaccacccccagctaatttttgtatttttagtaaaaacggggtttcaccatgttggtcaggctggtctcgttcttcaaaagtgggtgagtaggcaagcacactttttctctcttgactcttgcataaaattgacttttggtttaatctgtccagtgcaaaaaatggcccttagcttttattaataaaaatctctactttgaaaaaaatctgggcaacctctgggtaaactccctaaaagaaataaatccataactgatacaaatttcagaagactgaaattttcatgaatgacaattctgatttagtaaaatgacatttagtaaatgaatactgatttagtaaaaaccaaaagagtaacaccttcactcaaaarccctgagtttctgagtctgaagctatgagtcttgcattgggttctttctcattagatttgtttttatacaacttgtgtgtgtgtgtttttaattataatactggagacgtgttgagatctggactatgaagtattctaataaataatgtagtactgttgtgtaaaataataatgtcgtactgttt

SEQ ID NO: 576355 - DNA, 547 bp, Homo sapiens
atcttattcatgttggcctagaaagaaatcccatttkcagctacaaggtctctgaacacaagataataggaaaggagaagagcttccctgaccctgtaatccagacgtaagaaagagtcagggcccacaacatcctatgttgcatagagaagctgatccacaggctttgcaaacattcttcccagcctaggaaaacgtggggaatgtgaaggatccaaatgcaaaggaactgtgttacataaacacatatgggaccattaacaatacaaattcttcaaaagagtccatgttaatcgtccaaaggtggaattgctcaggtgaagcagtggagtagcttcccttggccttattcaggggaaaggctaggtatcaaagtgatcttcagaaaacacttcttatcagctgtcatgtacctggtaccaataggaatgttttcacctacatttttctacaatccttacaatcctggaaggtgggaaattatccctcttttacaaatgaagaacccacagttcagagagattaaataacttgctaaggctaccca

SEQ ID NO: 576356 - DNA, 547 bp, Homo sapiens
atcttattcatgttggcctagaaagaaatcccatttgcagctacaaggtctctgaacacaagataataggaaaggagaagagcttccctgaccctgtaatccagacgtaagaaagagtcagggcccacaacatcctatgttgcatagagaagctgatccacaggctttgcaaacattcttcccagcctaggaaaacgtggggaatgtgaaggatccaaatgcaaaggaactgtgttacataaacacatatgggaccattaacaatacaaattcttcaaaagrgtccatgttaatcgtccaaaggtggaattgctcaggtgaagcagtggagtagcttcccttggccttattcaggggaaaggctaggtatcaaagtgatcttcagaaaacacttcttatcagctgtcatgtacctggtaccaataggaatgttttcacctacatttttctacaatccttacaatcctggaaggtgggaaattatccctcttttacaaatgaagaacccacagttcagagagattaaataacttgctaaggctaccca

SEQ ID NO: 576357 - DNA, 547 bp, Homo sapiens
atcttattcatgttggcctagaaagaaatcccatttgcagctacaaggtctctgaacacaagataataggaaaggagaagagcttccctgaccctgtaatccagacgtaagaaagagtcagggcccacaacatcctatgttgcatagagaagctgatccacaggctttgcaaacattcttcccagcctaggaaaacgtggggaatgtgaaggatccaaatgcaaaggaactgtgttacataaacacatatgggaccattaacaatacaaattcttcaaaagagtccatgttaatcgtccaaaggtggaattgctcaggtgaagcagtggagtagcttcccttggccttattcaggggaaaggctaggtatcaaagtgatcttcagaaaacacttcttatcagctgtcatgtacctggtaccaataggratgttttcacctacatttttctacaatccttacaatcctggaaggtgggaaattatccctcttttacaaatgaagaacccacagttcagagagattaaataacttgctaaggctaccca

SEQ ID NO: 576358 - DNA, 547 bp, Homo sapiens
atcttattcatgttggcctagaaagaaatcccatttgcagctacaaggtctctgaacacaagataataggaaaggagaagagcttccctgaccctgtaatccagacgtaagaaagagtcagggcccacaacatcctatgttgcatagagaagctgatccacaggctttgcaaacattcttcccagcctaggaaaacgtggggaatgtgaaggatccaaatgcaaaggaactgtgttacataaacacatatgggaccattaacaatacaaattcttcaaaagagtccatgttaatcgtccaaaggtggaattgctcaggtgaagcagtggagtagcttcccttggccttattcaggggaaaggctaggtatcaaagtgatcttcagaaaacacttcttatcagctgtcatgtacctggtaccaataggaatgttttcacctacatttttctacaatccttacaatcctggaaggtgggaaattatccctcttttacaaatgaagaacccacarttcagagagattaaataacttgctaaggctaccca

SEQ ID NO: 576359 - DNA, 515 bp, Homo sapiens
ggcttggccagtttcccagtttccaagtccaatcctaacccaaagcagtgtacaccaaattcccaccaacctccagctaccaggaatttggcatctatttgttcccctgttttttaaccaattcagaaatggtttgtttttttttttccaggtcatataactgggtttctgctgaggtgtctggctccgagttgctttggagcagccacctagagcccaggccttgggagggccaggccctgtttgcagcccggagaccagggctctatgtcccctgaaggacacagagtggcagatttgcccagtgtggagatgccactgctgggctrtgtcctcctaccatctgtctcccttttgcctgccagtaaaaagagaagatgcactcaagaaaggtgggctccctggaaccagcagggagggagagagaatgccgcctctgctctcaggaattttctgttccctgttgccctctccttgggcttcacccctggcccatgcctctcacccttaaagac

SEQ ID NO: 576360 - DNA, 563 bp, Homo sapiens
ttgaggcttgtccctcctgtgctgcgtttcaagggtgatggccagaacatggtcctctgggtctcttttgctcacccacccacagaaagttggcaaattaaatgtatgttttggacattcagtagctgttactcatggaaaccctgaatctacgtgaacactctttccaaagccagatggaatttccactcagaaaatcttggcaccaatttcttcaaaacaatagcaagttacaggcaggaactgggaaacctccattacattagkggctggcactgtgggctaaccagggggaggtgatcctggtgtcttttccctgttcagcaggacctggtagccctctgattcttactcatgggtttcaaggcaggatggcaacttcttctaaagcagaccttcctcatagaggaatgccttgttaaaatataagcagccccaacacaaacgtttgtaagaatgatcgtgtctaaattaaggcagtttgatagacagtaacagaaagccaccaaacatagctcaaaccgaaagggaagtatatgagaagaacaccaaaaacattttac

SEQ ID NO: 576361 - DNA, 563 bp, Homo sapiens
ttgaggcttgtccctcctgtgctgcgtttcaagggtgatggccagaacatggtcctctgggtctcttttgctcacccacccacagaaagttggcaaattaaatgtatgttttggacattcagtagctgttactcatggaaaccctgaatctacgtgaacactctttccaaagccagatggaatttccactcagaaaatcttggcaccaatttcttcaaaacaatagcaagttacaggcaggaactgggaaacctccattacattagtggctggcactgtgggctaaccagggggaggtgatcctggtgtcttttccctgttcagcaggacctggtagccctctgattcttactcatgggtttcaaggcaggatggcaacttcttctaaagcagaccttcctcatagaggaatgccttgttaaaatataagcagccccaacacaaacrtttgtaagaatgatcgtgtctaaattaaggcagtttgatagacagtaacagaaagccaccaaacatagctcaaaccgaaagggaagtatatgagaagaacaccaaaaacattttac

SEQ ID NO: 576362 - DNA, 634 bp, Homo sapiens
ttgagaatcaaaatgaatcaagaaaaacaacaaatttaatgagctgtaagaaagctctattaggattgaacaaaatacaggaactggtctagggtatctataaccactcaaagggcattcaatttataaattccaccctgatttaggctgctttccagagttgaaataaaaaaagtaaatcaattgctcatatgaattctaactaaagaattttaatttgctttgcgtattgattagatttatggaaaaattattcaactgccagatttcttctacatatacaatctaaaatgaacataatttattttagctcacagtttcactacataagttgtatattatttaaaatgttttctcatatgttcccaaaagtgatatagatgtgaataatgcataaataagtctgtaaattrtgtacataacttctgattattttattttgaaaagggaaaaataatttgacccacctactttactttttcattctaggctagatagtatattggttcaattaatggtcatatattttaatttagcctggctttgtcacttaaaaacttgttgagattcaaaacttctgctttctcataggaaaacatcaaaattatctttaatgttttgtgaggtttaaata

SEQ ID NO: 576363 - DNA, 568 bp, Homo sapiens
tgatgcatcttctggtaagctacagaaagaaaaacatcagtacacagttggatgcaagatcatctactaagataatttaatgaagatgagtgaatatatcaaatcaaaccttcataaccaaagttgctaggcattagaaacccaaatggagatgttgcaaagaatcactatgcactttttcttttctargtaaagcaacctcaaaaacttcagatttatttaccactcaactcccttcctcatgtttgtttgtttttagccttatgtgttagaatttgtgcctctaactgattcccactgacacaaactcttttgaaatgcactcaagattctccacattgttttgaaagagaagtgtcacatactacacacaagaactagaattccaaaatcagggagatagaggcagtctgggtgttatgtagtaactgtgtgagccacacactgtgtaatcacactggagtaaggtaagcataaaaaatagaaaatacataaaacttattagaatgctagaatatatgtttccagagtggcagaaaaaagtgtttagttctcatgcaaattaggt

SEQ ID NO: 576364 - DNA, 607 bp, Homo sapiens
aattgcctttttaaaagaactttcatcctaagatgtatatgtatatgcccaagattcccctcctgaactgacatcagggaatgcacactgggggggaaatgaaattcactaaagtactccaactaagtaactaaacaaataaacaagcaaacaaaataacaacaacccatagccccaagaaagaaagaataggtattcagagttcaatattatataaaatggccagttttcaacaaaaaattatgagatgtgcatagaagtaaaaactgtaaattgtagagaaaatttaaaaaggcaatagtacctgcctttgagagaatctacacgttagactcagcagacaaatttcaaagcaaatattaaaaatatgttcaaggaactaaaggaaaccgtgccttaaaaagaaaaaggtatgatgacaatgtttcatcatgtaaagaatgtcaataaagaaggaaataaattacttttttaaaaactaagtgaaaattctcaagttgaaaactacaataaacraagttaataatttaatagaggggctcaatggtatgtttgaactggcaaaagaatgtgtgatgttgaagactgattattagagaatatgaaa

SEQ ID NO: 576365 - DNA, 512 bp, Homo sapiens
ttccccaccctagtaagcctgagggtactgcaggagaccagggcatacttctgtcyttatctcaaccacataagacagacactcccagagcagccatttatagacctcccctccaggaatgcattccttccccagcgtattaattattaatattccttgctaggaatagaatttagcaatatcttccctacttgcacgtccgtttataggctctctgcaagaagaaaaatatggcactattttgctcgaccccgcaggcagtcagaccttatggttgtcttcccttgttccctgaaaattgctgttattctgttctttttcaaggtgcactgatttcatattgttcaaacacacatgttttgcaatcaatttgtacagttaacacaattatcatagtggcactgaggtgatgtacatcctcagcctatgaagataacaggattaagagattaaagtaagacaggcataagaaattatgaaagtattatttgggaactggtaaatgtccatga

SEQ ID NO: 576366 - DNA, 626 bp, Homo sapiens
taattttgcaatataaccgatggaaatscaacatagagattattggtgttcctaaccaagagaaataacaataaatccaaattttaagtaaccttttctaaatttaatgagccaaaaagtactcaatttgttctgaaaaaagcaaaaagtaaagagaaaatatttaaatgaaaatgatcgttggatagatgatagatagatcgattttacttggtaacgttattgaacttaaagtttaaaaaaacttatacaaattcaaaagataatttcacaaaaatctggtaacctacaaagcaaaacataaaggcaaggcttccctcagccttttccttagaagtgttagatacagaggccaaaggaacagaatctgcagatttttgaggaagtaaagattgtcatcagttaattttatactgatgcaagttattattcctgactgcagaaaatggaagcaaaaatttgaattgctgtgattcaaggaaaagttgtgattcctaaaaagctaatttaaaaagttaagccagtcaacaaatagctgtatctcaaaaataaaaatataaatggtgaaataatacagaaaaaataaatttagggtagagccaatttaaataatttacaatgttata

SEQ ID NO: 576367 - DNA, 549 bp, Homo sapiens
ggaacaatgaaaacctctccatggcaatttttgctctccaaaawtccactcaattgttttgtttatcagtttccccagtatttgtacaaaaggttagcataaaaggatctgaataaacagaacctcaattttctaaactatttttaaataatttaacaaatagtgcaaagcagtggctgctgaacacttttattaatatgaattaataagaagatttaatttcattactaacactaaaacccagaataagacagatttttttgataatatgtgtggtttgaaatttttgtgaaaaactgtgttttacacttctgttcactttctttagccatcagtatagttgtctttaaaggtgagcctttttcttttttttctttttttgctagactccttaccttccttgagcttctttcaaattctctgcaactttttctaccacgttaggctcagtaatgtgtttttattcccgctcacttcaagaatccctgtccattgattgtgccttttcgtaccctagtactttatcttatgacctgatttactggacgt

SEQ ID NO: 576368 - DNA, 561 bp, Homo sapiens
gggttacgtagtgtaaggtgtcaacctatacctgtgttgcagaaaatcaaacatgcaattttcatattgaagtttgtggctctgaaaagaagtaatctttgaagttcctgatttgaggctcagaggcaagacrctcttgaatgagctagtacaggagtgagcaaactgtagcctgcaggccaaacctagtcctacacctgttttgcaaataaagttttattgaaagaaaagtcacactagtttctatacatatatatatatatatatatatatatatatatatatagagagagagagagagagagagagagagagagagagagagagagattatatttagtgatatttgcatgacagagttgagtagtagcaacagagaccatatggcccacaaagctgaaagtatttgctatctgctgctttgcaggaaaaaaaatgctgccaaattttagcatttatttggctttttgtgtgagggtgttataaaacaaataaaccaaaaagagtataatgtgtctgaaactccatcaaatatgtgattttttaaagagctatgtgtgt

SEQ ID NO: 576369 - DNA, 561 bp, Homo sapiens
gggttacgtagtgtaaggtgtcaacctatacctgtgttgcagaaaatcaaacatgcaattttcatattgaagtttgtggctctgaaaagaagtaatctttgaagttcctgatttgaggctcagaggcaagacgctcttgaatgagctagtacaggagtgagcaaactgtagcctgcaggccaaacctagtcctacacctgttttgcaaataaagttttattgaaagaaaagtcacactagtttctatacatatatatatatatatatatatatatatatatatatagagagagagagagagagagagagagagagagagagagagagagattatatttagtgatatttgcatgacagagttgagtagtagcaacagagaccatatggcccacaaagctgaaagtatttgctatctgctgctttgcaggaaaaaaaatgctgccaaattttagcatttatttggctttttgtrtgagggtgttataaaacaaataaaccaaaaagagtataatgtgtctgaaactccatcaaatatgtgattttttaaagagctatgtgtgt

SEQ ID NO: 576370 - DNA, 561 bp, Homo sapiens
gggttacgtagtgtaaggtgtcaacctatacctgtgttgcagaaaatcaaacatgcaattttcatattgaagtttgtggctctgaaaagaagtaatctttgaagttcctgatttgaggctcagaggcaagacgctcttgaatgagctagtacaggagtgagcaaactgtagcctgcaggccaaacctagtcctacacctgttttgcaaataaagttttattgaaagaaaagtcacactagtttctatacatatatatatatatatatatatatatatatatatatagagagagagagagagagagagagagagagagagagagagagagattatatttagtgatatttgcatgacagagttgagtagtagcaacagagaccatatggcccacaaagctgaaagtatttgctatctgctgctttgcaggaaaaaaaatgctgccaaattttagcatttatttggctttttgtgtgagggtgttataaaacaaataaaccaaaaagagtataatgtrtctgaaactccatcaaatatgtgattttttaaagagctatgtgtgt

SEQ ID NO: 576371 - DNA, 566 bp, Homo sapiens
ttaccttttttttcaatatctaagagttttttttaattttctggtttttatttttatagcatcttatatttgattccattctcagaagatttttttttaaactagttgctttttatgttttgcactttgtctatttcatcagagtccctttgcttctgtttgttttgttcactggcttttatggtaaatgttgtccttagagatctaattatcctgggactcacgcacatagccagcaatgaaacaagaaaaagttcatagaaatgtttacttcgttaaggaaaaccttgtatgaatggaagtttgtttcayaaaaagtacttataagcgaaatctagtagtgttgagtgttagaatacgaaagataaaagcatatcttatttttatagaaaatcttggagcctgggtcataggctatattatcattatatctggttcaattgttattatctataaaatattttagattttatataaagagaattttgcatcaactctacctgacttaattgctccaaattccacgtacatctataattctaatacttttctaataccaagaagat

SEQ ID NO: 576372 - DNA, 627 bp, Homo sapiens
gatttttttttaaactagttgctttttatgttttgcactttgtctatttcatcagagtccctttgcttctgtttgttttgttcactggcttttatggtaaatgttgtccttagagatctaattatcctgggactcacgcacatagccagcaatgaaacaagaaaaagttcatagaaatgtttacttcgttaaggaaaaccttgtatgaatggaagtttgtttcacaaaaagtacttataagcgaaatctagtagtgttgagtgttagaatacgaaagataaaagcatatcttatttttatagaaaatcttggagcctgggtcataggctatattatcattatatctggttcaattgttattatctataaaatattttagattttatataaagagaaytttgcatcaactctacctgacttaattgctccaaattccacgtacatctataattctaatacttttctaataccaagaagatgaaaagtgatggatttttatattttcaccagtaatgttttgctttgaaaggatgcattaaagttgatatccagtcatttgatgggccattgtttatggctaaataggattaatatatttttttaaagccccatcattagaatgactaa

SEQ ID NO: 576373 - DNA, 642 bp, Homo sapiens
aattaaaactgagatttaaaagtttattgaataatttaaaaatagcaagattaacccattacatgttaacctaaataacrtatctttctaaaaatacatttctaaactaaaaaataattggtgagaagagtagcatttttctacattattgcagatttaaaatctatctggcttattaggaaatagttgaattctcaaaactcttttgcattcaacctattataatatgttgttttggttaaagtataaaaaatcaggcttacacagaaatatagtaggaaaaggaataattattttaataatgtcaaagataaaattaaatttgagacaaaattagtaaatgctacttattcctgatcatgcagccttaaaggaaactatctgtggccatgctcttttcagcaggattcaaaggtatttgaaggaagttttggttttatagaggaaaaggagtaagtcctgagatagatagactctgattagcaagttttcttaacactcttacgggatttttgaaagtggtggagactttctaattgttcttcaggtacatttttgtgtccttgtgtcgtaggactttttccttagttcagctaagagccagtttcttgtcacatggccatgagatattagactcgcaga

SEQ ID NO: 576374 - DNA, 517 bp, Homo sapiens
ggcagaggtttgtctttactggaatagacccttactctggatacaggtttgcctatcatgcatgcaatacttctgcaaggacttccatctgtggactcatggaatgctttatccaccrtcatggtattccacacagcattgcctctgaccaaggcagtctatggttaaagaagtgtggcagtgggctcatgctcatggaattcactggtcttaccatgttccccatcatcctgaagcagctggattgatagaatggtggaatggccttttgaagtcacaattacaatgccatctaggtgacaatactttgcaagggtggggcaaagttctccagaaggccgtgtacatgctgaatcagtgtccattatatagtactgtttctcccatcgccaggattcatgggtccaggaaccaaggggtggaagtggaagtggcaccactcaccatcgcctctagtgatccactagcaaaatttttgcttcctgttcctgcaacattatcttctgctggcctagag

SEQ ID NO: 576375 - DNA, 395 bp, Homo sapiens
ccttgctggatgcttcctgccctcaaatattggacttcaagttcttcagctttgggactcggactggcttccttgctcctcagcctgcagatggcctattgtgggacgttgtgatcatgtgagtttaataccccttaataaactcccctatatgggagagttgaaactcccctatataggagaacttgaagtccaatgtttgagggcaggatttaaaataaataagtgacaaattgaggccgggcatggtggctcatttctgtaatcctagcactttgggaggcctaggtgggtggatcacatgaggtcaggagttcaagactaacctagccaacatagtgaaaccctgcctctactaaaaatacaaaaaaagtarccaggcatgatggtgggcg

SEQ ID NO: 576376 - DNA, 571 bp, Homo sapiens
tctggctgaatagtatcccattttgtaaatatatatgtatatatgtatatttgtatmcatatatatgcacacatatatttgtatatatacacatgtatatttgtgcaatacacacatatacacatgtacacaaatgtatgtatgtgtatatacattaatatatgtacacacacattatttatccattcatctgttaatggaatcctaggtctatttcatttcttgggtaaggtgaataatactggaatgttcattggagtgcggatacagctttgacatactactgattccatttcctttagatacatgcacagcagtgggattgctagattacatggtagctctatttttacttttttgaggaaattctgtattttcttctatgatatataactaatttacattactgccaacagtgaacaagggttccctttctccacctccttgctaacactttttatctttcttctttctgataatggccattctaatggagtgaggtgacgtgtcattgtgatattagtttgtatttccctgatgattaatgatgtttagcatttttcttacacct

SEQ ID NO: 576377 - DNA, 553 bp, Homo sapiens
gcaccactgcactccagcctgggtgacagagtatgactytgccaaaaaaaaaaaaaaaaaaaagagtagaaggaattatagccacagaattttccagggcaattccagaggagacccaacaactgttagggactatgcccctattgttaaaatgtctatataacctctgaggctgatgactttgagaacacctacactgacttgaaaattcacattctggtgtgtttctttctttctttgagacagtgttagttttactctgtcacttaggcgagagtgcagtggtgcgatcatgactcattgcagccttgaactcctgggttcaagcaatcctcccacctcagcctcccaagtagctgagaatacaaacatgcaccaccacacccggttaacttttcaaattttttttatagagacaaggtcttgctgtgtcgcccaggctggtcgagaactcctcacctcaagtgaacctcctgccttggcctctcaaagtgctgagtgtgcttctactgaaaacatttacagtatgtcataatcacaactttttagcata

SEQ ID NO: 576378 - DNA, 577 bp, Homo sapiens
tatctctctctctttagctttatatgttgctttatatatctgggtgtataaatatatctgggtatataaatactccaaagttgggtgtctatatatttacagttgttatatcatcttgtttaattgacctttttattattatataatgaccttctttgtctcttatagtttttgacttgaaatgtactttgtccaatataagtatagctgctcctcctcttttttcgtttcattggcatggaatayctctttccatctctttattttcaatctatgtgtgtctttataggtgaagtgtgtttcttatagaaaacagatcatggggtcttgtttttgtatccattcagccactctgtcttttgattggagagtttagtccattaatattcaattttatttgataagtaaggacttactcctgtcattttattatttgttttctggttgttttgtggtattctttcatttctttccttccttccttgcttcctgtcttctgtgaaggtgattttctctgatggtgtgatttgattttttgctttttattttgtgtgtatctgtcatgtatttttttgat

SEQ ID NO: 576379 - DNA, 393 bp, Homo sapiens
tctgtaaatcaaaacaaaatgagatggagacagaatgaataaagcagaagacttccatgtgcacaatactatttatgcacaaacacacctaaaggaaagaatgagaacagaagtttctgttgctctttgtaaactagggttcctgaaatatttcagttcaccaccagagctttytttggtatctgtttagtggatttgtggttcaatatggtaatctgagtctctctctgcatctaaaagttctaactctaccttcctgcccacattgtgcataccaattgaagcctccaaaaaaaaaaaaaaaaaaaaaaaaaaaaagttaaaataggaaagaatatgggtctgtgctggaaatcagggaagatttcacattcatgaaaaccggaaaaattc

SEQ ID NO: 576380 - DNA, 561 bp, Homo sapiens
cagtcagagggccagatttggcccttggtctatggttgtttagagcagtcaaaatttattccctggggctgggccaactttttctttaaaaaaaaaaaaaaaacccactgtcagaataaaayaaggtttctatttaaaaagaaaaaaaggctgggtgtggtggctcatgcctataatcctagcactttggaagggtgaggcaggaggactgcttgaagccaggagtttgaaaccaacttgggcaatatagtgagaccctctgtctgcaaagaataaaaaaattagccaggcatggtggcacatgtctgtagtcttagctacataggaggctgaaggggaagatcacttgagcccaggattttgaggctacagtgagctctgactgtaccatttgtactctagcctaggcaaagagggagaacccaaaaacaaacaaacaaaaagttggtttgggcgggttggagaagaaagtatttctgaatttctgggtaggttactggtagtgtcaggccaaactagctctacagtcatattcattataaataaaggcaactagaagat

SEQ ID NO: 576381 - DNA, 561 bp, Homo sapiens
cagtcagagggccagatttggcccttggtctatggttgtttagagcagtcaaaatttattccctggggctgggccaactttttctttaaaaaaaaaaaaaaaacccactgtcagaataaaacaaggtttctatttaaaaagaaaaaaaggctgggtgtggtggctcatgcctataatcctagcactttggaagggtgaggcaggaggactgcttgargccaggagtttgaaaccaacttgggcaatatagtgagaccctctgtctgcaaagaataaaaaaattagccaggcatggtggcacatgtctgtagtcttagctacataggaggctgaaggggaagatcacttgagcccaggattttgaggctacagtgagctctgactgtaccatttgtactctagcctaggcaaagagggagaacccaaaaacaaacaaacaaaaagttggtttgggcgggttggagaagaaagtatttctgaatttctgggtaggttactggtagtgtcaggccaaactagctctacagtcatattcattataaataaaggcaactagaagat

SEQ ID NO: 576382 - DNA, 561 bp, Homo sapiens
cagtcagagggccagatttggcccttggtctatggttgtttagagcagtcaaaatttattccctggggctgggccaactttttctttaaaaaaaaaaaaaaaacccactgtcagaataaaacaaggtttctatttaaaaagaaaaaaaggctgggtgtggtggctcatgcctataatcctagcactttggaagggtgaggcaggaggactgcttgaagccaggagtttgaaaccaacttgggcaatatagtgagaccctctstctgcaaagaataaaaaaattagccaggcatggtggcacatgtctgtagtcttagctacataggaggctgaaggggaagatcacttgagcccaggattttgaggctacagtgagctctgactgtaccatttgtactctagcctaggcaaagagggagaacccaaaaacaaacaaacaaaaagttggtttgggcgggttggagaagaaagtatttctgaatttctgggtaggttactggtagtgtcaggccaaactagctctacagtcatattcattataaataaaggcaactagaagat

SEQ ID NO: 576383 - DNA, 561 bp, Homo sapiens
cagtcagagggccagatttggcccttggtctatggttgtttagagcagtcaaaatttattccctggggctgggccaactttttctttaaaaaaaaaaaaaaaacccactgtcagaataaaacaaggtttctatttaaaaagaaaaaaaggctgggtgtggtggctcatgcctataatcctagcactttggaagggtgaggcaggaggactgcttgaagccaggagtttgaaaccaacttgggcaatatagtgagaccctctgtctgcaaagaataaaaaaattagccaggcatggtggcacatgtctgtagtcttagctacataggaggctgaaggggaagatcacttgagcccaggattttgaggytacagtgagctctgactgtaccatttgtactctagcctaggcaaagagggagaacccaaaaacaaacaaacaaaaagttggtttgggcgggttggagaagaaagtatttctgaatttctgggtaggttactggtagtgtcaggccaaactagctctacagtcatattcattataaataaaggcaactagaagat

SEQ ID NO: 576384 - DNA, 608 bp, Homo sapiens
cttgggcaatatagtgagaccctctgtctgcaaagaataaaaaaattagccaggcatggtggcacatgtctgtagtcttagctacataggaggctgaaggggaagatcacttgagcccaggattttgaggctacagtgagctctgactgtaccatttgtactctagcctaggcaaagagggagaacccaaaaacaaacaaacaaaaagttggttkgggcgggttggagaagaaagtatttctgaatttctgggtaggttactggtagtgtcaggccaaactagctctacagtcatattcattataaataaaggcaactagaagatctccatctagctattaaaattggttaaaatctacagagataaaggacggtgactcttgtgtcagttagttgttgtcacaaaatgctgcataacaagtcactccaaatctcagtggcttaatacaacaatcgtttattttcatggatctatgggtcagctgaggattggtcaatctagcatgagcatgtctgggaagctcgacgttgctcttgctgtctcttctgctggaagcagcagtctggcctgggcttgttctcatggtgatagcaggagtgagtgagca

SEQ ID NO: 576385 - DNA, 494 bp, Homo sapiens
ataggctgggaatacacaggttgttggtttttgagatttccctccctgtgccttcatgccagctgtgaaagagtcaaaaggctcctaactgtcaaaataaaaatgacacttggtcacagaggaagcagattataggtcaatcacattgatgactttttaactatgagaagccattaatgttactgaataagcaaatctgtttgcataascagatttttataggctactgggaataaaggttttcctaagtgggtgatttgtacaacgatagcctttgggtctctgatggaacagctctgatgaggaaatgttcctttaattatgtggaaggccaattaccacgttatagccacattgttttgcagattgcatataatttcaccatttccatagtttcagcactataattctggagaaaattcaggcaccaaggagacacttgaggcacactatgctggagacaaagatgttttagcgaattcaatttaagcttc

SEQ ID NO: 576386 - DNA, 494 bp, Homo sapiens
ataggctgggaatacacaggttgttggtttttgagatttccctccctgtgccttcatgccagctgtgaaagagtcaaaaggctcctaactgtcaaaataaaaatgacacttggtcacagaggaagcagattataggtcaatcacattgatgactttttaactatgagaagccattaatgttactgaataagcaaatctgtttgcataagcagatttttataggctactgggaataaaggttttcctaagtgggtgatttgtacaacgatagcctttgggtctctgatggaacagctctgatgaggaaatgttcctttaattatgtggaaggccaattaccacgttatagccacattgttttgcagattgcatataatttcaccatttccatagyttcagcactataattctggagaaaattcaggcaccaaggagacacttgaggcacactatgctggagacaaagatgttttagcgaattcaatttaagcttc

SEQ ID NO: 576387 - DNA, 328 bp, Homo sapiens
accactcccttatatctgctccctgtatcatctcttcttgagtgtgtgcagagcttgtgatttggccaaggggaaggaattttgcaaatgtgattatggtcacacttgctttgttaagcacatttgctcagctgactttgagttcatccaaagcaggatgatcttaggtgggccagacctaatcaggtgagtcttttaaaggtgaagtttcagagattcaacccttagcctccaaggagacamaaatggccatgctgtgaactgtctttggaggtggcagctctaggagctgagggccttcgttctacaattgcaagaaattgaattc

SEQ ID NO: 576388 - DNA, 328 bp, Homo sapiens
accactcccttatatctgctccctgtatcatctcttcttgagtgtgtgcagagcttgtgatttggccaaggggaaggaattttgcaaatgtgattatggtcacacttgctttgttaagcacatttgctcagctgactttgagttcatccaaagcaggatgatcttaggtgggccagacctaatcaggtgagtcttttaaaggtgaagtttcagagattcaacccttagcctccaaggagacaaaaatggccatgctgtgaactgtctttggaggtggcagctctaggagctgagggccttcgttcwacaattgcaagaaattgaattc

SEQ ID NO: 576389 - DNA, 527 bp, Homo sapiens
gattatagcaagcatttaatttccatttgtgttgcaggagccctcaaccagatatgggactacactggaatttatgattaagtagttggtgtttgaagttacatctggtttggttaatattttattctctagtttttattctctagccttgtatcagctctctgtaatcctgtatttcattatctatttatcagagctataacccgcactgtcttttatcttaaaacatactaccttcayctttcccccatcaatatgttggagtttttgtatatttgctattcatttgatctgttcatgttggacatggagaaaaaatcttaagctatattcttggagcaaaagcagaataaatcctcttttatttgtaaatgttgctctgtttatgggcagatgaacataagatactgagaactcacaagaaaaatatgacatcataaccaggcaagggtcttcccttgcaatagccatgtgagtaataatgtagtagtatatttggaagtacagagttggaaacagactgaccg

SEQ ID NO: 576390 - DNA, 496 bp, Homo sapiens
gcacaggaggatgctgggattcctcctgcaagtttaacgcaatgcagcctattttacaaggtcacagaagctcagataggttaacctgcccaggttctcatagcttgtaagtgacaaaacaaaacccgcccaaatctctgtctctatagatatttccacttgctttaactctggagctgtcttagttgtaaagacagattccactcctcactcacttttgtttgcatatattgcctaaggtcccttgtgaatatttaggtcagggctttttttttttttgagtttttttttktttgtttgtttgtttttaaaaaagcaatcttgtacaaagaacccaaagtggctccccattttaagactctgcaaacagggataccagagtctggagtcccggtctgatttccacactttccttagatttccctgtgtgtaaaatccaacaataatctttgacaaattgcctcccccaggggagagatggaggaagtgttaactt

SEQ ID NO: 576391 - DNA, 496 bp, Homo sapiens
gcacaggaggatgctgggattcctcctgcaagtttaacgcaatgcagcctattttacaaggtcacagaagctcagataggttaacctgcccaggttctcatagcttgtaagtgacaaaacaaaacccgcccaaatctctgtctctatagatatttccacttgctttaactctggagctgtcttagttgtaaagacagattccactcctcactcacttttgtttgcatatattgcctaaggtcccttgtgaatatttaggtcagggctttttttttttttgagtttttttttgtttgtttgtttgtttttaaaaaagcaatcttgtacaaagaacccaaagtggctccccattttaagactctgcaaacagggakaccagagtctggagtcccggtctgatttccacactttccttagatttccctgtgtgtaaaatccaacaataatctttgacaaattgcctcccccaggggagagatggaggaagtgttaactt

SEQ ID NO: 576392 - DNA, 595 bp, Homo sapiens
cctcactcacttttgtttgcatatattgcctaaggtcccttgtgaatatttaggtcagggctttttttttttttgagtttttttttgtttgtttgtttgtttttaaaaaagcaatcttgtacaaagaacccaaagtggctccccattttaagactctgcaaacagggataccagagtctggagtcccggtctgatttccacactttccttagatttccctgtgtgtaaaatccaacaataatctttgacaaattgcctcccccaggggagagatggaggaagtgttaactttgtttttttttttcttttttcagacagagcctcactctgttgcccaggatggagtgcagtggtgcaattttggctcactgcaacctctgcctcctgagctcaaatgattcttgtgcctcagcctcccgaatagctgggactacagacagatgccaccacacctggctaatttttgtatttttagtagagatggggtttcgcatattggccaggctrgtatcgaactcctggcctcaaatgatccaccccgctcagcctctcaaagtgctagaactactatagtcatgagccaccatgcccagcc

SEQ ID NO: 576393 - DNA, 468 bp, Homo sapiens
gagccaccatgcccagccactttgctatttttttaatagacagcttcgaggtccagtatgatttcacagattaggaaacatcacaggcaaagaagaacactttgcattcaaatagtagaatgtttttgttttcaaggagctctcacctgccatctaatcttgtcttcctagcagtcctgggagagaagcagatgtggtttccaatcccactttccaaaagaggagactgaggcagaggctttgcagatacacagaggacatgtgaggacaggtgaaggtcatgatcattgtcagcgccctcccccaacttgacattcccagacctagtggacttccaaacagaggagacagaagaactgatcaatcaattctgccatgggtgccaggacccaatttttccctggctaactcggtcacatcctgtctgggatctccaactactacccmtcccacaagtctcagctaaaa

SEQ ID NO: 576394 - DNA, 555 bp, Homo sapiens
gtcatatctggccaaactaagcttcctcagtgaaggagaaataagatccttttcagataagcaaattctgagagaattcattaccatcagagtgccttacaaaatatcttaaaaggagcactaaatacagaaaggaaaaagcattaccagccaatacaaaaatacacttaattacccagaccagtgacactataaagcagacacataaataagtttgcataataaccagctaacaatacaatgacaggatcaaatccacacatatcaatactatccttgaatgtaaatgggttaaaggccccatttaaaaggcacagagtggcaagctggataaaaaagcaagactgaatggtaagctgtcttcaagagacccatctcacacacaatgacacccataggctcaaaataaaggwatgttggaaaatttatcaagcatatggaaatcacaaaaaaagtagaggtggcaatcctaatttcagacaaaacagactttaaaataacaaagttcaaaaaagacaaagaagggtgtgacataattgtaaaggttttaattca

SEQ ID NO: 576395 - DNA, 622 bp, Homo sapiens
attacaattgacaccacaaaaatacaaaagttcatttgaaattactatgaacacctctttgcacaggaattagaatatctagaaaaaawtaataaatgctggaagcctacagccctcctagattaaatttggcagaaatagaaaccctacatagaccaataaaaatcagtgagactgaattagtaagaaagaaaaattcccaacaaaaaatgtttaggaccacacatatgcacagctgaattctaccagacatccgaagaagaattgatacctaccctattgaaaccattccaaaagattgagaaagagagtcctccctaactcattctatgaagtcagtgtcaccctgataccaaaaccagggaagaatataacaacaacaaaaaacctacagactaatatccctgataaacatacatgcaaaaaccctcaacaaaatactagctaacaaaatcaaatagcaaaaaaaaaggatactataccattattgagtgagtctcattcaaatgatgtaggggtggtttaacatataagaatcaatagaggttagattaagatggcagataggaggcaggactagcttgcccctcctgctctgacagacagagcagtgtgtggagac

SEQ ID NO: 576396 - DNA, 556 bp, Homo sapiens
ggcgtgagccactgcgcctggccttgagttgtttttaaaagcatatttctctcaaattatctccggggtgtcccactgtgacttgggaaaaggttggattttctggaggtggaaagtcaaacttcaaatacaatttggaggctgccactgtggctcatgcctgtaatcccagtactatgggaggctgaagtgggtggatcatttaaggccagaagttcgagaccaamctgggcaacatgacgagacttcgtttctactaaaaatacaaaaattagccaggcgtggtggtacatgcctgtaatcccagctacttaagaggctgaggcaggtgttattgcttgaacctgggaggcagagttgtcctgtgtccaaaccccatgaggagtatcagctggctgaagataaaatcggtcacgcagtgttgggattgtggttgctgttatcatccctcatccccacccctgctaggcatccacaaatagtcgtcttcaatgagacgtccctcctgcccctggctgccttatttcatctgcacccaatcgtatccattgcttgt

SEQ ID NO: 576397 - DNA, 556 bp, Homo sapiens
ggcgtgagccactgcgcctggccttgagttgtttttaaaagcatatttctctcaaattatctccggggtgtcccactgtgacttgggaaaaggttggattttctggaggtggaaagtcaaacttcaaatacaatttggaggctgccactgtggctcatgcctgtaatcccagtactatgggaggctgaagtgggtggatcatttaaggccagaagttcgagaccaaactgggcaacatgacgagacttcgtttctactaaaaatacaaaaattagccaggcgtggtggtacatgcctgtaatcccagctacttaagaggctgaggcaggtgttattgcttgaacctgggaggcagagttgtcctgtgtccaaaccccatgaggagtatcagctggctgaagataaaatcggtcacgcagtgttgggattgkggttgctgttatcatccctcatccccacccctgctaggcatccacaaatagtcgtcttcaatgagacgtccctcctgcccctggctgccttatttcatctgcacccaatcgtatccattgcttgt

SEQ ID NO: 576398 - DNA, 549 bp, Homo sapiens
ccaggtagctccccatctctaactctgacctgctaagacagaatcttgtgcgtgtggcccaggactgtacatattgaaacagtcaatgacctgggaactatttctgaacacccctagktttcccatgtttgccctttcctttcacatttggacccctttgtgtgctgaccactgggctgtttcacatggacataacataaaaaagacaggccaggtgcattggctcatgcctgtaatcccagcactttgggaggccgaggtaggcgaatcgcttgaggccaggagttcaagatctgcctggccaacatgagtaaaccccgtctctaccaaaaatatgaaattagctgggtgcggtgatgcacacctttgatcccagctactcaggaggctgaggctggagaatcccttgagcccaggaggcagagactgcagtgagccgagatcgcaccactacaccccagcctgggtgagagtgagactcttaaaaaaaaaaaaaaaaaaaaaaaaacaaagagacagagatgatccttcctttatggagctctcagt

SEQ ID NO: 576399 - DNA, 549 bp, Homo sapiens
ccaggtagctccccatctctaactctgacctgctaagacagaatcttgtgcgtgtggcccaggactgtacatattgaaacagtcaatgacctgggaactatttctgaacacccctaggtttcccatgtttgccctttcctttcacatttggacccctttgtgtgctgaccactgggctgtttcacatggacataacataaaaaagacaggccaggtgcattggctcatgcctgtaatcccagcactttggraggccgaggtaggcgaatcgcttgaggccaggagttcaagatctgcctggccaacatgagtaaaccccgtctctaccaaaaatatgaaattagctgggtgcggtgatgcacacctttgatcccagctactcaggaggctgaggctggagaatcccttgagcccaggaggcagagactgcagtgagccgagatcgcaccactacaccccagcctgggtgagagtgagactcttaaaaaaaaaaaaaaaaaaaaaaaaacaaagagacagagatgatccttcctttatggagctctcagt

SEQ ID NO: 576400 - DNA, 530 bp, Homo sapiens
ttctctacaggggcttgaaatgtccagtgtgtaccctgcccctctctgtcatagctaaaaggaatgtgctccgtgtcttcttcctgctcaaaggaccgtccaccaacctgcgcaggcagcactttcggcaaggggaggatgggagaacatcctaccatttcccacttacgcactgcattcatcaggagcctgcctcacaaattacaagagcgctacggcagacccacgaygttccagcggatggccatgtcttcatgtcaacttgaaagatcattgccagggaaatatctatatctcggcagagagagcttcagcctgtgtagttcagctgtgctcaaatggaaatcaaaaaaaccagatgttggtcaaaacaccctgtctcagggagctggctctgcaggtccccagtgtgagagtgaactgggtgggccacctgacctgcctacccacatcccggcctcctggaatcctgaaccctgagaaccagggggatgtggtggggagcaggcaagtcttgtgcagaaagccaa

SEQ ID NO: 576401 - DNA, 530 bp, Homo sapiens
ttctctacaggggcttgaaatgtccagtgtgtaccctgcccctctctgtcatagctaaaaggaatgtgctccgtgtcttcttcctgctcaaaggaccgtccaccaacctgcgcaggcagcactttcggcaaggggaggatgggagaacatcctaccatttcccacttacgcactgcattcatcaggagcctgcctcacaaattacaagagcgctacggcagacccacgatgttccagcggatggccatgtcttcatgtcaacttgaaagatcattgccagggaaatatctatatctcggcagagagagcttcagcctgtgtagtycagctgtgctcaaatggaaatcaaaaaaaccagatgttggtcaaaacaccctgtctcagggagctggctctgcaggtccccagtgtgagagtgaactgggtgggccacctgacctgcctacccacatcccggcctcctggaatcctgaaccctgagaaccagggggatgtggtggggagcaggcaagtcttgtgcagaaagccaa

SEQ ID NO: 576402 - DNA, 372 bp, Homo sapiens
cgcccacggcgaggagggctgcccatgctgcctaaatgggttcagaatgaagaccgccctctctcccatgtggggctcattaaccatgaatccaattattaaracaagctcagctgagcaaatggtcaaacataaaaacatgtggaaggaacaaagaggtcaaccccattatccattaaaaaccatcaaggtggcggccctcactgaggggtacagttctccagcgggccctcatctgccctccaaacccacatgcctccgcagtggaaggccagcaaagccacacaggaagagttggggtaggaaagccgaaagtgaaccccaggaggccagcctggctatgcagccccatcccacacacactggcccggt

SEQ ID NO: 576403 - DNA, 372 bp, Homo sapiens
cgcccacggcgaggagggctgcccatgctgcctaaatgggttcagaatgaagaccgccctctctcccatgtggggctcattaaccatgaatccaattattaaaacaagctcagctgagcaaatggtcaaacataaaaacatgtggaaggaacaaagaggtcaaccccattatccattaaaaaccatcaaggtggcggccctcactgaggggtacagttctccagcgggccctcatctgccctccaaacccacatgcctccscagtggaaggccagcaaagccacacaggaagagttggggtaggaaagccgaaagtgaaccccaggaggccagcctggctatgcagccccatcccacacacactggcccggt

SEQ ID NO: 576404 - DNA, 372 bp, Homo sapiens
cgcccacggcgaggagggctgcccatgctgcctaaatgggttcagaatgaagaccgccctctctcccatgtggggctcattaaccatgaatccaattattaaaacaagctcagctgagcaaatggtcaaacataaaaacatgtggaaggaacaaagaggtcaaccccattatccattaaaaaccatcaaggtggcggccctcactgaggggtacagttctccagcgggccctcatctgccctccaaacccacatgcctccgcagtggaaggccagcaaagccacacaggaagagttggggtaggaaagcmgaaagtgaaccccaggaggccagcctggctatgcagccccatcccacacacactggcccggt

SEQ ID NO: 576405 - DNA, 472 bp, Homo sapiens
tggggtaggaaagccgaaagtgaaccccaggaggccagcctggctaygcagccccatcccacacacactggcccggtgattcaggggccaacgtttgcaggacaccgggagctcacagggacagcgccccggggatgcaaggaactttgcctctctgtccctctctgtagggatggaaagaggagagcgatttctggggtggaagccatctgcctcctctcaactcttgctgcccaaccagaaagggaagaaaaacaggaagatgcgggacgggtgaggagctgggtaagcgccgccagcccgcagtccagcagagcagggcttggccaagcctggcgccagggacttcccccctacccccaccacaggcccctcgccaggtgagaggcaccgacagggtcccagacagatgccccagacaggatgcccagcgcaacacccgccacttcccctgctaggggcccccaggacg

SEQ ID NO: 576406 - DNA, 472 bp, Homo sapiens
tggggtaggaaagccgaaagtgaaccccaggaggccagcctggctatgcagccccatcccacacacactggcccggtgattcaggggccaacgtttgcaggacaccgggagctcacagggacagcgccccggggatgcaaggaactttgcctctctgtccctctctgtagggatggaaagaggagagcgatttctgggrtggaagccatctgcctcctctcaactcttgctgcccaaccagaaagggaagaaaaacaggaagatgcgggacgggtgaggagctgggtaagcgccgccagcccgcagtccagcagagcagggcttggccaagcctggcgccagggacttcccccctacccccaccacaggcccctcgccaggtgagaggcaccgacagggtcccagacagatgccccagacaggatgcccagcgcaacacccgccacttcccctgctaggggcccccaggacg

SEQ ID NO: 576407 - DNA, 472 bp, Homo sapiens
tggggtaggaaagccgaaagtgaaccccaggaggccagcctggctatgcagccccatcccacacacactggcccggtgattcaggggccaacgtttgcaggacaccgggagctcacagggacagcgccccggggatgcaaggaactttgcctctctgtccctctctgtagggatggaaagaggagagcgatttctggggtggaagccatctgcctcctctcaactcttgctgcccaaccagaaagggaagaaaaacaggaagatgcgggacgggtgaggagctgggtragcgccgccagcccgcagtccagcagagcagggcttggccaagcctggcgccagggacttcccccctacccccaccacaggcccctcgccaggtgagaggcaccgacagggtcccagacagatgccccagacaggatgcccagcgcaacacccgccacttcccctgctaggggcccccaggacg

SEQ ID NO: 576408 - DNA, 641 bp, Homo sapiens
aaaattaaaacaaggtactccatctactttgttgttataaccctaattcctgggacagaacttgggtagcagcaagctggctgaggatattcaaactgcgccacataccatatggaaaggagggagactttttattataggtactggagaacgtggatgaagagtttgaggaggtgattgaaacaacagaatatacccattgagaacacccatctgcttgagtttcaatttggctcctgtacttaaagtacatattaaccttctctgtaaaatggagtgagaacagggccaaattaatgagattgytattaataatcaatgaataatatatgtaaacactcacaacagtgctttacacaaagtgtgtcatttataaatgtttgctaagattatcctctgaattatatgtttaaaagattatctggctactgtgttgaggataaactttaagggacacagagtagaagtcagaagaccaacaggaaatcccttgtattagtccaagagaaagatggtggtcctgggaccagagtggtgttaatggagatataattatgtaatatatgatgttcaaatatggtagcagacattatatagaccattttattcatgaatattttatatgtatctcagaagatgaa

SEQ ID NO: 576409 - DNA, 594 bp, Homo sapiens
tgatttttacaggtactgaagatgcaatcaaaatccatgcattgcagttatttgccatgtctcttaagtgtcttttttacctagagattgcctccctgtcagccagcctctctttctctctacacacacacacacacacacacacacacacacacacacacttcccccctccccttactttacttggtggagcaagaaaagaattcttattaggagtgttttaaagtctggattttgctattgagtccctataccgtcattcaatgtttatctttcccatgtttttcacatttatcagtactttcagcaacattcttratcactttgggttgatttctttttcagcagcgtgtcataggaggtgtgtatttccataagaaaatacacacatacacctaagacttatatattttttcttaacaccgtctgttttatttgctctctagtagatgcctcaggaaaatcttatagtaatatgatttcctaagatattaaatgctcatagcatactttatggagcttttaaatttaaagtttagtttggatgactgtaaaattctaagctcatattttccttctttgcttatatttcta

SEQ ID NO: 576410 - DNA, 545 bp, Homo sapiens
taaactaccagttacacacacacacacacacacacacacacacacacacacacacacacacasagaaattccaccatgattggtcagaataggtgaggttttgctgcaataacaaacaactcccaaatcttggtaacttcaaacatcagaagttgtttttctcactcatgcttcatctgcagggaggtgtggggtgctctgtttcccatcaaacttgccctaagactaaggttaatgggggttgcaatacctcgagtatcaccaagcagggaacagagggagaagaatgttagagagtcttgtactaagaattaaatgctccaggctagaagtctaacattgcacctctgcccccagcctcttggccagtactagccacatcccctcccccaccacagggcaatacatgaagacaggagaattggatacattacaaatttctaccccatggcatttcataaaagagaaaaaaatgccaatacaaaaatgttttaatagaatagaatatatacatttttagaataaagaacaatcctccaaaaagg

SEQ ID NO: 576411 - DNA, 545 bp, Homo sapiens
taaactaccagttacacacacacacacacacacacacacacacacacacacacacacacacacagaaattccaccatgattggtcagaataggtgaggttttgctgcaataacaaacaactcccaaatcttggtaacttcaaacatcagaagttgtttttctcactcatgctwcatctgcagggaggtgtggggtgctctgtttcccatcaaacttgccctaagactaaggttaatgggggttgcaatacctcgagtatcaccaagcagggaacagagggagaagaatgttagagagtcttgtactaagaattaaatgctccaggctagaagtctaacattgcacctctgcccccagcctcttggccagtactagccacatcccctcccccaccacagggcaatacatgaagacaggagaattggatacattacaaatttctaccccatggcatttcataaaagagaaaaaaatgccaatacaaaaatgttttaatagaatagaatatatacatttttagaataaagaacaatcctccaaaaagg

SEQ ID NO: 576412 - DNA, 545 bp, Homo sapiens
taaactaccagttacacacacacacacacacacacacacacacacacacacacacacacacacagaaattccaccatgattggtcagaataggtgaggttttgctgcaataacaaacaactcccaaatcttggtaacttcaaacatcagaagttgtttttctcactcatgcttcatctgcagggaggtgtggggtgctctgtttcccatcaaacttgccctaagactaaggttaatgggggttgcaatacctcgagtatcaccaagcagggaacagagggagaagaatgttagagagtcttgtactaagaattaaatgctccaggctagaagtctaacattgcacctctgcccccagcctcttggccagtactagccacatcccctcccccaccacagggcaatrcatgaagacaggagaattggatacattacaaatttctaccccatggcatttcataaaagagaaaaaaatgccaatacaaaaatgttttaatagaatagaatatatacatttttagaataaagaacaatcctccaaaaagg

SEQ ID NO: 576413 - DNA, 545 bp, Homo sapiens
taaactaccagttacacacacacacacacacacacacacacacacacacacacacacacacacagaaattccaccatgattggtcagaataggtgaggttttgctgcaataacaaacaactcccaaatcttggtaacttcaaacatcagaagttgtttttctcactcatgcttcatctgcagggaggtgtggggtgctctgtttcccatcaaacttgccctaagactaaggttaatgggggttgcaatacctcgagtatcaccaagcagggaacagagggagaagaatgttagagagtcttgtactaagaattaaatgctccaggctagaagtctaacattgcacctctgcccccagcctcttggccagtactagccacatcccctcccccaccacagggcaatacatgaagacaggagaattggatacattacaaatttctaccccatggcatttcataaaagagaaaaaaatgcmaatacaaaaatgttttaatagaatagaatatatacatttttagaataaagaacaatcctccaaaaagg

SEQ ID NO: 576414 - DNA, 369 bp, Homo sapiens
tcaaatataatcaggtaaaaagagcaaattctctgtgattctacctttttgttttgttcaggccttcartggattggatgaggctcacccacattggggaggacaatctgctttattcagtctaccaattaaatgttatcctcatccagaatacctcagagacacacccagaataatgtgtagccaaatatctgggcaccccacaacccagtcaaattgatacataacactaaccatcatgtcttgcttctactctctcgccatttctgcatggccaaatctttcccttatttcaaggcttagttcaaatgttacctcttaactaagccttccctgctaaccccaaatattaatagaattggtttctcc

SEQ ID NO: 576415 - DNA, 553 bp, Homo sapiens
gacagtgattcccagacaaattatcacaagagtataaaagaagtcttctttgagtgtgaaatatctcatggaatatagcacatggcctcttcatgaagaaactactgggagagaagaagacaagctggaagaggccagggaaagggggttagtacaaagcacaatggggctgggctcatacagtggctcacacctgtaatcccagcactttgggagcccaaggccggtggatcacgagatcagcagatcgagaccatcctggctaacacggtgaaaccccgtctctactaaaaatacaaaaaagttagccaggcrtggaggtgggcgcctgtagtcccagctactcgggaggctgaggaaggagaatggtgtgaacccgggaggcagagcttgcagtgagccgagattgcaccacagcactcaagcctgggtgacagagcaagactccatctcaaaaaataaaataaaataaaataaagcacaatgaaatgtcagtggatgggtgcctataatttctaagggaaatagagtataatccaagaattttatagcc

SEQ ID NO: 576416 - DNA, 553 bp, Homo sapiens
gacagtgattcccagacaaattatcacaagagtataaaagaagtcttctttgagtgtgaaatatctcatggaatatagcacatggcctcttcatgaagaaactactgggagagaagaagacaagctggaagaggccagggaaagggggttagtacaaagcacaatggggctgggctcatacagtggctcacacctgtaatcccagcactttgggagcccaaggccggtggatcacgagatcagcagatcgagaccatcctggctaacacggtgaaaccccgtctctactaaaaatacaaaaaagttagccaggcatggaggtgggcgcctgtagtcccagctactcgggaggctgaggaaggagaatggtgtgaacccgggaggcagagcttgcagtgagccragattgcaccacagcactcaagcctgggtgacagagcaagactccatctcaaaaaataaaataaaataaaataaagcacaatgaaatgtcagtggatgggtgcctataatttctaagggaaatagagtataatccaagaattttatagcc

SEQ ID NO: 576417 - DNA, 616 bp, Homo sapiens
aaaacaacctagaaataactagtttccagaggtaaagagagggactgtaggaagtagaaktgctaatgccctttattaagtcaattaatcaggtctaaaattgaaacgtgattttaaatatataacttcttgtttattttcctccctaactacctgaggatcaaccaccaacatgaatgacacagtgactacctggaccaggaagttcatgaccaatcgaccgttccagaggaaacaaatggtcaccaatgtccttcaccccggaaaggcaacaaaatgtacaagaccacaatggatgtcatcttcatattaatagttggactcagaacccattttggtggtggttaaacaatcgtcacccacattggagcgcagtggtacgatctcagctcaccaaatctctgcctcccaggcttaagcaattctcctgcctcagcctccccccgcagtaggattacaggcacgcaccactactgcctggctaatttttatgtttttagtagagatggggtttcacccttgttggccaggctggtcttgaactcctgacctcaaatgatccacccgccttggcctcccaaagtgctaagattacaggcatgggtcactgtgccca

SEQ ID NO: 576418 - DNA, 616 bp, Homo sapiens
aaaacaacctagaaataactagtttccagaggtaaagagagggactgtaggaagtagaattgctaatgccctttattaagtcaattaatcaggtctaaaattgaaacgtgattttaaatatataacttcttgtttattttcctccctaactacctgaggatcaaccaccaacatgaatgacacagtgactacctggaccaggaagttcatgaccaatcgaccgttccagaggaaacaaatggtcaccaatgtccttcaccccggaaaggcaacaaaatgtacaagaccacaatggatgtcatcttcatattaatagttggactcagaacccattttggtggtggttaaacaatcgtcacccacattggagygcagtggtacgatctcagctcaccaaatctctgcctcccaggcttaagcaattctcctgcctcagcctccccccgcagtaggattacaggcacgcaccactactgcctggctaatttttatgtttttagtagagatggggtttcacccttgttggccaggctggtcttgaactcctgacctcaaatgatccacccgccttggcctcccaaagtgctaagattacaggcatgggtcactgtgccca

SEQ ID NO: 576419 - DNA, 535 bp, Homo sapiens
tctgcaacgaatcccaaaagtgtgtagttgagctgactgcaaggtgcttgacacgcaagagaatttayaaatgggattcggcctctggaaagtggtggtagttccagatttatgtggatgttactttgtttttccctataagatctattctttaaactatcaagctcttggctcctggctgcagtcgtttgctggtggcagtgggctgggtactgccaccggggagaaatgctgtccacttagagaaagggaaactggttctctttaagaggcagagggaggtttccagtgccagtttgtttggaggcaaaatggctgttgtagtaaaattgcccaaacttgggctggtgccttgtgtgtttagagctcaaagccacgattggtttctttttcttttcttttttttttttttttttggtggttggttttccatccttttgcttggcaggtttctgctaatagcttcaacctcaagagtcccattacacagacactaatagcacctactatgtgccaggcattggagataatataa

SEQ ID NO: 576420 - DNA, 535 bp, Homo sapiens
tctgcaacgaatcccaaaagtgtgtagttgagctgactgcaaggtgcttgacacgcaagagaatttacaaatgggattcggcctctggaaagtggtggtagttccagatttatgtggatgttactttgtttttccctataagatctattctttaaactrtcaagctcttggctcctggctgcagtcgtttgctggtggcagtgggctgggtactgccaccggggagaaatgctgtccacttagagaaagggaaactggttctctttaagaggcagagggaggtttccagtgccagtttgtttggaggcaaaatggctgttgtagtaaaattgcccaaacttgggctggtgccttgtgtgtttagagctcaaagccacgattggtttctttttcttttcttttttttttttttttttggtggttggttttccatccttttgcttggcaggtttctgctaatagcttcaacctcaagagtcccattacacagacactaatagcacctactatgtgccaggcattggagataatataa

SEQ ID NO: 576421 - DNA, 309 bp, Homo sapiens
tactttgtttttccctataagatctattctttaaactatcaagctcttggctcctggctgcagtcstttgctggtggcagtgggctgggtactgccaccggggagaaatgctgtccacttagagaaagggaaactggttctctttaagaggcagagggaggtttccagtgccagtttgtttggaggcaaaatggctgttgtagtaaaattgcccaaacttgggctggtgccttgtgtgtttagagctcaaagccacgattggtttctttttcttttcttttttttttttttttttggtggttggttttc

SEQ ID NO: 576422 - DNA, 309 bp, Homo sapiens
tactttgtttttccctataagatctattctttaaactatcaagctcttggctcctggctgcagtcgtttgctggtggcagtgggctgggtactgycaccggggagaaatgctgtccacttagagaaagggaaactggttctctttaagaggcagagggaggtttccagtgccagtttgtttggaggcaaaatggctgttgtagtaaaattgcccaaacttgggctggtgccttgtgtgtttagagctcaaagccacgattggtttctttttcttttcttttttttttttttttttggtggttggttttc

SEQ ID NO: 576423 - DNA, 309 bp, Homo sapiens
tactttgtttttccctataagatctattctttaaactatcaagctcttggctcctggctgcagtcgtttgctggtggcagtgggctgggtactgccaccggggagaaatgctgyccacttagagaaagggaaactggttctctttaagaggcagagggaggtttccagtgccagtttgtttggaggcaaaatggctgttgtagtaaaattgcccaaacttgggctggtgccttgtgtgtttagagctcaaagccacgattggtttctttttcttttcttttttttttttttttttggtggttggttttc

SEQ ID NO: 576424 - DNA, 309 bp, Homo sapiens
tactttgtttttccctataagatctattctttaaactatcaagctcttggctcctggctgcagtcgtttgctggtggcagtgggctgggtactgccaccggggagaaatgctgtccacttagagaaagggaaactggttctctttaagaggcagagggaggtttccagtgccagtttgtttggaggcaaaatggctgttgtaktaaaattgcccaaacttgggctggtgccttgtgtgtttagagctcaaagccacgattggtttctttttcttttcttttttttttttttttttggtggttggttttc

SEQ ID NO: 576425 - DNA, 535 bp, Homo sapiens
tctgcaacgaatcccaaaagtgtgtagttgagctgactgcaaggtgcttgacacgcaagagaatttacaaatgggattcggcctctggaaagtggtggtagttccagatttatgtggatgttactttgtttttccctataagatctattctttaaactatcaagctcttggctcctggctgcagtcgtttgctggtggcagtgggctgggtactgccaccggggagaaatgctgtccacttagagaaagggaaactggttctctttaagaggcagagggaggtttccagtgccagtttgtttggaggcaaaatggctgttgtagtaaaattgcccaaacttgggctggtgcctwgtgtgtttagagctcaaagccacgattggtttctttttcttttcttttttttttttttttttggtggttggttttccatccttttgcttggcaggtttctgctaatagcttcaacctcaagagtcccattacacagacactaatagcacctactatgtgccaggcattggagataatataa

SEQ ID NO: 576426 - DNA, 524 bp, Homo sapiens
caggcatccagagactcagagcagatttaagtgaagttacagaaataggaatgtgacatttcctacatccgggtgtgctggagcaaatatattccttctctggtttgtggggaaggagaatgctaacagacaagactccaggattttgctcttaaacctggtgcctasagatgcattttctactggatgcagacagaagctccatatagacatatccatcgctgcatctctcatgccttctgttctccctaattttccctttttcacccacagaggaagaaagttccagcatcacttctggcctctcaagagtgagttaggtggccaggtggggttattcatgcctgtaatctcatactgaaggggtggcctgcccctccacacctgtgggtatttcttgtcgggtgggatgagagacagaaaagaaatcagacacagagacaaagtatagagaaacaacagcgggcccaggggacctgcgcttagcatgctaaggacctgcactggcacaggtctctgaattc

SEQ ID NO: 576427 - DNA, 520 bp, Homo sapiens
gaattctccacctgccaggcatccagagactcagagcagatttaagtgaagttacagaaataggaatgtgacatttcctacatccgggtgtgctggagcaaatatattccttctctggtttgtggggaaggagaatgctaacagacaagactccaggattttgctcttaaacctggtgcctacagatgcattttctactggatgcagacagaagctccatatagacatatccatcgctgyatctctcatgccttctgttctccctaattttccctttttcacccacagaggaagaaagttccagcatcacttctggcctctcaagagtgagttaggtggccaggtggggttattcatgcctgtaatctcatactgaaggggtggcctgcccctccacacctgtgggtatttcttgtcgggtgggatgagagacagaaaagaaatcagacacagagacaaagtatagagaaacaacagcgggcccaggggacctgcgcttagcatgctaaggacctgcact

SEQ ID NO: 576428 - DNA, 526 bp, Homo sapiens
gccaggcatccagagactcagagcagatttaagtgaagttacagaaataggaatgtgacatttcctacatccgggtgtgctggagcaaatatattccttctctggtttgtggggaaggagaatgctaacagacaagactccaggattttgctcttaaacctggtgcctacagatgcattttctactggatgcagacagaagctccatatagacatatccatcgctgcatctctcatgccttctgttctccctaattttccctttttcacccacagaggaagaaagttccagcatcacttctggcctctcaagagtgagttaggtggccaggtggggttattcatgcctgtaatctcatactgaaggggtggcctgcccctccacacctgtgggtatttcttgtcgggtgggatgagagacagaaaagaaatcagacacagagacaaagtatagagaaacaacagygggcccaggggacctgcgcttagcatgctaaggacctgcactggcacaggtctctgaattc

SEQ ID NO: 576429 - DNA, 526 bp, Homo sapiens
gccaggcatccagagactcagagcagatttaagtgaagttacagaaataggaatgtgacatttcctacatccgggtgtgctggagcaaatatattccttctctggtttgtggggaaggagaatgctaacagacaagactccaggattttgctcttaaacctggtgcctacagatgcattttctactggatgcagacagaagctccatatagacatatccatcgctgcatctctcatgccttctgttctccctaattttccctttttcacccacagaggaagaaagttccagcatcacttctggcctctcaagagtgagttaggtggccaggtggggttattcatgcctgtaatctcatactgaaggggtggcctgcccctccacacctgtgggtatttcttgtcgggtgggatgagagacagaaaagaaatcagacacagagacaaagtatagagaaacaacagcgrgcccaggggacctgcgcttagcatgctaaggacctgcactggcacaggtctctgaattc

SEQ ID NO: 576430 - DNA, 491 bp, Homo sapiens
acagcgggcccaggggacctgcgcttagcatgctaaggacctgcactggcacaggtctctgaattccctcagtttttattgattattatcttcattatttcagcaaaaaggaatgtagtaggagggcagggtgataataaggagaaggtcagcaacaaacgtgagcaatagaatcyatgtcataatgaagttcaagggaaggtactatgactggacgtgcatgtaagccagatttatgtttctctccacccagacatctcagtggagtaaaggataacaaggcagcattgctgtaaacatgtctcgcctcccaccatagggcggtttttctcccatctcagaactgaacaaatgtacaatcgtgttttataccgagacattcagttcccaggggcagtcaggagacagtggccttcctctatctcaactgcaagtctttcctctttgactaatccacctcagcacagatcttttatgggtgtcgcgctggg

SEQ ID NO: 576431 - DNA, 639 bp, Homo sapiens
cacccacagagtgggagaaaattttcacaaactgcatttgacaaagaactaatgtcagaatctacagggaactctaatcagcaagaaaaaaataatctcatcaaaaaatgtgccaaggacatgaatagacaattctcaaaagaagatatacaaatggccaacaaacatatgaaaaaatgctcaacatcactaattaccagggaaatgcaaatcaaaaccacaatgcaataccacgtgtaaaataaacaaaaagagggccgggcgcggtggctcacgcctgtaatcctagcactttgggaggccaaggtgggcggatcacgaggtcaggagtttgagaycagcctgaccaacatggtgaaacccagtctctactgaaaatataaaaattagccgggcatggtggcagttgcctgtaatcccagctactcaggaggctgaggcaggagaattgcttgaacccgggaggcagaggttgcagtgagctgatatggcaccattgtactccagcctgggcgacagagcgagactccatctcaaaaaaacaaaaaacaaaagacaaaacaaaacaaaaaaaacaaaaattgatgttggcatggatgtggtgaaagacaacgcttttacactgatggtgggaatgta

SEQ ID NO: 576432 - DNA, 629 bp, Homo sapiens
tttgacaaagaactaatgtcagaatctacagggaactctaatcagcaagaaaaaaataatctcatcaaaaaatgtgccaaggacatgaatagacaattctcaaaagaagatatacaaatggccaacaaacatatgaaaaaatgctcaacatcactaattaccagggaaatgcaaatcaaaaccacaatgcaataccacgtgtaaaataaacaaaaagagggccgggcgcggtggctcacgcctgtaatcctagcactttgggaggccaaggtgggcggatcacgaggtcaggagtttgagatcagcctgaccaacatggtgaaacccagtctctactgaaaatataaaaattagccgggcatggtggcagttkcctgtaatcccagctactcaggaggctgaggcaggagaattgcttgaacccgggaggcagaggttgcagtgagctgatatggcaccattgtactccagcctgggcgacagagcgagactccatctcaaaaaaacaaaaaacaaaagacaaaacaaaacaaaaaaaacaaaaattgatgttggcatggatgtggtgaaagacaacgcttttacactgatggtgggaatgtaagctagtaccagcactatggaaaaca

SEQ ID NO: 576433 - DNA, 649 bp, Homo sapiens
gcattattatgaggacatccttagaggttggggaacttgcgcggctttggctaatgaggagctctgtgcctgagccccccaggccacaggatagtaaatactcagtctgtgcctcccgccctgcagtgtgaggttgcagtcctgtggtctccacagccgtcacctgtatcaggaggctcatgtctcaccctgtcttcttgccagccttgaggacggagcctgagcctccatggtgcaccacgcagggaggacagtggacctgttctccgtggtcatgtcccagcagaggggagaggcagttcagtgagtgtagggaaaagaaagagagatcagactcttactgtgtctatgcagaaaggaaagacataagagactccattttgagaaagacctgtactttcaacaattgctttgctgagatgttgttaatctgtagctttgccccagccactttgacccaacctgaagctcacaaaaacatgtgttgtatgaaatcaaggtttaagggatctagggttatgcaggacgtgccttgttaacragatgtttccaagcagtatactttgtaaaagtcatcgccattctctagtatcaataaaccaggggcacaatacactgtggaaagccgcagggagccctgcccttgaaa

SEQ ID NO: 576434 - DNA, 392 bp, Homo sapiens
agccccctgcctgttcacacaaataaagttttattggaacacagccacacccatttcagtacctattgtctgtggctgctttcctgctacaatggagagttgaatatttgggacagagacctatggcctgcaaagctcaactatttaccatctggccctggagagaaaggaaaaaaatgctgatccttgtaccctgacagtcttaggttaagaggacttcgtaccactctgacgtcccaggccgccatgagtccagccacccttgaaatgtacacaagtctgggctgaggttgcagcaggtgagrcccaattttgcaggtctttggtatcaggggcacaacccaggattttgtgtggggtttcttcctcactgtggctgggcactgggcaag

SEQ ID NO: 576435 - DNA, 488 bp, Homo sapiens
  misc_feature 238, 421: n = A,T,C or G
acaggtacacaggggctctgtgtggtgccatgttctagttgccttcaggaagcatgkggtgccctggtttccttggcttcgtgtccccctttcctcctgccacccctgactctgccccccaccttgtccctcagaacatcttcctggaagggcctggccagggcttgtgtccttgctagtctctggggaggaagactctgtggcttgaaaggctgtcggcttaagttgcaaggtgtangtgcctgggagggcatgtgcacggccctcttgactgatccattcatgttttccttttttgactccgttctatgttgtcctgatggaggggtaagcccctgccttctgcctttcctgccttggactcttgcaattgggccagatgagagggtccatgtggtctgagaatcaagcatgcagccangcgtggtggctcacacctgtaatcccaggacttttggaggctaaagagggcaggccaggagtttgag

SEQ ID NO: 576436 - DNA, 562 bp, Homo sapiens
acatgcacgcagccagttgtcttggatccgcccctgtgcctgattcatcagggtgaggggttctcctctgaggtgcttgcaaagagctgcttaattttcatatgaaagactctctgtagaaaccaggcccagctttggaagaaagccctttctccccctttagcaaattcggtgtcatttttttttcttttttgagacggagtttcacttttgttgcgcaggctggagtgcaatggtgcaatctcagttcactgcagtctctgcctccttggttcaaacgattctcctgcctcagcctcctgagtagctgggactacaggcacccacaaccacacccagctaaatttttttttgtatttttagtagagagggagtttcaccatgttggycaggttggtcttgaactcctgacctcaggtgatccacctcggcctcccaaagtgctgggattacaggcatgagccaccatgcctggctggaattctgtgtcattctgcatacttatcatgacttcaagcatccaggactctgtcctgggtatcctgagcctgagggtgtatgt

SEQ ID NO: 576437 - DNA, 562 bp, Homo sapiens
acatgcacgcagccagttgtcttggatccgcccctgtgcctgattcatcagggtgaggggttctcctctgaggtgcttgcaaagagctgcttaattttcatatgaaagactctctgtagaaaccaggcccagctttggaagaaagccctttctccccctttagcaaattcggtgtcatttttttttcttttttgagacggagtttcacttttgttgcgcaggctggagtgcaatggtgcaatctcagttcactgcagtctctgcctccttggttcaaacgattctcctgcctcagcctcctgagtagctgggactacaggcacccacaaccacacccagctaaatttttttttgtatttttagtagagagggagtttcaccatgttggtcaggttggtcttgaactcctgacctcaggtgatccacctcggcctcccaaagtgctgggattacaggcatgagccaccatgcctggctggaattctgtgtcattctgsatacttatcatgacttcaagcatccaggactctgtcctgggtatcctgagcctgagggtgtatgt

SEQ ID NO: 576438 - DNA, 562 bp, Homo sapiens
acatgcacgcagccagttgtcttggatccgcccctgtgcctgattcatcagggtgaggggttctcctctgaggtgcttgcaaagagctgcttaattttcatatgaaagactctctgtagaaaccaggcccagctttggaagaaagccctttctccccctttagcaaattcggtgtcatttttttttcttttttgagacggagtttcacttttgttgcgcaggctggagtgcaatggtgcaatctcagttcactgcagtctctgcctccttggttcaaacgattctcctgcctcagcctcctgagtagctgggactacaggcacccacaaccacacccagctaaatttttttttgtatttttagtagagagggagtttcaccatgttggtcaggttggtcttgaactcctgacctcaggtgatccacctcggcctcccaaagtgctgggattacaggcatgagccaccatgcctggctggaattctgtgtcattctgcatasttatcatgacttcaagcatccaggactctgtcctgggtatcctgagcctgagggtgtatgt

SEQ ID NO: 576439 - DNA, 490 bp, Homo sapiens
acagaggtgggtatttataacccatggtaacattaaatgcagtgccttcttctcctggttgtgcggggcaagggtcgtctatggctccaggcatccacacactatcgttagtgtagatttctgygggagcatctatccgggtgagagagcgaataagtggaggaaaagacacctaagcccaagaagaataattatgtgtagcaggtaaatcagtgtgagaggaaactggtgagacagaaagtataaggaggagaatcattaaataaaacctagtgtaagcgagatggagtgctgaaggagaaagagaagaacagtgggatgttattttcaggctaatagaaatggtgagatatttaggtttgtaaggagaaaaagaaaggtaatcaggataagtgtgattagttagatgggtctccactgtcatcagggaggattgatttacacccattgtgatttggtgtgcctgtttctgaggagtcggcacagatct

SEQ ID NO: 576440 - DNA, 490 bp, Homo sapiens
acagaggtgggtatttataacccatggtaacattaaatgcagtgccttcttctcctggttgtgcggggcaagggtcgtctatggctccaggcatccacacactatcgttagtgtagatttctgtgggagcatctatccgggtgagagagcgaataagtggaggaaaagacacctaagcccaagaagaataattatgtgtagcaggtaaatcagtgtgagaggaaactggtgagacagaaagtataaggaggagaatcattaaataaaacctagtgtaagcgagatggagtgctgaaggagaaagagaagaasagtgggatgttattttcaggctaatagaaatggtgagatatttaggtttgtaaggagaaaaagaaaggtaatcaggataagtgtgattagttagatgggtctccactgtcatcagggaggattgatttacacccattgtgatttggtgtgcctgtttctgaggagtcggcacagatct

SEQ ID NO: 576441 - DNA, 423 bp, Homo sapiens
ccgggccggccccgatacccagctccgcgccgcgcggacccaccgagcccgtgctcagacgccccagctccgccgagaagccgcttgagccgggtccttcttcttccccaagttcaggcagagcccgcggagccatggccagcccttccagcagctccgaagccactggcaagcyccgaggcagggatggcagtcccaggatgggggaggaggaagtccctcccgaagagaagaggctggggctgtagctggaggggggaagcgcacagcccgaggactgcgaggacggggaggacccgccgctgccgggcaggaaggagaccggcacccagacaggtggcgacggcaaaggagtaagtgatgcgggcgcgggggtccgggagtgccgggggctcgggggtgccggggacgcgacgaaggggc

SEQ ID NO: 576442 - DNA, 423 bp, Homo sapiens
ccgggccggccccgatacccagctccgcgccgcgcggacccaccgagcccgtgctcagacgccccagctccgccgagaagccgcttgagccgggtccttcttcttccccaagttcaggcagagcccgcggagccatggccagcccttccagcagctccgaagccactggcaagctccgaggcagggatggcagtcccaggatgggggaggaggamgtccctcccgaagagaagaggctggggctgtagctggaggggggaagcgcacagcccgaggactgcgaggacggggaggacccgccgctgccgggcaggaaggagaccggcacccagacaggtggcgacggcaaaggagtaagtgatgcgggcgcgggggtccgggagtgccgggggctcgggggtgccggggacgcgacgaaggggc

SEQ ID NO: 576443 - DNA, 563 bp, Homo sapiens
ccctcgttttttctctctccccaccgcccttcccagcccctggtaaccatcattttacaatcttcatgagttcatttttttcttctgactcccacatgttagtgagaacatgccatattcgtcttactgtgccaggcttatttcatttaacataatttcccccagttccatccgtgttgtcacaaatgacggatttcattcttttcagggctcaataatattccattatgtatawatagcacatttttttaatccattcatccactgatggacacttaggttgcttccaaatcttggctattgtgaattgtgctgcaataaacatgggagtgtagacatctcatcaacatactcattttctttctttttgataaatacccagcaatggcattgctgcatcatgtagtagttctctttttagttttttgagagacctgtatactgttctccatcacggccatactaatttactctcccaccaacaatgtgtgaatgtccctctttttctacatcctcaccagcattaattattgcctgtctttggggtaaaggttattttaact

SEQ ID NO: 576444 - DNA, 563 bp, Homo sapiens
ccctcgttttttctctctccccaccgcccttcccagcccctggtaaccatcattttacaatcttcatgagttcatttttttcttctgactcccacatgttagtgagaacatgccatattcgtcttactgtgccaggcttatttcatttaacataatttcccccagttccatccgtgttgtcacaaatgacggatttcattcttttcagggctcaataatattccattatgtataaatascacatttttttaatccattcatccactgatggacacttaggttgcttccaaatcttggctattgtgaattgtgctgcaataaacatgggagtgtagacatctcatcaacatactcattttctttctttttgataaatacccagcaatggcattgctgcatcatgtagtagttctctttttagttttttgagagacctgtatactgttctccatcacggccatactaatttactctcccaccaacaatgtgtgaatgtccctctttttctacatcctcaccagcattaattattgcctgtctttggggtaaaggttattttaact

SEQ ID NO: 576445 - DNA, 559 bp, Homo sapiens
gacagcaggatccctaggggataccccaccctactgagtcagaatcaccagaggtagaacctgggtatgtatgtatgtgtgtrtgtgtatgtgtgtgtgtgtgtgtgtgtgtgtgtgtgtatgtacaagagacagggtcctgctctgcagtccaggctggagtgcactgtcacaatcatagttcactgcagcttcaaattacccctggtctcaatccatcctcccgtctcagccttcagagtagctgagactacaggcgcgtgccaccaagcccggatactttttttttttttcttccttttggagagagttctcactctgttgcccaggctggagcgccatggtgcaatcttggctcactgcaacctctgtctcccgggttcaagtgattctcatgcctcagcctcctgagtagctagggttacggggctacaccaccacatcagcgtaattttgctctttcattgttgtttcttgtttgtttttcacaaataggactttttatttggtactgttttaagtctgaactttaaacagattcttggactggtggttccta

SEQ ID NO: 576446 - DNA, 559 bp, Homo sapiens
gacagcaggatccctaggggataccccaccctactgagtcagaatcaccagaggtagaacctgggtatgtatgtatgtgtgtatgtgtrtgtgtgtgtgtgtgtgtgtgtgtgtgtgtgtatgtacaagagacagggtcctgctctgcagtccaggctggagtgcactgtcacaatcatagttcactgcagcttcaaattacccctggtctcaatccatcctcccgtctcagccttcagagtagctgagactacaggcgcgtgccaccaagcccggatactttttttttttttcttccttttggagagagttctcactctgttgcccaggctggagcgccatggtgcaatcttggctcactgcaacctctgtctcccgggttcaagtgattctcatgcctcagcctcctgagtagctagggttacggggctacaccaccacatcagcgtaattttgctctttcattgttgtttcttgtttgtttttcacaaataggactttttatttggtactgttttaagtctgaactttaaacagattcttggactggtggttccta

SEQ ID NO: 576447 - DNA, 583 bp, Homo sapiens
ggtggttcctatccatcagctcattcaactttagcatgtgtctcgtccctagtgggttttccagaactactacctccaccacgaagctccatgcctttcaaacccagggttctccagcatttttacttttctaatgaagacatcatggagaggataaattggmaaaccttttctgtatcttttccaatgttgtctggaatcaatttattgaccacttctttcaagtcatttgtctgcacctctcaggtcatgatttccatcatcttcttctggatttggcagactgttggtgctaagcataagaggtcttcagtatctgattgttgtgttttttagtaaaaccaacacaaaacagatgaaagaagtaaccatcggtagtcctgacatcaacatgagcttcaaccatcgttgaacatttttcaaccatggaacatattttgtcacaggtaagacccatgccatagaaattagtcaggcagtttttgtcctgaacatcttcagtaatcagcttgaattttctaaatgcaacttcatcattctgcaaatcagcaagactcacttcaaacagaagacccttgagacc

SEQ ID NO: 576448 - DNA, 558 bp, Homo sapiens
  misc_feature 1, 2, 3, 4, 5, 6, 7, 8, 9, 10, 11, 12, 13: n = A,T,C or G
nnnnnnnnnnnnntgaaaataatttatagccatctacttaaattttccatgcctcggtttcctcaaatgttaattttggaaaaattagacaatgtacagaggaaaaaaaaacacaaactatattcttcaaccaattgtaaatcgttattatatattttgatttttcttaataggcatattcacaaattatttacaaaactgagattgtactggatatatactttcatgtcttttgtttctatcttagcatactattacggtattatattttgtattaaaagtggatttcatttgaatctggtgaagcttatgtttcaggtaccttcccattaatagaccctttcgaagcctctgtacctaattgtgcctactcacaattgtgtaraatatttgttaaagggagtcctgtaaattgcatcagcatcaatcctcatagaatctgggtctatcactgtaggcactaaacctggaggaaggctgcctggatttggaatcccagctccatcaccttggaagttacttaaatttgctgtgcctctgtttccctaaatgtaagac

SEQ ID NO: 576449 - DNA, 590 bp, Homo sapiens
tctgacagagggaacaatgggactcagacacatcctaacctagtggaaatcattttctaaaactgtgagttagcccagtccttctagcagagccagcttcagagctgatgctctggttccaggttatcttggcaaccatttcagtacattctggttaccagcttccgggatgcccaagttgtattggaaaaggaaggtcatctgactgactgtctctggaaaacattgcttaattgaatgaagtagaaaagtaacctatgcttctttcattttttatttgaatctcttcccaggtttcaagggccaaagactaaataatgtgtttgtgtgtttgtttgtgttctaccgtagactcacttcttagctcccatcccattcttcacacattttctgagtctctaaattgtttcaggactacaraaaatttaaaagaaaaaaaaagacattgcctctacctaaatgagctgataataataataaacaggaaaagtacttattttgtaatgcaccactgcaaacccagacattaataccacaactgtttgagaaatgctttgaagcagctcttcttccagttgattaaaaaataa

SEQ ID NO: 576450 - DNA, 647 bp, Homo sapiens
tatagcaaatattattaaatctacatggagagatagagtccaataaaatgatagttgagaacttcaatatcctactctcagcattggacagttcatctagacataaaatcaacaaagaaacattagatttaagctgcactttggaccaaatggacctaacagatattttcagaatakttcatccagcagcagcagaatatacaatcatctcatcaacacatggaatattctccaggatagaccatatgttaggacacagaacaaggctcaataaaattttaaaaattaaaatcatatcaagtatcttctcagaccacaatggaataaaacttgaaatcaataagaagaagaaatttggaaactgtacaaatatatggacattaaacatgctattgaataatcattgggtcaatgaagaaattaagatggacatcaaaaaaattttttaaacagaaaatggaaacacatcatgcaaaacctatgggatacagcaaaagcagtactaggaggaaagtttatagcaataaatgcctacaccaaaaaagtagaaagatttcaaataaacaacctaatgatgcacctcaaggaactcaaaaagcaagaacaaatcaaacacacaattagtagaaagaaaaaattttaattcc

SEQ ID NO: 576451 - DNA, 647 bp, Homo sapiens
tatagcaaatattattaaatctacatggagagatagagtccaataaaatgatagttgagaacttcaatatcctactctcagcattggacagttcatctagacataaaatcaacaaagaaacattagatttaagctgcactttggaccaaatggacctaacagatattttcagaatatttcatccagcagcagcagaatatrcaatcatctcatcaacacatggaatattctccaggatagaccatatgttaggacacagaacaaggctcaataaaattttaaaaattaaaatcatatcaagtatcttctcagaccacaatggaataaaacttgaaatcaataagaagaagaaatttggaaactgtacaaatatatggacattaaacatgctattgaataatcattgggtcaatgaagaaattaagatggacatcaaaaaaattttttaaacagaaaatggaaacacatcatgcaaaacctatgggatacagcaaaagcagtactaggaggaaagtttatagcaataaatgcctacaccaaaaaagtagaaagatttcaaataaacaacctaatgatgcacctcaaggaactcaaaaagcaagaacaaatcaaacacacaattagtagaaagaaaaaattttaattcc

SEQ ID NO: 576452 - DNA, 608 bp, Homo sapiens
gtaaaaaggacaaacaagatcattatatggtaataaagggatcaattcagcaacaaagtataacaattccaaatatgcatgcaaccaacacaagcgcatccagagacatatagcaaatattattaaatctacatggagagatagagtccaataaaatgatagttgagaacttcaatatcctactctcagcattggacagttcatctagacataaaatcaacaaagaaacattagatttaagctgcactttggaccaaatggacctaacagatattttcagaatatttcatccagcagcagcagaatatacaatcatctcatcaacacatggaayattctccaggatagaccatatgttaggacacagaacaaggctcaataaaattttaaaaattaaaatcatatcaagtatcttctcagaccacaatggaataaaacttgaaatcaataagaagaagaaatttggaaactgtacaaatatatggacattaaacatgctattgaataatcattgggtcaatgaagaaattaagatggacatcaaaaaaattttttaaacagaaaatggaaacacatcatgcaaaacctatgggatacagcaaaagcag

SEQ ID NO: 576453 - DNA, 521 bp, Homo sapiens
tcttcaccattcatcacatagccttttccaaggctttccttcaatccagccctcactaaacgctggaactgttgttgacaaaatccagaacaagctgggtgggggatgcagttgggaagcaggctgtagtaatggggaaaaattctaagcaatctcgaacacagaaaataaactgaacaggtaagagagaggcagtcaagagaagaagtgtgaattttgcataactgaagctgaagaagatcggggggcatggcagaccacaagataaatatgatawagactcctttttaaaaaagtataaacatccaccctttcctactgacaactgtgcttcaaatattgctaaggtctttactaaaggtgagtcagaaaaactgggtattttatgcaatagagtaagaaggcccataggcaagtatgttcctgacaccaccttctaggataagccctgagattctggttactcctgtcctaaacttgtctctcactcctgctgttggagagctaccatgagagaagaa

SEQ ID NO: 576454 - DNA, 602 bp, Homo sapiens
  misc_feature 1, 2, 3, 4, 5, 6, 7, 8, 9, 10, 11, 12, 13: n = A,T,C or G
nnnnnnnnnnnnnccccctgctcaccttggtctctcttccttctctcccttatccttgttcaagggccccgggttggcttcaccccggggcttccatggtttcaggttttccttcccttcctttttccccaaggtcgctggaaccagggctgccttccagcacttcatggggcacctggtacttctggccgtgtggccaaaggccccgcagtttttgcacttgagctgygggtggaaaggaagtgatgtcagtgagtgagctgaagccacaggcagcgatcccacgtcaacattgggacggattgtgaattcagagctgaataaggattccaaagaggggacaccggcatgggggccgttaagtgctgggagagttcggatgcgatgttccctcgcaaagcccatgtgacggaggaactctgaaaggaaggactcaaggttccaagggacacgatggtgaagccgatgtcaacaacgcagccaaacgtggctacacaggactctaagtagaaagggaggttgcccccaagagtctctcaagggacctatcgggccggggagaaggtcccaagccacgcccaccttggatgggaaaagcaacc

SEQ ID NO: 576455 - DNA, 602 bp, Homo sapiens
  misc_feature 1, 2, 3, 4, 5, 6, 7, 8, 9, 10, 11, 12, 13: n = A,T,C or G
nnnnnnnnnnnnnccccctgctcaccttggtctctcttccttctctcccttatccttgttcaagggccccgggttggcttcaccccggggcttccatggtttcaggttttccttcccttcctttttccccaaggtcgctggaaccagggctgccttccagcacttcatggggcacctggtacttctggccgtgtggccaaaggccccgcagtttttgcacttgagctgcgggtggaaaggaagtgatgtcagtgagtgagctgaagccacaggcagcgatcccacgtcaacattgggacggattgtgaattcagagctgaataaggattccaaagaggggacaccggcatgggggccgttaagtgctgggagagttcggatrcgatgttccctcgcaaagcccatgtgacggaggaactctgaaaggaaggactcaaggttccaagggacacgatggtgaagccgatgtcaacaacgcagccaaacgtggctacacaggactctaagtagaaagggaggttgcccccaagagtctctcaagggacctatcgggccggggagaaggtcccaagccacgcccaccttggatgggaaaagcaacc

SEQ ID NO: 576456 - DNA, 602 bp, Homo sapiens
  misc_feature 1, 2, 3, 4, 5, 6, 7, 8, 9, 10, 11, 12, 13: n = A,T,C or G
nnnnnnnnnnnnnccccctgctcaccttggtctctcttccttctctcccttatccttgttcaagggccccgggttggcttcaccccggggcttccatggtttcaggttttccttcccttcctttttccccaaggtcgctggaaccagggctgccttccagcacttcatggggcacctggtacttctggccgtgtggccaaaggccccgcagtttttgcacttgagctgcgggtggaaaggaagtgatgtcagtgagtgagctgaagccacaggcagcgatcccacgtcaacattgggacggattgtgaattcagagctgaataaggattccaaagaggggacaccggcatgggggccgttaagtgctgggagagttcggatgcgatgttccctcgcaaagcccatgkgacggaggaactctgaaaggaaggactcaaggttccaagggacacgatggtgaagccgatgtcaacaacgcagccaaacgtggctacacaggactctaagtagaaagggaggttgcccccaagagtctctcaagggacctatcgggccggggagaaggtcccaagccacgcccaccttggatgggaaaagcaacc

SEQ ID NO: 576457 - DNA, 602 bp, Homo sapiens
  misc_feature 1, 2, 3, 4, 5, 6, 7, 8, 9, 10, 11, 12, 13: n = A,T,C or G
nnnnnnnnnnnnnccccctgctcaccttggtctctcttccttctctcccttatccttgttcaagggccccgggttggcttcaccccggggcttccatggtttcaggttttccttcccttcctttttccccaaggtcgctggaaccagggctgccttccagcacttcatggggcacctggtacttctggccgtgtggccaaaggccccgcagtttttgcacttgagctgcgggtggaaaggaagtgatgtcagtgagtgagctgaagccacaggcagcgatcccacgtcaacattgggacggattgtgaattcagagctgaataaggattccaaagaggggacaccggcatgggggccgttaagtgctgggagagttcggatgcgatgttccctcgcaaagcccatgtgacggaggaactctgaaaggaaggactcaaggttccaagggrcacgatggtgaagccgatgtcaacaacgcagccaaacgtggctacacaggactctaagtagaaagggaggttgcccccaagagtctctcaagggacctatcgggccggggagaaggtcccaagccacgcccaccttggatgggaaaagcaacc

SEQ ID NO: 576458 - DNA, 515 bp, Homo sapiens
gattagggggagaaccatggtgtcagacatccggaaagaagacgggatgaatgttttacctctgaagtacatcccaaatgtgggagttaacttcagctttgctggggtctatttggccagtgaaactctgcctggttccttcgcacatccggaagccacttcacggggggccgtcgcaactggaaccacacacttggcatcggcggttgagccaaatggggactcgtggtgcaagcaacgctccccacgtgttagcgtgcgtgagatkcggttggcggaattttactaggtgcgtgttggtagagtggggctgaggttttcttgctcctgtggatgtatagcaagtcaaaggtcctgcccagccctgcggtcccctcagtcaactctgtttcggagacgtaacgatttggattgccaacaagtcaagaaatgttcaagcccttggatgtagggtaaagaaagagagatcagactgtcactgtgtctatgtagaaggggaagacataagagactcc

SEQ ID NO: 576459 - DNA, 515 bp, Homo sapiens
gattagggggagaaccatggtgtcagacatccggaaagaagacgggatgaatgttttacctctgaagtacatcccaaatgtgggagttaacttcagctttgctggggtctatttggccagtgaaactctgcctggttccttcgcacatccggaagccacttcacggggggccgtcgcaactggaaccacacacttggcatcggcggttgagccaaatggggactcgtggtgcaagcaacgctccccacgtgttagcgtgcgtgagatgcggttggcggaattttactaggtgcgtgttggtagagtggggctgaggttttcttgctcctgtggatgtatagsaagtcaaaggtcctgcccagccctgcggtcccctcagtcaactctgtttcggagacgtaacgatttggattgccaacaagtcaagaaatgttcaagcccttggatgtagggtaaagaaagagagatcagactgtcactgtgtctatgtagaaggggaagacataagagactcc

SEQ ID NO: 576460 - DNA, 515 bp, Homo sapiens
gattagggggagaaccatggtgtcagacatccggaaagaagacgggatgaatgttttacctctgaagtacatcccaaatgtgggagttaacttcagctttgctggggtctatttggccagtgaaactctgcctggttccttcgcacatccggaagccacttcacggggggccgtcgcaactggaaccacacacttggcatcggcggttgagccaaatggggactcgtggtgcaagcaacgctccccacgtgttagcgtgcgtgagatgcggttggcggaattttactaggtgcgtgttggtagagtggggctgaggttttcttgctcctgtggatgtatagcaagtcaaaggtcctgcccagccctgcggtcccctcagtcaactcygtttcggagacgtaacgatttggattgccaacaagtcaagaaatgttcaagcccttggatgtagggtaaagaaagagagatcagactgtcactgtgtctatgtagaaggggaagacataagagactcc

SEQ ID NO: 576461 - DNA, 515 bp, Homo sapiens
gattagggggagaaccatggtgtcagacatccggaaagaagacgggatgaatgttttacctctgaagtacatcccaaatgtgggagttaacttcagctttgctggggtctatttggccagtgaaactctgcctggttccttcgcacatccggaagccacttcacggggggccgtcgcaactggaaccacacacttggcatcggcggttgagccaaatggggactcgtggtgcaagcaacgctccccacgtgttagcgtgcgtgagatgcggttggcggaattttactaggtgcgtgttggtagagtggggctgaggttttcttgctcctgtggatgtatagcaagtcaaaggtcctgcccagccctgcggtcccctcagtcaactctgtttcggagacgtaacgatttggattgccaacaagtcaagawatgttcaagcccttggatgtagggtaaagaaagagagatcagactgtcactgtgtctatgtagaaggggaagacataagagactcc

SEQ ID NO: 576462 - DNA, 559 bp, Homo sapiens
agaagattccgtggatccttttccattcggcagcggcttctctggaggtttcccggaaaacatgtggaggagagccttcctctgcgggtcttgttgcctgcagaacagaagaaggtcaggccgtgccccctggttttccccaggagacagggagaaccccgtctggggcccagccccattccgtgttttgtgatacagaaatggacatctggtgccctttccgcctctgcaccttccctcacgtgcsaaccttcccatcctccaggtggccctctaggcttcccaactaaggactgtgatttggattccatcgcttttcccgctgtcgtggggaacctgcacgaagcgcccccgcctctccccgtccctgaatctcccagagcccaaggagctcctgggtgtggaaccccggaggacacggagctccggcctatttctctgcagcgttccttccctggcccggagacggaaaggcacacggtgtgcaggtgcagagacaccatgtccttgggaggccgtaccctaagagtggtgaaaacccctcccactgctcaccttg

SEQ ID NO: 576463 - DNA, 559 bp, Homo sapiens
agaagattccgtggatccttttccattcggcagcggcttctctggaggtttcccggaaaacatgtggaggagagccttcctctgcgggtcttgttgcctgcagaacagaagaaggtcaggccgtgccccctggttttccccaggagacagggagaaccccgtctggggcccagccccattccgtgttttgtgatacagaaatggacatctggtgccctttccgcctctgcaccttccctcacgtgcgaaccttcccatcctccaggtggccctctaggcttcccaactaaggactgtgatttggattccatcgcttttcccgctgtcgtggggaacctgcacgaagcgcccccgcctctccccgtccctgaatctcccagagcccaaggagctcctgggtgtggaaccccggaggacacggagctccggcctatttctctgcagcgttccttccctggcccggagacggaaaggcacacggtgtgcaggtgcagagacaccatgtccttrggaggccgtaccctaagagtggtgaaaacccctcccactgctcaccttg

SEQ ID NO: 576464 - DNA, 478 bp, Homo sapiens
ctggcttatgttattctttcagagaaagaccttcactcttctctgatgcctttacaaatggttaaaatgagaaatgtcttttcatttcacttttgtaatattacacttgaagatgattcaatcatagaaaaagaaggaaagtaagatattgccttatctaatgtctttattttacagaagagacatttaagccaggaggaaaatgatcatttttactattttttcagtgtactttctttctgttgttgaaaaatgaaaatcaaatggttcaatagattttcccttttgctttagttgctaaaawaccttagagcaaagtccacatatggttcttaaaaacctctgagcatagtactttcttgatgaactctctcctattttttttttttttttggtaaaaatttgtatcccaagttgttatttaatcaataagccacttcaatccatttcaaaagaagaccagatacttaaagagaat

SEQ ID NO: 576465 - DNA, 404 bp, Homo sapiens
atggtcaccagctctgccctgcaagcccccaggtgacaatgaacttaaatgagagagaaaacaggtttcgaggtggatttcagttcagcatcttggagtctctgtgtggacatgaaatctgtctccccagctgtggactgcatccttgtttgtcatctggtttggttcttggggacttggaaactcgtgggcacctttgcaatttgtcaagaagctgcatggcccttccaacaaaagcaaggaataggaacagaagcccwaggcttcagatcaaggtgcaatttaaagcagcctcagtataaaagcaaacaagagccagagggatgcctaaggcagagtctagaccccagggcagctataaggcaaagagaaagagagagagagacagagacagaaagacagag

SEQ ID NO: 576466 - DNA, 404 bp, Homo sapiens
atggtcaccagctctgccctgcaagcccccaggtgacaatgaacttaaatgagagagaaaacaggtttcgaggtggatttcagttcagcatcttggagtctctgtgtggacatgaaatctgtctccccagctgtggactgcatccttgtttgtcatctggtttggttcttggggacttggaaactcgtgggcacctttgcaatttgtcaagaagctgcatggcccttccaacaaaagcaaggaataggaacagaagcccaaggcttcagatcaaggtrcaatttaaagcagcctcagtataaaagcaaacaagagccagagggatgcctaaggcagagtctagaccccagggcagctataaggcaaagagaaagagagagagagacagagacagaaagacagag

SEQ ID NO: 576467 - DNA, 404 bp, Homo sapiens
atggtcaccagctctgccctgcaagcccccaggtgacaatgaacttaaatgagagagaaaacaggtttcgaggtggatttcagttcagcatcttggagtctctgtgtggacatgaaatctgtctccccagctgtggactgcatccttgtttgtcatctggtttggttcttggggacttggaaactcgtgggcacctttgcaatttgtcaagaagctgcatggcccttccaacaaaagcaaggaataggaacagaagcccaaggcttcagatcaaggtgcaatttaaagcagcctcagtataaaagcaaacaagagccagagggatgcctaaggcagagtctasaccccagggcagctataaggcaaagagaaagagagagagagacagagacagaaagacagag

SEQ ID NO: 576468 - DNA, 554 bp, Homo sapiens
gcctgttccccaatgactgggggtattgggacatattgttgggcccagcacctagctgatatgacacttttctttccttttttcttcttctttttgacggagtttcactcttcttgctcaggctggagtgcaatggagtgatctcagctcactacaacytctgcctcccaggttcaagtgattctcctacttcagcctcccgagtagctaggattaaaggcatgtgccaccatgcccaaataattttgtatttctagtagacatggtttctccatgttggtcaggcttgtctcgaactcccaacctcaggtgatctacctgcctcagcctctcaaagtgctgggattacaggcatgacccattgcgcccggctgacacttttctttttttaagtttctgctcacaaaagagattatgagatacgactgtgcctaacagtaaggtgatattactttttttgctttggctgttcccttagaaggcattgggacatactactgggcccagtactaagatgatgtgagtcctctgcctgaacccttaccacagagagc

SEQ ID NO: 576469 - DNA, 554 bp, Homo sapiens
gcctgttccccaatgactgggggtattgggacatattgttgggcccagcacctagctgatatgacacttttctttccttttttcttcttctttttgacggagtttcactcttcttgctcaggctggagtgcaatggagtgatctcagctcactacaacctctgcctcccrggttcaagtgattctcctacttcagcctcccgagtagctaggattaaaggcatgtgccaccatgcccaaataattttgtatttctagtagacatggtttctccatgttggtcaggcttgtctcgaactcccaacctcaggtgatctacctgcctcagcctctcaaagtgctgggattacaggcatgacccattgcgcccggctgacacttttctttttttaagtttctgctcacaaaagagattatgagatacgactgtgcctaacagtaaggtgatattactttttttgctttggctgttcccttagaaggcattgggacatactactgggcccagtactaagatgatgtgagtcctctgcctgaacccttaccacagagagc

SEQ ID NO: 576470 - DNA, 554 bp, Homo sapiens
gcctgttccccaatgactgggggtattgggacatattgttgggcccagcacctagctgatatgacacttttctttccttttttcttcttctttttgacggagtttcactcttcttgctcaggctggagtgcaatggagtgatctcagctcactacaacctctgcctcccaggttcargtgattctcctacttcagcctcccgagtagctaggattaaaggcatgtgccaccatgcccaaataattttgtatttctagtagacatggtttctccatgttggtcaggcttgtctcgaactcccaacctcaggtgatctacctgcctcagcctctcaaagtgctgggattacaggcatgacccattgcgcccggctgacacttttctttttttaagtttctgctcacaaaagagattatgagatacgactgtgcctaacagtaaggtgatattactttttttgctttggctgttcccttagaaggcattgggacatactactgggcccagtactaagatgatgtgagtcctctgcctgaacccttaccacagagagc

SEQ ID NO: 576471 - DNA, 545 bp, Homo sapiens
agcctgggtgacaaagtgagacttcatctcaaacaaacacacaaaaaaagaattkcccctgtgtaaagttccacactttcatctccctggtcttgataaattgtgcagaccttacagagctgagactgctctgagctatttttattttcacctccttgctccggacacatgaactattaacaataaaaagaatttacataagaatcttggcaagccacaagaataatgccaggaggtgacctccaggaacctggctgtcaccttcttttcccaccttaccctccactcctcttacacacacacaccctggatcacaagaccaacaaaaccactccatcagccacagacagagaagccacagaagaacccagaaccactgcatggcccccttggaccaccctagaatgaacagccattgttaacattcaggagccgtttattcccatcttcacactacactaaataactttcaagagtcacaagataaactggctgaaagctgatgcttggaacatcccacatcccccaggagctcagtgctgcag

SEQ ID NO: 576472 - DNA, 592 bp, Homo sapiens
cagtgagcccaggtcgtgccactgcactccagtctgggcaacaagagtgaaactccatcaaaaaaaaaaaagaatgaaagaaagaaagaaaaagaaggaaagaaagaaagaaagaaagaaagaaagaaagaaagaaagaaagaaagaaagaaagaaagaaagaaaaaagaaagaaatccaaatttgtaaatcctttcccatttgctatttcttttggttccccattagagttcctataaaagttactgatgaagsactaaaacctccctgactttccattatcttccaataaggcttaaactttttgataacagtcctacaattattaatgagttttcagcctacagaagtacaatttagcagctgtaggtgagataaaggtaatacaagagattttggtcatcaaggtaagaaaaaggaatctatctagaggggatccccctgccaaacccatgcagttgtggaaacggcaatgcctggtgctctggtcactggtggcctttgaaagggcaagacaaggctgggatgtgctctcgtgagagccgcagtgtgtgtgcagacaaggcaggggcccggggagggcaactgcaac

SEQ ID NO: 576473 - DNA, 324 bp, Homo sapiens
tcatctctgattccatttgtttggattttttctttttttcttagtctggctaaaggtttgtcagttttgtttaacttttcaaaaagccaactttttgtttttyatttatattttatattgttttcttcctatcatttcattgatttctgctctgctttgtttcttttctattcattttgggttttgtttgctcttggcttttttcattaagatgtatcattgagttgtttatttgaagttttcttcctttttgatgtaggcacttatatagctacaaacttcctttttagcactccttttgctgtatctcataggttttggtat

SEQ ID NO: 576474 - DNA, 532 bp, Homo sapiens
tacctgaactctgtcccccgaccytccatgctcctcacctttctgggtctctcctcagtgtgggggtgagagtaccttctctatcgggcacagcctagggtgttgggggtgaagggggagaagttcttgattcagccaaatgcagggaggggaggcagaaggagcccacaggccactccctatcctctgagtgtttggaaataaactgtgcaatcccatcaaaaaaaaaggagaaaaaaatgtaaaaaacattcttagctgtaagctacttatagggggataaagacaggactgttaatggacacaaacatacagttagagagaagaaataagttctgtccaggcgcggtggctcacacctctaactccagcactttgggagaccaaagcgggaagatcatttgagtccaggagttcgagaccagcctggacaacatagcaagatcttatctctacagaaaattttaaaaaaagaaaaaaactagccgcacaggtctgcagtcctagctactcgggaggctaaggtgggaga

SEQ ID NO: 576475 - DNA, 576 bp, Homo sapiens
atatacgtttgtttctggatgtttctgttatgtttcatcgatttgtgtatttttccctttgccaataccacacagtacttattatggtagctacatagtaagtcttaaaattgggtagatgatttcctcttagaattattcttctgttaaaaaatttctttagctattctagttcctttggcttttcttataaattttaaaataattttctatatatctacaaaaatccttgatagcattttaataaggatatgttagatctgtatataaatttgaggagaatcttctcctcatgttgaatcttctaatccatagcaagatatttattgccgtttatctaggtattttttctttcattagcattttgtagattttagcatagaagttctacacgtgttacatttatacccaagtacttaattcttttttagctattgtaagcaatattgtatttttacttttagtatctatacattcattgctcatgtatagaaatataattaactcttaaaatatttgtcttggctgggtgcrgtggccaatgcctgtaatcccagcactttgggaggccaaggt

SEQ ID NO: 576476 - DNA, 464 bp, Homo sapiens
agggttgaaaagttacctactgggcactatgttcattagtcaggtgatgcatatactagaagcccaaacttcaccactacgtaatatattcatgtagcaaatctgcatatktacccactgaatctatgagaagttttataaagtatgcatattttaaaaagacaataacttttttcacataaaatattacataaatactcactacctacacagtctgaataactataggtataaacagctgaaatttgtcaggtataaatgaaggaaaggacaactgagccaaagggaataatgtgtgagaaggcacagaggcgggaaagaataaagtgtgctatgggaagagtaaaggatgctctgtagctgaagcagaaggtgggcaaatttgggaagaaaggctgggataaggctgaaaagtaagtaggcaccgaggcttctgaaaactcctgaatgccatttagaggagt

SEQ ID NO: 576477 - DNA, 577 bp, Homo sapiens
tgaaaatgagaaagaaaataatgagggaaaatggggaattttttccaagagagttgaagatgcatttgaataagcaatgcaaaaaattgctgacatgctgaaggctgatggcaggggacctgtacttgtttcaccagccaagggaactccagagctgaactggaaaccaggcttctcctttaccttttgacattaatacagtttaacatactgctttggaaacctcctcagggaaacctgcctctgaaagcagctgactctaggagctgaataccttagttattctctttttctttctttaggtctctgtaggctctcaggctttcctggcatagcgtcctgattccagatgcttctgcactgctcctgttaaacttaactgcatatctgcaaactgcctgtcaaagacatgacatccaaagggtccaagactgacttctaaactagagtttctaagaataatttcctaaccccttgatatttgctgttcacctattagcattattaaataagcttgtgaatattggctttatggtaaagagcaagtaacytacctgttatttatacaagtctggaa

SEQ ID NO: 576478 - DNA, 562 bp, Homo sapiens
cttccagataattgaagaggaagaaattcttccaaactcgttctgtgagcccagtattgatatcaaaaccagacaaggatggacagacacacacacacacacacacacacacacacacacacacmcccctataggccaatattcctgatgaacatagatacaaaaatgctcaacaaaataatagcaaactgaatctggcagcacattaaaaacatcattcaccatacataatcaagccagatttatcccagggatacaagtatagtttaacatatgcaaatcaataaacacgatacatcacattaatataatagagggcaaaaaccatatgatcatctcaatagacacggaaaaagcatttgataaaattcaacataccttcatgataaacacctccaacaaggtaagtatagaaagaatatacctcaacacaataaagaccatatataacaaactcacaatcaacatcataccaaatgaggaaaagttgaaatcctttcctccaaactctgcaacaacacaacagtgtccactttcctcacttttattcaacatagtacag

SEQ ID NO: 576479 - DNA, 485 bp, Homo sapiens
tatatgtatccatattaattcaaccatatacacactcctatatttctgtatctatatatttacatattgaaaaacatgaattcatattaatatcattgattctcattaaatagtgcagtttattctagcctgcttctttgccttatttggaggatttttccaaatgtgaaaaattaagttcaatatatacaatgcatcttcatgtattctcaattctatatatacatattggagtttcagaattgttaaatcatatctatgtcaaaaaacaatttgctagctgtatttcagtatttctgtagaggtcctttgtctttagctccatagtagtgactagtaaagatgctatttagctccatagtagtatctagtamagatactttttcacaaagtaaagtattagttattttcttgctcaatgtagttatccatttataatacagtcagggtcttttgttattgcttttattccattttccagcccc

SEQ ID NO: 576480 - DNA, 497 bp, Homo sapiens
agactggagtgtaatggcacaatctcagctcactgcaacctccgccacccaggttcaagcgagtctcctgcctcagcctccctagtagctgggattacagacacacaccaccgtgcctggctaacgtttttgtatttttagtagagacagggtttcactatgtttgccaggytcgcctcgaactcctgaccttaggtgatccacgtgcctcagccacccttaagtgctgggattataggattataggtgtgagccaccacacctggcctctttttttttttttttttgaggcgggagttctggttctttgttgcccaggctttgccaggatggagtgcaatggcatgattcttggctcactgcagcctctgcctcctgggttcaaacgattctggctcagcctcccgagtagctgggattacaggcatacgccaccacacctggctaattttgtatttttgagtagagacatggtttcgtcatgttggtcaggctgg

SEQ ID NO: 576481 - DNA, 543 bp, Homo sapiens
cccatgtttgttgcagcattattcacaatagccaagatttggaagcaacctaagtgtccatcaacagatgaatggataaagaaagggtggtacataatacacaatggagtactattcagccataagaaaaagaatgagatcctatcatttacaacaacatgggcagaacttgaggacaatatgttargtgaaataagccaggcactgaaagacacactttccatattcttgctcatttatgggagctaaaaattaaaacatttgaactcttggagatagagagtagagtgacggttaccagaggctgggaagggtagttgggagaggggtgagaagtggggaaagttaatgggtccaaaaatgtagttagatagaatgaataagatgtagtatctgatagcgcaacaggataactacagtcaacaataatttatctttgtacatttttaaataactccaacagtataattgggatgtttgcaacataaagaaatgataaatgtttgaggtgatggataccccatttaccttgatatgattatt

SEQ ID NO: 576482 - DNA, 543 bp, Homo sapiens
cccatgtttgttgcagcattattcacaatagccaagatttggaagcaacctaagtgtccatcaacagatgaatggataaagaaagggtggtacataatacacaatggagtactattcagccataagaaaaagaatgagatcctatcatttacaacaacatgggcagaacttgaggacaatatgttaggtgaaataagccaggcactgaaagacacactttccatattcttgctcatttatgggagctaaaaattaaaacatttgaactcttggagatagagagtagagtgacggttaccagaggctgggaagggtagttgggagaggggtgagaagtggggaaagttaatgggtccaaaaatgtagttagatagaatgaataagatgtagtatctgatagcgcaacargataactacagtcaacaataatttatctttgtacatttttaaataactccaacagtataattgggatgtttgcaacataaagaaatgataaatgtttgaggtgatggataccccatttaccttgatatgattatt

SEQ ID NO: 576483 - DNA, 547 bp, Homo sapiens
aatatgagtgataagcattatgataccrtataataagagaaaaatgtaagaaaactttggatcaccagcaaccttgcaaatattaccactgttatatgaagccaaaataagaattttctgatgcagcatacataagtatctgttgaatgtggtatgaaactacagtaagaagataatggttagcaagattgtatcaagaacaaaatgagaaaagggcagtaggaacaaatgaatgacaatagagaacagacaagtaatacaaagtaatttactgtttgcaccgaccgtccaaagaaacaaatgcaggaattgagtcttcctgctttccagtggcaacttgaaagaaaagcaatcttgggaaacattataaacaaaatgttacatatcctgaaaatgaattctttataggttgttactttgatcattaataaatacagtcacagatgaatttaggtggatgatttaatttgccaattttgcttagccactgtccaaccaccccatttgtggaacagaatagggaaggagtactcttagggggagagga

SEQ ID NO: 576484 - DNA, 547 bp, Homo sapiens
aatatgagtgataagcattatgataccgtataataagagaaaaatgtaagaaaactttggatcaccagcaaccttgcaaatattaccactgttatatgaagccaaaataagaattttctgatgcagcatacataagtatctgttgaatgtggtatgaaactacmgtaagaagataatggttagcaagattgtatcaagaacaaaatgagaaaagggcagtaggaacaaatgaatgacaatagagaacagacaagtaatacaaagtaatttactgtttgcaccgaccgtccaaagaaacaaatgcaggaattgagtcttcctgctttccagtggcaacttgaaagaaaagcaatcttgggaaacattataaacaaaatgttacatatcctgaaaatgaattctttataggttgttactttgatcattaataaatacagtcacagatgaatttaggtggatgatttaatttgccaattttgcttagccactgtccaaccaccccatttgtggaacagaatagggaaggagtactcttagggggagagga

SEQ ID NO: 576485 - DNA, 533 bp, Homo sapiens
taattttttccctcacttttgaactttaattcataattccactatgacaaatcttgctgtcactctcaacactccccaatcagtgcccttgccaaagtttctgatgattttcatgtcaaaattagtaaatacttttccatgttttcctagcctctcggctgcatcagacactrtttaacagtccctcctccttctgtaaaaccaaattcttctttcttgtttaccttactagtcctttcagagcgccttctctcctctctcatatctccctagttgattacatctatttgcatttttaaaagtgtatgtgctgtgcattcccatttgtgattctagtcttaactctcttctctgagctccagactcatagccaatttctccctgtcccatcaatttggatctctagtatacatttcaaacttgattatggcctaaaataatctcttgatttttctaagaaaatgtagtttcttcccagctttctttatttggttcaagccaaaacaacaacaacaaaagaaatatccttttaa

SEQ ID NO: 576486 - DNA, 533 bp, Homo sapiens
taattttttccctcacttttgaactttaattcataattccactatgacaaatcttgctgtcactctcaacactccccaatcagtgcccttgccaaagtttctgatgattttcatgtcaaaattagtaaatacttttccatgttttcctagcctctcggctgcatcagacactgtttaacagtccctcctccttctgtaaaaccaaattcttctttcttgtttaccttactagtcctttcagagcgccttctctcctctctcatatctccctagttgattacatctatttgcatttttaaaagtrtatgtgctgtgcattcccatttgtgattctagtcttaactctcttctctgagctccagactcatagccaatttctccctgtcccatcaatttggatctctagtatacatttcaaacttgattatggcctaaaataatctcttgatttttctaagaaaatgtagtttcttcccagctttctttatttggttcaagccaaaacaacaacaacaaaagaaatatccttttaa

SEQ ID NO: 576487 - DNA, 569 bp, Homo sapiens
catgcccagcttatttccatattttttgtagagtcaaggttttgccatgttacccaggctggtctcaaactcctgagctcaagtgatagccccgccttggcctctaaaaggggtgggattacatgtgtgagacactgtgcccagcctcattttatttttaaacaaaatcttcaaaaattgtcctgattyaataagaaaatacaacatcctaaaacatgatattaatatttaccatctttagttgtacagattctttatttctttgtaaagaacattattaggtcttcataagaaatgaaatattgctctttatgagtttaatgcacataagtaatctataattctgtatgaaacttttacaatcccttaagaaatgtcctgcaaatttgataatatcaaatttaaaaataaaatacttttaaggtccaaactttagatttcagaaaaaaacatgtggagtacttagtttatacagcctaactctgttctatcatttgcactgataacattattcctgaacacattttagcccaaacccagggaagataggcttacatgcaagtttacaa

SEQ ID NO: 576488 - DNA, 552 bp, Homo sapiens
tggcattagagacctgcaaasccaggagaagggggatgacaggatagagatgcaatagtaaggctaacttcatggatgaaggacacagagtagaaggaaaacttgaaaaccaagaacgtggctttaaataagacaaattgccacatgaatgagtgtacacacccaacataaatcaaaaggaatttctccaaaggattctgaggacaaacttagccctgtataaatgcatcctgtctacttaatcacaaaaagcattctgattgcctccaaacataaggcaacaaaattgcactgagccataccagctgtttgtcgaaggggctctgccacagtctcccaactcccaacttttcttgtctgtcccaagaaagcctgccgctaatgagatggatcaaaagttagggctagattctattttcaagaagaaatcaactcagagcctgatctagaaagtaactagaagaaaagaagatcccacatttcccaaaatagatattatgaacagtttaatgcccttatggatttaaggacatagaactttgttttggatgc

SEQ ID NO: 576489 - DNA, 578 bp, Homo sapiens
gggtttcattcaccatgttggccaggatggtctcgatctcttgacctcatgatccgcctgccttggcctcccaaagtgctggatttacaggcrtgagccactgtgcccagcctaaaaaagtattcctattatcgatttatttgaatcaaaattaaaactgtgtgtttggtttttatatctctttgatttttatctctcttaactgtcctttataacagttgctgcttctgttttttttccgatattaactataaggcactgtagaatttcccatattctggagttggctgattatgtctttgtggcatcatttaatgtgtacctctgtccctgtatttcctgtaaactgggatttagattcagagactggattagattcaggctctttctgttggtaagaatgctgcttggtgggtccgtgtatttccagtttcctcacttcagaaggaacttactgtctggttgtaactattttagtgacttaagattgatctgtgagttaggttttatcagcctgttttacccattatcaaattcatcatttttacttaatagccttagctgccattgataattgt

SEQ ID NO: 576490 - DNA, 451 bp, Homo sapiens
cacagagttgaagattcctcttgatagagcagttttgaaacactctttttgtagaatctgcaagtgggtatttggaccactttgaggccttcgttggaaactggatttcttcatataaaactagacagaagaattctcagaaacttctttgtgatgtgtgcattcaactcacagagttgaactttcctttcgatagagcagttttgaasaactctgtaaagtctgcaagtggatatttggacctcattgaggccttcgttggaaatgggatttattcatgcaaaaactagtcagaagaattctcagaaacttctttggaatgtgtgcattcaactcacagaattgaaccttcctttcgatagagcagttttgaaacactctttggtagaatttccaagtgaatagttagagtgcttggaggcctatggtagaaaaggaaatatcttcatag

SEQ ID NO: 576491 - DNA, 559 bp, Homo sapiens
gaggcaggagaatcacttgaacccagggggcggaggtggcagtgagcccagatcgctccattgcactccagcctggccaacagagtgagattccatcttaaaaaaaaaaaaatagatgctgtgtggaaccagtggattcaacgcaagggctctgggtcccgcaatccggtagagtgcacacaacccaacagtgaacaggttcgttgcagggtagaggccctgggcagtaatcctgtgcagtgcacgaatgcaatgtcagatactgtgcagtggtgctgsctttgcaaacctaagccagtcctgaagcccaagaaagtggtcccaagctgtactatagatatagactccctgagtcatgtgcaacgtggggcagtgaggacactcaatgcaaagatgttgttcacgtagggctgacaacaaaaacctggaaaaggacgccagcctacagataccatggtggtaggagcgtgaaaggccaggacaccataggggcagcgtttcagcagcagtggtgcagtgcaagggctgggccatgaggcacatatccagtgcagcaaag

SEQ ID NO: 576492 - DNA, 648 bp, Homo sapiens
tgcataaatgacttgaaagcacctaaatgtgccctgaaggaaatccttatctcctatagtcacagggttgagattgctgaaaatcaaacccagaatctcatcctatgccagaattacaacacaagttgaactcccagctttatagggtatctcctgttaaagtgagggcattagttgggaaggaatgggagactaccagttggaataggaatgtgtagggagacactgatgaacctggggacatttaggccctaaattctgatgagttgtctttgccagtagaagagaccacttcaccgcatctgaggggattaacctagcattacctgaggaaactgtaatggcatcccagccaatgctgagtctcctcaagtcgcacttccaccacatttctttgcytctagacctataactagatctctaaaggtgaggtacaaaatgtgactataaggagatacattgcactctgaaagaactacttgaattttctactttatacagacagaaatccatggaacatgcatgggaatgtattctaagggtgtgggataagggtggaaggaacataaagttggattaggctgaagtttttgatatgggcttactaagccaggtgtgcatttaatgttgcaactcaaagagttagaa

SEQ ID NO: 576493 - DNA, 604 bp, Homo sapiens
agcctgaatagaagaaaaaggctgatccttctaagaataagagagaacttactgccttcaatctgaaatactgaaagactaaattgccttcagactcaaactgaaacattggctctttctaagtctacagcttgcaggcatttggactggagttattccatcaactctcttgggtctccagcttgctgactgtagatttttgatcttgccagcctccataattgcatgagccaattccatataataaatctctttacacacatacaacacacacacacacacacacacacacacacacacacacacacacacaycctattggtctctttctctggagaaccccatctaatacagtatctgttttcttttttttaatttttttttgagatggagttttactctttttgcccaggctggagtgcagtggcatgatctcagctcactgcaacttccacctcacaggttcaagcatacagtatctgtttccaaagtattctacaatagtttaaaatagtgtttttagtattactttacaatattattttctagtataaataatttaataaaaatgtaatattgctacttattttaaatttaattatta

SEQ ID NO: 576494 - DNA, 517 bp, Homo sapiens
aagccagagggatgctgttccctataaatatgtattggagatggtcaaagtgcaacacaaagcttttttggcatgtgttgaagtgtgatagcaaccaccttccacaccacattctgtatttctattatttgccaatatgtaatacttggtaataaaaccttcactgttttaaatagtaaacaktctctagtttcacttgaattcaatatattgcttttatatttctttatttctaatcctaaatacactgtaacttttctgctgtttcacttggtaatgtagtttttctccagtagggaagcaccacatgtttaagcaataaaacttgtttcccagatgttctacttctttaaaactacagcagctaattcacttacatgtaaagacttttgaaaagtagatcttgccatcttcaaatagaaaatataattcttcctcccacttaaaaaaatggttatatatcatcccagttaaatggctgatggcaaacaatttgccttgcattcctagctattgg

SEQ ID NO: 576495 - DNA, 517 bp, Homo sapiens
aagccagagggatgctgttccctataaatatgtattggagatggtcaaagtgcaacacaaagcttttttggcatgtgttgaagtgtgatagcaaccaccttccacaccacattctgtatttctattatttgccaatatgtaatacttggtaataaaaccttcactgttttaaatagtaaacattctctagtttcacttgaattcaatatattgcttttatatttctttatttctaatcctaaatacactgtaacttttctgctgtttcacttggtaatgtagtttttctccagtagggaagcaccacatgtttaagcaataaaacttgtttcccagatgttctacttctttaaaactacagcagctaattcacttacatgtaaagacttttgaaaagtagatcttgccatcttcaaatagaaaatataattcttcctcccacttaaaaaaatggttatatatcatcccagttaaatggytgatggcaaacaatttgccttgcattcctagctattgg

SEQ ID NO: 576496 - DNA, 574 bp, Homo sapiens
taaaaaggtacgaagtaagaagtacgatgttgttgatactgagtaatgatgaggacatgatttggtaatttcaaaagcgtgaaawccatttgaaaaagtcattttgacatctggcttccagtccaaaatgtgaagagtttggaagtcatgtcctttgattctcgcaacactaaaaatgctgaaattcaattctcttgagatccattggataactgagatctcatcacattctgcagtctctaaaaaaagctggaaagacaggaggataaggaaagtcacagctcatcaggagcaccaactagtcagaagtgctgatggagccagccctgggtaagaatgctgacagggtaatggacaaattgctgaactggggtgggctagcttgggagattaaaatctctggaggcccaggctaaataaacattagagttttagagttttacctctaggtgccctatcttgttctcattgtgaatcttatagaaaaattcccttacatttatggcaggggaaggagaaaaataggcattttaaaattagactggaacactgtgtgttcctatagaaaggactg

SEQ ID NO: 576497 - DNA, 574 bp, Homo sapiens
taaaaaggtacgaagtaagaagtacgatgttgttgatactgagtaatgatgaggacatgatttggtaatttcaaaagcgtgaaatccatttgaaaaagtcattttgacatctggcttccagtccaaaatgtgaagagtttggaagtcatgtcctttgattctcgcaacactaaaaatgctgaaattcaattctcttgagatccattggataactgagatctcatcacattctgcagtctctaaaaaaagctggaaagacaggaggataaggaaagtcacagctcatcaggagcaccaactagtcagaagtgctgatggagccagccctgggtragaatgctgacagggtaatggacaaattgctgaactggggtgggctagcttgggagattaaaatctctggaggcccaggctaaataaacattagagttttagagttttacctctaggtgccctatcttgttctcattgtgaatcttatagaaaaattcccttacatttatggcaggggaaggagaaaaataggcattttaaaattagactggaacactgtgtgttcctatagaaaggactg

SEQ ID NO: 576498 - DNA, 329 bp, Homo sapiens
aacctgtaagctcctgcttcaaggattgagaggagggaccggctgggcttcctgggtcgagtaagggctcagaaagctgtgaaactcactcatttcctgcatcaggacttacttcggtcctggatgaataatatcgaagatacatgcttaaaatattcataacaccaggatttgtgcatgtgttttctttcccaaggaagctatcaacagagaaaattttgctgtaagttttcctgtgtttttgtctccctctctcccttccccctcccctgaaactaaagtaaaaggaatgttaactgcttgttttyctgtaaccagcggaacttatc

SEQ ID NO: 576499 - DNA, 546 bp, Homo sapiens
gattttactggctcatagatgaaagggacctgcctttccttggatgaaacttttgactgtggacttttgagttaatgctgaaatgagtgaagactttgggggactgttgggaagtcatggttggttttgagatgtgaagacatgagatttgggagcagccaggggtggaatgtcatggtttggctgtgtccccactcaaatctcatcttgaattcccatgtgttgtggaagggaygctgtgggaggtaattgattaatgggggcaggtctttcccatgttgctctcatgatattgaataagtctcacaagatctgatggttttataaggggagtttccctgcacaagctctctttttgcctgcttgcatccatgtaagatgtgacttcctcttccttggcttctgccatgattgtgaggttttcccagccacatggaacagtaagtccattaaacctttttcctgtatgaattacctcgtcttgggtatgtctttattaccagcatgaaaatggactaatacagacaccaaaccaaagtttaaaag

SEQ ID NO: 576500 - DNA, 599 bp, Homo sapiens
ttgatactaaaatcagacatgaatacaagaaagactatttctatttctggctcttttatggacttggataaaaacataaaaaaaagcaaacagaatcaatatatcaatgaaaagaatactgcattataatcaagttcatttggctttagggatttagtttagccacaggatattagtgtaacaaaacaaagggaaacaggtgatacaagttttttggttttttttttagacatggtctgttgcccaggctggagctcagtggcgccatcttggctcactgtaacctccacctccctggttcaagcgattctcctgcctcagcctcctgagtagctgggactrcagaagcctgccaccacacctggctaatttttgtacttttagtagagacggggtttcaccatgttggccaggctggtctggaactcctgacctcacatgaggtctgcctaccttggcctctcaaagtgctgggattacagatgtgagccatcgcgccccaccacaagtgatacaattatctcaataggtgttaataaaactgtctgcacaactagaatggtagaaagaaatatttaatatacaaaaaaataagagta

SEQ ID NO: 576501 - DNA, 599 bp, Homo sapiens
ttgatactaaaatcagacatgaatacaagaaagactatttctatttctggctcttttatggacttggataaaaacataaaaaaaagcaaacagaatcaatatatcaatgaaaagaatactgcattataatcaagttcatttggctttagggatttagtttagccacaggatattagtgtaacaaaacaaagggaaacaggtgatacaagttttttggttttttttttagacatggtctgttgcccaggctggagctcagtggcgccatcttggctcactgtaacctccacctccctggttcaagcgattctcctgcctcagcctcctgagtagctgggactgcagaagcctgccaccacaccyggctaatttttgtacttttagtagagacggggtttcaccatgttggccaggctggtctggaactcctgacctcacatgaggtctgcctaccttggcctctcaaagtgctgggattacagatgtgagccatcgcgccccaccacaagtgatacaattatctcaataggtgttaataaaactgtctgcacaactagaatggtagaaagaaatatttaatatacaaaaaaataagagta

SEQ ID NO: 576502 - DNA, 541 bp, Homo sapiens
agctacttgggaggctgaggcaggagaattgctggagccagagaggcagaggttgcagtgagccaagactgcgccattgcactccagcctaggtgacaaaactccgtctcaaaaaataaaaataaaaaaaaatgggagtaataatcaggaaaggccagagttctgattctaaagcatgtactttgttctctgactaattttgtaagccctgctaaatgtaggtgattttggactacgtattaattaaagccgtaaagttgtgtccctcttcaagacacaacaaagatgaaggatttgcattgcatatggccttttgcaatcagaagtatgaacatcctaatgcatctcaccctccctgcattatgcatctatgttgtatagaaaatataagtgagcaagcaattattgagcayctattgtatctaaggcaaggagttgaatacttccacctctataatctcattcaacactcgtagcatgtggcttagatattattttcttcattttacatgtgagaaattaagacagagagaggtaaaat

SEQ ID NO: 576503 - DNA, 535 bp, Homo sapiens
cactcccttggttaccccagctggtctcactgggtcatgcacatcccaagtgcactggctctaagcccagcacagcaccaggacttgtgcaggaattatagtccttatggcctagatggcttttcaagtttatttaggacccagagtatttyagccatagtggtggggctagatgaactcagggttttgaccgctggggtaaatgattcccctctggttagggctggtctaaatgctcactccatgggcaccagctgaattttgccctttgttgctttctgctatgacagtttgcactgaattccattgcaaagtcccataatcactttgcttttcctcccccaagcacacagattctctctccataccatgtggcactgccaggagacgaaggaggattggtgtagttgattaaagactgtctttcctaccttcttcagcacctttttccttgctatgatgttaaaaccacgtactgtgattgctcacctgatttttggttcttatgaaggtgttttcttgtgtggagagatgt

SEQ ID NO: 576504 - DNA, 535 bp, Homo sapiens
cactcccttggttaccccagctggtctcactgggtcatgcacatcccaagtgcactggctctaagcccagcacagcaccaggacttgtgcaggaattatagtccttatggcctagatggcttttcaagtttatttaggacccagagtatttcagccatrgtggtggggctagatgaactcagggttttgaccgctggggtaaatgattcccctctggttagggctggtctaaatgctcactccatgggcaccagctgaattttgccctttgttgctttctgctatgacagtttgcactgaattccattgcaaagtcccataatcactttgcttttcctcccccaagcacacagattctctctccataccatgtggcactgccaggagacgaaggaggattggtgtagttgattaaagactgtctttcctaccttcttcagcacctttttccttgctatgatgttaaaaccacgtactgtgattgctcacctgatttttggttcttatgaaggtgttttcttgtgtggagagatgt

SEQ ID NO: 576505 - DNA, 535 bp, Homo sapiens
cactcccttggttaccccagctggtctcactgggtcatgcacatcccaagtgcactggctctaagcccagcacagcaccaggacttgtgcaggaattatagtccttatggcctagatggcttttcaagtttatttaggacccagagtatttcagccatagtggtggggctagatgaactcagggttttgaccgctggggtaaatgattcccctctggttagggctggtctaaatgctcactccatgggcaccagctgaattttgccctttgttgctttctgctatgacagtttgcactgaattccattgcaaagtcccataatcactttgcttttcctcccccaagcacacagattctctctccataccatgtggcactgccaggagacgaaggagsattggtgtagttgattaaagactgtctttcctaccttcttcagcacctttttccttgctatgatgttaaaaccacgtactgtgattgctcacctgatttttggttcttatgaaggtgttttcttgtgtggagagatgt

SEQ ID NO: 576506 - DNA, 560 bp, Homo sapiens
cctggttccaacccatatctgtctgattataacattcttgttcttaatcactayactttactcacataatttagtgagagacgaaagtgtttatataactattataatataatgtgataaatgaaaaaaaaaggcactatggaaggacataggagggccacctggccagactgggagaagaggaagtggttaaggaaatcttctaggaggaggtaccatgagatgaatcatagaaaatgaaatgaagttagccaaggcttcatagctagcaaatggcagagcaaagactagactctgtgattgctagttcactccactgtatatctgctgtaaaccttcaatctgggacatggaattattttctctagttcctgatctccagttgcttgtaaacacttactcttagtaaagtgataatttcatcctatggcaaataaagaatgctttgccaagtgccatcagctgctgtcaagccattctcatgggatgtcatttattatacatctgaagtaagtccatgatcacaatgtggcaactcctgcttgcatgttattccttca

SEQ ID NO: 576507 - DNA, 521 bp, Homo sapiens
atcgcttgaggtcaggagttcaagaccagcctggccaacatggggaagccctgtctctactaaagatacagaactttgccaggcatggtgatgcatgcctgtaatccgagctactcaggaggctgtggcaggagaattgcttgaacccaggaggtaaaagttataatgaaccaagattgtgccactgcactccagcctgggcaacagagactccacctcaaaaataaaacaaaacaaaacaaaacaaaacaaaacaaaaaaaggcctgtgcctctctagaaggttaccgtgtagaatacactttttcaaatatgcccttttctctgaagacagtgawatgaatcccacaggggccagacatttatctgactccttgattaagaatggctggtggattagggttggggagttaaaatccaacttcatagatggccaagaaaatgcctgacttcttcagggtcacacagctggtaatgatgaccctgaggctcataccaagaccttttagtctcagtcaagca

SEQ ID NO: 576508 - DNA, 626 bp, Homo sapiens
ccgttgggctatttcactgctatggtacttttctctgtccatatattcatagtttttttkttttttttttttttttttttttttttgagacaaattctcgctctgttgccaggctggagtgcagtggcgtgatcttggctcaatgcaacctctgcctcctgagttcaagcaattctcctgcctcagcctcctgagtagctgggactacaggtgcatgccaccacgcccagctaagtttttgtatttttagtagagatggggtttcactgtattagccaggatggtgtcaatctcctgacctcatgatctgcccacctcggccttccaaagtgctgggattacaagtgtgagccactgcccctggccatattcatagatctttaaaaggagaatgctcattgagttttggagccccccaaactggctttaaatactagcttaggtttttatttgttgcataatataaagaagacacaatctctctcagtctcagtaccatcatcaatgaaatggggataatcacctttcaagatagttataaaacttaagacaacatctgcaaagtatttggcacatagtaggtcttcaaaataattcttgtttatcccaccatcagccaccattct

SEQ ID NO: 576509 - DNA, 626 bp, Homo sapiens
ccgttgggctatttcactgctatggtacttttctctgtccatatattcatagttttttttttttttttttttttttttttttttttgagacaaattctcgctctgttgccaggctggagtgcagtggcgtgatcttggctcaatgcaacctctgcctcctgagttcaagcaattctcctgcctcagcctcctgagtagctgggactacaggtgcrtgccaccacgcccagctaagtttttgtatttttagtagagatggggtttcactgtattagccaggatggtgtcaatctcctgacctcatgatctgcccacctcggccttccaaagtgctgggattacaagtgtgagccactgcccctggccatattcatagatctttaaaaggagaatgctcattgagttttggagccccccaaactggctttaaatactagcttaggtttttatttgttgcataatataaagaagacacaatctctctcagtctcagtaccatcatcaatgaaatggggataatcacctttcaagatagttataaaacttaagacaacatctgcaaagtatttggcacatagtaggtcttcaaaataattcttgtttatcccaccatcagccaccattct

SEQ ID NO: 576510 - DNA, 597 bp, Homo sapiens
ttgaaagtatcaattaagaccataatactttattaacttgaataatatgattcttactatttttatatcccatatagatattattttaaaatattttctagtgatttggatgaattgcaaatgttcattaattcttcattttcaggaaaacaaggatcaaagttcttagcattgcttttttaaaaaattagacataatctatttttgccaccttgaatcctacatattacctacataagttattgcaggactgggagaattaaattatttgctgtatttatagtactcataatcgaatatagtatrtgctatataagtgtcagcaaatcttttttttattcttgttcatgctgttttttttcctttctccttcttcattagagtgttattgtatttttgtacctgacaaacttgtattcattcttcaaaatgcatagtgtagaacacatggacacagggaggagaacatcacacacaaggcctgtcggggggtcgagggaaaggggagggagagcattaggacaaatacctaatgcatgcagggcttaaaacctaaatgacaggttgataggtgcaatgaaccaccatggcacatgt

SEQ ID NO: 576511 - DNA, 597 bp, Homo sapiens
ttgaaagtatcaattaagaccataatactttattaacttgaataatatgattcttactatttttatatcccatatagatattattttaaaatattttctagtgatttggatgaattgcaaatgttcattaattcttcattttcaggaaaacaaggatcaaagttcttagcattgcttttttaaaaaattagacataatctatttttgccaccttgaatcctacatattacctacataagttattgcaggactgggagaattaaattatttgctgtatttatagtactcataatcgaatatagtatatgctatataagtgtcagcaaatcttttttttattcttgttcatgctgttttttttcctttctccttcttcattagagtgttattgtatttttgtacctgacaaacttgtattcattcttcaaaatgcatagtgtagaacacatggacacagggaggagaacatcacacacaaggcctgtcggggggtcgagggaaaggggagggagagcattaggacaaatacctaatgcatgcagggcttaaaacctaaatgacaggttgataggtgcartgaaccaccatggcacatgt

SEQ ID NO: 576512 - DNA, 519 bp, Homo sapiens
tttcctttcattctttaaagttctttcaatctttttgttaaatttatctgatagaattctgaattatttctctgtgttatcttaaatttatttgagctttctcaaaacagctattttgaattttttgtctgaaaagtcacatatatctatgcttctccaggattgggtcctcatgccctatttagttcattgggtaaggccatgttttcttgaatagccttgatgcttatctttctttggtgtccgggcattgaaaaattaggtattcattgtagtctttgttgtctgggcttgtttatacctatacttgctaagaatgctttccaggtattcaaagggacctgtgaattgtgatctaagccttatctgcattaggggcacaccaaacccagtaacactgtggttcttgcaggctcatagagattatgcgttggtgatcttaaattagatccagaagaattctgtggattaccatgcagagactcttgctctcgsgccttactttctctaaaataaatg

SEQ ID NO: 576513 - DNA, 633 bp, Homo sapiens
taagtatagctacttctactcacttttggtttctgtttgcatggaatatctttttccatccctttatttttagcctataagtcttttaaggtgacatgagtttcttgtaggcagcatatagttgggccatgttttctatccattcaaccagtctatatcttttaattggaaagcctaatttgttgatattcaagattattattgatatgtgaggacttattcctgtcattttattaattgatttctaggtttttttgtatagcctttgtttattttcttctctctcattgtttatcattgtttttcttagttggtaacatttragtcctttctcttcttatttgtatgtgtgttctactcagtgggctttatattttcgtgcgttttcatgatgacatgtatcatcctttcacttcaaaatgcaggactctgataagaattctttgttgagctagtctagtggtgataaattccctcagcttttgcttgtctgggaaagtctttatctctccttcatttgtgaaaaataactttgttgagtatggtattcttgcctgaccgtttttcttctttcagcactttgaatatcttttcccattctcttttggcttataaggtttctgctgagaaatc

SEQ ID NO: 576514 - DNA, 633 bp, Homo sapiens
taagtatagctacttctactcacttttggtttctgtttgcatggaatatctttttccatccctttatttttagcctataagtcttttaaggtgacatgagtttcttgtaggcagcatatagttgggccatgttttctatccattcaaccagtctatatcttttaattggaaagcctaatttgttgatattcaagattattattgatatgtgaggacttattcctgtcattttattaattgatttctaggtttttttgtatagcctttgtttattttcttctctctcattgtttatcattgtttttcttagttggtaacatttgagtcctttctcttcttatttgtatgtgtgttctactcagtgggctttatattttcgtgygttttcatgatgacatgtatcatcctttcacttcaaaatgcaggactctgataagaattctttgttgagctagtctagtggtgataaattccctcagcttttgcttgtctgggaaagtctttatctctccttcatttgtgaaaaataactttgttgagtatggtattcttgcctgaccgtttttcttctttcagcactttgaatatcttttcccattctcttttggcttataaggtttctgctgagaaatc

SEQ ID NO: 576515 - DNA, 633 bp, Homo sapiens
taagtatagctacttctactcacttttggtttctgtttgcatggaatatctttttccatccctttatttttagcctataagtcttttaaggtgacatgagtttcttgtaggcagcatatagttgggccatgttttctatccattcaaccagtctatatcttttaattggaaagcctaatttgttgatattcaagattattattgatatgtgaggacttattcctgtcattttattaattgatttctaggtttttttgtatagcctttgtttattttcttctctctcattgtttatcattgtttttcttagttggtaacatttgagtcctttctcttcttatttgtatgtgtgttctactcagtgggctttatattttcgtgcgttttcatgatgacatgtatcatcctttcacttcaaaatgcaggactctgataagaattctttgttgagctagtctagtggtgataaattccctcagcttttgcttgtctgggaaagyctttatctctccttcatttgtgaaaaataactttgttgagtatggtattcttgcctgaccgtttttcttctttcagcactttgaatatcttttcccattctcttttggcttataaggtttctgctgagaaatc

SEQ ID NO: 576516 - DNA, 609 bp, Homo sapiens
gtcacaataaaatgtctcccagcaaggaaaaactcagacctatggcttcactgctaaattctactaaacacttaaagaagaattaatagcaatcctacttaaactattccaaaaaatggaggaagaggaaatacttccaaacttagtttatgaggccagtatttccctgataccaaaaccaaacaaaggcacaacaaaaaaggaaaaccataggccaatatccctgatgaatattgatgcaaaaattctcaaaaaaataatagcaaactgaattcaacaacacattaaaaagattacttctcataaccaagtgggatttatcccagggatgcaaggatggtttgatatacacaaatcaatcaatgtgatacatcatatctacaggatgaaagaggaaaatcacatgatcatgtcaattgatgccgaataagcatttgmtaaaattctacatcccttcatgataaaaatgctcaaaaaactaggtatagaagtaatatacatcaacatactcaaagccatatacaagagacacacagctagtatgacactgaatggggtaaaactgaaaaacttccttttgtgatctggcacgtgacaaagatgcccact

SEQ ID NO: 576517 - DNA, 562 bp, Homo sapiens
ttccctgtgctgcctagctttcatctctctccagtagcttccacggctccccttccccagcccctccctctctctgttcctcaaacctgccaagtatgtttctgcctcagagctgttctgttgagtggttctcagccctaaagactcttcagatgatctcatcatttgggccttagagcagtgccgaggccttccttaaccaccccatataaaatagtccctgaatcacttggtttcattttaagagtcagggccactgtaagaatgtgtagtgccattgctctaattttaaaaaggggcctcctctggctgctgcagaccctatccaccccctyggttgggcctgtgctgtaaacaaactgtaaacttgttcagggcagcctggagggtatttgtccctaactgaaatcatcttgtttattcactgacttttttttttttttttttttttttttgccaatctctcctattagttgtatgagagcagaaatttatgcgttttaaaactatccaacactttattgtggcttttaccccagaactttaagtactgtaggaattc

SEQ ID NO: 576518 - DNA, 363 bp, Homo sapiens
ttgcattcccaccaacaatgtataagggcttttgttgcctgtcagtcttgccaacttttaaatttttgcaatctaataggttagatgtagtatctttgtcttctttcagtttgcatttcttgtmttattaataaaactggtcatctatttatgtttaatatagatatgtgatctgttaatgttcacttttttctaaaggatttttggtgtttttctttacagttctttatatatcagataaattagtacttcgtgacatatgttgcaaatagttattctcaatctgttgtttgccctttgactttgcttgtggtggggttctgaggggtttttgtttgtttgtttgtttgtttgtttttgcaa

SEQ ID NO: 576519 - DNA, 571 bp, Homo sapiens
taacaataaagctaatcttcatatggtgcttcttacgtggggaagatactgttaatattggctcatttagttttcacaacaaacctgtgaggcaggcgtttgcaccattcccggtggcaaatgaagaaactgaggcccagagatgcagagcacatggctccaggtcacccagctggcaggagagagagatgggatcygactcaggctgtctggctccagattccaggaccctaaccactgccctgaactgcctcttctggaagactgtgttttgaatacaaaatttgcactcacagaatcataagtgacctttcatagaatttcaccaagtgattctcacagcatataatttcttaattagggaaattataccaaaaaaaagcacactggggacttgcaaatacatactctgaatttacaaaatttggcaaaggctatccaagtgaaggaatttacaacgacctttgagaaatattagcagaaccatatgcctttgtagttactattattattaacctgtatatacatataatatgctctatcattttatttatttattttttgagatgga

SEQ ID NO: 576520 - DNA, 571 bp, Homo sapiens
taacaataaagctaatcttcatatggtgcttcttacgtggggaagatactgttaatattggctcatttagttttcacaacaaacctgtgaggcaggcgtttgcaccattcccggtggcaaatgaagaaactgaggcccagagatgcagagcacatggctccaggtcacccagctggcaggagagagagatgggatctgactcaggctgtctggctccagattccaggacsctaaccactgccctgaactgcctcttctggaagactgtgttttgaatacaaaatttgcactcacagaatcataagtgacctttcatagaatttcaccaagtgattctcacagcatataatttcttaattagggaaattataccaaaaaaaagcacactggggacttgcaaatacatactctgaatttacaaaatttggcaaaggctatccaagtgaaggaatttacaacgacctttgagaaatattagcagaaccatatgcctttgtagttactattattattaacctgtatatacatataatatgctctatcattttatttatttattttttgagatgga

SEQ ID NO: 576521 - DNA, 393 bp, Homo sapiens
cctgtaaagttatcaccaaaataaaggggatccatcatctaaagatttaaagatggtgtctgcatttttgtaagggaagttattttgtatgattgtgttcttttactgaaaaaaaattaaatgttaaccccgaacatgccattcatgtactacggaatttcatattgaaaaaaytgttctggtgacatagctattgcaaaggaatgctataagcaggtttcctgcagttcaaataccatcaagatgtaatataagaaacagctataaattttgcttctctacaaattcttttaatgagtaaaatgcatttcctagagaagaagggaagcttagattatttcatgatatgaatgataaggttctgaggtgacaattcgattttaagcacaacaa

SEQ ID NO: 576522 - DNA, 595 bp, Homo sapiens
tcacattatggagggtaattcaaatttcattaatttaaatgttaatcttctccaaaaaacaccttcacagaaacacccagaataatctttgaccaaatatcagcactgtggcccagccaagaggtcacataaaattaactatcacaggttggtacttcatgtgtcctatttaataagtctttccttacctcaacatcttaagattttctcctatgttttcttctgaaagttttttatatttatcttgtaaatttaagtctatgatctatttcaagataatttcaagctaatgtgtggtrtgatagaagggctgaaatgtattttattccatatgaataaccagctgcttcagcaccattaaaagattaccctctgccccattgaattgccttgacacccttgtcaaaagtgaatgagatactatgcagccataaaaagaaatgagatcatgtcctttgcagggacatgggtggagctggaagccattatcctcagcaaactaacacaggaacagaaaaccaaacacctcatgttctctcttacaagtgggagcttaacaataagaacacatggacacagggaggggaacaacaca

SEQ ID NO: 576523 - DNA, 232 bp, Homo sapiens
taatttactcttttgtttctttgtctttcagggtgctgccccacgtcccccaccaaagcccatgtaaggagctgagttcttaaagactgaagacaggctattctctggagaaaaataaaatggaaattgtacttaatattgcatgttaagtgtatctgtgccagatarggtggggattttgtgtgttagaccaagtgtgaagtgacacacattattttcatggggaagaaag

SEQ ID NO: 576524 - DNA, 232 bp, Homo sapiens
taatttactcttttgtttctttgtctttcagggtgctgccccacgtcccccaccaaagcccatgtaaggagctgagttcttaaagactgaagacaggctattctctggagaaaaataaaatggaaattgtacttaatattgcatgttaagtgtatctgtgccagataaggtggggattttgtgtgttagaccaagtgtgaagtgacacayattattttcatggggaagaaag

SEQ ID NO: 576525 - DNA, 543 bp, Homo sapiens
gccacctgtgtatgtgtgtcagggctggcagggaagcggtggcttcagggctctacttccatccagcctccgccacctttgcccccacggtgaaggcagcctagtgcactgtttccagggtctggcccttttaaatttagctgcggggaaaaagcagtttgtgcaggtctggaacttggagacaatcagcaacaggaaaaagtcatccgaggggagctttcagtgaattatggaggtattgttcctgcgcccaaggagccagggctgctggtccaaacctcgctgacccagcccaggcctttggggcaaaacattgcctggagctgcgtcaggacaacacaatgtgggcctctgaaggccaaaaaaaaaaaaaaaaaaaaarggccagaggaagaaaaatactggaaattccctgcatcccagtgatggaagagcctttcttgaaaatcaacagcaagggaaaggttgctgcccgcccaggcggggcctcggggagcaggaggaagtcgcaagcgatattttgagatattttcagtctggtgt

SEQ ID NO: 576526 - DNA, 399 bp, Homo sapiens
ctttgtagctatgataaatgggattgctttcttgatttcttttttagattgttcactttgggtatatggaaatgctactgatttttgtatgctgactctgtattctgcaactttgctgaatttgtttatcagttctattagtttcttggtggcgtcttcagctttttctgagtataacatcttgtcggcttttatatcagcactttaatatcagcacttagggccaaagatgagggatcacttgcacctaggagtttgagatcagcctaggcaacatggcaaaaccccatctttacaaaaaatacaaaaattagcaggatagggtggcaggtgcctgtggtcccagctatttgagaggctgggaggatcacttgagctygggaagtcaagcctgcagta

SEQ ID NO: 576527 - DNA, 585 bp, Homo sapiens
tttttcccctacctagcctgtctgggaagagtgaagatatcttaaaccctttctgccrttggccttcaaatcttacaaggtccagttgagcagtgattaagccaagaccctcaatgattgctattgtatcaattaggatgacttgggctgtaaagggcaaaaaaaaaaatcttaccttacctggcttaaacagtaagggcatttgtgatcttatataacaagactcctagcatcaggtggcactaggatggctcaataaaacacctcaaggatgtcgggatctttattcattctttttgccactataccaacctcaatatactggccttgtccttgacaaactcctcaaacttgcaagatgacatctacaactagaagcatctttggcaagcaacagcatccagttgaatgaaagggatgtttattatcatgtgtctctctctctctctctcttttttttttttttgagacagagtttcactctgtttccaggctggagtgcagtgtcacgatctcagctcactgcagtctccaattccctggttcaagcagttctcctgccttagcctcctgagtagactggga

SEQ ID NO: 576528 - DNA, 585 bp, Homo sapiens
tttttcccctacctagcctgtctgggaagagtgaagatatcttaaaccctttctgccattggccttcaaatcttacaaggtccagttgagcagtgattaagccaagaccctcaatgattgctattgtatcaattaggatgacttgggctgtaaagggcaaaaaaaaaaatcttaccttacctggcttaaacagtaagggcatttgtgatcttatataacaagactcctagcatcaggtggcactaggatggctcaataaaacacctcaaggatgtcgggatctttattcattctttttgccactataccaacctcaatatactggccttgtccttgacaaactcctcaaacttgcaagatgacatctacaactagaagcatctttggcaagcaacagcatccagtygaatgaaagggatgtttattatcatgtgtctctctctctctctctcttttttttttttttgagacagagtttcactctgtttccaggctggagtgcagtgtcacgatctcagctcactgcagtctccaattccctggttcaagcagttctcctgccttagcctcctgagtagactggga

SEQ ID NO: 576529 - DNA, 607 bp, Homo sapiens
agttaaagatgtacataagaatacatagaataatcaagagtagaactaaaaatacatatatatttatttctctaggtttattttttcactccgaaatctttggggtttcaaagacattattctggcgagattgtctttctttcaataattattttcttcraaattcttagaaaagcaatatgttccttttttccccactaaataactccaattaccctgtatggatgggagcctccaagttattctaaaccagcacatgtggaccttgcccagcacagagactttttttcagtattaaggaccaaagactggaattcaccttcttctctaggtgatcaccttttcctgaacctagaacatttctggatggggcacatgtgttgacccagccagaatgagccacagcccattcttatagagatagaagaaaaaataaacctggagctggagggctgatcaatatcactgtttgtaataaacaaatcccataccttatatatcctatgccaaattcaatgatttttctcaactactgaggccataaggaagaatttcttgtatctgtttcattaaacaataattatattttctaatgtaaaggataact

SEQ ID NO: 576530 - DNA, 556 bp, Homo sapiens
tgccaaatgcaatttttggcagaagtcaagaaaaaaatcttggattatctgctctaactgggctagagggcaaaaatattaccttttctggggtttgtttacttaattataaaaccagttatgccatggctgttctagcaaatctggctccaagttttgaatctaagtatgaaagatttcaytactatctaatttggagccttagggattttcatattcaatgtctaatttggttttagtgatactgatagaagaaccttctttgcatagctatgtagaaaaatgactggcttactgcctgactcagtaattccactcatatgtatgtacccccaaaaatgaaagcatatatctgcacaaaatcttgtatgtgaatattattggcagcatcattcataatagttccaaagtggaaacaacccaaatgtccaccaactgatgaatgaataattaaatgtggtatgtcttagtccattttgcagggctgtgacagaatacctaagactgggtaatttatcatgaacagaaatgtattttctcatggttctgaaagctg

SEQ ID NO: 576531 - DNA, 616 bp, Homo sapiens
tttgtcctacagtaggacaaatactgtgtgattcaatttacatgaaatgtctacaataggcaaatccatagagacagaagtagatttctggtttccaggggctaagggaagggcagagaaagaggacaggaaagaaactgctaaccagaagatttctttgggtgatattgaaaaatgtttaaaattgactgtggtgatagttgcacaactctgtgaatatggtaaaacacacacacacacacacacacactgaattttacacttttaaagggtggattttatgatatgtgaattatatagcaatgaaactgttttcaaaaatgactggcaaggaaacaagagccgctctaagtatgagattgaagcctgctggagggtggtgtgtagcccttgcccaggacaagggacaaggagaagtgcagccctcatggccatctgttttcatcatccaggccycagcatggacagctgaacatgggagctgcttaacaaccaggtccaaaagtgggagcattctcaaagtaacactttcctccctgacttacacaggtattgctgacactttttttttctcctcccaaatgaaccttacttagtttttgattaagtcactttg

SEQ ID NO: 576532 - DNA, 528 bp, Homo sapiens
ggtaaaacacacacacacacacacacacactgaattttacacttttaaagggtggattttatgatatgtgaattatatagcaatgaaactgttttcaaaaatgactggcaaggaaacaagagccgctctaagtatgagattgaagcctgctggagggtggtgtgtagcccttgcccaggacaagggacaaggagaagtgcagccctcatggccatctgttttcatcatccaggccccagcatggacagctgaacatgggagctgcttaacaaccaggtccaaaagtgggagcattctcaaagtaacactttcctccctgacttacacaggtattgctgacactttttttttctcctcccaaatgaaccttacttagtttttgattaagtcactttgccaggacataagtgtctaaatttagtcatagtaaaaagaataattattattgkaaatgtgttaattctcctctgttacacatttggcttaagccccttgttaggagttaccataccctgtggagaaaacgct

SEQ ID NO: 576533 - DNA, 543 bp, Homo sapiens
gaggcagcagccatccccatgtgtgctctccttgtacaccccaggaaggatcttagggatcatccagtccctgattctcattagacagaagtgaaagctgagtctcaaagaggtgaatggttgacttaagctagacaacaagctacttgtggggaataggggtaraaattaatattgcttttgcttttggagaatagtctcaatatgtcagtcacttttctagatgtaattaataatatatatttttaaaacttcaaaaacctatagggtaggtaacatctctatttttatagctttgttttataaagaaggatatattgtctgagaagtgagttcaatctggagccacatctgtctacaaagcccatgctttttcctcaccgtacctgatgttcattcccagctcagcaggattcatgagaccttccccataaactaacccaaagggcaaaagactgggttgccatgccctgtggccatgttgagggtggtgagagggagagtggctattcttagggctgtaagttgtacctaagaatatat

SEQ ID NO: 576534 - DNA, 714 bp, Homo sapiens
ttctagaggcagattcacgcttaatctggtgggtgtaatccaatcagctgcctgtgaatataaagcaggcagaaaaatgtgaaaagcaagactggcctagtctcccagcctacatctttctcccatgttggatgcttcctgccgtcaagcatcggactccaagttcctcagttttgagagtcggactggctcttcttgctcctcaagctcacagacagcctattgtgggaccttatgatcatgtaagttaatacttaataaactctcatatacatatatatttgtgtgtgtgtgtatatatatatacattatatatacatatatatacattatatatatacatatatatatacacacatatatatacatatatatatgatatatatatatattctattagttctgtccctctagggaaccctggctaatacaaaatccaacatccattcatgttaaaaactcccaataaactaggtattgaaggaacatacctcaaaaataataagagccatttatgacaaacccacagccaacatcatactgaatgggaaaaagctggaagcattccccttgaaaactggcacaaatcaaggatgctctctctcaccacttctattcaacatactattggaagtcctggctggagcaatcaggcaagagaaagaaataaacktatccaaataagaagagaggaagtcaaactatccctatttg

SEQ ID NO: 576535 - DNA, 421 bp, Homo sapiens
agccaggtgtgtttgtgcatgcctgtactcccaactactggggaggctgaggcaggagaatcacttgaacctgggaggcggaggctgcagcgagctgagctcacgccactgcactgcagcctgagtgacagagtgagactccttctcaaaaaaaaaaaaaaaaaaaaaaggagagttgctgtaccatttatcaaggcttactacacttaacaccctaygactatgtcacagggatagacaaacagaacagaaacacaaaacagaacccagccaaagacccactatacatagaaatttaatatatggtgatgatggcattacagatcaatggtgaacgtacgggttaatcaataaatagtacaacttgttattcacataataataatagtagtagtaacaataagaataatgacattgatct

SEQ ID NO: 576536 - DNA, 577 bp, Homo sapiens
ggggttttgccatgttgggcaggctggtcttgaactcctgacctcagatgatctgcctgccttagcctcccaaagtactgggattacaggcatgagccaatgcacccagccgatctgatggttttataagcagctcatcccccatctctcagcacttctctttcatgcaggcttctgaagaaggtgmcttgcttccccttggctttcccccgtgattgtaagtttcctgaggcttccctagccatgctgaactgtgagtcaattaaacctctttcctttatacattaccatgtctcaagcagttcttaatagtatgaaaacagactaatacagtaaattggtaccacggagagtgggacactgatacaaagataccaaaaaatgtgaaattgactttggaactgggtaagaggcagaggttggaacagtttggagggcttagaagacaggaagacgtgggaaggtttggaactttctagagactcgttgaatggctttgacgaaaatgcagatagtgatatctaaaatgaagtccaggctgaggacggagatgaggaacctgttgcaaaccagaata

SEQ ID NO: 576537 - DNA, 577 bp, Homo sapiens
ggggttttgccatgttgggcaggctggtcttgaactcctgacctcagatgatctgcctgccttagcctcccaaagtactgggattacaggcatgagccaatgcacccagccgatctgatggttttataagcagctcatcccccatctctcagcacttctctttcatgcaggcttctgaagaaggtgccttgcttccccttggctttcccccgtgattgtaagtttcctgaggcttccctagccatgctgaactgtgagtcaattaaacctctttcctttatacattaccatgtctcaagcagttcttaatagtatgaaaacagactaatacagtaaattggtaccacggagagtgggacactgawacaaagataccaaaaaatgtgaaattgactttggaactgggtaagaggcagaggttggaacagtttggagggcttagaagacaggaagacgtgggaaggtttggaactttctagagactcgttgaatggctttgacgaaaatgcagatagtgatatctaaaatgaagtccaggctgaggacggagatgaggaacctgttgcaaaccagaata

SEQ ID NO: 576538 - DNA, 572 bp, Homo sapiens
ttcaaggccagcctgtgcaacatggagaaacctcgactctacaaaaaaaagaaaaatcagccaggtgtggtggcacatgcttgtagtcccagctacttaggaggttgaggtgggaggattgcttgagcccaggaagcagaggatgcagtgagctatgattttgccactacactccagcctcagtgacagagtaagaccctgtcttamaaaaagaaaaaaaaaacaaaaaagtatgttgcttaatctccacatattgtttggggctttccagttatcttgctgtgattgatttctagattaattccatgtggtttgagaacagatattgtatgatatctattcttttaaatttgttaagatgtgtttaatggcccagaatgtggtctgtcttggtagctgttccatgtgagcttgagaagaatatatattctgctgttattggataaagtagtctacagatatcaatcatatccagctgattgacggtgttgttgagttcaactatgtccttactgattttccagttgctgaatttgtccatttctgatagaggggtgctgaagtcttcaact

SEQ ID NO: 576539 - DNA, 428 bp, Homo sapiens
tttttttttttgaggcggagtttcattcttgttgcccaggctggaatgcaatggcgcacaatgtctgctcactgcaagctccgcctcctgggttcaagcaattctcctgcctcagcctccccgcctcctgggttcaagcaattctcctgcctcagcctcccgagtagctaggattacaaacatttgccaccacacccggctaattttgtatttttagtagagatggggtttctccatgttggtcaggctggtctcaaactcctgacctcaggtgatctgctcaccttggcctccaaaagtgctgggattacaggcgtgagccaccacatccagcytattgtggaaacacaaatagtaataaactctatgcatgatccagcttcaacaaatatgaacatttttttccattcatgatttttcagcagaat

SEQ ID NO: 576540 - DNA, 597 bp, Homo sapiens
ttttcttatattttcttttcaattcttccatcatcaaaattggactaaagtatttgtcataaaaatccaaggtaaaatcctatgttttggacagactcaggagtggaggaccccaaatgtaggctctgtgaggacaagagctgggtttcctccattcactactgtgtgtacatcatcagacccctgggagtctggagttcattcctgatagatctgtgcccaatgaataaaccaattggtgaaataattcaatttgcaggccttgtcattactttttcatgcccaatattaggagaaaaaaactattctaaaaatattataataattatttcaaaaccacaatgaaagcagcatatgatatgacaggtcagtgaagaaaatatatcgagagatttggcatttaacaatgaaaaatattttttagtaagattaattttattaaaacataatgtcttatatgttaattatatgctccattaaaattttctcaaagrtaaagagtctcaggtcttatgaatatctcaaaacgagttagaaaaataaaatacaaggaaaaaaacaaatggagaattgatgacacatctttcaaatatgttc

SEQ ID NO: 576541 - DNA, 573 bp, Homo sapiens
atccggaatatcatgaaactgccgctgcatcgttctcagtgcgttattttaaaacatttgacatctcattgttggtgatagtgtttatctcctggttaaggtggtgtctgttaagattttccattacaaaattgttgttttattcttttgcaccaataaggatctgcaggaaataatttgggactatgtaaatatcttatttttcatcacattcttgatgatttcagcagacattgatgacttttgcaagcatgtattgtaactattgtagttgtcaaattgtgatgtcctattttcatcattgcttctgcattttcaggcagaaattatactataaaaagaaacttkccattctatgacatttgtttattcattttatttacatcagtatgaactcttggattctgatttttatttataggttattatctatcactgttgttattatttgcttgatgttcatatacccctcagtttggttaatgggagtatttcagccaactcctgttttcatttcacataccacccattcattcgtgatcaacttcttattgcctgaactcgtagaatata

SEQ ID NO: 576542 - DNA, 555 bp, Homo sapiens
actcattctctcattctctctctttstctctcatattactgcagcacatatttgttgaaaactcctcgcctaacatgaatactgtattttaaatttggtagactctgcaaggctaccatgagagcatcataagagccctaactattctgccagttttaagtgattctcaaaatattgggtgggtcatagacaaccataggtctctttaacaatcactacataatagattattttcttggcttctattggctctaatataatgtgattggaataaacaattcttaatcactatgttaatcagctctgcatgcttatcagtcctgtaatatggtactttttgaaaagccagtcttggattcataatcatagggtcagttctttcttatatgatattttatgggttccatttcatgttgaatagagaagctgaaacttcctaaggtaattatggatttgtccaaataaatagctttgatctctaaaatctaaaatccaaaatttggatcagagacaaatctagcatagattagaaaatttgaccaaagtattactgta

SEQ ID NO: 576543 - DNA, 617 bp, Homo sapiens
atgaagcagaagcccccagcctgacaaagaccccctgactctctgcaaccctgcaaacccaacattctcaaaatcacactcagagtctcctggttcctgctggcaaatattaacctgaccctgctacttttatttatttatttttcttctctctctctctggtaaaaatctattttctttccttttctctctttctctccctctttctctctctttctttctttctttctttctttctttctttctttctttctttctttctttctttctttccttctttctttctttctttctctctttctctctctctctttctttcttttttcatttatttttctgatggagtctctctatgccacccaggctggagtgcagtggcgtcatctcggctcactgcaacctctgcctcctaggttcaagtgattctcctgcctcagcctccggagtagctgggactacaggtccccaccaccrcacccagctaatttgttgtatttttagtggagatggggtttcaccgtgttagccaagatggtcttgatctcctgacctcgtgatcctcccaccttgacctaccaaagtgctaggatttacaggcatgagccaccgcgcctggc

SEQ ID NO: 576544 - DNA, 635 bp, Homo sapiens
gggagatcagcaacaacttctctgaggaggtggcacctcgggtgagacctgaatgatgagaaggaggcagtcatacaaacaactggggaaagaacagcaagtgcaaaggccttgaggcaggaaggaacctgacttgttctaagagtagacataagatcagtgtggctaaaatatacaaatgatgggtagagtgatatggatgaaactagagagataggcaggggctgcctttgattctctttgtaatagttagctattcaggcccggcgcagtggctcatgcctgtaatcccagcactttgggaggccgaggcaggcggatcacctgaggtcgggagtttgagaccagcctggctaacatggcaaaaccccatctctaccaaaaatacaaaaattagctgggcgtggtggtgggcacctataatcccagctactgggtagggtgaggtgagagaatcrcttgaacctgagaggcagagtttgcagtgagctgagattgcaccattgcactccatcctgagtgacaagagtgaaactctgtctcaaaagaaaaaaaaagtaacctattcaaacaggagtggcatgatctaacttatatatttagaaggccaccctagctatgttgtggaaggtagg

SEQ ID NO: 576545 - DNA, 425 bp, Homo sapiens
agtgggtgctaagcattgagtacacatggacacaaagaagggaacaacagacactgaggcctatttgagggtggaggttggagggtgggaggaggaggaggatgaggattgaaaaactgattgagtatgatgatgattacttggatgacaaaattatctgtaccccaagcccccatgacatgcaattcccccatgtaacaaacctgaacatgtaccccttgaacctaagatagaagttggaaagaaaaaaaatccctgatgtttatayagctccctattgaagctcattgtcatcctatgagttgagagttgttaatgtaggcacagtctttaaggaataaaattactaatgagaaaatataatgcaagatagaattatactttagaattagtaggttttttttttttttttttgagatggagtc

SEQ ID NO: 576546 - DNA, 583 bp, Homo sapiens
ttctggggacatatgaataggtaatttaattttttggcttaagagccttttctctagctttctctggccaagtaaagaaagtaatttttcacatcaactggaaaactaattaagcatcatagatggcatccttatttattccctgggattaacccaggaagaagtagagaagaaaactaacattaatttatgcagtttgtatcgacaagcatcrtacaaggtaccttacacattgtattaactctaatagttatagcaaccctaggacacatacattataattctttttatttcttcttttttgagatgctctgtcttaaaagagcttctctcttttttgctttctttgtttctgagatgcttctttccttcctgctctgtcaccctggctggagtgcagtggtgcaatcatagctcattgcagcctcaaactcttgggctcaagcgatcctcctacttcagcctcccaagtagctgggaacacaggcatgtgccaccatacctcactaccttttttttttaatttgtttttttagagacagactctcactttgttacccaggctggtctcaaactcctggct

SEQ ID NO: 576547 - DNA, 366 bp, Homo sapiens
tctaaaactttaaacatttaaakcatttaaactaaattgaattttacgcaatcttgtcttaggtgaattcatctttatcttgaggcttgctgataaaattacgggcaatatttttgctaattgcaaatttccaggtatgttcaacaaattattattttatccccaaaaagtgagcaagtataacaaattcttgcttttgttgaatctctgattacaaagtgtgctgtggtaaatcacaataaacataaaaggaatgacagaagaattacaaagtcatgctgtactgtgtccttcagcaaattatttatatttttattttctccatttcttacttttcaaaaattgtttcttcatcaaagtggctta

SEQ ID NO: 576548 - DNA, 578 bp, Homo sapiens
aaaacctgtggtctgcaatcatttcttggaaggacatacagtaatgaggtctgaactctagctacagtatgtcttacatgtccttgttgaatgtaatccaacaaatatttagtgtctaaaaacattagaagtgtattgtttgtcctcattaaatccagtagaagaattttttacacagtaggcatctcatacctgctatacactaccaatacccaaatcttctgctcagacctcatgtattcaaytccctgtgagactcacatatccaactgaaataaacttctaatggcctgttttgaagtccattattgaaaaatgatgcaaatctttatatttttttctttgaaagtttgagttcatctgtcactggtacttagcatttaaaggcaattggcagataaaataatgatgtggagtgatatggtttggctgtttcccccaccccaaatctcatcttgaattgcagtccccataatccctacctgtcaagagagagaccaggtggaggtaattgaatcatgggtctggtttcccccatggtattctcatgatagtgagtgagttcacgagatctgatg

SEQ ID NO: 576549 - DNA, 578 bp, Homo sapiens
aaaacctgtggtctgcaatcatttcttggaaggacatacagtaatgaggtctgaactctagctacagtatgtcttacatgtccttgttgaatgtaatccaacaaatatttagtgtctaaaaacattagaagtgtattgtttgtcctcattaaatccagtagaagaattttttacacagtaggcatctcatacctgctatacactaccaatacccaaatcttctgctcagacctcatgtattcaattccctgtgagactcacatatccaactgaaataaacttctaatggcctgttttgaagtccattattgaaaaatgatgcaaatctttatatttttttctttgaaagtttgagttcatctgtcactggtacttagcatttaaaggcaattggcagataaaataatgatgtggagtgatatggtttggctgtttcccccaccccaaatctcatcttgaattgcartccccataatccctacctgtcaagagagagaccaggtggaggtaattgaatcatgggtctggtttcccccatggtattctcatgatagtgagtgagttcacgagatctgatg

SEQ ID NO: 576550 - DNA, 588 bp, Homo sapiens
tatatatgtaaggtttttacattatacataaagtggtttaatattatttgtgatcagttaaatatgtatggcataaactctagagaatctactccccaaaatggagctatagctaataattcaaagataatattgtcataatgcttggactttttatagtatgtctttcataatcagttaatataatacatatgaaagatgttaggaatatatactgttttccataaaattgaggcaatatttaaaatgtttttgataattccataagtaatgaaagcataagaaacatttcaagaatgcctgaaacacagaaatttttaaattttaatcaatgctatgacaatgtcagattaaactttttytctaaaatacagtttgggttatgttacccttctgcctaacaccttcaatggctcaatatttctactcatagttaaaggacaaattaaaaatttcagctcctctgtaaatccttttctgaattttcagaaatgaaattaatcactctaaaaaaatctgctagagtttgaatgtctgtctactctaaaacttatgttgtaatttaactgccattttaacagtactagg

SEQ ID NO: 576551 - DNA, 585 bp, Homo sapiens
cactgcaacctttgcctcccgtgttcaagagattctcctgcctcagcctcctgagtagctgggattacaggcattagccaccacgcctggctaatttttgtatttttagtagagacagggtttcaccatgttaatcaggatggtctcaatctcttgacctcatgatctgcccacctcagcctccctaagtgcttggattacagacgtgagccaccatgcctggcytctttctgtttttatgtagagacttagaaagaataaaaaacaatgctgtcactacatgtaatattttccagatttccatatccatttcaagctttcctgtttagttcatgcaagagtcagaggagtagttgagaatgattacaggttagggcaaacttaatcaggtagtgatgtcaatcacggctgtgtttctggatctggcatctttgccggagcaaatcaacataatctttggctcctggcaggcaactactgactgtacacatttcccctttcctctctttccaaaaaagataattagaagcaatttgccttctcattgtgggaataacagcattactttgaccgtcttagagccat

SEQ ID NO: 576552 - DNA, 585 bp, Homo sapiens
cactgcaacctttgcctcccgtgttcaagagattctcctgcctcagcctcctgagtagctgggattacaggcattagccaccacgcctggctaatttttgtatttttagtagagacagggtttcaccatgttaatcaggatggtctcaatctcttgacctcatgatctgcccacctcagcctccctaagtgcttggattacagacgtgagccaccatgcctggcctctttctgtttttatgtagagacttagaaagaataaaaaacaatgctgtcactacatgtaatattttccagatttccatatccatttcaagctttcctgtttagttcatgcaagagtcagaggagtagttgagaatgattacaggttagggcaaacttaatcaggtagtgatgtcaatcacggctgtgtttctggatctggcatctttgccggagcaaatcaacataatctttggctcctggcaggcaactactgactgtacacatttcccctttcctctctttccaaaaaagataattagaagcaatttgccttctcatkgtgggaataacagcattactttgaccgtcttagagccat

SEQ ID NO: 576553 - DNA, 548 bp, Homo sapiens
ggtgatgtgggtcctgttaaaggcattcagttttataaaggaagcagagcatagaagaacagaacacttggagaattgtaatgccatagaaaagaaaaggcttgtaatcccagcactttgggaagctgagaccggtggaycatgaggtcaggagtttgagaccagcctgaccaaaagaacagaacatttggagaattgtaatgccatagaaaagaaaaggcttgtaatcctagcactttgggaagctgagacaggtggatcacgaggtcaggagtttgagaccagcctgaccaaaagaacagaacatttggagaattgtaatgccatagaaaagaaaaggcttgtaatcccagcactttgggaagctgagacaggtggatcacgaggtcaggagtttgagaccagcctgaccagtctgagatcctgcctctactaaaaatacaaaaattagctgggagtggtagcacatgcctgtaatcttaactactcaggaggctaaggcagaagaattgcttgaacctgggaggcataggttgcagtgagccaag

SEQ ID NO: 576554 - DNA, 596 bp, Homo sapiens
tggttttatttgcatttctctaaagattagtgatgttgagtattttttttaatatgcttgctggccacatatatgtcttcttttgaaaagcgtctgttcatgtcttttgcccaccttttaatggggttatttgctttctgcttactgagttgtttaagttccttaaagattctrgatatgagactattgtcagatacatagtttgcaaatactttctctcattctgtaggttgtctgtttactgttaacagtttcttttgctgtggagaagctcttcagtttaattaactccaacttgtcaaattaagcccatgagcatttttgttaaaattgcttttgaggtctagtcataaaattatttctgaaaagaatggcgtttcctgttttcttctaagattctttcttataatttgaggccttacatctaaatatttaatttatctttgttaattttttatggtgtaaggaggggatccagtttcaatcttctgcatgtctagccagttatcacagcaccattcattgaatagggaatccttttcccatctcttgtttttgtcaggtttgtgaaagatcagatagttgtaggtgtgcgg

SEQ ID NO: 576555 - DNA, 596 bp, Homo sapiens
tggttttatttgcatttctctaaagattagtgatgttgagtattttttttaatatgcttgctggccacatatatgtcttcttttgaaaagcgtctgttcatgtcttttgcccaccttttaatggggttatttgctttctgcttactgagttgtttaagttccttaaagattctggatatgagactaytgtcagatacatagtttgcaaatactttctctcattctgtaggttgtctgtttactgttaacagtttcttttgctgtggagaagctcttcagtttaattaactccaacttgtcaaattaagcccatgagcatttttgttaaaattgcttttgaggtctagtcataaaattatttctgaaaagaatggcgtttcctgttttcttctaagattctttcttataatttgaggccttacatctaaatatttaatttatctttgttaattttttatggtgtaaggaggggatccagtttcaatcttctgcatgtctagccagttatcacagcaccattcattgaatagggaatccttttcccatctcttgtttttgtcaggtttgtgaaagatcagatagttgtaggtgtgcgg

SEQ ID NO: 576556 - DNA, 604 bp, Homo sapiens
aatctaactaaactaaagagcttgtgcgtaacaaaagaaactattaacagatttaacaggcaacctataaaatgggagaaaatttttgcaaacttcatccaacaaaaatctaatgttcaacatctataaggagctaaaataaatttacatgaacaataaaaaacaaattaccccattaaaaatgggtaaaggacataaacaggcacttttcaaaggaagacataactgcagtcaacaatcatatgaaataaagctcaacattactgatcattrcagaaatgcactgcaaaaccacaatgatatatcatctaacacaagtcagaatggctactattaaaaagacaaaaaataacagatacttgtggggttgttcagaaaaaagaacagttatacactgttgtgggagtgtaaacttgttcagcccttgtggaagacaagtgtggcgattccctaaagactgaaagacagaaacattattctactcagcaaaacaaccactgcatatatacccaaaggaatattaattattctattataaagacacatgcacattcattacagcactagtcacaatactaaagatatagaattaacctaaatgccc

SEQ ID NO: 576557 - DNA, 607 bp, Homo sapiens
tctgggttaaatgaaatgtgatcaaaagatagtatctgcattatttctacttttggaatttaktattttaggattttctgtaaaggtagttttttaaattaatgttctgtatgtacttaatattgtgtatcttgtattattagagcacaaaatttacatatattcacaagacctaccttttcattacttggtttagtatcttggtatgcttattatttgttcattttatcagttattgactgagagaagtgaattaacctcttctgttattgttgcttttctgtttacttttgctactataatttctatgttttagaaaactgtgatgttacagcatggggattcatgaatgttatagtttcagcttgaattacattctttagcattttaaccactcatattgtctaattttatgaattttactctaattctgatatttgatattaagattgtgaacttcaattttttggcattttctgatataactttgcccattcatttacattctattctcttctcaattacattgttttcatatctgtcatttaaagtacagaatttgtttttgctttgaggtataatctgaaaaaaaaatacatgaattaaa

SEQ ID NO: 576558 - DNA, 607 bp, Homo sapiens
tctgggttaaatgaaatgtgatcaaaagatagtatctgcattatttctacttttggaatttattattttaggattttctgtaaaggtagttttttaaattaatgttctgyatgtacttaatattgtgtatcttgtattattagagcacaaaatttacatatattcacaagacctaccttttcattacttggtttagtatcttggtatgcttattatttgttcattttatcagttattgactgagagaagtgaattaacctcttctgttattgttgcttttctgtttacttttgctactataatttctatgttttagaaaactgtgatgttacagcatggggattcatgaatgttatagtttcagcttgaattacattctttagcattttaaccactcatattgtctaattttatgaattttactctaattctgatatttgatattaagattgtgaacttcaattttttggcattttctgatataactttgcccattcatttacattctattctcttctcaattacattgttttcatatctgtcatttaaagtacagaatttgtttttgctttgaggtataatctgaaaaaaaaatacatgaattaaa

SEQ ID NO: 576559 - DNA, 607 bp, Homo sapiens
tctgggttaaatgaaatgtgatcaaaagatagtatctgcattatttctacttttggaatttattattttaggattttctgtaaaggtagttttttaaattaatgttctgtatgtacttaatattgtgtatcttgtattattagagcacaaaatttacatatattcacaagacctaccttttcattayttggtttagtatcttggtatgcttattatttgttcattttatcagttattgactgagagaagtgaattaacctcttctgttattgttgcttttctgtttacttttgctactataatttctatgttttagaaaactgtgatgttacagcatggggattcatgaatgttatagtttcagcttgaattacattctttagcattttaaccactcatattgtctaattttatgaattttactctaattctgatatttgatattaagattgtgaacttcaattttttggcattttctgatataactttgcccattcatttacattctattctcttctcaattacattgttttcatatctgtcatttaaagtacagaatttgtttttgctttgaggtataatctgaaaaaaaaatacatgaattaaa

SEQ ID NO: 576560 - DNA, 607 bp, Homo sapiens
tctgggttaaatgaaatgtgatcaaaagatagtatctgcattatttctacttttggaatttattattttaggattttctgtaaaggtagttttttaaattaatgttctgtatgtacttaatattgtgtatcttgtattattagagcacaaaatttacatatattcacaagacctaccttttcattacttggtttagtatcttggtatgcttattatttgttcattttatcagttattgactgagagaagtgaattaacctcttctgttattgttgcttttctgtttacttttgctactataatttctatgttttagaaaactgtgatgttacagcatggggattcatgaatgttatagtttcagcttgaattacattctttagcattttaaccactcatattgtctaattttatgaattttactctaattctgatatttgatattaagattgtgaasttcaattttttggcattttctgatataactttgcccattcatttacattctattctcttctcaattacattgttttcatatctgtcatttaaagtacagaatttgtttttgctttgaggtataatctgaaaaaaaaatacatgaattaaa

SEQ ID NO: 576561 - DNA, 519 bp, Homo sapiens
gaattcgagaccagcctgggcaatatagcaagacccacctcttaaaaaaaaaaaagaaatacagggaaaataccaggacagttgaggcaagtcggcattagttactgtcagtaatacagcctagaaacagtatgtccaggggagcctgtcatggcctggtgttttgcctatgggtaagttggggtgcaagtaatcccctttctgcaaataaggaaaccgtggctcagaaagcccaaggtcacaaggtggctggcggaacaggataggggttactgcatttcayagatgataaaatgtgttgtaggaattttatacatgaggaaacaggtctggagggaaatgtgactttctcaagaccatgcaggtaagaggagcagggctggggctggatcccagtcaccctggttcctgctcctgagatctttctactttactcctcgttaggagcagtggtagaaccagtgaaacaagtagcacttattaatcatgttgttgtccatatttttgttgtttttcttc

SEQ ID NO: 576562 - DNA, 424 bp, Homo sapiens
tttcacaaattccttacaatatcaaatacacgactgagtactgttgacccttaaacagcacaratttgaactacgtgggtccactcatacagatttttttttttcaccccaatgcagatagaaaatacaatattcacaggatgtgaaacctgtgtatacagcgggctgactgtatactaagaggaacaatatgcactaaacagattatctgtaattcttttttttttgagatggagtctcactctgtcccccaggctggagtgcagtggcacgatctcagctcactgcaagctccacctcccaggttcacgccattctcctgtctcagcctcctgagtagctgggactacaggagtccaccaccatgcccggctaattttttgtacttttttttagtagagacggggtttcaccatgttagcca

SEQ ID NO: 576563 - DNA, 396 bp, Homo sapiens
tctttctactcatttcacaaattccttacaatatcaaatacacgactgagtactgttgacccttaaacagcacagatttgaactacgtgggtccactcatacagatttttttttttcaccccaatgcagatagaaaatacaatattcacaggatgtgaaacctgtgtatacagcgggctgactgtatactaagaggaacaatatgcactaaacagattatctgtaattcttttttttttgagatggagtctcactctgtcccccaggstggagtgcagtggcacgatctcagctcactgcaagctccacctcccaggttcacgccattctcctgtctcagcctcctgagtagctgggactacaggagtccaccaccatgcccggctaattttttgt

SEQ ID NO: 576564 - DNA, 557 bp, Homo sapiens
tgtcagattctgtgaaatctaaggaattttcaacaattctgtctaagcataaagtcttttatctcaagaaggatcakgttcccgtcacagaaaatattcaaacacaactcaggtaataatacaaaaggaacttggaaagagactcacatctgatggatgcttggacgagattattttttaaacatcttttcccacacctagattttttattatatattttaacttcaagaaagtgaaaatacttacaaaagagcagtgctatacccagtaatattgcaaggattgcccattttccaagtattactcctgtactccttgaagtcgcacgacactgagttggatgagtacattcacacagattaactctcaataattttgttgcagcttggccggccctgtcttttacagtaataggaatggtatattcttgaaatccagcatttttctgatatgaaagacgggcagctgtatctgaaagaaaataaaagaagtttattttttaatgatcatttattcttcccttagcatttgtttcatcacgcttgtttttgaaggcg

SEQ ID NO: 576565 - DNA, 557 bp, Homo sapiens
tgtcagattctgtgaaatctaaggaattttcaacaattctgtctaagcataaagtcttttatctcaagaaggatcatgttcccgtcacagaaaatattcaaacacaactcaggtaataayacaaaaggaacttggaaagagactcacatctgatggatgcttggacgagattattttttaaacatcttttcccacacctagattttttattatatattttaacttcaagaaagtgaaaatacttacaaaagagcagtgctatacccagtaatattgcaaggattgcccattttccaagtattactcctgtactccttgaagtcgcacgacactgagttggatgagtacattcacacagattaactctcaataattttgttgcagcttggccggccctgtcttttacagtaataggaatggtatattcttgaaatccagcatttttctgatatgaaagacgggcagctgtatctgaaagaaaataaaagaagtttattttttaatgatcatttattcttcccttagcatttgtttcatcacgcttgtttttgaaggcg

SEQ ID NO: 576566 - DNA, 655 bp, Homo sapiens
agagagaaatagatgataaagtgatggaagaaaaaagttaaagaaaggaggaagtgagaagctattagaaataagattctatacttgagcaacagataaaaatggaatgattcactgattagtataactgaaaatatagggaggtgtggattctgcaggacagcatctggattaaatactttataagaaaaaatataattcagcaaaagtttttctcttctgygataacatgacagacatttcagtgcctacttgcctcagaaagaggagcttgacacagagcagcaatcagaagctacttactctttcatcattagaatatgttgctgagtaattaatgaagttgacaagttgaaggcaattttctggttcttgttttaacaacaatttaactttgttttttataacccaatgatgctggataaaataaaaccaattgacagagaagtcaggacaggacttggttgtttctgaatatgaaaaatatctagaaagatgcttcatctttatcctttaccttattctgttgccctcatagcatacatgaattcagtttttaaatacttatttttaattttttaaatatataacaaatcatgcatagcaaaagttttattccgtagaattcatactctcattctctgatttttacatt

SEQ ID NO: 576567 - DNA, 655 bp, Homo sapiens
agagagaaatagatgataaagtgatggaagaaaaaagttaaagaaaggaggaagtgagaagctattagaaataagattctatacttgagcaacagataaaaatggaatgattcactgattagtataactgaaaatatagggaggtgtggattctgcaggacagcatctggattaaatactttataagaaaaaatataattcagcaaaagtttttctcttctgtgataacatgacagacatttcagtgcctacttgcctcagaaagaggagcttgacacagagcagcaatcagaagctacttactctttcatcattagaatatgttgctgagtaattaatgaagttgacaagttgaaggcaattttctggttcttgttttaacaacaatttaactttgttttttataacccaatgatgctggataaaataaaaccaattgacagagaagtcaggacagkacttggttgtttctgaatatgaaaaatatctagaaagatgcttcatctttatcctttaccttattctgttgccctcatagcatacatgaattcagtttttaaatacttatttttaattttttaaatatataacaaatcatgcatagcaaaagttttattccgtagaattcatactctcattctctgatttttacatt

SEQ ID NO: 576568 - DNA, 514 bp, Homo sapiens
aattcaattatgcagcgtggatctctatgacctctaaaagccattcaccatccctagacrtcctgacaagtctgagatgctggtggtgactagagatatggaaacaattcccactgcctttgcttgtctctgaaatgcaaacgagacatgtgttggtagagtattatcttgtaggacaactccctggggcctcctagactcggccacccattgcacagggccagtttcacaaaggcaggcatgtaacctgtggagtcacacaggtctctgtgctttgaagggccctgtgcttggttcgatgcaccgctattgccatcttgaaattcctaataatttttgaacaagggctctgagacttttatcttgcactgggccctgtaaattaggtcctgcctatgcttgtatgttgtccattagattcatcgtgatttcctttctgttgccctccctctcttgcccacaggaatcagcctcttataatctctgtaaattcttgacattcttaggtgttagg

SEQ ID NO: 576569 - DNA, 546 bp, Homo sapiens
ctttgttttctcttcctggtaagagatttctaaggattgtttaatgcaaaagaacgtagacatccagtttgaattgtggtactaatctacgtgagaaatatcagagaagtctaagatttaaaaattrtctatgccccatgagtcttaaaatagctgcagttcaattgaaactcaaaacaacttttagaacctagacctcctactgtcttcccaaagtctcagaagcaagtatcaatgtgattaaaactcccatgagttttagatgtttatttttttaaagttagttatgcacatgtaaaaaactttctattccaaaaaagatcaggccatagatgaagagtcctgtaatctgtgggcatctatagatataagagaaagggtatagacttggagtgagaaaatatgagtctgagttctgattttgccacttattagctgcatgatcttaggcagataaataattttagcattaattctctcattatggaaaagggtatagtaataatcttgcttgtttcatgcagtcaatgtgaagatcaagtgtga

SEQ ID NO: 576570 - DNA, 546 bp, Homo sapiens
ctttgttttctcttcctggtaagagatttctaaggattgtttaatgcaaaagaacgtagacatccagtttgaattgtggtactaatctacgtgagaaatatcagagaagtctaagatttaaaaattatctatgccccatragtcttaaaatagctgcagttcaattgaaactcaaaacaacttttagaacctagacctcctactgtcttcccaaagtctcagaagcaagtatcaatgtgattaaaactcccatgagttttagatgtttatttttttaaagttagttatgcacatgtaaaaaactttctattccaaaaaagatcaggccatagatgaagagtcctgtaatctgtgggcatctatagatataagagaaagggtatagacttggagtgagaaaatatgagtctgagttctgattttgccacttattagctgcatgatcttaggcagataaataattttagcattaattctctcattatggaaaagggtatagtaataatcttgcttgtttcatgcagtcaatgtgaagatcaagtgtga

SEQ ID NO: 576571 - DNA, 645 bp, Homo sapiens
aacaaacctgcacattctgcacatgtatcccagaacttaaagtataattaaaaaaaaattaaagttcctttgtctctttttggcaaaatatttagtgtttccaggttcctcagcttataaagttccttttacattttggcttctaggtggttaacctgtaccttctcaaccattttgtgaaaggtattttaatatttattttaacatatctggcagtcagaaacaatatctatccttcttttatcaataaaatttttcccaacatggttaaaatataaaaaaacccttagaaccatatgtttccttttacttttytaaccaactaatctttcccccactgaaccattactctctgtcccaattcagaaaagaagtcagctctactactttctctccagtgttttaatgaagaagaactcaggactaatcattctctattacatcagatctcttcatggtggtgaatatggccaactatgtctgaggcttacagttacctcatcttgtttgccatggggcctgagttatgacatgtggtactctgaaaggagcaattactgagaaggtaaatagtttttttgagtaagactctacttgcaatcattttgtttgccctgaaactgggatttggatagatataactta

SEQ ID NO: 576572 - DNA, 645 bp, Homo sapiens
aacaaacctgcacattctgcacatgtatcccagaacttaaagtataattaaaaaaaaattaaagttcctttgtctctttttggcaaaatatttagtgtttccaggttcctcagcttataaagttccttttacattttggcttctaggtggttaacctgtaccttctcaaccattttgtgaaaggtattttaatatttattttaacatatctggcagtcagaaacaatatctatccttcttttatcaataaaatttttcccaacatggttaaaatataaaaaaacccttagaaccatatgtttccttttacttttttaaccaactaatytttcccccactgaaccattactctctgtcccaattcagaaaagaagtcagctctactactttctctccagtgttttaatgaagaagaactcaggactaatcattctctattacatcagatctcttcatggtggtgaatatggccaactatgtctgaggcttacagttacctcatcttgtttgccatggggcctgagttatgacatgtggtactctgaaaggagcaattactgagaaggtaaatagtttttttgagtaagactctacttgcaatcattttgtttgccctgaaactgggatttggatagatataactta

SEQ ID NO: 576573 - DNA, 645 bp, Homo sapiens
aacaaacctgcacattctgcacatgtatcccagaacttaaagtataattaaaaaaaaattaaagttcctttgtctctttttggcaaaatatttagtgtttccaggttcctcagcttataaagttccttttacattttggcttctaggtggttaacctgtaccttctcaaccattttgtgaaaggtattttaatatttattttaacatatctggcagtcagaaacaatatctatccttcttttatcaataaaatttttcccaacatggttaaaatataaaaaaacccttagaaccatatgtttccttttacttttttaaccaactaatctttcccccactgaaccattactctctgtcccaattcagaaaagaagtcagctctactactttctctccrgtgttttaatgaagaagaactcaggactaatcattctctattacatcagatctcttcatggtggtgaatatggccaactatgtctgaggcttacagttacctcatcttgtttgccatggggcctgagttatgacatgtggtactctgaaaggagcaattactgagaaggtaaatagtttttttgagtaagactctacttgcaatcattttgtttgccctgaaactgggatttggatagatataactta

SEQ ID NO: 576574 - DNA, 645 bp, Homo sapiens
aacaaacctgcacattctgcacatgtatcccagaacttaaagtataattaaaaaaaaattaaagttcctttgtctctttttggcaaaatatttagtgtttccaggttcctcagcttataaagttccttttacattttggcttctaggtggttaacctgtaccttctcaaccattttgtgaaaggtattttaatatttattttaacatatctggcagtcagaaacaatatctatccttcttttatcaataaaatttttcccaacatggttaaaatataaaaaaacccttagaaccatatgtttccttttacttttttaaccaactaatctttcccccactgaaccattactctctgtcccaattcagaaaagaagtcagctctactactttctctccagtgttttaatgaagaagaactcaggactaatcattctctattacatcagatctcttcatggtggtgaatatggccaactatgtctgaggctyacagttacctcatcttgtttgccatggggcctgagttatgacatgtggtactctgaaaggagcaattactgagaaggtaaatagtttttttgagtaagactctacttgcaatcattttgtttgccctgaaactgggatttggatagatataactta

SEQ ID NO: 576575 - DNA, 503 bp, Homo sapiens
tctgtggcctctgtttgggcatactattcacctggagtgcagtgtgtttatatagacaggtgcctgcaaagcacaaagaagagtctccgtttttggactttgttatcgaagtcaacaggtcctgagtttactctctgtagagtttaccatctacattgtcagaaaaattccatggggaactaagcccatgagcacatcagagaggaagttaggaaggtgyggaggatagtggggcttctaataagggaaaggttttttggcataagaaaggaattacacgtttaatgaacactatgagctaaattcctgtccttcagattgtctctaactggaaaaccaagaaacattactatgctagaactgtttttttatcacagagaaaacacatagagtaggcttcgaaataaattcaggattatttccaacttgaagggtttctccaattattccaaattttaggtgtcataggaccagaggtcaaggagataggcatgttagatatc

SEQ ID NO: 576576 - DNA, 295 bp, Homo sapiens
gagtatgaacaatcttttgaagacagttggcactgggtgggtgggcagcttccatgcttgcatttggaaggcagaacactgccaaagaggtgaagggcattggcttggcagggcccttggacaggcaggctttcaacattatcacgaggttgctgggtgacctgggttcacctctgctcactgaaactctgtttcttcgtctgtaaaatggggataattccrttacctgcctctcagggttgtgaagattaaatgagagcacgcatatgcactacccggtttagaataggaattc

SEQ ID NO: 576577 - DNA, 569 bp, Homo sapiens
tctcatactgtgattttcagttctatcaggtcatttaaggtcttctctacactagttattccagttagccattcrtctaaccttttttcaaggtttttagcttccttgcaatgagttagaacatgatcctttagctcagagaagtttgttataaccgaccttctgaagcctacttctgccaactcgtcaaacccattctccaaccagttttgttctcttgttggtgagaagttgtgttcctttggaggagaagaggtgttctagtttttggaattttcagcctttctgctctggtttctcccctctttgtggttttatctacctttggtctttgatgttggtgacctatggatgaggttttggtgtagatgtcctttttgttgatgttgatgctattcttttctgtttgttggtttttcttctaacagagaagcctctcagttgcaggtctgttggagtttgctggaggtccactccagaccttgtttgcctgggtatcaccagcagaggctgcagaatagcaaatattgctgcctgatccttcctctggaagcttcatcccagagggg

SEQ ID NO: 576578 - DNA, 569 bp, Homo sapiens
tctcatactgtgattttcagttctatcaggtcatttaaggtcttctctacactagttattccagttagccattcgtctaaccttttttcaaggtttttagcttccttgcaatgagttagaacatgatcctttagctcagagaagtttgttataaccgaccttctgaagcctacttctgccaactcgtcaaacccattctccaaccagttttgttctcttgttggtgagaagttgtgttcctttggaggagaagaggtgttctagtttttggaattttcagcctttctgctctggtttctcccctytttgtggttttatctacctttggtctttgatgttggtgacctatggatgaggttttggtgtagatgtcctttttgttgatgttgatgctattcttttctgtttgttggtttttcttctaacagagaagcctctcagttgcaggtctgttggagtttgctggaggtccactccagaccttgtttgcctgggtatcaccagcagaggctgcagaatagcaaatattgctgcctgatccttcctctggaagcttcatcccagagggg

SEQ ID NO: 576579 - DNA, 569 bp, Homo sapiens
tctcatactgtgattttcagttctatcaggtcatttaaggtcttctctacactagttattccagttagccattcgtctaaccttttttcaaggtttttagcttccttgcaatgagttagaacatgatcctttagctcagagaagtttgttataaccgaccttctgaagcctacttctgccaactcgtcaaacccattctccaaccagttttgttctcttgttggtgagaagttgtgttcctttggaggagaagaggtgttctagtttttggaattttcagcctttctgctctggtttctcccctctttgtggttttatctacctttggtctttgatgttggtgacctayggatgaggttttggtgtagatgtcctttttgttgatgttgatgctattcttttctgtttgttggtttttcttctaacagagaagcctctcagttgcaggtctgttggagtttgctggaggtccactccagaccttgtttgcctgggtatcaccagcagaggctgcagaatagcaaatattgctgcctgatccttcctctggaagcttcatcccagagggg

SEQ ID NO: 576580 - DNA, 593 bp, Homo sapiens
taaaagggaaacacattaaagtcagtaaatgtaaataaccacacggtggcagtagatgccaagaaattttaagtgttacgtgtaactgagggcatggaagagcaagtttatctccctatatggccacccacgttttcctttctgtctgactgctggaaggaaagggggaggtaactagaatctttccacacactcatccctgaagcactacccataaagtattaccactgaagagtgaggacatagacagttcactgtattcctcccccaattcctagaagagtagtaagggtcttaaggcgggagaatgagacctcctgaaatacttatgaagcyttcccttatcaagtactcacagccaaatatttcagagtggcgttaattaaaacaatgtcatacttggtctgctgtgaagcctgcctagttcagagttgataccactggggaaatcccaggggaaaataagtgtcaaataaaagaaggaatattatttccacaaatgagagacattaaggataaaggcttaacaccatataggcatgcctcacatatatatacagtgcatatattcacacgtacactgtacagaattc

SEQ ID NO: 576581 - DNA, 427 bp, Homo sapiens
tatgtaacttgatgtgagccataaataaaaatgtgccaaatatattaggtaattgtataaatctaaagcattctataatagtatattatctctggctggtgaatctagcaaacacaacatatagttatctctccatataggtggggatcaattccaggggcaccttcatgtaccaaaatccacatatactcaagtttcccagttggccctgtggaacctgtttataggaaaaggcaaccctacagaaaacacygcattttttattgagtttggttgaaaaaaaatatgcatataagtggacctgcatagtgtacacgtgttcaagggtcaactgtagctgaaagcaaaccacatttagtttgtacatatattttagagagaatatttgtgaagtgttttattttttaaaaaaaaagctaactaaaga

SEQ ID NO: 576582 - DNA, 484 bp, Homo sapiens
cttcacatatccttcagatagctggtaaaatgctgctttttgctagaagccttctccgccctttctatataacagcaacctctcttctcagtttcttgtcatctccagtacaccttctagctgcttttctaattttatttttcccaagcacaacttagcactttactggaagtcatctgttttctgcttcacaaagcaaggacttgtctccgttgtgcccggctctagcctcagggcctagaaaagtactcagcgtgtaatgtgcaccaaatacatgtatattggattaatatttaaatktgtatatacttagctgtgaataaatagcatcaatatttgtcttttaaatgttaaaaatataaagtgtatagccttcaaaagtacactgtacataaacaatttgaaggtgatgaagaggaccctgaaacaggaatggattcctaattcctagcagggatttaatggccatcacggagcagccaga

SEQ ID NO: 576583 - DNA, 484 bp, Homo sapiens
cttcacatatccttcagatagctggtaaaatgctgctttttgctagaagccttctccgccctttctatataacagcaacctctcttctcagtttcttgtcatctccagtacaccttctagctgcttttctaattttatttttcccaagcacaacttagcactttactggaagtcatctgttttctgcttcacaaagcaaggacttgtctccgttgtgcccggctctagcctcagggcctagaaaagtactcagcgtgtaatgtgcaccaaatacatgtatattggattaatatttaaattygtatatacttagctgtgaataaatagcatcaatatttgtcttttaaatgttaaaaatataaagtgtatagccttcaaaagtacactgtacataaacaatttgaaggtgatgaagaggaccctgaaacaggaatggattcctaattcctagcagggatttaatggccatcacggagcagccaga

SEQ ID NO: 576584 - DNA, 566 bp, Homo sapiens
atgtactcatgacagctctttttcttgatttttctagcctttatccatttggaaatgtgaaccaccttttataggtgagatacaatatagctgaacacttctctaaaggtttctgtaaaaaagcataaatgtacaagcctatcatccygattctatttagtttgccttgaatatgaatgtgataagtgaagtaagatctcacatcttgcaacatgaagtgggagaagggtcaacatagaagaaatgtcagaagaaatgaaccaatagaaaattcctcatttgctaaattttgttaaaaaaaatagattttaatattaatctgttctacacaggcaaatgttaactgcaatgaaaatgtcttttagataattcagaacactttccatccttggtaaaagtattcattttactgactcactattatatattttgttaagttagaaactcatattcaatcaaaggaaataaaagttccccctaatttctaggaatataaaaaaataggtacacatagcttagataatattttctatatttgttcaagtaaatcagtttagtaattgttt

SEQ ID NO: 576585 - DNA, 566 bp, Homo sapiens
atgtactcatgacagctctttttcttgatttttctagcctttatccatttggaaatgtgaaccaccttttataggtgagatacaatatagctgaacacttctctaaaggtttctgtaaaaaagcataaatgtacaagcctatcatcccgattctatttagtttgccttgaatatgaatgtgataartgaagtaagatctcacatcttgcaacatgaagtgggagaagggtcaacatagaagaaatgtcagaagaaatgaaccaatagaaaattcctcatttgctaaattttgttaaaaaaaatagattttaatattaatctgttctacacaggcaaatgttaactgcaatgaaaatgtcttttagataattcagaacactttccatccttggtaaaagtattcattttactgactcactattatatattttgttaagttagaaactcatattcaatcaaaggaaataaaagttccccctaatttctaggaatataaaaaaataggtacacatagcttagataatattttctatatttgttcaagtaaatcagtttagtaattgttt

SEQ ID NO: 576586 - DNA, 621 bp, Homo sapiens
tagaactaggccctataaaatataaaattgtcaaaattggttagcatgattgtagcttcaaggatcctattgttaatgtggcaacttctgaaaccaaacatcatcatgcttagcatcaagagctaaagtagtcatgagttaatggagaagaacaactaaggaattggctgccgaagtaaagtttatgctaaatttaaatgaaatgaaataacaaagtagtttgaaatgaacattccattgattatttttaaaattttatttattaacaaagtagcttatactaactgcccactgtctatcccaayagttacagcaataacatatagttaacatttgtaattaaatatttcatttcatacaaatagtattttaaaattcaagtgttgatttttaagcctttgaatgtttgactgtttaaaatttaagtgcatataaaaattgtagaaaagggtcattattaataaaatattcaaaatatggtaaaatttgcaagatgatttaatatatgcaaattgacaagtgatgtgaatagtacatttgaatagagaaaatatgtacataaatgaatggtatttcagaatctaagcaaattgatgactacattatgtacttgtccccaat

SEQ ID NO: 576587 - DNA, 592 bp, Homo sapiens
tttattggtaacctcttctgctctgcaactttggaaataatatggaggactccaaattcatttgagacaaaaatattaaaaatgtawcccctgattaggatttcagttccaaagctctccttggagggatatagagctggagaaaatcacatttatttttcgtctctttaatattgatatataaaagtcaggttaaaattagtatcaaattgggaagcctgcatggtaaactggctggaataatacactctgcaatatgaaggaaaaaggaaaaatttagttgatttatttacctaactataattttttaaagaattttaagtttctaataaatttaactctaaatttttaattttctatctttcatttagtaccatctatataaacttttccaggctacttctctgaatcacctggcaaaatcttataatttaccacctaattgaataaaacacacacacaaaataatctattttgaataataaacatcatttataattatcttgttgagattgagagtaatcatcaggtgtggaaaaactattgaggaaattttaacaatttaaaatgtaataatcttttttgtattatg

SEQ ID NO: 576588 - DNA, 592 bp, Homo sapiens
tttattggtaacctcttctgctctgcaactttggaaataatatggaggactccaaattcatttgagacaaaaatattaaaaatgtaacccctgattaggatttcagttccaaagctctccttggagggatatagagctggagaaaatcacatttatttttcgtctctttaatattgatatataaaagtcaggttaaaattagtatcaaattgggaagcctgcatggtaaacyggctggaataatacactctgcaatatgaaggaaaaaggaaaaatttagttgatttatttacctaactataattttttaaagaattttaagtttctaataaatttaactctaaatttttaattttctatctttcatttagtaccatctatataaacttttccaggctacttctctgaatcacctggcaaaatcttataatttaccacctaattgaataaaacacacacacaaaataatctattttgaataataaacatcatttataattatcttgttgagattgagagtaatcatcaggtgtggaaaaactattgaggaaattttaacaatttaaaatgtaataatcttttttgtattatg

SEQ ID NO: 576589 - DNA, 592 bp, Homo sapiens
tttattggtaacctcttctgctctgcaactttggaaataatatggaggactccaaattcatttgagacaaaaatattaaaaatgtaacccctgattaggatttcagttccaaagctctccttggagggatatagagctggagaaaatcacatttatttttcgtctctttaatattgatatataaaagtcaggttaaaattagtatcaaattgggaagcctgcatggtaaactggctggaataatacactctgcaatatgaaggaaaaaggaaaaatttagttgatttatttacctaactataattttttaaagaattttaagtttctaataaatttaactmtaaatttttaattttctatctttcatttagtaccatctatataaacttttccaggctacttctctgaatcacctggcaaaatcttataatttaccacctaattgaataaaacacacacacaaaataatctattttgaataataaacatcatttataattatcttgttgagattgagagtaatcatcaggtgtggaaaaactattgaggaaattttaacaatttaaaatgtaataatcttttttgtattatg

SEQ ID NO: 576590 - DNA, 597 bp, Homo sapiens
tgaggaggtgctacacccttttaacaaccagatttcataataactcactcactcactatcataagaatagcaccaaggaaatggtattaaaccattaaaaagaaaccactccacaatccaataacctcccatcaggccccacctccaacactgggtattacaatttgacatgagatttggttggggacatagatccaaaccatattattttgccctagtccctcccaaattttatgtctttctcagtttgcaaaatataatcatgccttcccatcagtcccccaaagtcttaactcacttcagcattaactcaaacatccaaagtctaaagtcttatctgagatgaggcaagccccttctgcctaagaccctgtaaaattaaaaaaaaaaaaactcccaagatataatgtataatgggggtacagggattgggtaaatactcccatttcaaaagggagaaattggccaaaagtaaggggctacgggccccatgcaagtctgaaacccagtaggaaagttattaagtcttaaagcttaacaatctcctttgacgccatccagggyataccactgcaaggggtgagctcccaaagcctt

SEQ ID NO: 576591 - DNA, 477 bp, Homo sapiens
ttctgttccatagggagcaaatataccacatgaaacattgcaactatgaatccaactagactgtaygggaaacatatattgaaaaataaattaaaattataagttctatgagaaaacacaaacatttgagtaaaaaaatgagaaaggtttagtggtgacttcttcccatgttagaaaaaaggattcataatgaacaacttttttttcatgtatttcctacaattgagtaaaataataggactaggtaagtttactggtttgcattttttcatctgggtctggtttttcatttcaattgttagccattgtattaactactttcaccattcaaaggaatgaatgatctgccatagtattttctgcagttccatctcttgttttcagtatcattccaattctgcatctgtctaattttgatctctgttctatttattttcctgattcataacattttgctttgtgctgagctcctaattg

SEQ ID NO: 576592 - DNA, 618 bp, Homo sapiens
ccacatgaaacattgcaactatgaatccaactagactgtacgggaaacatatattgaaaaataaattaaaattataagttctatgagaaaacacaaacatttgagtaaaaaaatgagaaaggtttagtggtgacttcttcccatgttagaaaaaaggattcataatgaacaacttttttttcatgtatttcctacaattgagtaaaataataggactaggtaagtttactggtttgcattttttcatctgggtctggttttycatttcaattgttagccattgtattaactactttcaccattcaaaggaatgaatgatctgccatagtattttctgcagttccatctcttgttttcagtatcattccaattctgcatctgtctaattttgatctctgttctatttattttcctgattcataacattttgctttgtgctgagctcctaattgtctctctgtcattctcaacattttagccctatggtctaaaagatgcccaaaagaatgtagcatattctagtatatcagtgggacaacatgaacaacttgcttaattgttaatctatttaaaaatgaaacagtgtttttcattttttcaatcaatttaatgctgact

SEQ ID NO: 576593 - DNA, 530 bp, Homo sapiens
caacttttttttcatgtatttcctacaattgagtaaaataataggactaggtaagtttactggtttgcattttttcatctgggtctggtttttcatttcaattgttagccattgtattaactactttcaccattcaaaggaatgaatgatctgccatagtattttctgcagttccatctcttgttttcagtatcattccaattctgcatctgtctaattttgatctctgttctatttattttcctgattcataacattttgctttgtgctgagctcctaattgtctctctgtcattctcaacattttagccctatggtctaaaagatgcccaaaagaatgtagcatattctagtatatcagtgggacaacatgaacaacttgcttaattgttaatctatttaaaaatgaaacagtgtttttcattttttcaatcaatttaatgctgactagatcctataactacattctactttttataactaaagaactccagaaaaatmaatgtaatagctttgctggaaaagattaa

SEQ ID NO: 576594 - DNA, 416 bp, Homo sapiens
caacacaccagaaactctagaacacagctaaagcatggttaaaaggaaagtttattgtgctaaacacttatgtcaacagctagaaagatctcaaatttgcaacctaacatcacagatagaggaacctaaaaaacaaaacagaaccaacctcgaaggtagtagaagaaaagaaatggccacaatcataactgmaattaacaaaatggagatgagaaaaaaatataaaaaaatcaacaaaactgaatgttgggtatttgaaagaaaaaataatgttgataggccattatctaaacttataaagaaaaaaaagagacaatattcaaataaacacaatcacaaaagagacaaaggggacattaccagtgaccccacagaaatacaacaaccctcagggatgattatgaacacctctatgt

SEQ ID NO: 576595 - DNA, 416 bp, Homo sapiens
caacacaccagaaactctagaacacagctaaagcatggttaaaaggaaagtttattgtgctaaacacttatgtcaacagctagaaagatctcaaatttgcaacctaacatcacagatagaggaacctaaaaaacaaaacagaaccaacctcgaaggtagtagaagaaaagaaatggccacaatcataactgcaattaacaaaatggagatgagaaaaaaatrtaaaaaaatcaacaaaactgaatgttgggtatttgaaagaaaaaataatgttgataggccattatctaaacttataaagaaaaaaaagagacaatattcaaataaacacaatcacaaaagagacaaaggggacattaccagtgaccccacagaaatacaacaaccctcagggatgattatgaacacctctatgt

SEQ ID NO: 576596 - DNA, 556 bp, Homo sapiens
taacatataaaactatcaagtatgttgattatgtttttagtatagtggtattgtttatccggatttaatcttgaagattaaaaataaaaataatgttaacttcagttaactgttcaggcaaattattttcttttttgataaaatgtatttgtgttgctacacactgacatggagctgcagattttctcattcaagttattaaaatgccaaccacctttgtaatgctagtagtcactgccaaatcaattttcattatatcggggggaaaatacaaatcttcttaaaaactgatataactgaaactgtatgtacattgtattatatcacaaaatacatgtaagtataatgaagaaaaatttgttaagaaagtttaccaaagcattctagttaagattacatttaggtggataagaaatttttcatttccaaaaaattacaaaacaacggtaaattgagttggtatttcacartatttgaattgcaatagtatgaagcgtgtatctaaatgcatgctatttatgaggcaatagttatgacaaaggcatagtaacataat

SEQ ID NO: 576597 - DNA, 530 bp, Homo sapiens
gaatggctttctgaaataagacaggcagataagaatagaaaaaaagaatgaaaaagaatgaacaaaacctctgagaaatatgggattatgtagagactgaatctactactggtgtacctaaaaaggatagagaaaatggagtcaacttagcaaaagttgacttttgatatttttgatctcatggatcaaaatatcatccatgagaacttccctaacctagatagagaggtcaacattcaaattsaagaaatacagagaacttcagtaagatactccacaaaaagatcatcttgaagacaaataatcatcagtttccaaggccaaaacaatagaaaaaatgttaaagacagtgtattagtctgttttcacactgctgataaagacatacctcagattgggtaaattataaagaaaaagaggtttaatgaactcacagttccacatgactggggagacctcacaatcatagtggaaggcagaagtcatgtcttacatggcaacaggcaagagagagaatggggaccaagcaa

SEQ ID NO: 576598 - DNA, 530 bp, Homo sapiens
gaatggctttctgaaataagacaggcagataagaatagaaaaaaagaatgaaaaagaatgaacaaaacctctgagaaatatgggattatgtagagactgaatctactactggtgtacctaaaaaggatagagaaaatggagtcaacttagcaaaagttgacttttgatatttttgatctcatggatcaaaatatcatccatgagaacttccctaacctagatagagaggtcaacattcaaattgaagaaatacagagaacttcagtaagatactccacaaaaagatcatcttgaagacaaataatcatcagtttccaaggycaaaacaatagaaaaaatgttaaagacagtgtattagtctgttttcacactgctgataaagacatacctcagattgggtaaattataaagaaaaagaggtttaatgaactcacagttccacatgactggggagacctcacaatcatagtggaaggcagaagtcatgtcttacatggcaacaggcaagagagagaatggggaccaagcaa

SEQ ID NO: 576599 - DNA, 530 bp, Homo sapiens
gaatggctttctgaaataagacaggcagataagaatagaaaaaaagaatgaaaaagaatgaacaaaacctctgagaaatatgggattatgtagagactgaatctactactggtgtacctaaaaaggatagagaaaatggagtcaacttagcaaaagttgacttttgatatttttgatctcatggatcaaaatatcatccatgagaacttccctaacctagatagagaggtcaacattcaaattgaagaaatacagagaacttcagtaagatactccacaaaaagatcatcttgaagacaaataatcatcagtttccaaggccaaaacaatagaaaaaatgttaaagacagtgtattagtctgttttcacactgctgataaagacatacctsagattgggtaaattataaagaaaaagaggtttaatgaactcacagttccacatgactggggagacctcacaatcatagtggaaggcagaagtcatgtcttacatggcaacaggcaagagagagaatggggaccaagcaa

SEQ ID NO: 576600 - DNA, 530 bp, Homo sapiens
gaatggctttctgaaataagacaggcagataagaatagaaaaaaagaatgaaaaagaatgaacaaaacctctgagaaatatgggattatgtagagactgaatctactactggtgtacctaaaaaggatagagaaaatggagtcaacttagcaaaagttgacttttgatatttttgatctcatggatcaaaatatcatccatgagaacttccctaacctagatagagaggtcaacattcaaattgaagaaatacagagaacttcagtaagatactccacaaaaagatcatcttgaagacaaataatcatcagtttccaaggccaaaacaatagaaaaaatgttaaagacagtgtattagtctgttttcacactgctgataaagacatacctcagattgggtaaattataaagaaaaagaggtttaatgaactcacagttccacatgactggggagacctcacaatcatagtggaaggcaraagtcatgtcttacatggcaacaggcaagagagagaatggggaccaagcaa

SEQ ID NO: 576601 - DNA, 583 bp, Homo sapiens
ctctgggggtacaggcattgggtaactatacccattccaaacaggacaaattggccaaaayaaaggggttacaggccgcatgcaagtccaaactccagcaaggcagttgaatcttaacgcttcaaaatgatctcctttgactccatgtctaacatccaggtcatgctgatgcaagatgtgggctcccatggacttgggcagctctgcccctgtggctttgaaaggtacagttcccacctagctgctttcacaggctggtgttgagcatctgaggtttttttaggtgcatatgcaagctgtgagtggatttaccattctggggtctggaagatggtggtcctcttctcgcacaggcagcgcttcagtggggactctgtgtggggctccaaccccacatttcccttccccacttccttagcagaggctctccatgatcccccccctcccccacagcaaacttcttcctggacatccaggcatttccatacatcctctgaaatctaggctgaggctcccaagccttgcttcttgacttctgtgcacatgcaggctcaactccacatggacgctgccaaggtttggg

SEQ ID NO: 576602 - DNA, 583 bp, Homo sapiens
ctctgggggtacaggcattgggtaactatacccattccaaacaggacaaattggccaaaacaaaggggttacaggccgcatgcaagtccaaactccagcaaggcagttgaatcttaacgcttcaaaatgatctcctttgactccatgtctaacatccaggtcatgctgatgcaagatgtgggctcccatggacttgggcagctctgcccctgtggctttgaaaggtacrgttcccacctagctgctttcacaggctggtgttgagcatctgaggtttttttaggtgcatatgcaagctgtgagtggatttaccattctggggtctggaagatggtggtcctcttctcgcacaggcagcgcttcagtggggactctgtgtggggctccaaccccacatttcccttccccacttccttagcagaggctctccatgatcccccccctcccccacagcaaacttcttcctggacatccaggcatttccatacatcctctgaaatctaggctgaggctcccaagccttgcttcttgacttctgtgcacatgcaggctcaactccacatggacgctgccaaggtttggg

SEQ ID NO: 576603 - DNA, 583 bp, Homo sapiens
ctctgggggtacaggcattgggtaactatacccattccaaacaggacaaattggccaaaacaaaggggttacaggccgcatgcaagtccaaactccagcaaggcagttgaatcttaacgcttcaaaatgatctcctttgactccatgtctaacatccaggtcatgctgatgcaagatgtgggctcccatggacttgggcagctctgcccctgtggctttgaaaggtacagttcccacctagctgctttcacaggctggtgttgagcatctgaggtttttttaggtgcatatgcaagctgtgagtggatttaccattctggggtctggaagatggtggtcctcttctcgcacaggcagcgcytcagtggggactctgtgtggggctccaaccccacatttcccttccccacttccttagcagaggctctccatgatcccccccctcccccacagcaaacttcttcctggacatccaggcatttccatacatcctctgaaatctaggctgaggctcccaagccttgcttcttgacttctgtgcacatgcaggctcaactccacatggacgctgccaaggtttggg

SEQ ID NO: 576604 - DNA, 594 bp, Homo sapiens
tcttctaaaacttttactattctccataatcctcaaagatatctagagcaacttaaaaatctctttcctaaactttcttattgttttggaatgagttctactccaatactagggcccagggctcatagtgccccttcgttcatcttgagatttaattaaaagcaatgttgagtcttctcttttggatctaaagatctatttgatgagaaagactgaagaaaaataaggataagggtatttcctccatgttttcatggcacaaaatctttgtttgctaactgtgataagcagaataatgcccccccaccccccacaagactgtccctgtcctattctccatgtcaggaaggatatgctatgttatataagaatatatgatgttacaatgcaagaaagtattaaggttgcacatgacattaagcttactaaacagcggaacttaaaataagagatcatacttgattatctggggggggcaatttaatcacaagaatcctttaaatgtggaagagtgtggtagaaaatatttaaagatactacaytgctaattgtactggaggaaagaaccaagagacaaggaatggggaaagtgga

SEQ ID NO: 576605 - DNA, 565 bp, Homo sapiens
tgcccttttcaccacattcatgccaaaatctgtttgtttgttttttttttttttttgactttttaataatggctattatgctgggaaaagatggtatctcactgtggttttaatttgcatttctttgatgattagtgacattgagaattttttatatgtttgttggtcatttgtatatcttcttttgagaaatgtctattcatgtaattttttttcactttctgttgggattattttttcttgctgatttgttttccttgttaattctagatattaattatttgctagatgcatactttgtaaacattttcttctattctctgagttatctgtttactgtgatgattatttcttttgctgtgaaggtttttagtttacttatgtcctttttatttatttttgyttttgttgcatttacttttggagtcttagtcataaagttttggcttaggtaaatatccagatgcgtttttcttagtttttttctagaatttttatggttttgggttttatatttaagtctgaaccatcttctaatttttgtggatggtgagaaagagtgatc

SEQ ID NO: 576606 - DNA, 565 bp, Homo sapiens
tgcccttttcaccacattcatgccaaaatctgtttgtttgttttttttttttttttgactttttaataatggctattatgctgggaaaagatggtatctcactgtggttttaatttgcatttctttgatgattagtgacattgagaattttttatatgtttgttggtcatttgtatatcttcttttgagaaatgtctattcatgtaattttttttcactttctgttgggattattttttcttgctgatttgttttccttgttaattctagatattaattatttgctagatgcatactttgtaaacattttcttctattctctgagttatctgtttactgtgatgattatttcttttgctgtgaaggtttttagtttacttatgtcctttttatttatttttgtttttgttgcatttacttttggagtcttagtcataaagttttggcttaggtaaatatccagatgygtttttcttagtttttttctagaatttttatggttttgggttttatatttaagtctgaaccatcttctaatttttgtggatggtgagaaagagtgatc

SEQ ID NO: 576607 - DNA, 565 bp, Homo sapiens
tgcccttttcaccacattcatgccaaaatctgtttgtttgttttttttttttttttgactttttaataatggctattatgctgggaaaagatggtatctcactgtggttttaatttgcatttctttgatgattagtgacattgagaattttttatatgtttgttggtcatttgtatatcttcttttgagaaatgtctattcatgtaattttttttcactttctgttgggattattttttcttgctgatttgttttccttgttaattctagatattaattatttgctagatgcatactttgtaaacattttcttctattctctgagttatctgtttactgtgatgattatttcttttgctgtgaaggtttttagtttacttatgtcctttttatttatttttgtttttgttgcatttacttttggagtcttagtcataaagttttggcttaggtaaatatccagatgcgtttttcttagtttttttctagaatttttatggttttgggttttatatttaagtctgawccatcttctaatttttgtggatggtgagaaagagtgatc

SEQ ID NO: 576608 - DNA, 584 bp, Homo sapiens
ttctgactgagaacactgtgtggacatttaaaataaaattaacaaacttgagcccaggagtttgaggctgccatgwgctatgatggcatcactacactctaacgtgggcaactaagtgagaaccagtttctaaataaataaagaaataaatacataaatagtaaaatgaataagatgagtattaaaagcccaaaaacagattctcaaattttgttgaatatgtgaatggatgaataaatatgaaatgtagatggagacattaggaagaagttagcttccactgaaaaatatacacaaatcaaattccaaataattaaatatgtagaatatagcttgtttacaacaataaaaaataatgttctctgtcagagaaaattaagaaaagcaatttaaactcaactgttatagaaagaaagattactatctatttagcagtgcttaaaaaggaggtcatagagaattaattccaatataaacctgacatgaacagcaatgcaaaaaatttggactcaatgtaaaatattatttgatggtgtgaataaataatgaaataaatgttcataagataaattgttgaaataatt

SEQ ID NO: 576609 - DNA, 307 bp, Homo sapiens
gagttaacttttatgagaggttttttgtttgtttttgttttttttttcttattaggccaggaccccaattcccaagatagccttttctctcccttgtttaaggaagacccagctccaaagctttaggttagcatgactaattgctgccgattaggcccccttccatctcgtggatagaggtcattctagtatccayggcatgcatgaaatctagagaactcaaaagttatcgacaacagtgggacaagaagcgcatgggtaatggtggataactcgcaccctgtaagccccctgttaacataggtga

SEQ ID NO: 576610 - DNA, 307 bp, Homo sapiens
gagttaacttttatgagaggttttttgtttgtttttgttttttttttcttattaggccaggaccccaattcccaagatagccttttctctcccttgtttaaggaagacccagctccaaagctttaggttagcatgactaattgctgccgattaggcccccttccatctcgtggatagaggtcattctagtatccacggcatgcatgaaatctagagaactcaaargttatcgacaacagtgggacaagaagcgcatgggtaatggtggataactcgcaccctgtaagccccctgttaacataggtga

SEQ ID NO: 576611 - DNA, 307 bp, Homo sapiens
gagttaacttttatgagaggttttttgtttgtttttgttttttttttcttattaggccaggaccccaattcccaagatagccttttctctcccttgtttaaggaagacccagctccaaagctttaggttagcatgactaattgctgccgattaggcccccttccatctcgtggatagaggtcattctagtatccacggcatgcatgaaatctagagaactcaaaagttatcgacaacagtgggacwagaagcgcatgggtaatggtggataactcgcaccctgtaagccccctgttaacataggtga

SEQ ID NO: 576612 - DNA, 307 bp, Homo sapiens
gagttaacttttatgagaggttttttgtttgtttttgttttttttttcttattaggccaggaccccaattcccaagatagccttttctctcccttgtttaaggaagacccagctccaaagctttaggttagcatgactaattgctgccgattaggcccccttccatctcgtggatagaggtcattctagtatccacggcatgcatgaaatctagagaactcaaaagttatcgacaacagtgggacaagmagcgcatgggtaatggtggataactcgcaccctgtaagccccctgttaacataggtga

SEQ ID NO: 576613 - DNA, 488 bp, Homo sapiens
tgtccttctgtatagttctgtcataaagaggggtaccttaggatagaatgcaggcctaggaccccaaaagtttgctgatcaaaccagcctggcaaactggtcagtaacaaacgttgctgcagttcttcatcttgttttttgtcctcaggagcttgaccttgtaaccacttgataatactttcttttggcctctgccattttacaatggtggcctgggtttaatccyggcttagggaatgagtatattttggccaatatctgtgtgacttctaccatttgctgattctcttcccctctataaacaactttagcttcctttcttaaatcttcctttgtctgaaccaactttaaagatcttagattctgtaaaaactgcttagcacctctttgaaaataacttttacacttacagttaagtcataaccttagttgaggcttgttggtttcacctgtgaggttatttttgataaagttcaaaagccagaaat

SEQ ID NO: 576614 - DNA, 367 bp, Homo sapiens
gtgacacagccaatagcaaagaagtgccagaaaatacgtaagcaaactgtgacctctttttacctcttgattgacttttatgttaaataatgaatttaccttatgcttgaaagaatttgaaatarcatttggcagtgaagaatttactcctcccatattttcattcaagagaaatttccatgaggagggttgttggtgggttacctccaactcaaccacttcagagctactacagtggtaatgcatgttgaagaaaagagtcaaactctgtgaaatatttgaagagatttattctgaggcaaatatgagtgacctcggcctgtcacacagcccaggagatcctaagaacatgtgccaaggttgttgg

SEQ ID NO: 576615 - DNA, 397 bp, Homo sapiens
tgaggagggttgttggtgggttacctccaactcamccacttcagagctactacagtggtaatgcatgttgaagaaaagagtcaaactctgtgaaatatttgaagagatttattctgaggcaaatatgagtgacctcggcctgtcacacagcccaggagatcctaagaacatgtgccaaggttgttggactacagcttggatttatacatgtgagggagacataagacatcaatcagtacacctaagatacacattggtaaaattgggaaaggtgagacaactcaaagcaggtgggggtggggtgggtgaaggcttccaggttaaaggtgaattcaaagattttctgactggcatttgacaactggctaaaataatttatctaaagaccggaatcaat

SEQ ID NO: 576616 - DNA, 397 bp, Homo sapiens
tgaggagggttgttggtgggttacctccaactcaaccacttcagagctactacagtggtaatgcatgttgaagaaaagagtcaaactctgtgaaatatttgaagagatttattctgaggcaaatatgagtgacctcggcctgtcacacagcccaggagatcctaagaacatgtgccaaggttgttggactacagcttggatttatacatgtgagggagacataagacatcaatmagtacacctaagatacacattggtaaaattgggaaaggtgagacaactcaaagcaggtgggggtggggtgggtgaaggcttccaggttaaaggtgaattcaaagattttctgactggcatttgacaactggctaaaataatttatctaaagaccggaatcaat

SEQ ID NO: 576617 - DNA, 562 bp, Homo sapiens
tatagtaaaccccaacatccaatcgggaaaaatgttgtaactctatatattcattaaattgttcacaaactgacatcttttagcatataatatggtttcctttagcttgttaaagagcatggactcatgactaaaacataagaacacccaatgaagctcaactaaatcaattcaactatgaaaaataaactgactagtgatcatctctttattattattgaaagaataacttacaagtaaaaacattcaatttttgaaaacagctttatatttattgaatttatgcatataacgttagttgcrtttcaaaataaaatggctgccttaaaagtgatgcaaaattacatatttatacattctctgaattaagcaggattaattgaaaagtggatatgaaggcatgactgcaagctacaaattgagcctatttttagtaacttgctctagctgagatgttatatgttcagatttgttgacatgaagctttattgagaagcattacttattcccaataactcaaggaggagcctgttttgggaggaaaaaccacatcaagtatgtt

SEQ ID NO: 576618 - DNA, 562 bp, Homo sapiens
tatagtaaaccccaacatccaatcgggaaaaatgttgtaactctatatattcattaaattgttcacaaactgacatcttttagcatataatatggtttcctttagcttgttaaagagcatggactcatgactaaaacataagaacacccaatgaagctcaactaaatcaattcaactatgaaaaataaactgactagtgatcatctctttattattattgaaagaataacttacaagtaaaaacattcaatttttgaaaacagctttatatttattgaatttatgcatataacgttagttgcatttcaaaataaaatggctgccttaaaagtsatgcaaaattacatatttatacattctctgaattaagcaggattaattgaaaagtggatatgaaggcatgactgcaagctacaaattgagcctatttttagtaacttgctctagctgagatgttatatgttcagatttgttgacatgaagctttattgagaagcattacttattcccaataactcaaggaggagcctgttttgggaggaaaaaccacatcaagtatgtt

SEQ ID NO: 576619 - DNA, 562 bp, Homo sapiens
tatagtaaaccccaacatccaatcgggaaaaatgttgtaactctatatattcattaaattgttcacaaactgacatcttttagcatataatatggtttcctttagcttgttaaagagcatggactcatgactaaaacataagaacacccaatgaagctcaactaaatcaattcaactatgaaaaataaactgactagtgatcatctctttattattattgaaagaataacttacaagtaaaaacattcaatttttgaaaacagctttatatttattgaatttatgcatataacgttagttgcatttcaaaataaaatggctgccttaaaagtgatgcaaaattacatatttatacattctctgaattaagcaggattaattgaaaagtggwtatgaaggcatgactgcaagctacaaattgagcctatttttagtaacttgctctagctgagatgttatatgttcagatttgttgacatgaagctttattgagaagcattacttattcccaataactcaaggaggagcctgttttgggaggaaaaaccacatcaagtatgtt

SEQ ID NO: 576620 - DNA, 376 bp, Homo sapiens
tgactgcaagctacaaattgagcctatttttagtaacttgctctagctgagatgttatatgttcagatttgttgacatgaagctttattgagaagcattacttattcccaataactcaaggaggagcctgttttgggaggaaaaaccacatcaagtatgttttgttgaatcaagaggattttatttttagaaaastactaatgattttttctgaaaatgtgactattttgaaatctaagaaaaatcaaatatttgatacttaacgtaatttgcaacttgacataaaactactcagtttagttggtcataatatactcattcctaacttattccactttacaaaaaaagtaaaagaaaagcataaataaataaataa

SEQ ID NO: 576621 - DNA, 376 bp, Homo sapiens
tgactgcaagctacaaattgagcctatttttagtaacttgctctagctgagatgttatatgttcagatttgttgacatgaagctttattgagaagcattacttattcccaataactcaaggaggagcctgttttgggaggaaaaaccacatcaagtatgttttgttgaatcaagaggattttatttttagaaaagtactaatgattttttctgaaaaygtgactattttgaaatctaagaaaaatcaaatatttgatacttaacgtaatttgcaacttgacataaaactactcagtttagttggtcataatatactcattcctaacttattccactttacaaaaaaagtaaaagaaaagcataaataaataaataa

SEQ ID NO: 576622 - DNA, 376 bp, Homo sapiens
tgactgcaagctacaaattgagcctatttttagtaacttgctctagctgagatgttatatgttcagatttgttgacatgaagctttattgagaagcattacttattcccaataactcaaggaggagcctgttttgggaggaaaaaccacatcaagtatgttttgttgaatcaagaggattttatttttagaaaagtactaatgattttttctgaaaatgtgactattttgaaatctaagaaaaatcaaatatttgatacttaacrtaatttgcaacttgacataaaactactcagtttagttggtcataatatactcattcctaacttattccactttacaaaaaaagtaaaagaaaagcataaataaataaataa

SEQ ID NO: 576623 - DNA, 483 bp, Homo sapiens
aggaaataaataatttacaaattttaagaatgayagaagtggctgggggtggtggctcatgcctgtgattccagcactttgggaggccgaggcaggcggatcgtttgaggtcaggagttccagaccagcctggccaacatagtgaagccctgtctctactaaaaatacaaaaattagccgagcgtgatggcgcatgcctgtattcccagctactcgggaggctgaggcacaagaattgcttgaagctgggaggtggaatttgcagtgagtagagatgaggccactgcactcaagcccgggcgacagaacgggactctgtctcaaaacaaataaacaacaaaaaaagaatgatagaagtaacatttctattgtcctacaacagtttaaggataactaaatgaataccatgatgaaatttataaatgtaaattagttaatttagattaagtgtataaatccctcaaaagatacaaactaaggcaa

SEQ ID NO: 576624 - DNA, 455 bp, Homo sapiens
caaaaccaaaaattcgaagaaacgattgccaaaatgttattagaatcacaaataaagacaaaatggcaaggtaaactattgtctaatttctgaaaatcagtgakaaagagaaaaatcttaaaaggcatcagagatgaaaaaataatccacatcaaaagaaatacacacacaaacacacaaatacgggcaattttcttcagaaactatgaaagcttggagacaatggagcaatcataaataattaaataataaaaaacagctttatctacatttttataacaagtagaaaattttaagcactaaagcaaaatagggctcatttatttttagaaaattaaaaataggtttggaactagggtaaagaaaatgacacaactaggtcccaaaacctaaagagctactcactttcagagttatatatttgagattgagagtgcaagacttgtgccttgtgt

SEQ ID NO: 576625 - DNA, 317 bp, Homo sapiens
tctgcagtctcacatacttaagaggctaaggtgggaggactacttgagcccaggagtttgaggcttcagtgaaytatgatggtgccacaacactccagcctgggaaacagagctggaccccatttccaaaaaaaaaaaaaaaaaagtagttacccaggtaaggtggatgatcaagtacacccagtgagaagcacacaaaccttaccctttacccaaactctctcccttacctggcccatttctggtttctggaggaggatcagttagggggtgtgacccaagttacccagataattaactgtggaagcacgagtttt

SEQ ID NO: 576626 - DNA, 297 bp, Homo sapiens
tgtgtttcaaaactgctctatcaaaagaaaggttcaacactgttagttgrgggcgcacatcacaaataagattctgagaatgcttctgtctagttttcaggggaagatatttcctttttcaccataggcctgaaagcgctccaaatgtccacatccagatactacaaaaagagtgtttcaaacctgctctatgaaagggaatgttaaactctgtgacttgaatgcaaacatcacaaagaagtttctgggaatgctgctgtctgcttttatatgtaatcccgtttccaacgaaatcct

SEQ ID NO: 576627 - DNA, 297 bp, Homo sapiens
tgtgtttcaaaactgctctatcaaaagaaaggttcaacactgttagttgggggcgcacatcacaaataagwttctgagaatgcttctgtctagttttcaggggaagatatttcctttttcaccataggcctgaaagcgctccaaatgtccacatccagatactacaaaaagagtgtttcaaacctgctctatgaaagggaatgttaaactctgtgacttgaatgcaaacatcacaaagaagtttctgggaatgctgctgtctgcttttatatgtaatcccgtttccaacgaaatcct

SEQ ID NO: 576628 - DNA, 297 bp, Homo sapiens
tgtgtttcaaaactgctctatcaaaagaaaggttcaacactgttagttgggggcgcacatcacaaataagattctgagaatgcttctgtctagttttcaggggaagatatttcctttttcaccataggcctgaaagcgctscaaatgtccacatccagatactacaaaaagagtgtttcaaacctgctctatgaaagggaatgttaaactctgtgacttgaatgcaaacatcacaaagaagtttctgggaatgctgctgtctgcttttatatgtaatcccgtttccaacgaaatcct

SEQ ID NO: 576629 - DNA, 408 bp, Homo sapiens
caactctgttagctgagtagatacatcatgacaaattttctgacattgcttctatctagcttttattggaagatatttcctttttcaccgtagtcctgacagcgctccaaatgtccacttccagatactacaaraagagtgtctcaaacctgctctatgaaagggactgttcaacactgtgacttcaattgaaacatcccaatgaagttactgagaatgcttctgtctagagtttatatgaagacaatcccgtttccaacgaaatcctcaaagctatccaaatatcctcttgcagattttacacaaagagtgcttcaaaactgccctatcaaaagaaaggttcaacactgttagttgagggcgcacatcacaaataagtttctgagaatgcttctgtctagttttcag

SEQ ID NO: 576630 - DNA, 408 bp, Homo sapiens
caactctgttagctgagtagatacatcatgacaaattttctgacattgcttctatctagcttttattggaagatatttcctttttcaccgtagtcctgacagcgctccaaatgtccacttccagatactacaagaagagtgtytcaaacctgctctatgaaagggactgttcaacactgtgacttcaattgaaacatcccaatgaagttactgagaatgcttctgtctagagtttatatgaagacaatcccgtttccaacgaaatcctcaaagctatccaaatatcctcttgcagattttacacaaagagtgcttcaaaactgccctatcaaaagaaaggttcaacactgttagttgagggcgcacatcacaaataagtttctgagaatgcttctgtctagttttcag

SEQ ID NO: 576631 - DNA, 428 bp, Homo sapiens
tgcaaacgtcacaaagaagtttctgggaatgctgctgtctgctttttatatgtaatcccgtttccaacgaaatcctcaaagctagacaaatatccacttgcagattccacaaaaagagtgtttcaaaactgctctctcaaaagaaaggttcaactctgttagctgagtagatacatcatgaaaaagtttctgacattgcttctatctagcttttattggaagatatttcctttttcacygtagtcctgagagcgctccaaatgtccacttccagatactacaaaaagagtgtttcaaacctgctctatgacagggaatgttcaacactgtgacttcaattgaaacatccgaaagaaatttctgagaatgcttctgtctagagtttatatgaagacaatcccgtttccaacgaaatcctcaaagctatc

SEQ ID NO: 576632 - DNA, 428 bp, Homo sapiens
tgcaaacgtcacaaagaagtttctgggaatgctgctgtctgctttttatatgtaatcccgtttccaacgaaatcctcaaagctagacaaatatccacttgcagattccacaaaaagagtgtttcaaaactgctctctcaaaagaaaggttcaactctgttagctgagtagatacatcatgaaaaagtttctgacattgcttctatctagcttttattggaagatatttcctttttcactgyagtcctgagagcgctccaaatgtccacttccagatactacaaaaagagtgtttcaaacctgctctatgacagggaatgttcaacactgtgacttcaattgaaacatccgaaagaaatttctgagaatgcttctgtctagagtttatatgaagacaatcccgtttccaacgaaatcctcaaagctatc

SEQ ID NO: 576633 - DNA, 428 bp, Homo sapiens
tgcaaacgtcacaaagaagtttctgggaatgctgctgtctgctttttatatgtaatcccgtttccaacgaaatcctcaaagctagacaaatatccacttgcagattccacaaaaagagtgtttcaaaactgctctctcaaaagaaaggttcaactctgttagctgagtagatacatcatgaaaaagtttctgacattgcttctatctagcttttattggaagatatttcctttttcactgtagtcctgagagcgctccaaatgtccacttccagatactacaaaaagagtgtttcaaacctgctctatgacagggaatgttcaacactgtgacttcaattgaaacatccsaaagaaatttctgagaatgcttctgtctagagtttatatgaagacaatcccgtttccaacgaaatcctcaaagctatc

SEQ ID NO: 576634 - DNA, 233 bp, Homo sapiens
caactctgtgacttgaatgcaaacatcacaaagaagttwctgggaatgctgctgtctgctttttatatgtaatcccgtttccaacgaaatcctcaaagctagacaaatatccacttgcatattccacaaaaagagtgtttcaaagctgctctctcaaaagaaaggttcatctctgttagctgagcagatacatcatgaaaaagtttctgacattgcttctatctagcttttat

SEQ ID NO: 576635 - DNA, 225 bp, Homo sapiens
ctgtgacttgaatgcaaacatcacaaagaagtttctgggaatgctgctgtctgctttttatatgtaatcccgtttccaacgaaatcctcaaagctagacaaatatccacttgcakattccacaaaaagagtgtttcaaagctgctctctcaaaagaaaggttcatctctgttagctgagcagatacatcatgaaaaagtttctgacattgcttctatctagcttt

SEQ ID NO: 576636 - DNA, 233 bp, Homo sapiens
caactctgtgacttgaatgcaaacatcacaaagaagtttctgggaatgctgctgtctgctttttatatgtaatcccgtttccaacgaaatcctcaaagctagacaaatatccacttgcatattccacaaaaagagtgtttcaaarctgctctctcaaaagaaaggttcatctctgttagctgagcagatacatcatgaaaaagtttctgacattgcttctatctagcttttat

SEQ ID NO: 576637 - DNA, 225 bp, Homo sapiens
ctgtgacttgaatgcaaacatcacaaagaagtttctgggaatgctgctgtctgctttttatatgtaatcccgtttccaacgaaatcctcaaagctagacaaatatccacttgcatattccacaaaaagagtgtttcaaagctgctctctcaaaagaaaggttcatctctgttagctgagyagatacatcatgaaaaagtttctgacattgcttctatctagcttt

SEQ ID NO: 576638 - DNA, 519 bp, Homo sapiens
aaaatacataatataaaacctattaaaactgaaaggtaaaatagtaaaaccacagtcatccatggggatttcaacagtctcctgccataaatatttaaattttgttaaacgaaaagttggtaagcgtagagaggatcttaaaaatataattagccaacttgatctaattgaatcttttagaataatctaaggatgaggaatgaggtagcagagaaagaaaaggcagacatcaacgtgacgttagtgtttcaaggttatgagaatacamcaatgatggtgtgtgtgtgtgtgtgtgcagatggtaagctcaatcttaaaaatattgagttttaactgacaattcattaggaaagataagaggaaatgatatctactgagaggctatatgactgagctctaagagaaaggtcacagcagaaattgtgtacttgacagctctataaggaggtcagtcaaaaataagtcagtgatgaattctctggtgtaaaagcagatgaatgaggattagatttaaaacac

SEQ ID NO: 576639 - DNA, 519 bp, Homo sapiens
aaaatacataatataaaacctattaaaactgaaaggtaaaatagtaaaaccacagtcatccatggggatttcaacagtctcctgccataaatatttaaattttgttaaacgaaaagttggtaagcgtagagaggatcttaaaaatataattagccaacttgatctaattgaatcttttagaataatctaaggatgaggaatgaggtagcagagaaagaaaaggcagacatcaacgtgacgttagtgtttcaaggttatgagaatacaccaatratggtgtgtgtgtgtgtgtgtgcagatggtaagctcaatcttaaaaatattgagttttaactgacaattcattaggaaagataagaggaaatgatatctactgagaggctatatgactgagctctaagagaaaggtcacagcagaaattgtgtacttgacagctctataaggaggtcagtcaaaaataagtcagtgatgaattctctggtgtaaaagcagatgaatgaggattagatttaaaacac

SEQ ID NO: 576640 - DNA, 519 bp, Homo sapiens
aaaatacataatataaaacctattaaaactgaaaggtaaaatagtaaaaccacagtcatccatggggatttcaacagtctcctgccataaatatttaaattttgttaaacgaaaagttggtaagcgtagagaggatcttaaaaatataattagccaacttgatctaattgaatcttttagaataatctaaggatgaggaatgaggtagcagagaaagaaaaggcagacatcaacgtgacgttagtgtttcaaggttatgagaatacaccaatgatggtgtgtgtgtgtgtgtgtgcagatggtaagctcaatcttaaaaatattgagttttaactgacaattcattaggaaagataagaggaaatgatatctactgagaggctatatgactgagctctaagagaaagrtcacagcagaaattgtgtacttgacagctctataaggaggtcagtcaaaaataagtcagtgatgaattctctggtgtaaaagcagatgaatgaggattagatttaaaacac

SEQ ID NO: 576641 - DNA, 328 bp, Homo sapiens
aaaacaggaaaaacaaaacaaaactgctcttgaaggtgaaggaggaatatcactgagctcaccaacacagccaggaaaagaacagaagtgtgagaaggctacattcctgagaccctgagaaaaagtacctgcataagactgagatgaaattacctactctagttatgattgaaatcccaaaaagaaaagagggaaaaataatggagcaaaagaaatatwtttcaaaataactgccaaaaatattctaaaagaagtgacagaaaatcaaacttcagataaaggaaactcagagaatgtcaaatagaacaaaaagaaataagaattccat

SEQ ID NO: 576642 - DNA, 328 bp, Homo sapiens
aaaacaggaaaaacaaaacaaaactgctcttgaaggtgaaggaggaatatcactgagctcaccaacacagccaggaaaagaacagaagtgtgagaaggctacattcctgagaccctgagaaaaagtacctgcataagactgagatgaaattacctactctagttatgattgaaatcccaaaaagaaaagagggaaaaataatggagcaaaagaaatatatttcaaaataactgccaaaaatattctaaaagaagtgacagaaaatcaaacttcarataaaggaaactcagagaatgtcaaatagaacaaaaagaaataagaattccat

SEQ ID NO: 576643 - DNA, 304 bp, Homo sapiens
agtgttgaacagtccctttcatagagcaggtttgaaacactctttttgtagtatatggaagtggacatttsgagcgctctcaggactgcggtgaaaaaggaaatatcttccaataaaagctagatagaagcaatgtcagaaactttttcatgatgtatctactcagctaacagagttgaacctttcttttgagagagcagttttgaaaccctctttttttggaatctgcaagtggatatttgtctagctttgaggatttcgttggaaacgggattacatataaaaagcagacagcagcattccc

SEQ ID NO: 576644 - DNA, 304 bp, Homo sapiens
agtgttgaacagtccctttcatagagcaggtttgaaacactctttttgtagtatatggaagtggacatttcgagcgctctcaggactgcggtgaaaaaggaaatatcttccaataaaagctagatagaagcaatgtcagaaactttttcatgatgtatctactcagctaacagagttgaacctttcttttgagagagcagttttgaaacmctctttttttggaatctgcaagtggatatttgtctagctttgaggatttcgttggaaacgggattacatataaaaagcagacagcagcattccc

SEQ ID NO: 576645 - DNA, 304 bp, Homo sapiens
agtgttgaacagtccctttcatagagcaggtttgaaacactctttttgtagtatatggaagtggacatttcgagcgctctcaggactgcggtgaaaaaggaaatatcttccaataaaagctagatagaagcaatgtcagaaactttttcatgatgtatctactcagctaacagagttgaacctttcttttgagagagcagttttgaaaccctctttttktggaatctgcaagtggatatttgtctagctttgaggatttcgttggaaacgggattacatataaaaagcagacagcagcattccc

SEQ ID NO: 576646 - DNA, 341 bp, Homo sapiens
cagtgttgaagctttcttttgatagagcagttttgaaacactctttttgtaaaatctgcaagaggatatttggatagctttgaggatttcrttggaaacgggattgtcttcatataaactctagacagaagcattctcagaagcttcattgggatgtttcaattgaagtcacagtgttgaacagtccctttcatagagcaggtttgaaacactctttttgtagtatctggaagtggacatttggagagatctctggactacggtgaaaaaggaaatatcttccaataaaagctagatagaagcaatgtcagaaactttttcatgatgtatctactcagcta

SEQ ID NO: 576647 - DNA, 195 bp, Homo sapiens
ttatcttccaataaaaggtagatagaagcaatgtcagaaactttttcatgatgtatctactcagctaacagagttgaacctttcttttgagagagcagttttgaaacmctctttttgtggaatctgcaagtggatatttgtctagctttgaggatttcgttggaaacgggattacatataaaaagcagacagcag

SEQ ID NO: 576648 - DNA, 561 bp, Homo sapiens
tcttttgatagagtagttttgaaacactctttttgtaaaatttgcaagaggatatttggatagctttgaggatttcgttggaaacgggattgtcttcatataaactctagacagaagcattctcagaagcttcattgggatgtttcaattgaagtcacagtgttgaacagtccctttcatagagcaggtttgaaacactctttttgtagtttctggaagtggacatttggagagatctcattaatacggtgataaaggaaatatcttccaataaaaggtagatagaagcaatgtcagaaactttttcatgatgtatttactcagctaacagagttgaacctttcttttgagagagcagttttgaaacactctttttgtggaatctgcaagtggatatttgtctagctttgaggatttcgttggaaacgggattacatataaaaagcagacagcagcattyccagaaacttctttgtgatgtttgcattcaagtcacagagttgaacattccctttcatagagcaggtttgaaacactctttttgtagtatctggatgtgga

SEQ ID NO: 576649 - DNA, 347 bp, Homo sapiens
atgtgcgccctcaactaacagtgttgaagctttcttttgawagagcagttttgaaacactctttttgtaaaatctgcaagaggatatttggatagctttgaggatttcgttggaaacgggattgtcttcatataaactctagacagaagcattctcagaagcttcattgggatgtttcaattgaagtcacagtgttgaacagtccctttcatagagcaggtttgaaacactctttttgtagtatctggaagtggacatttggagcgctctcaggactacggtgaaaaaggaaatatcttccaataaaagctacatagaagcaatgtcagaaactttttcatgatgta

SEQ ID NO: 576650 - DNA, 459 bp, Homo sapiens
cttttacattgttttcttttcctccagttagggcttgaggtttgtctctggagagtgacyatcaattggagccctgcctttctggggttctggtcagggggttgtggatgcttaacatgtgcctttcacaggacacttccttaccccagcagtggccaggtgtgcatcccacgaccaggcctccctctcacagaacatctgttgagactaggagatgcctggtgactgttgcctgacctgtgtcctgtgtatttctgacaagagccactctcagagaccctggccaggaggagagttaggttccagtgtaggtcagctcagacacatggaggccacagaaccaaacatgggaaatcacagaagtaggtttattactcacagatccagagagaagagggtagctgaggagagggtttagctgtgtccccagccaaatctcatcttgaattcccacatgtt

SEQ ID NO: 576651 - DNA, 459 bp, Homo sapiens
cttttacattgttttcttttcctccagttagggcttgaggtttgtctctggagagtgaccrtcaattggagccctgcctttctggggttctggtcagggggttgtggatgcttaacatgtgcctttcacaggacacttccttaccccagcagtggccaggtgtgcatcccacgaccaggcctccctctcacagaacatctgttgagactaggagatgcctggtgactgttgcctgacctgtgtcctgtgtatttctgacaagagccactctcagagaccctggccaggaggagagttaggttccagtgtaggtcagctcagacacatggaggccacagaaccaaacatgggaaatcacagaagtaggtttattactcacagatccagagagaagagggtagctgaggagagggtttagctgtgtccccagccaaatctcatcttgaattcccacatgtt

SEQ ID NO: 576652 - DNA, 366 bp, Homo sapiens
agattttattggctacctttgaacaatgttgtggcagrcagttcagtaacttcaggatgagtatttgtctgttgttgttttaaatcttctctttaaactttgtggagttagtctagagccatctgtaatttggagctaaatgagcactgtcactagggcatgaacctccagtggtctttactgaatatcctggaggtaaagaggggattcccttctctgattagaatttggaatataaagagaaaagagaaaaatagaaagctatgcataaacacgtgcattaaaatgaattttatgtgggctttttcatgaaaatgttcctaaggtatttttttttaattgtggtaaaatacacataacataaaa

SEQ ID NO: 576653 - DNA, 366 bp, Homo sapiens
agattttattggctacctttgaacaatgttgtggcaggcagttcagtaacttcaggatgagtatttgtctgttgttgttttaaatcttctctttaaactttktggagttagtctagagccatctgtaatttggagctaaatgagcactgtcactagggcatgaacctccagtggtctttactgaatatcctggaggtaaagaggggattcccttctctgattagaatttggaatataaagagaaaagagaaaaatagaaagctatgcataaacacgtgcattaaaatgaattttatgtgggctttttcatgaaaatgttcctaaggtatttttttttaattgtggtaaaatacacataacataaaa

SEQ ID NO: 576654 - DNA, 366 bp, Homo sapiens
agattttattggctacctttgaacaatgttgtggcaggcagttcagtaacttcaggatgagtatttgtctgttgttgttttaaatcttctctttaaactttgtrgagttagtctagagccatctgtaatttggagctaaatgagcactgtcactagggcatgaacctccagtggtctttactgaatatcctggaggtaaagaggggattcccttctctgattagaatttggaatataaagagaaaagagaaaaatagaaagctatgcataaacacgtgcattaaaatgaattttatgtgggctttttcatgaaaatgttcctaaggtatttttttttaattgtggtaaaatacacataacataaaa

SEQ ID NO: 576655 - DNA, 366 bp, Homo sapiens
agattttattggctacctttgaacaatgttgtggcaggcagttcagtaacttcaggatgagtatttgtctgttgttgttttaaatcttctctttaaactttgtggagttagtctagagccatctgtaatttggagctaaatgagcactgtcactagggcatgaacctccagtggtctttactgaatatcctggaggtamagaggggattcccttctctgattagaatttggaatataaagagaaaagagaaaaatagaaagctatgcataaacacgtgcattaaaatgaattttatgtgggctttttcatgaaaatgttcctaaggtatttttttttaattgtggtaaaatacacataacataaaa

SEQ ID NO: 576656 - DNA, 406 bp, Homo sapiens
taccactgaactgtacacttaaaatggttaacagagtacattttatgttatgtgtattttaccacaataaaaaaaataaaataccttaggaacattttcatgaaaaagcccacataaaattcattttaatgcacgtgtttatgcatagctttctatttttctcttttctcyttatattccaaattctaatcagagaagggaatcccctctgtacctccaggatattcagtaaagaccactggaggtccatgccctagtgacagtgctcatttagctccaaattacagatggctctagactaactcaacaaagtttaaagagaagatttaaaacaacagacaaatactcatcctgaagttactgaactgcctgtcacaacattattcaaaggtagccaataaaatct

SEQ ID NO: 576657 - DNA, 406 bp, Homo sapiens
taccactgaactgtacacttaaaatggttaacagagtacattttatgttatgtgtattttaccacaataaaaaaaataaaataccttaggaacattttcatgaaaaagcccacataaaattcattttaatgcacgtgtttatgcatagctttctatttttctcttttcyctttatattccaaattctaatcagagaagggaatcccctctgtacctccaggatattcagtaaagaccactggaggtccatgccctagtgacagtgctcatttagctccaaattacagatggctctagactaactcaacaaagtttaaagagaagatttaaaacaacagacaaatactcatcctgaagttactgaactgcctgtcacaacattattcaaaggtagccaataaaatct

SEQ ID NO: 576658 - DNA, 570 bp, Homo sapiens
ttttgtattttttgtaaagacagggtttcgccatgttgccaaggctggtctcgaactcctgggctcaagcgatctgcccaccttggcctcccaaagagctgggactacaggcatgagccactgcaccyggccccaagtttttttgcaaatgggcaaaaaagcatgagcaagcattttatttaaaaaaataaacacaaatggtatataaatatttgacaaggtgctcatcagtaaccaagcaaatgcaaactaagaccacagtgagatctcattctatacccactggcttggcaaaattaagggcacctgatagtaccagagggtagcaaggatgtggatcaatgggatacttacatgacacttatatgactgacgggagtacattagaacagccactttgaaaagcaatttggtactgcagtagactattgttcagaaatatcttctcctcacccctatttacagaatatacttttctgccctattgatgcctggcttggctgcaggatttgctctaaaggttatagtagaaccaactaaataggagcagaagtgacagatacccatttg

SEQ ID NO: 576659 - DNA, 476 bp, Homo sapiens
ttatggtcccaaagtgggttttcacaggcagtgtttttactgataccaggctggctctgcctgtaccattttcctctgcttaaggcaattgacagctcttacagcctggcacctgagcctgcctcacaatgcgcatgccctagtctaaaagcctctggctagcctcaccatgaaagtcaccattgcctagygacaagtccctgtgccttggcagagaaagagacttccgtggagatgtgtctttggtggactgtgtcctgtcttctctgtggaatcgaccagatagtcccatgttccaaggagagggcagatgtgagccaacctgaagaaatgtcaagcagagcctcaggaataaactgtgaatccctgaggatacaaaataatctgcaagattcctcaggcctgcctagatgttgtaggggtgagtctttttgaaactggccccactgtgatttctaggtatagcctgccttttt

SEQ ID NO: 576660 - DNA, 517 bp, Homo sapiens
ctcttgctctccaaattttattggagtgctgcatgattcctgtaggaagagaagcaggcagcgatgtttggcttttttctggtaatctacactgtgtttcattgcatctgcacatcctttctcattgtggaggtggtctttcattgggctgttgctggatggggctgcctcttacaacagatctatgggctgccagggatttcagtgagcaaaatggactctgggtaggtttagtgcctctccaggttgtgggtcgctgtctcgttatgggttgtttgcactttgaaggaggcttttgagttctctgacaggaatttttgaatattgcttagattccagcacaagccatctttttctcacacacacaccttgatttttctttgctttcctgggaagtccacagtgcccctcaacagcastactggacacccttttctggcttgccatggccacagatggcctctgagatactgtctcaaccttatctgtacccatgagaggccagtttgaggtttga

SEQ ID NO: 576661 - DNA, 602 bp, Homo sapiens
gagagatgtcatgctattgttagatcaaaccctggcctttaatgaaaataaggtggtcaagtaaatgayagaatggcaactgaagaaagggacaaattccctactggtcagcaagccatccccagtatggattccccttgggatctagactcagatcatggggactggagtcataaacagctgttggcctgtgttctagaaggactaaggaaaatgaggaaaaatcccattaattattcagtgatgtccatcataactcaggggaaggaagaaaatactcctgccttcctcaagcagctatgggaggccttaagaaaatatactctcctgtcacccatctccctcaagggtcaattgatactaaaagataagttcattacccaatcagcagcagatatcaggagaaagccccaaaagtgagccccaggccttcaacaaagtctggaggcattattaaacctggaaatgttggtgttctataatagggaccaagaggaacaggccaaaaaggaaaagtgagatcagtaaaaggtcacagctttagtcttggccctcagacaaacaaaccttggtggttcagaggggacagaaaatggagcagg

SEQ ID NO: 576662 - DNA, 585 bp, Homo sapiens
ttcaccccgtcagacagtggaagaggctttaacagtctttgtggaatcctgattagtctatttatataaatttatacaaatttaatcatacactaatccaatctaagacattgtttaaagaaatactacatttaatgttttaatagaacacaaaaaaacttaatgcttgttttacaaatttaacttgcatcagattttcatcaagaggtccaccccttagaatattagatgcactgagaagcaagataaatttctgtagccattgccaaggcatagattggcctcctaagccatcaagcaagcagtaacaccaagttagtatggctaaattttattgttttttataatttaaaatataataaccataggaactcaataaagaactggtaataaagaagttacggagataaattactctaaatggaaaataaatgacacttggtgataaggcttatgaggtctgggactcggcccrccatgttcacagcagcatccccaccacccagacatgcctggctcacaattggcacacaataaatcctcgttgaatatttttaataacttgtactcatttctaacaaatgt

SEQ ID NO: 576663 - DNA, 583 bp, Homo sapiens
caagaattcattatatctgcacgtggtaacatgaaagggtttctgcgagtagaaacatgtaagctgcagagagatcatttttgtaaactccatgcagatagatgcacagagaaagagctggaagaacccacactgcatggttagcactgggaaggaagaacaggctttcacgttttacctaaggtatttgttcactgattatgttttaagggtatatgctcattttgaaataaaaaaggacttttcaaaagatgcacccagtaattatatgcattggggaggtgacttagagcaggaatactgctgaataatttggttcaaacatgaaacctacacaagacaaagtcacttgacagaggatgactcttcagatgttcagggaaactcacgcactcactcacacwcgatgcatcggccgggctccctgatgcccccaacgcctctcctatgtccaaggaaatacttctgcagagcacgttagagtttccaatgcatgtgtgttatctcagagacaaagggcagaaaggggaaaaaacagaaagtacagtacggtaagtctcaaatttcagcatcctgttgtctc

SEQ ID NO: 576664 - DNA, 632 bp, Homo sapiens
agttcttggtgctgtacatcaccaccattgcttgttattatctgcctttttcatttcactgataactaatgaagctgagcacactttcatttttttggacaatttagatatcctcttttacgaagtggttgtattattcccattctactattggcttatgtgtctttttcacattaatttgtaggattttaaaaatatattctgcatctgagctctttgtcagtgaaatgtattgcaaatagctcaccaactttgtggcatgtctttttactctctttgtggtgtcatttgactaatggaatgtcttaatttcaatggaatgatagttatgataagtactctgtgtccagtttaaaaagtctgtgcctacatcatagttataaagatattctatattattttctagaagacagatgtataattgaccacaaattagtttttgtgtattgcattagggtttttcagagaaacagaaccaatcyatagcaaatatatatagcacatatatatatatatatacacacacacatatatatatatatacatatacgcacacacatatatatacacagagagagagagagagagagagagagagagattacaaggaattggctcatgtgattatggag

SEQ ID NO: 576665 - DNA, 552 bp, Homo sapiens
ggggtggggccaggcggagataattgaatcgtgggggtggtttcccccatactgttcttgtggtggtgaataagtctcttgagatctgatgattttataaaagggagttcccccgcacaaagtcccttgcctgctgccatttaagatgtgcctttgcttctcctttgccttccaccgtgattgtgaggcccccccaccagccatgctgaactgtgagtccattaaacctctttccttcataaattacccagtcttgggtttgtctttattagcagtgtgagaatagatatggtaaatttaagtttataagaaaatgccaaactattttccaaaatgactactgttttgcattcccaccagctgtgcatgagggttgcttttgtaaagctcatctcagtcacaycttttgcatttcctggaatctgcctgacttgttgatgcatgtcttgaaaccctggagtggggaggggagtggcttctcttgttgttatattaataacccacttggggaatttttgcttcctcttcacacaaccttagatggagtgaatt

SEQ ID NO: 576666 - DNA, 413 bp, Homo sapiens
tctattgccaaggctggagtgcagtggcacaaacacgactcactgcagcctcaacctcctgggcttatgcgattaccccacctcagcctctagggtagctgggaccataggcacaccatcaagcccagctaatttgtttttacatttttgtcgaaatgaggactttccatgttacccagaatgggctcaaactcctgagctgaagtgatcctcctgccttgacctcccaaagttctgggactgcaggagtgagccattgtgcttagcctatatagcatttttaatgtaaataaataaataaagtgatataatggaatatttaatttaggccaattttcacraaaagtattaagaaccttaagagtgagttttatccattgattacaaaaatggaaaaaaaactaagctgtctt

SEQ ID NO: 576667 - DNA, 600 bp, Homo sapiens
aaataaataaaaaagggcactctggcagctgtattcagaatagattgatcaaaaagttactggaaagcaatttggcaatatgtatcaagatcccttgcaaaggcataagaatgatacaatagactttggggactgagggaaagggtggaaggggggctgtgtatataggggactgtgtacactgcttgggtgatgggtggaccaaaatttcaggaatcaccgctaaagaacttattcatgtaaccaaacaccacctgttcccccaaaacctattgaaataaaaaaaagatacctaaaataattactatacatatagtagtatagaacaaaaactggtaaagtagaaaaagatttctattaatttcgatragaaatatgaacaatttcaaattgttattctattattattattattattattattattattattattatttttgaggtggagtctcgctctgtggcccaggctggagtgcagtggcgtgacctcggctcactgcaagctccgactcccgggttcatgccattctcctgcctcagcctctggagtagctgggactacaggcgcccgccaccacgccaggctaatttttttgc

SEQ ID NO: 576668 - DNA, 600 bp, Homo sapiens
aaataaataaaaaagggcactctggcagctgtattcagaatagattgatcaaaaagttactggaaagcaatttggcaatatgtatcaagatcccttgcaaaggcataagaatgatacaatagactttggggactgagggaaagggtggaaggggggctgtgtatataggggactgtgtacactgcttgggtgatgggtggaccaaaatttcaggaatcaccgctaaagaacttattcatgtaaccaaacaccacctgttcccccaaaacctattgaaataaaaaaaagatacctaaaataattactatacatatagtagtatagaacaaaaactggtaaagtagaaaaagatttctattaatttcgataagaaatatgaacaatttcaaattgttattctattatyattattattattattattattattattattatttttgaggtggagtctcgctctgtggcccaggctggagtgcagtggcgtgacctcggctcactgcaagctccgactcccgggttcatgccattctcctgcctcagcctctggagtagctgggactacaggcgcccgccaccacgccaggctaatttttttgc

SEQ ID NO: 576669 - DNA, 600 bp, Homo sapiens
aaataaataaaaaagggcactctggcagctgtattcagaatagattgatcaaaaagttactggaaagcaatttggcaatatgtatcaagatcccttgcaaaggcataagaatgatacaatagactttggggactgagggaaagggtggaaggggggctgtgtatataggggactgtgtacactgcttgggtgatgggtggaccaaaatttcaggaatcaccgctaaagaacttattcatgtaaccaaacaccacctgttcccccaaaacctattgaaataaaaaaaagatacctaaaataattactatacatatagtagtatagaacaaaaactggtaaagtagaaaaagatttctattaatttcgataagaaatatgaacaatttcaaattgttattctattattattattattattattattattattattattatttttgaggtggagtctcgctctgtggcccaggctggagtgcagtggcgtgayctcggctcactgcaagctccgactcccgggttcatgccattctcctgcctcagcctctggagtagctgggactacaggcgcccgccaccacgccaggctaatttttttgc

SEQ ID NO: 576670 - DNA, 573 bp, Homo sapiens
ctgtgtgtcgatgactgatggtcatcagtaatgtgacccagcacctccaccaggaggacagttctctctcagcagaaatcagttgttttatattatttattctacggagattttattttcagtggaggacattgtgaaaatgcatgtcgatgtcttttataaaatgtgatttttaaaatttataacctacagatttggatgattatgttaggatttttactaacacaatactcacgtaggctataaagtcaaattatcttaactcaagaacatgttgattaggaaaattattttgaatggatttttgttgccagtccagtgtgtttaatgttcatttatgaatgcatctgcatttttatatctgatctataattgagtattttcattctaaatcagctgaattctgagcaatgacgactcaatttgctgaatgcttttgcaagcacaatccatatttttaaaagccaggaatggtatcctgataaattcaaaccagccagtctgctgtgttaatacrtaactaactctcagactctgtgatttgactgcagaataatacttggatttcaagca

SEQ ID NO: 576671 - DNA, 637 bp, Homo sapiens
ttttaaatacaaacgaaatggaggaaaacactgcatttgacagcatcgtttttcttcttaggactagctcctttacaagatttccactacaaagcagattttaatcctgmcaatccctcaagtggcattttctcaatattttatatgttgagggaaaaaaccagcactttaacagccatagcactgcagatgatggagttatgattcaaactcttggctgtctgactttggtcccttgtaaaattttagtgtatagcaggacaattaaaatcccattccaccagtctgcattctgcctcaaaaatcaatccaaacatttcagaacttacatttattcatgttaagactctatcttccccagatataaaaatgtatccaagttgatgatttgacagatttagggacagaatagttatatctagccacattagatggatagcaaaattagctgagacatttctattccatgttgctaaggagaatgagtcagcctcagtggaggaatcagattgtgaaggatgtgttttctcagtcagagcaggaaatgaaaacttacggaagattttctactcattcagagtattccttcagctcttaccttctgctttgtattacaagtgagaaataagtatgttta

SEQ ID NO: 576672 - DNA, 543 bp, Homo sapiens
ttatagatgtgtggtcttgtttctgagttctctattctgtttcattggtctatgtctctgtccctgtaccartaccatgctgttttagttactgtagacttgtagtatagtttgaagtcaggtagcatgatgcttccagctttgttctttttgcttagtattgtcttggctatataggctcttttttggcttcctttgaattttaaagtagtttttttctaattctgtgaagaatgggattaggatttggtgttctatccttccttttttctaacaccattgctggtgctataattcaggctctctggatttctattttgattctaaaataattttctaattagactgttttcatctcactttaatgtctcattaatctacttttcattcaggacctaaattctcctaaagggcaaatcaaatccagccaaacagccattgcaattgaaatgaaaaaatgactgttcttcctgtgttggaaggagacaggacagggaagattctcagagcaacccactcaagtagtatggtggttgtttattc

SEQ ID NO: 576673 - DNA, 561 bp, Homo sapiens
catgtttgaacagagccaaaggctgaggttatattatttggaaaattcaataatatgctgaatggggagtcttgaagggtacaaagtkggggaggattagcaactaatttgtaggttggcaagactatttgagccaaaagagcaagataaatgaaaatctgttcagaagtatagtcaaatcagcaaccacagtaccagtttcaatattcatcttaaaatacatttctttttgcatcctcagctctttaagtgtgggtaatgatgttatttttattattacaatcacttctatttttaacatcattgaagtataatttacacaataaatgcatccattttacatataccatttgatgaattttgacaaatatgtacatctatgtacactttacccattttttatgaaccatatttccatcactcataaaattatctcatgctccttagcaggcatttggcagagctatgtattccctttggaaatagctttacaagctttaaataatgccatatacaagagaaaatattttaatttaaatgaaataaaattagtctttttta

SEQ ID NO: 576674 - DNA, 561 bp, Homo sapiens
catgtttgaacagagccaaaggctgaggttatattatttggaaaattcaataatatgctgaatggggagtcttgaagggtacaaagtgggggaggattagcaactaatttgtaggttggcaagactatttgagccaaaagagcaagatraatgaaaatctgttcagaagtatagtcaaatcagcaaccacagtaccagtttcaatattcatcttaaaatacatttctttttgcatcctcagctctttaagtgtgggtaatgatgttatttttattattacaatcacttctatttttaacatcattgaagtataatttacacaataaatgcatccattttacatataccatttgatgaattttgacaaatatgtacatctatgtacactttacccattttttatgaaccatatttccatcactcataaaattatctcatgctccttagcaggcatttggcagagctatgtattccctttggaaatagctttacaagctttaaataatgccatatacaagagaaaatattttaatttaaatgaaataaaattagtctttttta

SEQ ID NO: 576675 - DNA, 561 bp, Homo sapiens
catgtttgaacagagccaaaggctgaggttatattatttggaaaattcaataatatgctgaatggggagtcttgaagggtacaaagtgggggaggattagcaactaatttgtaggttggcaagactatttgagccaaaagagcaagataaatgaaaatctgttcagaagtatagtcaaatcagcaaccacagtaccagtttcaatattcatcttaaaatacatttctttttgcatcctcagctctttaagtgtgggtaatgatgttatttttattattacaatcactwctatttttaacatcattgaagtataatttacacaataaatgcatccattttacatataccatttgatgaattttgacaaatatgtacatctatgtacactttacccattttttatgaaccatatttccatcactcataaaattatctcatgctccttagcaggcatttggcagagctatgtattccctttggaaatagctttacaagctttaaataatgccatatacaagagaaaatattttaatttaaatgaaataaaattagtctttttta

SEQ ID NO: 576676 - DNA, 561 bp, Homo sapiens
catgtttgaacagagccaaaggctgaggttatattatttggaaaattcaataatatgctgaatggggagtcttgaagggtacaaagtgggggaggattagcaactaatttgtaggttggcaagactatttgagccaaaagagcaagataaatgaaaatctgttcagaagtatagtcaaatcagcaaccacagtaccagtttcaatattcatcttaaaatacatttctttttgcatcctcagctctttaagtgtgggtaatgatgttatttttattattacaatcacttctatttttaacatcattgaagtataatttacacaataaatgcatccattttacatataycatttgatgaattttgacaaatatgtacatctatgtacactttacccattttttatgaaccatatttccatcactcataaaattatctcatgctccttagcaggcatttggcagagctatgtattccctttggaaatagctttacaagctttaaataatgccatatacaagagaaaatattttaatttaaatgaaataaaattagtctttttta

SEQ ID NO: 576677 - DNA, 543 bp, Homo sapiens
ttatagatgtgtggtcttgtttctgagttctctattctgtttcattggtctatgtctctgtccctgtaccaataccatgctgttttagttactgtagacttgtagtatagtttgaagtcaggtagcatgatgcttccagctttgttctttttgcttagtattgtcttggctatataggctcttttttggcttcctttgaattttaaagyagtttttttctaattctgtgaagaatgggattaggatttggtgttctatccttccttttttctaacaccattgctggtgctataattcaggctctctggatttctattttgattctaaaataattttctaattagactgttttcatctcactttaatgtctcattaatctacttttcattcaggacctaaattctcctaaagggcaaatcaaatccagccaaacagccattgcaattgaaatgaaaaaatgactgttcttcctgtgttggaaggagacaggacagggaagattctcagagcaacccactcaagtagtatggtggttgtttattc

SEQ ID NO: 576678 - DNA, 543 bp, Homo sapiens
ttatagatgtgtggtcttgtttctgagttctctattctgtttcattggtctatgtctctgtccctgtaccaataccatgctgttttagttactgtagacttgtagtatagtttgaagtcaggtagcatgatgcttccagctttgttctttttgcttagtattgtcttggctatataggctcttttttggcttcctttgaattttaaagtagtttttttctaattctgtgaagaatgggattaggatttggtgttctatccttccttttttctaacaccattgctggtgctataattcaggctctctggatttctattttgattctaaaataattttctaattagmctgttttcatctcactttaatgtctcattaatctacttttcattcaggacctaaattctcctaaagggcaaatcaaatccagccaaacagccattgcaattgaaatgaaaaaatgactgttcttcctgtgttggaaggagacaggacagggaagattctcagagcaacccactcaagtagtatggtggttgtttattc

SEQ ID NO: 576679 - DNA, 543 bp, Homo sapiens
ttatagatgtgtggtcttgtttctgagttctctattctgtttcattggtctatgtctctgtccctgtaccaataccatgctgttttagttactgtagacttgtagtatagtttgaagtcaggtagcatgatgcttccagctttgttctttttgcttagtattgtcttggctatataggctcttttttggcttcctttgaattttaaagtagtttttttctaattctgtgaagaatgggattaggatttggtgttctatccttccttttttctaacaccattgctggtgctataattcaggctctctggatttctattttgattctaaaataattttctaattagactgttttcatctcactttaatgtctcattaatctacttttcattcaggacctaaattctcctaaagggcaaatcaaatccagccaaacagccattgcaattgaaatgaaaraatgactgttcttcctgtgttggaaggagacaggacagggaagattctcagagcaacccactcaagtagtatggtggttgtttattc

SEQ ID NO: 576680 - DNA, 370 bp, Homo sapiens
tctattttataatgagcttccaaaaattgtatccaatttactccttctcatatttactttcttagggaaaaattatattttatcatgtcagcaatttactccccatatgaggtaactgctctgttcatcgtgacatcatcattccacagttaaagaccactaaaggcttaaagattcactgaatgcttccagttttcttcagaaaggaatattctgattcccatacaattkttattgataaaggcaacaaaaaggactagcaatgacaggacgtatgcattcaaatctttttaattgaaatgttttccatgatatatcaacttcttaatgttgtaccctgctattctgattattgtatagcattttaaaa

SEQ ID NO: 576681 - DNA, 523 bp, Homo sapiens
ccttgcttcccctgtccttacagactcctaggcagcaaagctgtaaattggaggggaacacggaagatcctgaggcacagatgggcaacactctagctagtcagtcatccaaaaagttctagagatcatggagtgaaaaataccttcactggacatcaattggaaaaacatccagcctatttagtccctgggcacaagaactggacagtatttggacattagagtattrcataaggaaataatcagaaatgcaggcaaagaattatgtaccaagatgttcacagaagcagtatttaaaattgctgaacaagcaaaaaaaaaaaaaaaaaaacaattggactgaaagcaaacaaccccacataggatatacttaaataagatagactattaaacagacattaaatgtcatgttttcagaacatatttaattaaataaaaaatacacaatacaatataaagttaaaaaacatacacagatatatatatacgtatatatacatatacacacacagagagagagcgg

SEQ ID NO: 576682 - DNA, 588 bp, Homo sapiens
agtaggctggatgcagcggctcttgcctgtaatcccagcactttgtgaggccgaggcaggtggatcatcttgaggccaggagttcgagaccagcctgaccaacatggtgaaaccctgtcttcactaaaaatacaaaaaattaggcaggcatggtggcgcatgcttgtaatccgagctacttgggagggtgaggcatgagaattgcctgagtctgggaggcggaggttgcagtgagctgagaacatgccactgtactccagcctgggcaacagagcaagactctatttcatatatatatatacacatacatatacacacacacatatatatgtatataatatcaaaaataaggtagaatgaaaacaagtagaaaatagaagaggaaagaaataaattagaggatcagtttaagatttatttaaatttaaaagatttaaatttaagaatattaattttatttttttaatgattttcttttctccagtttctctagttagagaaactcctcatagttagrttttggatctcctcatagttaggttttggcttatgaagtgaaagaaatcatcaaagaaattatacttttcc

SEQ ID NO: 576683 - DNA, 564 bp, Homo sapiens
atcttctgcatgttcccaaactttcccaagacttttggaggtatacgttaggaggaggagcaagttatttggtaatatccttaaccaccatttctcaaaatgagagccattctcacactactcacccgtgtaggccatgttcttagggttgccataaggagccccagsgtgcacggggctgtaaacagggttcattgtggaagactgaggatcctacagagaaaacaaagaaaacagcactgatattgattgttcattcttcctgacatcagcttctcctccataatcttcagttttccctgaaaggaaagcatcagggtgtagtggaaagaagactaaacaaaaaagccaatttgcttgtagttggccctatgttaaatactttccccatttgacagatgaagatagtaaggagcaaggaagtaatataacttgcctaatgtcaacctaggcattttggctctcagctcagtgttagtcccactatcccacagacagctctggcactagagtactatgtggcattggccatgtcacttcccctgtctggacttcaatgtcctg

SEQ ID NO: 576684 - DNA, 564 bp, Homo sapiens
atcttctgcatgttcccaaactttcccaagacttttggaggtatacgttaggaggaggagcaagttatttggtaatatccttaaccaccatttctcaaaatgagagccattctcacactactcacccgtgtaggccatgttcttagggttgccataaggagccccagcstgcacggggctgtaaacagggttcattgtggaagactgaggatcctacagagaaaacaaagaaaacagcactgatattgattgttcattcttcctgacatcagcttctcctccataatcttcagttttccctgaaaggaaagcatcagggtgtagtggaaagaagactaaacaaaaaagccaatttgcttgtagttggccctatgttaaatactttccccatttgacagatgaagatagtaaggagcaaggaagtaatataacttgcctaatgtcaacctaggcattttggctctcagctcagtgttagtcccactatcccacagacagctctggcactagagtactatgtggcattggccatgtcacttcccctgtctggacttcaatgtcctg

SEQ ID NO: 576685 - DNA, 597 bp, Homo sapiens
gcaagcaaaccaaaatacaagcatgagagtcccagaaagaggagagaaagaaaattaggtgggaaaaatgggaatactatgccattaaaaaaataaaacaaaaaacaaaatcatgttctctgcagcaacatggatgcagctggaggtcattatcctaagcaaattaacccaggaacacaaaactaaataccacagattctcacttataagtgggagataaacattgagtacacatagacacaatgatgagaacaatagacactaggacttacttgggcagggagggttgaaggagggtgaaagtcaaaaaaaagtcaggtactatgctcgctacctgggtgatgaaatcatttgtacaccaaatcccagtgacacscaatttacccacgtaacaaatctgcatatgttacccctaaacctaaaataaaagtcaagggggaagaaaaagaaattataccacaaattgaaaaaaaaagaagatataatgtccaaaaacttcccaaatttgattaagacaacaacaacaacacatattaaactacacatccaagaaatacaatcaacttcaagttggataaacacaaaaagatccataac

SEQ ID NO: 576686 - DNA, 539 bp, Homo sapiens
aataattgagacaattcattgctagcaacctgcctttcaaaaaatactaaagaaatactaaatatttatgactgaaaggaagtgatactagacagtaattcaagtccacacacaaaaataaagagcaccaggaaagctgatatgtagatagatagatagatagatagatagatagatagatagatagatagataaaacaaggtataaatatttttcgtgttaactggcttaaaagacaattgcataaaacaactataaaactgaattgttggccttatgatatataaagataccatttacataaaaacaagagtccaaagtaaggaagtatgggaatgctgcyatattggagcaacatttctacattttactgaattacattagtttgcatctgaactagactgaaataaatgcaataagttataataaattaagatgcatatttaatccccaaagcaaccagtgagaaaataaattttaaaatgttaaatatcgacaatatcaataaaaaggaacaaactactgatacatgtcacaac

SEQ ID NO: 576687 - DNA, 540 bp, Homo sapiens
gtccttctagcaggctgaatttaactagaaaaatgcatactctatctgacamaactacacacctagaaattgtgctattatcataagagtccccattttctaaaaaggccaaatatcctaagggaagcatcatggccagttttaaagtcagctcattgtagtaaatgtacgctagtctgaagggttgtgaagcttgttctttccccttctctatttagcccatcctttgaaagtccactgttttgtaatggagtaattccctcaggtttatttactctatacttagctggaatccagggccacaatgaagctcctgaaatcttgtttttgtcctgctgggaccatagactggcctgtccctagttccctgtgtccaggaactagggattttctgagaacaatcttggcacacacttacaggttaccagtgttgttccattattgaattggagactgattcatatagattattcttcacacagtcagatcgtatttgattcatttgaaaaagaattgtgaagactttctgttttatttttg

SEQ ID NO: 576688 - DNA, 581 bp, Homo sapiens
ataatttcattgtgtcaattttgccaaattatcttgcattttgttattctatraactcataatgggataaggagtataggctttgattcagaacatatgtgatgttgctataaatgcttcatggaaaaccctaaatatattttgaagcctacatagtcaaaagtcaccattggaagacttttttactttactattgtatttatgctcgttagcactcattcttgtttgaaacgtctcaaatgcataattttattattttatttgttgtctccagattggtctgaggactccgctttcttcactgcccattcatcttcatactgttctcatatttttttttaaattgggatatgcaatgatccttagtttataaattcaactccactttgccacacacagtgttacgcttggggaaacaattagaacttgcccttcttggccaggcgcggtggctcccgcctgtgatcccagcactttgggaggccaaggtgggcagatcacgaggtcaagagatggagaccatcctggccaacatggtgaaaccccgtctctactaaaaatacaaaaattagctgggcatg

SEQ ID NO: 576689 - DNA, 583 bp, Homo sapiens
tgatctgtttgtttgcccactaaatattggttgagcacataaaaggtgggtgccaggtattcagatgtgaatataatatgactctgaatttaaggagcatacaatccagttgaggagacagatattgcatacataataatacagttatgcagctcccttacaaaggtctgagctaaatgccctaacaccataaaaagagaagtgcctacctccacctaggatggaatggggaaggcttcaatgagaaagtgacctttgagctgaatcttgaagggtgttaggcagacaaaaagggagtagtattccaggcagaaagaaggaaatttgtaaagacagaggtgtggaaaaggtagatcattttcagagagtttggtatgactggaatccaggggaatttagaggtgagaaggaatgtggctgaaaagataggctgggaccacctcattacagctctatgttccatgttgaggcayttagattttattctaatggtcatgctacaaactaacttgtgtcccctagcctgcagtgtgatagtatttggagataggcctttgggtggtaattaggattagatgaattc

SEQ ID NO: 576690 - DNA, 557 bp, Homo sapiens
tgctaatgcaatatctaatgctagacactttcacaatttaacccatgttaatgcttctggtctcaaacgcagatacagcattacctggaaagaagctaaagctattatccagtgatgcccaacttgccaaatggtacattcctcatcttttacaggaggagttaacccttgaggattggaatctaactctctttggcaaatggatgtcacacatgttccctcatttgggagactagcttatgtacatgtatgtgtggacaccttttctcactttgtctgggctacatgccaaacaggagagtcttatgcctgtggtaaacrtcaccttttgcagtgttttgtggtgatggacattccagcttctattaaaacagataatgccccaggctatactagccaagctctagctacgtttttctctatgtggaatattaaacacattactggtatcccatacaattctcaaggacaagccatagtggaaagaatgaatctctccctaaaacagcagttgcaaaagcagaaagggggagacagaatatggaaccccacagatg

SEQ ID NO: 576691 - DNA, 625 bp, Homo sapiens
ttttctcttttgttaggtgaactggcattatcaatacctgatatattcacagttgattcgatccttttatttttcttatttatttattttttgtttgtggcaggtgggtgaattgtgattaaatcttgttctgttgctcaacctggagtgacaggatcttggttcactgcaacctctgcatctcaggttcaagcaattctcctgcatcagccaactgagtagctgggaccacagtcacccaccagtccaaatggcagtattttttttattattttttaacatttttagtacacacgggtttcctcatgttgcctaggctggtctcaaactcctcactttgaaagaaatacattacatacataaggcaatgcatactgagtttttaaattataaaactgttttgttcattaataatactttactttgaaagtatattttcatttggaaaaaaattagcacrtgatttttttgcttgcttttgatcaactagttgaacatttggtagccatcagatatatatttaaaaccctttatgtccatgtccttcacccactttttgatggggttgtttgtttttttcttgtaaatttgtttgagttcattgtagattctggatattagccct

SEQ ID NO: 576692 - DNA, 390 bp, Homo sapiens
acttgctaatgctatagaattttagcacttgctaatgctatagaattttagcacttgctaatgctgtagaattttagcacttgctaatgctgtagaattgaagcagtactgagcacctcctttcaatatagcaatgttgaaagcatcaggagtttccaaggtgattatgattatttacctgactccttagagagtatgatctaatgaatgcaaaaatacytgctgaagctggagttcaccatctgcattgctttacactatattctaataggagaataacagctattggtgaaaacttaaagccctttagatcctctaaaggtggtctagtagcctagatatttttgaagtgataaacagaggaaaaaaattgtaggtattgatttgatt

SEQ ID NO: 576693 - DNA, 471 bp, Homo sapiens
aaggacaaagacaatccaacatcagagcaattggtgtcttttaaaaccatttaaagatatactagctgacatttctcctgaaatgaatctatagatcatagggcatgcatagctataaaaaaagacttaagtatatgttgatactaagccacagcttagaaaataattgtttgacatatgtaaattgaaaagtgagttgcttataaggaggaaatatcagggtggctttacacatctttctgctatcatgccatacaagaaaacaacagtgcaacactgtattagtacattttcacactgctataaagaaccacctgagactaatttctaaagaaaaaaggtttaattggctcacagttccacatggctagggtggcctcaggaaacttacaataatagcrgaaggtgaaagggaagcaaggcacatcttacatggaggcaggagagagggagaacaaggggagaagtgcc

SEQ ID NO: 576694 - DNA, 394 bp, Homo sapiens
gataaagggatgttgactttatctrtctttcccagaactagaagtttatcatttacattttcattttacttatggtatcttcctctgtacaaactttgttgttgttttgaggaagttgaatattttattatttgtatcttattttgctgcaaggctatttattcactgtataaaaatggcaccagcaaatgcagtatgttgcaaaattaagattggattgttttccatctgacattgtacaactaactcccaattatctccagtggaaaggtcattcagtattttgatccaaatctatggatggatgtcagcaagttataatataatataaggcttaagataataatgttatccttgaattacataatttctataactagttttcaccaccaat

SEQ ID NO: 576695 - DNA, 435 bp, Homo sapiens
taagtcgggtcatgccatttcttagaacctcatttcatccagagtgaaagccaaagtttcttcaatgacttacacagccttttataatcttaccttcaatatcccatacctcctctgctactaccctttgtgtcactcattccacttccatcatttgatcacttgctagttcttgtcrgttcttgccttatctttcttataccctctctttttttttctatagtatttttactttcatttgctctgtaaatgtcaagagagaagattctttgttttgcttatgtatccctagcacctagttctgtgctggacacacagtaggcttgcactaagcatttataaaatggatgaataagttaacctattttgagaacacatgttatgtaatttatatctaagccagtgtgatagagacaagaaagcaaataagcctgg

SEQ ID NO: 576696 - DNA, 435 bp, Homo sapiens
taagtcgggtcatgccatttcttagaacctcatttcatccagagtgaaagccaaagtttcttcaatgacttacacagccttttataatcttaccttcaatatcccatacctcctctgctactaccctttgtgtcactcattccacttccatcatttgatcacttgctagttcttgtcggytcttgccttatctttcttataccctctctttttttttctatagtatttttactttcatttgctctgtaaatgtcaagagagaagattctttgttttgcttatgtatccctagcacctagttctgtgctggacacacagtaggcttgcactaagcatttataaaatggatgaataagttaacctattttgagaacacatgttatgtaatttatatctaagccagtgtgatagagacaagaaagcaaataagcctgg

SEQ ID NO: 576697 - DNA, 390 bp, Homo sapiens
ttaaaaacaaaacagctttattgtcctagaattaaatcctattcaataaccaagttgcttgatttgatatctcaaagtccccttgttcttcatgaatgccaaaagatagatagcatgaaaacaaagaaacacctactgcaaaaacccatttcatctagtcttgggtttatttcagagttttgcaaactcactaccatcctgcaaggtagcatyttcctgaacaaacttcggcccaccggaaacatccatcctccttttcggcatttccccgtattctgttgtatcagtaacatccggggctcagaagaaaggttgtggtttagagttacaatgaattggaaaaaaaaaaaaaacacttttaagataaattttaaaatatgggaaatgatt

SEQ ID NO: 576698 - DNA, 613 bp, Homo sapiens
ctgggcgacagagtgagactctgtctcaaaaaaaaaaaaaaaaaaaggaagtcaaaatacctaaaaatatacattttttgtattctaaaactatacattttttatattggctatagccatgtttgagttttatttgtgatgtgactacattggaaagcagtattttcagaaactgtaagtgctctttggcgtgatcaaaacatttatatgtttgtaggtgcaagtttttrttttagttcttcttagataagcaattattcctttggtaacaagaagctatacaagatactgccttcaagggatttcttaccctgacatgagatcttagtccagcggaaactactggcatcttatacactaaattggtatgttttcattaattaatgaaaaagccatcttaaaggaatgaaataaaataaaaccctggggcagggaaaaatattagagaaactaccactcttttggaacctgaacatttgaatctatcatcttcatttgatagggtcctaaagtggtactgggtcaaagcaggctgttaggaatggaggcttttagaggaagaaaggtagcattaaccaaacgtttgttgagtactatttttaagaatcatctc

SEQ ID NO: 576699 - DNA, 606 bp, Homo sapiens
atagcaatgcaagaatgaactaatacagaaaattgrtgctgggaggtggggcattgctataaatatacctgaaaatgtagaagcaactttggggttaatgggcagaggttggaagagtgtggagggctcagaagaggacagaaagatgaggaagtttggaacttcctatatacttgttacgttgttgtgaccaaaatcctgatactgatatcatcaatgaagtctaagctgaggaggtctcagatggaaatgaggaacttattgggaacttgagtaaatgtcacttttgtgatgcgttagcagagtttggagtcattatgtccctgctctagagatctggaaatttgaacttgagaatgatgatttatggtatctgatgaaagaaatttcaaagtagcaaaacattcaagatgtttcctggctgcttctagtaggctatccttatgagcaaagagatcacatggaactggaacatgtatttaaaagggaaacagagcataaaagtttggaaaatttgcagcctgactgtggtagaaatgaaaaactgattttcttggggggagttcaagctggctgcaaaaatttgcataagtaaagagaaaccca

SEQ ID NO: 576700 - DNA, 523 bp, Homo sapiens
tctgtgtgtgtatatatgtatacacgtatatatgtatatacaaatatgtatacagacatacacacaaatctataaaatcaaacattgaaacatgtatatacatgtatatatacagacacwcacagaagtatgtatatatatgtgtgtagatagatacagacacacacagaaatatatataggttgatttcacatctttgctattgtgaatagtgctcttataaatatacaaatgtactttttttgatataatggtttcttttctattgggtagttactcagcagtggcattgctaggtcaattagttctttaagaaaattccatgctgtttttgatagaggttgtactaatttacattttcaccaaccacaatgagatactatcttacaccagaccgatgttgtaaaaagtttttctttgtgtaatttttatttgatttcatgggaaagattgatccaaataaccagaaatagaaatgcactagtatcttaggaatattttcactgggtctgtgaggttactc

SEQ ID NO: 576701 - DNA, 523 bp, Homo sapiens
tctgtgtgtgtatatatgtatacacgtatatatgtatatacaaatatgtatacagacatacacacaaatctataaaatcaaacattgaaacatgtatatacatgtatatatacagacactcacagaagtatgtatatatatgtgtgtagatagatacagacacacacagaaatatatataggttgatttcacatctttgctattgtgaatagtgctcttataaatatacaaatgtactttttttgatataatggtttcttttctattgggtagttactcagcagtggcattgctaggtcaattagttctttaagaaaattccatgctgtttttgatagaggttgtactaatttacattttcaccaaccacaatgagatactatcttacaccasaccgatgttgtaaaaagtttttctttgtgtaatttttatttgatttcatgggaaagattgatccaaataaccagaaatagaaatgcactagtatcttaggaatattttcactgggtctgtgaggttactc

SEQ ID NO: 576702 - DNA, 403 bp, Homo sapiens
tctacctggatagcctatgggcctcccactcatcttgcctctaacagggaccccttccaaacctgttcctgatctcagagaatgccactgctcagaacccacatcacccaagtcagggcagctggtctcatcttgacccgtctcctctttcaccccmacatgcaattcaacttttccaattaattattggggccgttcctcttaatacacctcctcccaacttaattatattatccactctgccctgattataaaaagagccttccaacttacctccctgcctccaaacctagtctattccaaaccaccttccacaccactgccatctaaacagcaaaactggacacctggggctcctgctgagcaagttaggagtgattcccatagctttccagataaagtg

SEQ ID NO: 576703 - DNA, 608 bp, Homo sapiens
ccattattaaaaagtcaaaaaacatgttggtgaggatgcaaagaaaaaggaacacttaaacacttgttagtgggaatttaaattagtacaacttttttgaaaatcagtatggtgatttctcaaataactaaaaatataaccactattcaattcagcaatgccactactggataactacccaaagggaaagaaattatatcaagaagacatctgcacttaaatgtttattgcagcactgtttataatatcaaagtcatggaatcaatctaagtgtccgtcaatggataattggataaagaaaatgtggtacgtacacacaatggaatactattcagtcataaaaaataatgaaatcatgtgttttgcagcaacatggatagagctgaaggccattattctaagtgaaacagcttagaaatggaaagtcaaaaaccatgtgttctcacttattagtgrgagctaaacaatgggtacatatggacatatagagtggaccattagccattggagattccaaaaggcagtagtgtggaaaggggtgaaggatgaaatattacctattgggtacaatgtatactgctcagatggtgggtacactaaaagcccag

SEQ ID NO: 576704 - DNA, 594 bp, Homo sapiens
gagtctcactttgtctcccaggctggagtgcagtggcgtgatctcggctcactgcaagctctgcctcctgggttcacaccattctcctgcctcagcctcccgagtagctgggactacaggcagccaccaccacacctggctaattttttttctactttttttcagtagagatgggttttcactgtgttagccaggatggtctcgatctcctgacctcgtgatccacccacctcagcctcccaaagcgttgggattacaggtgtgagccaccgcgcccggccaattatctctatttctttcaggttcagtttttctgatactgtatcttggctattctcttaaatgttatagacttttcttgattatccattgctccttgatttcacattaatgtttagaagtgaatacacagaaaattgattttgagctttgatatgaggatgggctttttttttttttttttggcttgcagacttacattagtaagctaaaaaaagagccagtttttatacttcaagatatctaaagactraaatgcaggggactttgattcaaacaatagcaaattctacactgctgctttagtttcccaca

SEQ ID NO: 576705 - DNA, 509 bp, Homo sapiens
tccaataacactgctctgctcagaaagcaagaggcctaatcataatctactctccggtagcctccagcaggtgaaatgtgttcaacagtccccagccttcaggagggcaattcagtgtgcacgtagatacagccaatagcatctgttatctgttccatcaaacttgcccaaggggtggtgttcaggaactcaaaccacgtttttcccctgctctcacgtcgacagcataacaatcaacacagaagacttctgtgaccccaaaacatgtgaagatttctccccactagcaaacaaggaatccattctgcagcagacaacagctcggtgtcctccaattcgattccggctttatctgcttgcagacagcgtcagatccccacaagtagagggctcaatcatgaaaactggcccctgcttcagccaccagccacaagcccaggccctcagaaatttgactgaccagctttaagttggggtttccrtgacccacctctttgggctcaattaat

SEQ ID NO: 576706 - DNA, 553 bp, Homo sapiens
catagacaaaagaggagaaggcaacatgaccatagaggccaagcttgaaagatgtggccacaagccaaagaatgcagatagccaccagaagctggaggaggcaagaaacaaattctcccttagagcttcatgaaggagtatggctgtgttgacaccttggttttgtcccagtgatctgatttcagactctggcctccacaacaatgagagaatacattcctatgtttttaagtcaccaagtttgtgacctaaaaaaatcattttaagttacatttgttacagcagccatagggaactaatacaaagggcttatgaactgctcttcaattccatgtttaaagtaatcatctgcaatacattcttaaaatgcaccaagttttgtgttagtccrtaaggaaggcagagaagaaataaaggacgtggtttcttccctcaagggctttatggcctcaatggggagacaaggttcatgagacaagggcaggtgacacagggaagtgtatcattaaatgctacattacttttataggctcataagagctgatgaggttca

SEQ ID NO: 576707 - DNA, 362 bp, Homo sapiens
gcctgtaatcccagctactggggaggctgaggcaggagaatcacttgaacccagaggcagaggtggcagtgaaccaagatcatgccactgcactccagcctgggtgacagaatgagaccctgtctcaaaaaaaaaaaaaaaaaaaaaaaaaaagaggcmgaggttgcagtgaaccaagatcatgctactgcactcccgcctgggtgacagaatgagagcctgtctcaaaaaaaaaaaaaaaaaaaagaaaagaaaagaaaagaaaaaggaaaagaaatatacatttttaaaaaccaaagtaaaaaattaaaatctccttttctatatcatccacttaaaaattagcatagtgtgctatgatg

SEQ ID NO: 576708 - DNA, 657 bp, Homo sapiens
aacaaaattcaaagccttaaaatgcttaattttaagagcaggtaatagttacatttgtagtgcaacrtactaaattgtgtctttagaggcactgattatatattcttaaaagtagataacaactgacaatcatatggcactttatttcttataaagcaactttatttaaattattccatttcattttctctgtcattctgtgaggttattactactgtgacccaaataaattgtatcaatttgactccctctgcattaccataatcattcccttttctccatcttcaatgctgttgtgttagttcatgaatttttgatctctcacctagactagaacaatagtctatgagttatttttctgcccacggtttcataacattccatttcatcttccaattgatgccaaataatctttctaatctatctggaaaaatatttaaaggaccacaagtttcttttttccatcttctcctttatcccatcttcagactttaaaacccatatttccttcactccaggcttaaggagtaatttacggataataagcatggtgtgctaagccattcttgtgttgctataaagaaatacctgagactgggtaatttataaggaaaagaggcttaactggctcatggttctgcaggctgcacaggaagc

SEQ ID NO: 576709 - DNA, 657 bp, Homo sapiens
aacaaaattcaaagccttaaaatgcttaattttaagagcaggtaatagttacatttgtagtgcaacatactaaattgtgtctttagaggcactgattatatattcttaaaagtagataacaactgacaatcatatggcactttatttcttataaagcaactttatttaaattattycatttcattttctctgtcattctgtgaggttattactactgtgacccaaataaattgtatcaatttgactccctctgcattaccataatcattcccttttctccatcttcaatgctgttgtgttagttcatgaatttttgatctctcacctagactagaacaatagtctatgagttatttttctgcccacggtttcataacattccatttcatcttccaattgatgccaaataatctttctaatctatctggaaaaatatttaaaggaccacaagtttcttttttccatcttctcctttatcccatcttcagactttaaaacccatatttccttcactccaggcttaaggagtaatttacggataataagcatggtgtgctaagccattcttgtgttgctataaagaaatacctgagactgggtaatttataaggaaaagaggcttaactggctcatggttctgcaggctgcacaggaagc

SEQ ID NO: 576710 - DNA, 627 bp, Homo sapiens
attgttcatagaaaagatttatattttccttcctttggtaattaatatatagcacaatctaatgactgyagtagaatattccccaaccttccctatgctgatattgatattagcatagctggtttataacatatctgaaaaataagctgatctttatttcaactgtttctctgtccatagggaggagccattgcccttcaggacgagaagaaaacatggttatagagaaagctgtctctttgtttctatttccatctagtatcaggcctttatggctctggatcaaaatacattctagaaaacatgggtgttttacctatctttgtgttattacaaacactgttcatcataagcaactgtacaaagcagttccttttcagtggagatgcctctgtctctaacataatgtgtggtacagtaatataactatttcagaaataaaagaaccaaattaaattacatggcttttgtatgtttgttggttttttaaaaaactgaataaaaatgttcactggaaaaccataggccaaattgtctttaactctttctcaattttcagatacttcttcaactctataaatatgtaagcattaaatatgtttagataaactttgttaaagcatttaa

SEQ ID NO: 576711 - DNA, 599 bp, Homo sapiens
tagaacttatatttaaaatggaagcaaagcataaaagtttagaaaatttgcagcccaaccatgcagtagaaaggaaaaactcattttctgaggaggaattcaaggctgcagaaatttgcataagtaaagaagaacagctgaatgttaatagccaagacaatagggaaaatgcctccagagtatttcagagacatttgtgacagtccctcccatcacaggcctggaggcccaggagggaaaaatgttttcatgggctgggcccagkcccttctgctctgtgcagcctcaaggcatggcaccctgcatcccagctgctccagctgtggatgaaaggggccaaggtacagcttgggccgttgcttcagcagatgctagccccaggccttggtggcttcaatgtggtgttgggtccatgagtgcacagaaggcaagagttgaggtttggaagcctccacctagatttcagaggatatatgaaaacgcctgaatgctcaagcaaaagtctgctgcagggattgggctctcatggagaatatctactagggcagtgtggagggaaaatgtagggttgagccctcacagtgtcctcactgtgacac

SEQ ID NO: 576712 - DNA, 599 bp, Homo sapiens
tagaacttatatttaaaatggaagcaaagcataaaagtttagaaaatttgcagcccaaccatgcagtagaaaggaaaaactcattttctgaggaggaattcaaggctgcagaaatttgcataagtaaagaagaacagctgaatgttaatagccaagacaatagggaaaatgcctccagagtatttcagagacatttgtgacagtccctcccatcacaggcctggaggcccaggagggaaaaatgttttcatgggctgggcccaggsccttctgctctgtgcagcctcaaggcatggcaccctgcatcccagctgctccagctgtggatgaaaggggccaaggtacagcttgggccgttgcttcagcagatgctagccccaggccttggtggcttcaatgtggtgttgggtccatgagtgcacagaaggcaagagttgaggtttggaagcctccacctagatttcagaggatatatgaaaacgcctgaatgctcaagcaaaagtctgctgcagggattgggctctcatggagaatatctactagggcagtgtggagggaaaatgtagggttgagccctcacagtgtcctcactgtgacac

SEQ ID NO: 576713 - DNA, 599 bp, Homo sapiens
tagaacttatatttaaaatggaagcaaagcataaaagtttagaaaatttgcagcccaaccatgcagtagaaaggaaaaactcattttctgaggaggaattcaaggctgcagaaatttgcataagtaaagaagaacagctgaatgttaatagccaagacaatagggaaaatgcctccagagtatttcagagacatttgtgacagtccctcccatcacaggcctggaggcccaggagggaaaaatgttttcatgggctgggcccaggcccttctgctctgtgcagcctcaaggyatggcaccctgcatcccagctgctccagctgtggatgaaaggggccaaggtacagcttgggccgttgcttcagcagatgctagccccaggccttggtggcttcaatgtggtgttgggtccatgagtgcacagaaggcaagagttgaggtttggaagcctccacctagatttcagaggatatatgaaaacgcctgaatgctcaagcaaaagtctgctgcagggattgggctctcatggagaatatctactagggcagtgtggagggaaaatgtagggttgagccctcacagtgtcctcactgtgacac

SEQ ID NO: 576714 - DNA, 599 bp, Homo sapiens
tagaacttatatttaaaatggaagcaaagcataaaagtttagaaaatttgcagcccaaccatgcagtagaaaggaaaaactcattttctgaggaggaattcaaggctgcagaaatttgcataagtaaagaagaacagctgaatgttaatagccaagacaatagggaaaatgcctccagagtatttcagagacatttgtgacagtccctcccatcacaggcctggaggcccaggagggaaaaatgttttcatgggctgggcccaggcccttctgctctgtgcagcctcaaggcatggcaccctgcatcccagctgctccagctgtggatgaaaggggccaaggtacagcttgggccgttgcttcagcagatgctagccccaggccttggtggcttcaatgtggtrttgggtccatgagtgcacagaaggcaagagttgaggtttggaagcctccacctagatttcagaggatatatgaaaacgcctgaatgctcaagcaaaagtctgctgcagggattgggctctcatggagaatatctactagggcagtgtggagggaaaatgtagggttgagccctcacagtgtcctcactgtgacac

SEQ ID NO: 576715 - DNA, 482 bp, Homo sapiens
taactactgtatatattttttctgagaattgaatgattcaatatacagtgttaaaagaatgaatagtgcctagcacatcataaatattcagtgggcattctctctggtaatctttttaataatctcaggctataggttggaaaactgagtaactgagaaggaaatgcatcattatcaataataatgaaagagcacagcacatgaaaaccrtaatatttgtctcctttttaacactgtgcgagttgccttatattttatctcattcaatccacacaacacattagaggtagacattattatcatcatttaagaaatcagaacattggaactcagagtcttcagcctacatccaaaccccatgcctgtgcctacccaaatccaatatccaagatatccaagccacatagataactgagtcctattagccacatagataactgagtcctattaaaaactgaactcattatcctcccctatattgg

SEQ ID NO: 576716 - DNA, 585 bp, Homo sapiens
ggccttacagcttctattcatttttagttaaaacttgtaatggaggttattggatggtggctcaattaataaaatgcagtactttgttatttgacttatgtcctctgcctgtctctggagaactgtggtagccagcctccccagacagtccccagtgagcctctgctcctggtaytcatacccttttttagtcccctctcacccgtaccagggttgatctgtgtgatcaaaaaactatggcagaagtgctggtgtgtcacttctgaggctgggactctgcagcctccatcttggctgctctttctcttggatcaccctcttgccacatcctgagaagcctcctggagaggcctctgggattccattctcagaacgtacccttcattgtctttatatgaatcattgcttgacattcccttgctcctttttattttattttattgttttagagacaaggtctcaccctgtcacccaggctgaagtactgtggtaggatcctagctcactgcagcctaggacttctgggcttaacagatcctccagcctcagccttccaagtagctaggactacaggcatgtgccacc

SEQ ID NO: 576717 - DNA, 557 bp, Homo sapiens
ctacaaaacaactataaaagaagtaccaaaattgcagtagtatgtctttacttattaataattatgttgaatgtaaacagattaaaatctccaataagagacggagtgactgaatgaatttaaaaaacaagacccaactccatgctgcctgcytacaagagactcaaatcctctgtaaggacatacagagactgaaagggaaaacattcaatgcaaattgaaaaacaagagaaagcaggagtagctacctatacttatattagataaaacagactttaagccaaaaattgtaagaagaaacaagagtattatgtaatgataagggggccaataaagaggatataataattgtaaatatatatgcaccttacattggagcaaatattaatagacataaaaggatagactgtcatacaataacagtaaggaaattcagtactcactcactcccagaaacggaaacaactcaatggcaaaaatacaaataacataattttaaaatgggcaaaagacctgaataaacatttctcagaagacatacaaatggccaacaggta

SEQ ID NO: 576718 - DNA, 607 bp, Homo sapiens
ttttgacttatattaaagcaacatttatattaaagcaacatttataacatctgtttaaaaatcaatttaacatgtacatttataatatgtaaaattaaaaagaaagaatattaaatggaaaataaaatttctacactatggcttacttattactttaaaaataaaattagtatatgaaatttatatattcctcaattktattaaattttagagtgacctctagagtatccagtagataatgcagttagccctaaagaagcagtgaaataaacttctggaatgtttttaaatttaaaaagtaaatcaaggcagggtgcagtggctcacgcctgtaatcccagcactttgggaggccgaggcgggcggatcacaaggtcaggagatcgagaccatcctggctaacacggtgaaaccccgtctctactaaaagtacaaaaaattagccaggtgtggtggcgggcgcctgtagtcccagctactcgggaggctgaggcaggagaatgacctgaacccaggaggtggagcttgcagtgagccgaggtcgtgccactgcacttcagccttcaaaaaaaagtaaatcaatatattactgcgtaaaacaaattct

SEQ ID NO: 576719 - DNA, 562 bp, Homo sapiens
  misc_feature 1: n = A,T,C or G
naatgtaatcaaataggtaagttagaatcagtcattgcagaacctcaaatagaaggaaatgatatgaattgattcataggcaatagcaatcttccctcccaaaagcataaccaaaataatgacatgattgataacaacacgtcattagatttaccctttaatgattgttattttttcatcacagttttatggaaatttatctcaaagtttatgtaaagtattcttaaaacactaaaaattaaaacaaaaatattttaagaatgagttggttttgtggtacaaaaatttgtttgatataaactaacattgtttgcttagaatgtttataatattcatcacatttcttgctgattcacttttaaaattttatttttaaatatataatagatttacatatttgggggtacatacgataatttartatattcatataatttttaaatatcaaatctgtataatttggatatccatcaccttaaatatttatcttttctttacactagaaacattcaaattattctcttctagatattttgaaatttgcactagattactgttaact

SEQ ID NO: 576720 - DNA, 614 bp, Homo sapiens
tgggtgacaagagtgagactccatctcaaaaaaaaaaaaaaaagagtgaaagattttatagtgtgctcaaggttgcctttttctctttatttttttctctttattttttaaaaatgtaaattatacaattagtgtcaaatataacgtataaaatartattgctttttttttatcttaagactttctcatttataccttgggccagaaaaaaagcagatgagtgcaaatatatagacattgtaaattgaacaaaccattctaaggttgttacccttagttataacttttattacttgtttgcctctgttttgttttcagagttaagaaaatgtattttcatggtattttccagttgcaaactgacttcatgttaatgattacatgagtcttgtacaaaaaacaatttgatgcaggtggaaaggtagttattcttcatttttgtggatggggagcttaggccaccagagttagggccctggtgtttggaatgcaggttaatatcttataaacgaatgaagtgaaaacatattgaacttttgtgtccagtagtatggcagactagaggctctggctgattctcaaacccaaagcaatatatataaatatatataaaa

SEQ ID NO: 576721 - DNA, 521 bp, Homo sapiens
atgaggccagcatcatcctgataccaaagcctggcagagagagacacaacaaaaaaagagcattttagaccartattcctgatgaacatcgatgcaaaaatcctcaataaaatactggcaaactgaatccagcagctcatcaaaaagcttatccaccatgatcaagtcagcttcatccctgggatgcaaggcttgttcaacatacccaaatcaataaacataatccatcacataaacagaaccaatgacaaaaaccacatgattatctcaatagatgcagaaaaggcctttgacaaaattcaacagcccttcatgctaaaaactctcaataaaccaggtatcgatgtaacttatctcaaaataataggagctatttatgacaaacccacagccaatatcatactgaatgggcaaaaactggaagcattccctttgaaaactggcacaagacagggatgccctctctcaccactcctatttcaacatagtgttggtagttctggccagggcaatcaggcaag

SEQ ID NO: 576722 - DNA, 456 bp, Homo sapiens
acagacttaatacacaaagctctcaactcacaaaggtgaaaagataactgactgagtaggtcaacaagcaaaccatctcaacaagattaaatgaatgcaaaacagatgcactccaaatgcaaatgtgatgcgcagattatgttacctctggccatacgtgctaaagaagagggagagaactcaatgccccggaacaagaaagaagtccaggccaggttctgggcattaactagtcatgtggactctgaacactcacctcatccttcakggcctcaatttccacatctatgaaataaagggtctggccaagagacacataacagccttctacatgtaactggagaaattgtgtcatggataggtgagggagggtaattaatggaattgcctctagagagcgaatacttaacagaattgcctccagtttctccatggctttctaaagaggggtcaaga

SEQ ID NO: 576723 - DNA, 575 bp, Homo sapiens
acatccttatctctgggaacttacccttttctgaagttatagctaacttagtaaaagtataagagagttaacatgatatgacaaaatttaacatgttccactcaagaaaacagaaaacacatgcatctccctcagatgacaacagccaggccaactctgtgkctgtggtggcatctcctacctgacacgatcatcacagggcctctgatctcggtcaacttctgctgggtgaagttcccaatgaggcattatatcaaagtgctctttccaacttttggaggccccgtcaccactatcactattggtggcggctctagtggagtctgatcaaccactggaatatgatgcttttttgtcttcaaatcctgagtcctattcattaaaaaaaaaagtaaactcattttcaaaatagagtaaaaggtatcaaccttataagtagactttttttagtttacttatagatatgagtactttagtatattttatagagagtacaacagacaatataaaaatataattaacctgtcaattattaatttgttaactactggcccccatccaaataactgctgttc

SEQ ID NO: 576724 - DNA, 450 bp, Homo sapiens
attaagctcaacatgagagactttaaataatataaatacatgacacactttttactcaactttttgttgtagaaaagttatttttcaatgaaaaatttctgttaacaatactgttctcaaggaatattttctgttgttataacctgggtcatgggttactactgacatctagttggtagaggccatgaatactgctaaactctctgcaatgcacaagacagtcctcacaacaaagcattatctagcacataatatcaacagtggtaaggctgtgaaatctaaactaaaaatagattttgaaaaamtttcaactgtataattctaccacactaaatatcaatataatcaatataaacacatactctttgagattctcaatcatttaagaattatgagagtcttaaggaacaaagaaaatacaaataatttgcttcgatattttagtagaca

SEQ ID NO: 576725 - DNA, 450 bp, Homo sapiens
attaagctcaacatgagagactttaaataatataaatacatgacacactttttactcaactttttgttgtagaaaagttatttttcaatgaaaaatttctgttaacaatactgttctcaaggaatattttctgttgttataacctgggtcatgggttactactgacatctagttggtagaggccatgaatactgctaaactctctgcaatgcacaagacagtcctcacaacaaagcattatctagcacataatatcaacagtggtaaggctgtgaaatctaaactaaaaatagattttgaaaaactttcaaytgtataattctaccacactaaatatcaatataatcaatataaacacatactctttgagattctcaatcatttaagaattatgagagtcttaaggaacaaagaaaatacaaataatttgcttcgatattttagtagaca

SEQ ID NO: 576726 - DNA, 414 bp, Homo sapiens
tatggcagattagcatccaagatrgaattgctttattctcattcaaggtttccctcattcttcactctccccatgctggtcaccttgctgcttgttcctcaaacacatatgaaatgcgtttctgtcttggcagtcatcctgctacctgtaatgtcagcactgctttctgttgtcccttcagtcaggtcactgttcaaatagctctctagacaggctcttccttatcattctacttaaaatagcccccaatcactctgtgtccctttagcctgcttcctcttcctgctatttcatactacctgaaaaaatacttgaacttcctagaacataagctcataaaagcaagaactgtgctccacctctcctcccctctaccccagcactcagaagagcaacagggtcagcatccagtga

SEQ ID NO: 576727 - DNA, 449 bp, Homo sapiens
tatggcagattagcatccaagatagaattgctttattctcattcaaggtttccctcattctycactctccccatgctggtcaccttgctgcttgttcctcaaacacatatgaaatgcgtttctgtcttggcagtcatcctgctacctgtaatgtcagcactgctttctgttgtcccttcagtcaggtcactgttcaaatagctctctagacaggctcttccttatcattctacttaaaatagcccccaatcactctgtgtccctttagcctgcttcctcttcctgctatttcatactacctgaaaaaatacttgaacttcctagaacataagctcataaaagcaagaactgtgctccacctctcctcccctctaccccagcactcagaagagcaacagggtcagcatccagtgagtgttcatgaatcaagtcactgcttggcagaattc

SEQ ID NO: 576728 - DNA, 449 bp, Homo sapiens
gaattcttggaactgggattaatcagaatatggcagattagcatccaagatagaattgctttattctcattcaaggtttccctcattcttcactctccccatgctggtcaccttgctgyttgttcctcaaacacatatgaaatgcgtttctgtcttggcagtcatcctgctacctgtaatgtcagcactgctttctgttgtcccttcagtcaggtcactgttcaaatagctctctagacaggctcttccttatcattctacttaaaatagcccccaatcactctgtgtccctttagcctgcttcctcttcctgctatttcatactacctgaaaaaatacttgaacttcctagaacataagctcataaaagcaagaactgtgctccacctctcctcccctctaccccagcactcagaagagcaacagggtcagcatccagtgagtgttca

SEQ ID NO: 576729 - DNA, 450 bp, Homo sapiens
tgaattcttggaactgggattaatcagaatatggcagattagcatccaagatagaattgctttattctcattcaaggtttccctcattcttcactctccccatgctggtcaccttgctgcttgttcctcaaacacatatgaaatgcgtttctgtcttggcagtcatcctgctacctgtaatgtcagcactgctttctgttgtcccttcagtcaggtcactgttcaaatagctctctagacaggctcttccttatcattctacttaaaatagcccccaatcactctgtgtccctttagcctgcttcctcttcctgctatttcatactacctgaaaaaatacttgaacttcctagaacataagctcataaaagcaagaactgtgctccacctctcctcycctctaccccagcactcagaagagcaacagggtcagcatccagtgagtgttca

SEQ ID NO: 576730 - DNA, 317 bp, Homo sapiens
gtcatcctgctacctgtaatgtcagcactgctttctgttgtcccttcagtcaggtcactgttcaaatagctctctagacaggctcttccttatcattctacttaaaatagcccccaatcactctgtgtccctttagcctgcttcctcttcctgctatttcatactacctgaaaaaatacttgaacttcctagaacataagctcataaaagcaagaactgtgctccacctctcctcccctctaccccagcactcagaagagcaacagrgtcagcatccagtgagtgttcatgaatcaagtcactgcttggcagaattc

SEQ ID NO: 576731 - DNA, 499 bp, Homo sapiens
ttccattttttgttatttttagttatctatggaaagataggaacagaaatgtctttaatattaaacctagaagtttccaggaatcaattctgaaattattttgcatctttgaagtgtcttaaattacaaaaattggtcttatctgcttatattttcttatagagtaccattcatsataatcttactgttttttgacttaattctaaactggtagctatttaaaataaaattctgagctactgagttatgcaaattaccatataagatagaggtgtacaccacatacttgccagcaaaaaacagattggttttttttttctatgaggagattgaaacaagaggttgattttctgtacatatttaatatatttcattgattatcactttcttcccattctttggatgtcagagacctattatttggcttaaaaataccttacagaaaacttcatttctttaaattagggtttcttaggtaagggccaggttagacccagcc

SEQ ID NO: 576732 - DNA, 657 bp, Homo sapiens
aattcaagatgagatttgggtgaggacacrgccaaaccatatcacagcctttctaagggcttcctttacatgctcaggacaatattattcagagtgatggattcaggaaatcctaattgagagagaaacgtttttcaaacctcttggatgtttggactttgttttcaagtctgactgctatgaaggagaagggatggatttggagttgataaaatgatatcttctttatgaaatagaagtaaggagtatctgttttctcacccaagtatagtcccatcatatacagaaaggtttctgattggcttataagttgaaagaagttgaagttgctggcgtttggtctgtttaaatccagagtaatcctttttcctttccgtcctccaaaaaccatgtttccatttatgacaattgccatccttaccaatgattccctaagtgctaggcactgtgctgggtgcctcactcactttcttgttgttttcagggctttcaaggtgaagtgactacatagggtcacacagtttgtaggaggtggagtcacagtttgactccaaagcctcttgcctattcccatcgtccctgaatgagactatgtcatggtcttaaagaccactccttcaaatgcatttgggtctccattcccaagttaaaagtggt

SEQ ID NO: 576733 - DNA, 623 bp, Homo sapiens
acttggcatcccaagaactctggggggtaacagtccttttccagagttgtwtttcccggtcatatgaaatctgcatggaagcttggcagctgagggaggaggaattgcatgtgttattttctagatcctgaagagggctaaattctaatgtaaagagaatgaaaaagaatccacgtcatcaaacacatgagtggctcagaaaacttcatcgggtcattatttctttttcatgatttctgttcatgttcttcactgcacaggactggcaaaggagcctatttctcctgtccccctgtaggtttatagggcaaggcaaagcccgtttgacatccgggagtcttaggacatggcaaaggtttcattcaggcttatgagggagtgtgatagaacttcttcttctggcctgcagctgagttcaggggttttccttggaaacatctctgtgttccccaggtctccaggccacaggccctggtgcggaaagcagcctcatcgcatgcagcgaccaaacaccaggttctgccccatattcttcgctgctctgcacagagcgtggcagacacatagcccctcacagtctccctgtgttgttccagaacaaggacttaaagagccggattatc

SEQ ID NO: 576734 - DNA, 623 bp, Homo sapiens
acttggcatcccaagaactctggggggtaacagtccttttccagagttgtttttcccggtcatatgaaatctgcatggaagcttggcagctgagggaggaggaattgcatgtgttattttctagatcctgaagagggctaaattctaatgtaaagagaatgaaaaagaatccacgtcatcaaacacatgagtggctcagaaaacttcatcgggtcattatttctttttcatgatttctgttcatgttcttcactgcacaggactggcaaaggagcctatttctcctgtccccctgtaggtttatagggcaaggcaaagcccgtttgacatccgggagtcttaggacatggcaaaggtttcattcaggcttatgagggagtgtgatagaacttcttcttctggcctgcagctgagttcargggttttccttggaaacatctctgtgttccccaggtctccaggccacaggccctggtgcggaaagcagcctcatcgcatgcagcgaccaaacaccaggttctgccccatattcttcgctgctctgcacagagcgtggcagacacatagcccctcacagtctccctgtgttgttccagaacaaggacttaaagagccggattatc

SEQ ID NO: 576735 - DNA, 623 bp, Homo sapiens
acttggcatcccaagaactctggggggtaacagtccttttccagagttgtttttcccggtcatatgaaatctgcatggaagcttggcagctgagggaggaggaattgcatgtgttattttctagatcctgaagagggctaaattctaatgtaaagagaatgaaaaagaatccacgtcatcaaacacatgagtggctcagaaaacttcatcgggtcattatttctttttcatgatttctgttcatgttcttcactgcacaggactggcaaaggagcctatttctcctgtccccctgtaggtttatagggcaaggcaaagcccgtttgacatccgggagtcttaggacatggcaaaggtttcattcaggcttatgagggagtgtgatagaacttcttcttctggcctgcagctgagttcaggggttttccttggaaacatctctgtgttccccaggtctccaggccacaggccctggtgyggaaagcagcctcatcgcatgcagcgaccaaacaccaggttctgccccatattcttcgctgctctgcacagagcgtggcagacacatagcccctcacagtctccctgtgttgttccagaacaaggacttaaagagccggattatc

SEQ ID NO: 576736 - DNA, 526 bp, Homo sapiens
gaattctgttataatttctgaactgttctgagacctgttcccagtcactgattgcaatttcttttacacaggttgggtagggagagttgtaggtaaggccttaaacaaatgaggccgtttctggaaggatagggctgtgtggtcatgtcccacagcaagcttttgggatcgggggaataagagggtatgggggaaaggttcatagacttaggtgtgagaatgaggtgggaggtgtctggtaaggtcatgggggaagggagatgagagaggagataggcagatgtgggtatggggcccagtgtgagaaggaagacagagaagttcttgaaagctgggggatgtgtgggcaagaggtggattgagcasgatctcagggttatgtcgaggaagggaagaaagaaacagaagtcaggcagaggcgtgtctgtgcaaactggaggactccttccaacttcctggaacaaagcgacatcgccagcagcaggctggcagggagtggttgaggtctgggggccaggccacatgg

SEQ ID NO: 576737 - DNA, 605 bp, Homo sapiens
ggtggggactggtcagtggtgaatgctgagggaattaatggctctggattcttgtgatgttctgagaaatccaaactgcccgttccagaacatggcaaaagaggaagcatgttcaatgttaattacagaataagcaggagccccctgtttaccccttttcctaaattcgaggtcttctgcaatcctagttggcccataatctctcttgatctcacaccaggcccatagcaggcaccacagtctctattttacagaaaccaaagcagcttcctcatggaaggggaccaatgatgatcattgtcctcagatctgtctattctttgcyctgtcccctggaggctgacccatacaggccatgggttccctgatggccactctggttgggttcagccagtgggagcaggtggaattctggatgtgtctgcatcactccctgctctgtgtggcactttcaagtgggctcccctgggacttgggtgatctctccttcagcctccagttctaagggcgggtcatggctttctcttgctgttcctctctgggtccctaccttggtgggttcctgccacactgcccacccaccagagcagcccttcattgagctg

SEQ ID NO: 576738 - DNA, 425 bp, Homo sapiens
tcccctggaggctgacccatacaggccatgggttccctgatggccactctggttgggttcagccagtgggagcaggtggaattctggatgtgtctgcatcactccctgctctgtgtggcactttcaagtgggctcccctgggacttgggtgatctctccttcagcctccagttctaagggcgggtcatggctttctcttgctgttcctctctgggtccctrccttggtgggttcctgccacactgcccacccaccagagcagcccttcattgagctgccgcagttcactgctgtgtcctgtccagagctctgtccacaaccgcctctgcctccaggtcaatgtggatgacctgtccctccagctctctagcagcactgattctcctggttctaattggaaggggtaacctaatgtaaatgagatt

SEQ ID NO: 576739 - DNA, 425 bp, Homo sapiens
tcccctggaggctgacccatacaggccatgggttccctgatggccactctggttgggttcagccagtgggagcaggtggaattctggatgtgtctgcatcactccctgctctgtgtggcactttcaagtgggctcccctgggacttgggtgatctctccttcagcctccagttctaagggcgggtcatggctttctcttgctgttcctctctgggtccctaccttggtgggttcctgccacactgcccacccaccagagcagcccttcattgagctgccgcagttcactgctgtgtcctgtccagagctctgtccacaaccgcctctgcctccaggtcaatgtggatgacctrtccctccagctctctagcagcactgattctcctggttctaattggaaggggtaacctaatgtaaatgagatt

SEQ ID NO: 576740 - DNA, 564 bp, Homo sapiens
gagcactgtttccccttgtccttccagtatggagaataaatactaaagaatattgattggaaagaacactgaattcttggcctgttttgggggtggcattttcagctttccttgggtggccacatgtctagtttcaggctcacaaagaccaaggtctcaccagctctgtcccctgtggaatggtggtggcatcttctgtgtgatggtgaattttagatgtcaacttgactgggctaagggatgcccagatagctggtaaaacatgaattctgggtatgtctgtgagggtgtttccagaagggattagcctctgaatcggcagaacgagtaaagcagatggccctccccactgtgagcaggctctgtccaatctgctgagggccctcactgaacaaaaaggtgggggaatagaggattcattctctacttaagctgagacatccgtcttctcccactctgacatcagcgctccttgctcyccagccttcagactctgaatgggacttaggcaatcactgctacccgccccccccacacccccattcttaggcctttgggcttgga

SEQ ID NO: 576741 - DNA, 542 bp, Homo sapiens
ttattttctactaaccaatgatgtactgctagattttggaataaaaggttctatgtgtgtggggaggggaggaaggagcagaatcaaaaagccctgagcaatgataggatggattagagtttggaaagggaaacgtggggtccagaacacactggttaggctgtggcaaggggrtcctcttgacatcctctaaccagatctcacagcacacttcctgccatgtcgcagcagagaccagccctcaccagacccggtgctgacattaaccaggtgctgccctgagcgagatggcgtcctgccacgcctgctccgtcatctgggagatgccttgtcggcagctccaaggcctcctgtgggaaggcatgaacgtctgtcctcacgtccctgcttcccttattacccagcggtggaagttcatcccccactctcctatcttcctgaattcatcccatcctttgttggccctgtgtgtggtttcttcctgtactctcttttgtggatttttgtagaatttcagaagtgattgtgatattagatgtgat

SEQ ID NO: 576742 - DNA, 503 bp, Homo sapiens
ctgacaatgattaacccagctaatcagtctccgtatgaacgawcttttctttccagataaggcatattcctgaaaggctgctttaagcagtatctgtccccacctgggcttgcattttgctggcctcctatgggctctattagggcagatattccatggggttgggagggccctgtggtcagttaagttggaaaaaccctgaatagttattcttcttttgaagacgctccatgcacactagggcagtgtgtactgtcttaaacctgcctgcttttgtttaacctagattttaccaattttatttgactacagatttaaaaaaaaataaatggaatgtcttttaacctccttgaagggacttaacctcacctctttttaagtccagtttctcttctctgtcctggtcctcatacctgggctttctgtctgggccactcttctggagtcactgttccgcatgtgtccccagcatcccttcttcatatcagggtctggtcttgctt

SEQ ID NO: 576743 - DNA, 503 bp, Homo sapiens
ctgacaatgattaacccagctaatcagtctccgtatgaacgaacttttctttccagataaggcatattcctgaaaggctgctttaagcagtatctgtccccacctgggcttgcattttgctggcctcctatgggctctattagggcagatattccatggggttgggagggccctgtggtyagttaagttggaaaaaccctgaatagttattcttcttttgaagacgctccatgcacactagggcagtgtgtactgtcttaaacctgcctgcttttgtttaacctagattttaccaattttatttgactacagatttaaaaaaaaataaatggaatgtcttttaacctccttgaagggacttaacctcacctctttttaagtccagtttctcttctctgtcctggtcctcatacctgggctttctgtctgggccactcttctggagtcactgttccgcatgtgtccccagcatcccttcttcatatcagggtctggtcttgctt

SEQ ID NO: 576744 - DNA, 503 bp, Homo sapiens
ctgacaatgattaacccagctaatcagtctccgtatgaacgaacttttctttccagataaggcatattcctgaaaggctgctttaagcagtatctgtccccacctgggcttgcattttgctggcctcctatgggctctattagggcagatattccatggggttgggagggccctgtggtcagttaagttggaaaaaccctgaatagttattcttcttttgaagacgctccatgcacactagggcagtrtgtactgtcttaaacctgcctgcttttgtttaacctagattttaccaattttatttgactacagatttaaaaaaaaataaatggaatgtcttttaacctccttgaagggacttaacctcacctctttttaagtccagtttctcttctctgtcctggtcctcatacctgggctttctgtctgggccactcttctggagtcactgttccgcatgtgtccccagcatcccttcttcatatcagggtctggtcttgctt

SEQ ID NO: 576745 - DNA, 503 bp, Homo sapiens
ctgacaatgattaacccagctaatcagtctccgtatgaacgaacttttctttccagataaggcatattcctgaaaggctgctttaagcagtatctgtccccacctgggcttgcattttgctggcctcctatgggctctattagggcagatattccatggggttgggagggccctgtggtcagttaagttggaaaaaccctgaatagttattcttcttttgaagacgctccatgcacactagggcagtgtgtactstcttaaacctgcctgcttttgtttaacctagattttaccaattttatttgactacagatttaaaaaaaaataaatggaatgtcttttaacctccttgaagggacttaacctcacctctttttaagtccagtttctcttctctgtcctggtcctcatacctgggctttctgtctgggccactcttctggagtcactgttccgcatgtgtccccagcatcccttcttcatatcagggtctggtcttgctt

SEQ ID NO: 576746 - DNA, 509 bp, Homo sapiens
gctttattcttttctaaatgtcttatattaacactggcatggaacactcaatatttttgctttgaagaaattgttccagacttaaaaaagtattctgtcatctttcatactcagcattaccaaaaaaatgagcaggcaattcctagttttctttagaaggktcttcagttttgttgagggctatgacttactagagtcatatagtttatattttatgatctccttcaagcctcacaacaaccctaggaggtgctgctgttatcccccatttcacaagtgagaagattcagacttggagaatgaaaatgacttgcccaagactcctcagcctgaatgtaaatgcgtgttagtttagctccaaagcccatgctgtctattaaacagtgttcttcagacggactcctctgatttgacagctagaatcccacaatcccaaggccccagacctctggaatttgaagggaataaatatatctactctatgcccctttccccacatgagcttgagt

SEQ ID NO: 576747 - DNA, 509 bp, Homo sapiens
gctttattcttttctaaatgtcttatattaacactggcatggaacactcaatatttttgctttgaagaaattgttccagacttaaaaaagtattctgtcatctttcatactcagcattaccaaaaaaatgagcaggcaattcctagttttctttagaagggtcttcagttttgttgagggctatgacttactagagtcatatagtttatattttatgatctccttcaagcctcacaacaaccctaggaggtgctgctgttatcccccatttcacaagtgagaagattcagacttggagaatgaaaatgacttgcccaagactcctcagcctgaaygtaaatgcgtgttagtttagctccaaagcccatgctgtctattaaacagtgttcttcagacggactcctctgatttgacagctagaatcccacaatcccaaggccccagacctctggaatttgaagggaataaatatatctactctatgcccctttccccacatgagcttgagt

SEQ ID NO: 576748 - DNA, 614 bp, Homo sapiens
tggtttattgttatcattgtcccagagattttactctaagcggtgacatattacatacccactggtatctacatttatttatttattgagacagggcctaactctgttgcccaggctggagtgccatgtcataataatggctcactgcagcctcaacctcctgggctcaagcaatcctcccaccttagcctcctgagtagctgggaccacrggtgcctgtcaccatgcaagactaatttttttattttttgtagaaacagaggtctcactatgttgcccaggctggtttgaactcctgggctcaagtaattaaccagcctcaacccctcaaagtgctgggattacacgtgaaccactgcacttggccagtatctacctttatatcttgatttgtttacagaaataatatatagctatagtggacacagttgatacccatgcatatctcctcagccacatttcacctgctctgtgtgtccattccctagcttttgcatccttggatgctaatggtctgtgcctgtgactttcagaggattttccaaggatattcaggttccttgcccctgtggagtgctgcaaatgccggagagttcatgtacattccccaccct

SEQ ID NO: 576749 - DNA, 562 bp, Homo sapiens
gattttccaaggatattcaggttccttgcccctgtggagtgctgcaaatgccggagagttcatgtacattccccaccctccatccccatacccaggtaacctttagccagtgactgactagtatagagtacaaatgccctagttcttttgtcttgaggcagaagtagctgtgaggtgcaatttatacttcagagctgcccatggatcaggctgaatttgaaactttacctaaggttgcatccttgcttgtttcttcccctccctgggtctcccactcccttcctggtttctcctgggagcacctccctaatgatcacctacataggagtccttggctcagaatctacttccgggagagggtgacctaaaatgacagtcattgcataaatagacatatcagatgttctgcttgaataygcacacaaagcatttcaggactttttatttttaaaaaaaagagcaaaaaagaatttcccttttatagattgtctattttttttttggtatagatttaaatacagttactactcatattttaatttgtccaaatgacaattactga

SEQ ID NO: 576750 - DNA, 289 bp, Homo sapiens
ttaaagacagtcatcagagtatcttcctgagaaaagaaatacrtaaggtttctgcctttgtatcaacatgttttctccaagctcacagtagtagctacttggaaaagtaagagtgctgccttcttctaggttttgaggtttgtctcactgtgtttaatctcagacttgggtgaagtcccaaggctgagaaagaaatcactcatcctttatttcattcattttcttagctgattccccatccctcaggatctgtagaggtatttgtcgactattcactggggtggcctac

SEQ ID NO: 576751 - DNA, 559 bp, Homo sapiens
attctaggaactgggatgggagaaggaggtaaaattcagtarctgattacaagaaaatgaagggtgcttatacagacatctggaattttctacacacctgtgctttagcagagaaattcaggactgctcttaggcctatgtggctatttctgtggatagaaaaggatgacagctaagacagttttgtcatagctcccgttctctccagcccaaacactagcaaccccttcatcaccaatgctcagagggtctggagtagatgagtcatgttgcaagggaatgtggagaacttctacaccagacccttatccctgttcccctcccattggccctcttccccactctcagttctgtagactccagaggactgctgactgggcagaagttctcagcttttgattcctcttttgaaaagagtccatctttttttaaaaatcatcttctctcagaaatattaatggaaaccagtgactgtgacttcattttttactttttcctctccactctagatccacttttccattgatttcagtccgacttgtcttcccattttccttct

SEQ ID NO: 576752 - DNA, 559 bp, Homo sapiens
attctaggaactgggatgggagaaggaggtaaaattcagtaactgattacaagaaaatgaagggtgcttatacagacatctggaattttctacacacctgtgctttagcagagaaattcaggactgctcttaggcctatgtggctatttctgtggatagaaaaggatgacagctaagacagttttgtcatagctcccgttctctccagcccaaacactagcaaccccttcatcaccaatgctcagagggtctggagtagatgagtcatgttgcaagggaatgtggagaacttctacaccagacccttatccctgttcccctcccattggccctcttccccactctcrgttctgtagactccagaggactgctgactgggcagaagttctcagcttttgattcctcttttgaaaagagtccatctttttttaaaaatcatcttctctcagaaatattaatggaaaccagtgactgtgacttcattttttactttttcctctccactctagatccacttttccattgatttcagtccgacttgtcttcccattttccttct

SEQ ID NO: 576753 - DNA, 559 bp, Homo sapiens
attctaggaactgggatgggagaaggaggtaaaattcagtaactgattacaagaaaatgaagggtgcttatacagacatctggaattttctacacacctgtgctttagcagagaaattcaggactgctcttaggcctatgtggctatttctgtggatagaaaaggatgacagctaagacagttttgtcatagctcccgttctctccagcccaaacactagcaaccccttcatcaccaatgctcagagggtctggagtagatgagtcatgttgcaagggaatgtggagaacttctacaccagacccttatccctgttcccctcccattggccctcttccccactctcagttctgtagactccagaggactgctgactgggcagaagttctcagcttttgattcctcttttgaaaagagtccatctttttttaaaaatcatcttctctcagaaatattaatggaaaccagtgactgtgacttcattttttactttttcctctccactctagatccacttttccattgatttcagtcygacttgtcttcccattttccttct

SEQ ID NO: 576754 - DNA, 530 bp, Homo sapiens
taacatttcttcattctttccacatttacttgcactaccacacgtcaattacctgctctagatattggacaggsagagatgtaaacaagatccagcttctacacagagctcacaagctagtgagctgtctgctgcttttgtaaagaaatataacaccgtgtgaataggatgttaacaatatgaaaaagacttgggtagattagagggcttcgtggaagtggaatgggaaggaacctgtcatgaacaattttctttttggaagggataggtggatgggaggatgcagagaggagtgtagcagaaaagcagaaggacttgggttagaagactagatgtgtagtctcagctgttcaccaattaacctaatgtctctggcctcagtttcctcatttgcaaaacaggggcgataactgtagcccaccttgtggggcattgtgagaattggttgagaaaatgcatataaagcacttaggacacaagcacagctactgtgaggatgacgatgaggatggtgaagaacaggctgtgca

SEQ ID NO: 576755 - DNA, 530 bp, Homo sapiens
taacatttcttcattctttccacatttacttgcactaccacacgtcaattacctgctctagatattggacaggcagagatgtaaacaagatccagcttctacacagagctcacaagctagtgagctgtctgctgcttttgtaaagaaatataacaccgtgtgaataggatgttaacaatatgaaaaagacttgggtagattagagggcttcgtggaagtggaatgggaaggaacctgtcatgaacaattttctttttggaagggataggtggatgggaggatgcagagaggagtgtagcagaaaagcagaaggacttgggttagaagactagatgtgtagtctcagctgttcaccaattaacctaatgtctctggcctcagtttcctcatttgcaaaacaggggcgataactgtagcccaccttgtggggcattgtgagaattggttgagaaaatgcatataaagcacttaggacacaagcacagctactgtgaggatgacgatgrggatggtgaagaacaggctgtgca

SEQ ID NO: 576756 - DNA, 554 bp, Homo sapiens
gaaggaccagtagacagagattgtgtctttccctgctgaaaaacactttgtcctcaagataaaggccaaatttccagctaagcacacaggttcctcatgatgtcctcagctcccttccgctgcktctccactgttttcccactgcactgtgatacttccaattcttgaaacatattttataccttcccttgctttccttccatctttgtgcatgctagttcttttgacctgggactccctcctccctctgttaggggacagcagaggggacaagcaaggcactagggtcggactgggggattcatatcctacctttgccactgagaggccagtgggtcgcctgctgtgttgctcaatccctaggtgagtcaacgtcttcatctgcaaaatggggatacaaggtaacaacagtgactccctcaaagggcaatggtgaggattaaatgaggtaacacacgcaaagtgctcgccaggcaggcccacagtaatcattgaataaatatgggcagtgtggcccactcctacttgcatttcaggtcttagcttagtcatca

SEQ ID NO: 576757 - DNA, 526 bp, Homo sapiens
ggaccatcagctccttgggctgcctcaggagtcctctcccctggtgtggctggtgctgatggccctgctccccagcgggtagagtcctggggccgtgcccttcctgggggcgttttatttagaccctgacatttacacaaatgttcaattcaaacataatgcttttttctttttgccaaaaaacattcaaagtctacaaaagaacataaaggaaaaagtgaaatctcattttcctgaggaaactgtcgttagagagctggattgcatccttctagatgttttacatacacaaacacacagtcttcaaacaaaaaatgaaaatttgaaatttatgatttttcactcagtgtatcttgatctctttctgtgtgtacaactttgagacytgggccactcgggagtgttccacagacttcattgttcctggcattgcttgtgttttccctgctccgtggcggcttcatctccctgcttgggccaggggcaggatcctctgtgtccggccacctgagttttcctgcaagcc

SEQ ID NO: 576758 - DNA, 603 bp, Homo sapiens
ggtggagtctgtgactgaaagatcttgcttttgtttcctggtatttggggagtttcattagagcttttcctcttcctggttatatgtccagtaaattggggataagttaatgccagctcttgactctgctgcaagccatttaacagctcagttacccaaacttaagcacaaatgtaaggatagcatcagtgcctttggggcccagctgtaagggactcagggggaagcatttaccagaaacaagtacaaggaatcacagctycttgcatcccatctcttcccaagtgtgggaagaagggcaagaagcaatggttgtagtattttcttactttttaaaaagattacattgaaacgaagcaaaacaaaacaaaaaacaagcaatatagaaaggtataaagaaaaaggcaaaagtcaccctgatctctagcgcccctaccccatccatggttccttccttagagacctgtaagtttaatcatcatcacatagttttctagacctttctttgattttgcaaactttgaatgaatgggatcataaagtacttaaagtacataaagaacttactgttctgccacaatgaatgattttcaaatgcaaatt

SEQ ID NO: 576759 - DNA, 596 bp, Homo sapiens
agatcttgcttttgtttcctggtatttggggagtttcattagagcttttcctcttcctggttatatgtccagtaaattggggataagttaatgccagctcttgactctgctgcaagccatttaacagctcagttacccaaacttaagcacaaatgtaaggatagcatcagtgcctttggggcccagctgtaagggactcagggggaagcatttaccagaaacaagtacaaggaatcacagcttcttgcatcccatctcttcccaagtgtgggaagaagggcaagaagcaatggttgtagtattttcttactttttaaaaagattacattgaaacgaagcaaaacaaaacaaaaaacaagcaatatagaaaggtataaagaaaaaggcaaaagtcaycctgatctctagcgcccctaccccatccatggttccttccttagagacctgtaagtttaatcatcatcacatagttttctagacctttctttgattttgcaaactttgaatgaatgggatcataaagtacttaaagtacataaagaacttactgttctgccacaatgaatgattttcaaatgcaaattaaagttttgtgt

SEQ ID NO: 576760 - DNA, 553 bp, Homo sapiens
atgtctctaaaacttcttttgtaatgatattattgaacattctacaratttttataaaaaaggcagccaaaaataccatgattctcaccagccgtgtgatgcttccttggccatcctggaacaaaaaaatgacagaattctttgtcagctaccattgctataaaaccttttatttatgctttcagtgagcatgggccagagatagggaccctgtggaacttctgggaagcacttatgcaaaagagggtctagactggtgtcttcctcattttgatgtggcacgctcatgcacaggtggtgtgtgaagtagagctttttgtgagcaaatacattgccgttctcgacatcctggtgcctgtttctcagtgcgcatggtcgtggggtggccacttgctgctgctgcagaacagctggtctcatagtgtgttcctttttctctcagatctccttctacctgtctcttcaggctctggttgtttttctttgctttagtttaagaaggtggacctccttaaagggccttccagccaaacacagtgctctgttttgttgg

SEQ ID NO: 576761 - DNA, 553 bp, Homo sapiens
atgtctctaaaacttcttttgtaatgatattattgaacattctacagatttttataaaaaaggcagccaaaaataccatgattctcaccagccgtgtgatgcttccttggccatcctggaacaaaaaaatgacagaattctttgtcagctaccrttgctataaaaccttttatttatgctttcagtgagcatgggccagagatagggaccctgtggaacttctgggaagcacttatgcaaaagagggtctagactggtgtcttcctcattttgatgtggcacgctcatgcacaggtggtgtgtgaagtagagctttttgtgagcaaatacattgccgttctcgacatcctggtgcctgtttctcagtgcgcatggtcgtggggtggccacttgctgctgctgcagaacagctggtctcatagtgtgttcctttttctctcagatctccttctacctgtctcttcaggctctggttgtttttctttgctttagtttaagaaggtggacctccttaaagggccttccagccaaacacagtgctctgttttgttgg

SEQ ID NO: 576762 - DNA, 633 bp, Homo sapiens
gagctccaattgtatatatgacattggtccaggtactggagctaagaagataagcaagacatagtccagatccccaagagaaccaggcatctctcctaaatatgtgtagatgagggatggattcatgtaccacatgtgtaacccccagtacctagaagaatgagatggacaataagtgctaagagagagatttgaaaacactgattggggtatgaacctgaaaatcacttaaaaaataaatctgcaaagcaagggatgtaggctccaaagaccgtcatttttatatgcctgtgttcttgccatttaaaaagttttacatttataggttcaactagtgacttactattctcaaggyatagccatcaaatgaatatttctaactggatagtgtgtgagtggggaggggttgagaaggatctgtattctgaaatggaggccaagaagctttgtttatgatggaagtacagaggtggagttctcgttctcttctacatgtctctaggaccctcctgtggttctgttgaaatccaggctgtgaaagagtccacctctgccaccaccctttttctttgttctttttttctcctctgcacctggattcagcatttaacacccttcatttatgagcaactt

SEQ ID NO: 576763 - DNA, 589 bp, Homo sapiens
gtaagaccatagtatataattttttagtgaatatttatattgtcataataatgtaaatagttgactcttgattttattattggtaggttagccaagtgagagacttgtatgtatggtgtggtatccaccctatgtagaaccaataagttaaggaatcacagtcaggaatattgtttagcaaaagggaggtaagtattagaagaaatagctgaaatttgcaggtttttttgtttttttttttttcctcctgggcagtgtgttcaggatcagggaagggaagctgaagaatgtaggttttcacttattttactttgattaaaaaataaattatttaaaaatacwagtataactgaaaatgaaagttgacaatgaaatatttggaattggtgagataatgataaatattacagatgaatgtacctctctgagttgttcctatctttaaagtggtaaatgatagtagctaaaatgtttgagatttaaaagaattatcaccaagcaaaactgacaacactatgctactggtaggaaactgaatatattcagaaagccccaagacagaacagagagacaaaacaagtaaagatgt

SEQ ID NO: 576764 - DNA, 612 bp, Homo sapiens
gtcgggcaccaaacctgacttttcttttcttgttktatttatttataatagagacagtcttgctacgttgcccaggctggtcttgaactcccttcctcaagcaatctcctgcctcccatagtgctgggattacaggcatgagccatcacgcctggcccagactatttttcacgtacttctcacaccagccttgtaaggcagcgctatcattatccccattttacagatgaagagaccgaggttcagagaggttaagtaatgcccagtgtcatatagctctgtctgactcccctcttctggcctgcctcccactgaggcctttcagcctgatgggagagtgaactgtgtacccgtattcatgtgggtactgggcactgaactattaaatatgcacagggctcggaaatccactcccaccccacctgctcattttgtctttcccttctgtgttccagtgcctaccgtcatctttagagaaggtaggttaagatgccactgccctgctagacactcggaggggacatggctggggtcgaggggacatggctggggtcgaggggacacagggtggagccgtgctggtagcagctggggcaaggccagtaagaatgt

SEQ ID NO: 576765 - DNA, 612 bp, Homo sapiens
gtcgggcaccaaacctgacttttcttttcttgttttatttatttataatagagacagtcttgctacgttgcccaggctggtcttgaactcccttcctcaagcaatctcctgcctcccatagtgctgggattacaggcatgagccatcacgcctggcccagactatttttcacgtacttctcacaccagccttgtaaggcagcgctatcattatccccattttacagatgaagagaccgaggttcagagaggttaagtaatgcccagtgtcatatagctctgtctgactcccctcttctggcctgcctcccactgaggcctttcagcctgatgggagagtgaactgtgtacccgtattcatgtgggtactgggcactgaactattaaatatgcacagggctcggaaatccactcccaccccacctgctcattttgtctttcccttctgtgttccagtgcctaccgycatctttagagaaggtaggttaagatgccactgccctgctagacactcggaggggacatggctggggtcgaggggacatggctggggtcgaggggacacagggtggagccgtgctggtagcagctggggcaaggccagtaagaatgt

SEQ ID NO: 576766 - DNA, 470 bp, Homo sapiens
taccttctgtagataacatttttataatgacatttgctcatccttcaaacctaagtgactccaggtattaagttttattcttactcaaggcaggaagatggtcttgagacgtacgtccagtacagatctgggttagagcatctcgcattcagaattctctaagccacatcacggaatatcagaatctttcactttgctctcttacagggcaaaggatgcaccccaaatggacatttaagccgtgagcatgtccttttatgmacactcaatctacttggcccattggagggactggtggtcacatgacatgcaccttccatttgtcggatctgctttagcttgtgcagtacgaatccttgcatataattgtgtttggactgcataaaaaacctgttctgtggccaggcatggtggctcacgcctgtaatcccagcactctgggaggctgaggcgagtggatcacctgaggt

SEQ ID NO: 576767 - DNA, 583 bp, Homo sapiens
catattttgtctctgatatttataagttaagttatctttgaaactggcccaatcatcccatagaactaatgtttacagtttttcgaataactataaaaattgaccctctagtcttaaaacttgaaaaatttacatttatcttatctgagttcctttctcaggaaactgaccatcaggtctcccagatagtatcaaggaattgaaaattaacagatcactgtatctggacaatgagaggccaaacacttcattcatcatgattgcttccttacccctccctaatttctgttttcctaatcaaccacctgcttcctgttgacaaactcctcttccttacygctacttaattcctaattcctgttttcttatacgtagctacattccttccctgctatataaacccccacttctggtcagctggggacatggatttgagactgatcacccatctcctcagctgcagcacccagttaaagccttcttccctggtaatacttgttatctcattgattggctatctgtgtggcaagtagcaggacctagactgaacccctggcattttgataacatcttgatggttaat

SEQ ID NO: 576768 - DNA, 558 bp, Homo sapiens
cacttcagcctcccgagtagctgggattgcaggtgcctgccaccgtgcctggttaatttttgtatttttagtagaggcgaggtttcaccatgttggccaggctggtttcgaactcctgacctcagatgatccacccacctcagcctcccaaagtgctgggattataggcatgagccaatgcacccggcccacgttctttattttttatacatggactctgttcctcactggcacttcatttttcaagtaattcttttgtctctttataaatacctgtgtgcacatacatacacacgtgcacacgtttacacacaygaaccacaggaaaggtacttatatgacttttcatttgagaattcatccttcagcccattcgtccacctgtctcatgctcctaagctccatgaagaaagaatctctgtcttagtcactgtggtaataacctctgtgcgtagcacagtgccaggccctcaaaattatttgttaaatgaacagatgaaactgttcaatagacagttgctgaacatccacaaggcaccaggctaggtgctaatggga

SEQ ID NO: 576769 - DNA, 270 bp, Homo sapiens
atggaaacgttgaaactagaaagctattagaagcaaacaaagggtaattttttataaccccatctaaggtcatgaaaacccatagtgattttagagatgacaccaaattacaagcaaaaaamcaaaaagtagatacatttcagttcactattttgtacactctatgagttttaacaaatgtgtaataacctgtacccatcattatgtgtcatacagaatggtttcgctgccctgaaaatcccctgtactccacggccttagaggtctggc

SEQ ID NO: 576770 - DNA, 237 bp, Homo sapiens
acctagggtttggcaatgactttttagatccagcaccaaaggcagggtccaggaaagaaataattgataagctagacttcattaaaaygaaaacttctgctctgtgaaagatgctgccaagaaaatgaaaagacaagccacagactgggagaaaatatttttgatggaaatatctgagaagagaggcttgttatccaaaatatacaaagaattcctaaaactcaacaatttgaaaat

SEQ ID NO: 576771 - DNA, 421 bp, Homo sapiens
gaattcaatgcttgggtcacctccagattcattttcacagtctttcatgttttggtcatatkacattgtattttgctgccatatgactgatctttttttgttaaatgtgagatacttgttaaaaaatgtttagcaatgaattgaggcctagtagcatgttatcttgctgcagaagagatgggagtctacttctgggggatggtcaggggtcctccatacaggctgcaattgaggtcgtcggtgcaggctcagtccctacaaaggccagggtatttcctgtccacctttattctgatgcatgactcttctgggtctcaaccagagccagtggacttcagtatgggtcgctttcattggcagaccctcaatccacttgttttccatctaatcccacgcatgtgtgcaaaagctgctgtgtttc

SEQ ID NO: 576772 - DNA, 421 bp, Homo sapiens
gaattcaatgcttgggtcacctccagattcattttcacagtctttcatgttttggtcatatgacattgtattttgctgccatatgactgatctttttttgttaaatgtgagatacttgttaaaaaatrtttagcaatgaattgaggcctagtagcatgttatcttgctgcagaagagatgggagtctacttctgggggatggtcaggggtcctccatacaggctgcaattgaggtcgtcggtgcaggctcagtccctacaaaggccagggtatttcctgtccacctttattctgatgcatgactcttctgggtctcaaccagagccagtggacttcagtatgggtcgctttcattggcagaccctcaatccacttgttttccatctaatcccacgcatgtgtgcaaaagctgctgtgtttc

SEQ ID NO: 576773 - DNA, 422 bp, Homo sapiens
tgaattcaatgcttgggtcacctccagattcattttcacagtctttcatgttttggtcatatgacattgtattttgctgccatatgactgatctttttttgttaaatgtgagatacttgttaaaaaatgtttagcaatgaattgaggcctagtagcatgttatcttgctgcagaagagatgggagtctacttctgggggatggtcaggggtcctccatacaggctgcaattgaggtcgtcggtgcaggctcagtccctacaaaggccagggtatttcctgtccacctytattctgatgcatgactcttctgggtctcaaccagagccagtggacttcagtatgggtcgctttcattggcagaccctcaatccacttgttttccatctaatcccacgcatgtgtgcaaaagctgctgtgtttc

SEQ ID NO: 576774 - DNA, 581 bp, Homo sapiens
attattttcctgattatctttgcattattgtaaaatctaatcttttaaagcatttcttaaaatattacattctagggatcataaatcccatctataagaagatgactattcatgaatatgacagccactcaaataaatgtggcaaatgtggtttaatagaaatagctcaagagcataaataattatagccaatgagattayattctccagtagaaagtatgaaccaaggagaaaattgaaaagttctcccttttaaaatgaattatgcagtttttaagctattttctttggcatgttagtattgtatttatacttattaagttaatcaaacagttcatatcaaaaagttaatgggaaaacactaataggacactattattatactacgtattaggaaagttcaggaaggtagctttagctatttaatcacagttaaattgatcttttaataattaaaatacagtaatatttttataaaagatgaaattgttataatccaccctatgatgacttataaaatataatttagttcaaagtccagtgggacaatctgttgaaatgagattttgtttagtgaaagg

SEQ ID NO: 576775 - DNA, 581 bp, Homo sapiens
attattttcctgattatctttgcattattgtaaaatctaatcttttaaagcatttcttaaaatattacattctagggatcataaatcccatctataagaagatgactattcatgaatatgacagccactcaaataaatgtggcaaatgtggtttaatagaaatagctcaagagcataaataattatagccaatgagattacattctccagtagaaagtatgaaccaaggagaaaattgaaaagttctcycttttaaaatgaattatgcagtttttaagctattttctttggcatgttagtattgtatttatacttattaagttaatcaaacagttcatatcaaaaagttaatgggaaaacactaataggacactattattatactacgtattaggaaagttcaggaaggtagctttagctatttaatcacagttaaattgatcttttaataattaaaatacagtaatatttttataaaagatgaaattgttataatccaccctatgatgacttataaaatataatttagttcaaagtccagtgggacaatctgttgaaatgagattttgtttagtgaaagg

SEQ ID NO: 576776 - DNA, 581 bp, Homo sapiens
attattttcctgattatctttgcattattgtaaaatctaatcttttaaagcatttcttaaaatattacattctagggatcataaatcccatctataagaagatgactattcatgaatatgacagccactcaaataaatgtggcaaatgtggtttaatagaaatagctcaagagcataaataattatagccaatgagattacattctccagtagaaagtatgaaccaaggagaaaattgaaaagttctcccttttaaaatgaattatgcagtttttaagytattttctttggcatgttagtattgtatttatacttattaagttaatcaaacagttcatatcaaaaagttaatgggaaaacactaataggacactattattatactacgtattaggaaagttcaggaaggtagctttagctatttaatcacagttaaattgatcttttaataattaaaatacagtaatatttttataaaagatgaaattgttataatccaccctatgatgacttataaaatataatttagttcaaagtccagtgggacaatctgttgaaatgagattttgtttagtgaaagg

SEQ ID NO: 576777 - DNA, 609 bp, Homo sapiens
agacttgtttttactaaagtttcrtgtacgtgaaatcataacaacatgttctcttgtgtttggcttctcttgctcagcatgatatttttaaggttcacccatattgcatgtatcaagaatacaatcctttttattattgagtagtgttctattgtatgtatatataccacagtttatttctcccttcatcctttgctagattttggggttttttcacattgcactattcagtataaacctgctctcaacattcatgtgcaagtctttgagtggacatatatttgcgtttctcttgagtgaatgcaccttgttgggtcacgtggcttaacttaaaaaaattttaatcactgtggtgcatatgtagtgattattaatgattatctcataattttattttcttgatgattaatgatgttgagtgtattccatttgtattttagtttgcaaatgttcaaattcttcacccgtttttaatgaagacataagacttatttttgtgttctgaacataagttctttgtcacataaaatgtgctatgaatgttgagttttaaatactccaaatgaatggctagagaattactatttgtagaaatatttatatgtcaaa

SEQ ID NO: 576778 - DNA, 308 bp, Homo sapiens
tgtggtggcatgtgcccgtaatcccagctactggggagcatgaggcaggagaatcgcttgaacctgggaggcagaggttacagtgagccragattgcaccactgcagtctgcctgggtgacagagctagactctgtctcaaaaacagaaaaacaaaaaacaactttccagtggcttctcactgctctgagaataaactccaggctcttccattgcaaccaacaggatctgttgattcgaccccagcccctctttccaggccctcatcactttgatcctctcttaacctatcctgctccagctgcactg

SEQ ID NO: 576779 - DNA, 581 bp, Homo sapiens
gcgggcacctgtaatcccagctactcaggaggctgaggcaggagaagcttgaacctgggaggcrgaggttgcagtaagccaagattgcgccactgcactctagcctgggcaacaagagctagacttcatctaaaaaaaaaaaaaagagtagagaaataaaggacgtggcagtggcggtgggtgtatgtttttggggaggtgagggaatgaggaaggcagggaaacagagttctctgcttcctttgcaagcctgatgaatagaaaggtatcaacagggtaacaactcaatgaagttattgctatgagctgccttggtttcctcccccagacacacggagctaaatgggacttcagtgggagtctgcaagttctaattgctctcctggcagaagctctcagatctggctcaaacacatcaagaaggacaatttcctagaaatggaacagtcaggtctcaatttcatgcaagtttattcttttcaataaggcagttaaatcacattttacatctggtactaaattaatgggttgtatgttgttacggacttttcatagaaccatcttcacaaggattacatatg

SEQ ID NO: 576780 - DNA, 581 bp, Homo sapiens
gcgggcacctgtaatcccagctactcaggaggctgaggcaggagaagcttgaacctgggaggcggaggttgcagyaagccaagattgcgccactgcactctagcctgggcaacaagagctagacttcatctaaaaaaaaaaaaaagagtagagaaataaaggacgtggcagtggcggtgggtgtatgtttttggggaggtgagggaatgaggaaggcagggaaacagagttctctgcttcctttgcaagcctgatgaatagaaaggtatcaacagggtaacaactcaatgaagttattgctatgagctgccttggtttcctcccccagacacacggagctaaatgggacttcagtgggagtctgcaagttctaattgctctcctggcagaagctctcagatctggctcaaacacatcaagaaggacaatttcctagaaatggaacagtcaggtctcaatttcatgcaagtttattcttttcaataaggcagttaaatcacattttacatctggtactaaattaatgggttgtatgttgttacggacttttcatagaaccatcttcacaaggattacatatg

SEQ ID NO: 576781 - DNA, 581 bp, Homo sapiens
gcgggcacctgtaatcccagctactcaggaggctgaggcaggagaagcttgaacctgggaggcggaggttgcagtaagccaagattgcgccactgcactctagcctgggcaacaagagctagacttcatctaaaaaaaaaaaaaagagtagagaaataaaggacgtggcagtggcggtgggtgtatgtttttggggaggtgarggaatgaggaaggcagggaaacagagttctctgcttcctttgcaagcctgatgaatagaaaggtatcaacagggtaacaactcaatgaagttattgctatgagctgccttggtttcctcccccagacacacggagctaaatgggacttcagtgggagtctgcaagttctaattgctctcctggcagaagctctcagatctggctcaaacacatcaagaaggacaatttcctagaaatggaacagtcaggtctcaatttcatgcaagtttattcttttcaataaggcagttaaatcacattttacatctggtactaaattaatgggttgtatgttgttacggacttttcatagaaccatcttcacaaggattacatatg

SEQ ID NO: 576782 - DNA, 522 bp, Homo sapiens
agcgccatgtggcttcccgggtggtgcagattctgtctctctctcaaacctcagcttcatgattcagcagcgctgacgtcaatttacaagaatgaaaagtgagaggagggtttgtgtgtgcaagagactgagttgggggcccaggtgcagtggaggtgtcctccccactgagcgggtgagccagggcagtgtggggcgggcaccatgggaaaggaggcactctttggaatgacaaggactgtgtgtgggtgtggggacagcctgtgaccagcctccaagccacccttgagctgaaaactctggcccccgttttccagatgaggaaatggaggctcagacaagtgcagccacctactcaaggtcacacagctcgtaagtgatggccaggacttggaccaaatscatcccactctaaacaacaagacaggtttcttcttcttttttttttttaagacagagtcttgctctgtcacctaggctggaatgcagtggcgagatcacaggtcactgcagaatcaaact

SEQ ID NO: 576783 - DNA, 585 bp, Homo sapiens
ataatattctatgctcccagaggatggagctcggaagcatgtgcccagctggatttcagaattgctatggaccagtgagtgctgtgtgctttgcatttttctcttctttgaaaggaaatatctattgcagttactctgtcaatgtttacctttgtatgttgggtgtagaggtgcagaaaacttttactttacagctctctaaggaatttctctggaggaatttcatctgcatctggccctgatttatctgactatatcttggacttctacctgatgttataatagcatatgacttgtgcatgaggagagaatgcattttgcatgccagagagatgtgattgttgtgaccacagggaggacattggtagatggttttgaagatagttgcaaaaatccttctcatcctcaatgmctttttgtaatatgagttagctattgctcccatcaagagatggagcccttttccccttcccttgaatctggaaagccctgtggcttccagtgaccattgccatatggcagaagtaacgttgtttaacttctgaagttaggctttcagaagtcttgcaccctgtgtttctcctt

SEQ ID NO: 576784 - DNA, 573 bp, Homo sapiens
gagctttaagttaatcagtaattggtttgtgtcctggagccctgggtgtttgaagccacatagcactactttgcacagtccatggttgatcctgtcgaagaaaattcattttgtaatataaacaaggacgagaatttgggacacagaaatactcaaataaaaatggaatatcctgagtcctactttttcccccaaccaggctttccctgagcccacttatttatggtttttccaaccctactgggactgtaagatggagataatactgtccccttaacagagttctcaagagctctgaagaggacagagaatgtacataaatgtccacatggtgtttggtatacaraagcaaaatatgtggtaggcttcctactctttctcctccttctcctcatcctcattgtcatcttcatcaatatcattatcatctgtcatctgaatgactcatatgtgcctccaaaaatatcttcttccagcttgattgcgggaaggaggactcaattcttgcctttcaagattggtaaagaaatctatggccttcaggtttcgggggcaggctggaggcagggaagg

SEQ ID NO: 576785 - DNA, 582 bp, Homo sapiens
agttgtcatgagtgagatgattttgttttgttttgtttgcccccaaatcattttcctttggacaaagaggacatttttcagcctcactgcccagagagccacatgacccttagtctgtgtgatgtcatttttaatgattttggcctaagtcacaaaatcagtgtcaacttaagaggacatgmaaccctctcaggagccaaaggaaccatagaatcaggaagatttgcaactgtctaaacccataaaatgtacaacaccaagagtaaaccctaatgtgatcatgctgtgtccacgtgtgtgtccactccaggagaaaccagtgtgtctgaaaatgggcctgagctatgattgtctggacctgcgcacaccttcagggtttccaagaaggagcaaggctgctgtgccctgaagcaggtgccaccctagccctggccttgttgtttttcatttgtcatggtggcaaaaatacagcaggtgggagtgcctggaacttctgccagcaacctcaacacgtgtcatcagacaatatttatgtgggtcaagttttcctctgagagagagagagggagaaaaaaaagagag

SEQ ID NO: 576786 - DNA, 582 bp, Homo sapiens
agttgtcatgagtgagatgattttgttttgttttgtttgcccccaaatcattttcctttggacaaagaggacatttttcagcctcactgcccagagagccacatgacccttagtctgtgtgatgtcatttttaatgattttggcctaagtcacaaaatcagtgtcaacttaagaggacatgcaaccctctcaggagccaaaggaaccatagaatcaggaagatttgcawctgtctaaacccataaaatgtacaacaccaagagtaaaccctaatgtgatcatgctgtgtccacgtgtgtgtccactccaggagaaaccagtgtgtctgaaaatgggcctgagctatgattgtctggacctgcgcacaccttcagggtttccaagaaggagcaaggctgctgtgccctgaagcaggtgccaccctagccctggccttgttgtttttcatttgtcatggtggcaaaaatacagcaggtgggagtgcctggaacttctgccagcaacctcaacacgtgtcatcagacaatatttatgtgggtcaagttttcctctgagagagagagagggagaaaaaaaagagag

SEQ ID NO: 576787 - DNA, 582 bp, Homo sapiens
agttgtcatgagtgagatgattttgttttgttttgtttgcccccaaatcattttcctttggacaaagaggacatttttcagcctcactgcccagagagccacatgacccttagtctgtgtgatgtcatttttaatgattttggcctaagtcacaaaatcagtgtcaacttaagaggacatgcaaccctctcaggagccaaaggaaccatagaatcaggaagatttgcaactgtctaaacccataraatgtacaacaccaagagtaaaccctaatgtgatcatgctgtgtccacgtgtgtgtccactccaggagaaaccagtgtgtctgaaaatgggcctgagctatgattgtctggacctgcgcacaccttcagggtttccaagaaggagcaaggctgctgtgccctgaagcaggtgccaccctagccctggccttgttgtttttcatttgtcatggtggcaaaaatacagcaggtgggagtgcctggaacttctgccagcaacctcaacacgtgtcatcagacaatatttatgtgggtcaagttttcctctgagagagagagagggagaaaaaaaagagag

SEQ ID NO: 576788 - DNA, 582 bp, Homo sapiens
agttgtcatgagtgagatgattttgttttgttttgtttgcccccaaatcattttcctttggacaaagaggacatttttcagcctcactgcccagagagccacatgacccttagtctgtgtgatgtcatttttaatgattttggcctaagtcacaaaatcagtgtcaacttaagaggacatgcaaccctctcaggagccaaaggaaccatagaatcaggaagatttgcaactgtctaaacccataaaatgtacaacaccaagagtaaaccctaatgtgatcatgctgtgtccacgtgtgtgtccactccaggagaaaccagtgtgtctgaaaatgggcctgagctatgattgtctggacctgcgcacaccttcagggtttccaagaaggagcaaggctgctgtgccctgragcaggtgccaccctagccctggccttgttgtttttcatttgtcatggtggcaaaaatacagcaggtgggagtgcctggaacttctgccagcaacctcaacacgtgtcatcagacaatatttatgtgggtcaagttttcctctgagagagagagagggagaaaaaaaagagag

SEQ ID NO: 576789 - DNA, 534 bp, Homo sapiens
gaattcctttggaaatactgtgtcattacacagtttatgatcaatgggttatcataaactgtataactatctgcagctatttacagatagttgctatctgcagagctatctgcaaaactgtgatgtaaaaccataaaggcattcgcagcttattgttcctattgccctttctatgtttgttgaaggttgagggtttgcttattttccatcctagtaattggatagttatatgatcatccatccatatttgagtagaggtcggatacatatgtcctcagtgttccagccaaggtctggacagtggaaacagtccatttggggtgcagacaatgagggggtacattacccatacataacttaaatacgcaataaaattgactaaaatttaatctgcttttaaatagtcaccatgctcagaaattcttaagtaccattaatgaaaagatctttttctggtctaatttgcaaacatttgctgtgattgcagctgtgtttcaataatatatatgcrtgcttcaaattagcacatttaaa

SEQ ID NO: 576790 - DNA, 576 bp, Homo sapiens
tgaattgatcttcagaaagaagacattgagagtcaaccgagggaggacacagaccctaggctgaatggggaggaagctaagaacactgcctggggttgccacgcagcaggactcctccctgaccctgagtggctcctggggaaatggtgagttaaataggcatggagtggctcttaaggacctcttgtaaggtgggtctggtggtagcaaatgtacttagcttttgcttgtttgaaaggattacatttctccatttcccaggctgttctcaaactcctgagctcaagtgatctgcccacctcagccttctaaagtgttgggactgcrggcatgagccactgtgcctggccaaaaatcaatagcatttccctacaccaacaacgtctaagctgaatgcaatcctattcacaatagccacaaaaagaataaaatacctaggaatacagcctacctgggaggtgaaaaatctctacaaccaaaatgacaaaacactcctcaaagaaatcagatgacacaaacaattggaaatacatttcatgctcatggataggaagaatcaatattgttaaaatgaac

SEQ ID NO: 576791 - DNA, 624 bp, Homo sapiens
tttttaaactaaattagagaatgtctccaaggctgtttgaaaacaagtaaattccctaagaagaacatcagtaatgaatggcaaagaataacacacacacacacacacacacacacacacacacacacacacacacwatcagtcagtcaattgagaaggacacggagtccagctgaagaaaacaaagttgagaatctctttattctttgaggacactcatgtttgtttccctctgtatttgcatttcagaggaagtgtaacaattgatgcatgccagctgaagtcccgcttcagtccatattctagaccttttcagttccaaaacacgaaacacaatgtccttctgccaaaatatttactttgcaaaacaggttgtttttgctatttggccatggactcagcatatcttaagaaatgaattataaagctagttctttcagcatgtaaaaattctaatcccggagtaacatttcttactacaacttattcattttgtaaatagatattgcgcattagattgtgaccacatttatgggatactctttttcctggctgaagtgaatggttctctctctgagtccccataatttggtttggcagcctgacatcaatcgagaaaaagga

SEQ ID NO: 576792 - DNA, 624 bp, Homo sapiens
tttttaaactaaattagagaatgtctccaaggctgtttgaaaacaagtaaattccctaagaagaacatcagtaatgaatggcaaagaataacacacacacacacacacacacacacacacacacacacacacacactatcagtcagtcaattgagaaggacacggagtccagctgaagaaaacaaagttgagaatctctttattctttgaggacaytcatgtttgtttccctctgtatttgcatttcagaggaagtgtaacaattgatgcatgccagctgaagtcccgcttcagtccatattctagaccttttcagttccaaaacacgaaacacaatgtccttctgccaaaatatttactttgcaaaacaggttgtttttgctatttggccatggactcagcatatcttaagaaatgaattataaagctagttctttcagcatgtaaaaattctaatcccggagtaacatttcttactacaacttattcattttgtaaatagatattgcgcattagattgtgaccacatttatgggatactctttttcctggctgaagtgaatggttctctctctgagtccccataatttggtttggcagcctgacatcaatcgagaaaaagga

SEQ ID NO: 576793 - DNA, 639 bp, Homo sapiens
aatgattcaatggtattacacgaattgcaaacaaacaaacaaaaatcacatacaaggctttgggtgcagcttgtgaaattgagggtttaatattctaacccaaactgagtgagataaaacccaatttgaataagtaaaagccaagtaaaggttgaatgacccggtcacaggaaatgcagggaggcagaggggcatcaggaacaactagaacgagaaacatggacctccccaggactgtgcctgcaactgtttctctctgcgtgttggttttattccctttcactgcagaccagcattcttcagactcagggaaccatggccactggttcataagttatgcaccataaagcttcagccaatgcaggaaagctctcactgggccaagccaaatcctagcgaaggaccttaattggtctagcttagrtccaagtcaactattgctaaaggagtagagtctaataaaaatatggagccaccattggcacatggtcaatgcagtaaaggacccagctaagaagaatctgcaaagacaaaacaactaacacgtaattgatttactcagaatggaacagctaataagcagtaggttcaggatcacaatcttagtacagtacaaagttctttctctgaaagtgacag

SEQ ID NO: 576794 - DNA, 565 bp, Homo sapiens
tgacttttcatgtaatgcattataaggggacagctctcctgattaggaatatgtgtttaatatttactgcctaaattattcctaggttgtgtggggggtgtgtgtgtatttagcctccagtgccactgcctatgtacattagctcctctactgctataccctttagcatggtatctgtcccttaagtatctaatggagaaaacaaataaggattgtctgccagctccgctgtaatacactcacaaaagcttgtgaatctttaaaagaaacaaagcaaagaaaataaatgcatgtctaagcacatttcctgaatatgtgaaagtcctctggcctttctcttccctacaaagattaccatcatctttaacatacatacctcacaaacatccgccaagtgctgtattgaataatttagtatgatttagtgtggctgcttgttctctgttagacttgtgtggaatgaaataaaagaaaggacgtaaggcagacacagaggagcacaattataggcaaatcacactaggtttcattcatcattctgkgctttcatgccaggaactatttc

SEQ ID NO: 576795 - DNA, 559 bp, Homo sapiens
atacttttataataaaaattcaacaaattaagtatgaaagaaatgtacatcaacataataaagaccatataaaacaagctcacagctaaaacattcacagtagtaaaaaataaaagtgttttctaaagaccaggaacaaaacaagacygctcactcttacaattgctattaacatagtactggaagttctagccagagcaattagtcaggtgaaataaataaagggcattcaaattggaaagaaataaattaaattgtctctgcagatgacataatcttatatacagaaaaccctaaagattacactgaaataaactgttagaaataatgaacaaatttagtaatgttggagtatacaaaatcaacatacacaaatcagtttcatttgtatacaataacaatgaagtatccaaaagaattaagaaaacagtatcatttacaatagtatcaaaaagaacaaaatacttatgaataaatttaaccaagaagctgaaagaattttacactgaaaattatagaacattggtgaaagaaattgaagaagacacaaataaatgga

SEQ ID NO: 576796 - DNA, 606 bp, Homo sapiens
aaaattatcctatcatgaaataattcagcagtcagcttgatgagtatgcttcagtgcaaaagccacagatatctgtgtcaagctgattttctgccattatttgcatgtttagagggttacttgaaaatagaaaaaaaatgaataatgagttttgtataagtacatacaatcacagcaaatacaatcacagcaaataatgtaaatatatacaatcacagcaaattaataagtgggaatggggctaaaatatggcctctaaaccttgagtcacaattgctatttgcatgccccaaataaccatttaggttttatcatcatctatcaaatactttccaatgacagtgacatctcttattcttagaagacagacacayaggatactatcccaaaagggtgcattttttggacttcccaaatcactaaaccaaaattattccatttaccatgaattttaatcaatatgttattattccaaaaatagatttaaatgtattcttcatctcatgcagtgttcatgatggctattgcaaaacaaaaggcagcatcatccatggcttttatcctagaactctggaactgctatcagggctgaatgggagacagttt

SEQ ID NO: 576797 - DNA, 596 bp, Homo sapiens
attttgaaaagtttttacattattacctgaaagttattggggtaattgtagcaaagttcattgtagatcttagatacctgtagttttgagagtattttaacattagatttctaccagtgatttggaattttggcttgcaggatatcttgaggaagagagatttactatgttgccggtttgttgttgtttttccctcagtctcctttaactgtctttattctcacaccsatgtatttaacaactttgtgttgactgtacctgcatcctgatcccaccacctccctacgtctgccatgagctagtctcaggcagtatgtgaaaccagtaatattttttctgtctccttcagtgaggttgactttggtcctccttccttttggaacatattctgtcccgttttttctacaggagctatactcctggtaaccactgcttgtaacagcaggtatgtttcagccttacaagctgctttgtatttctgttccagggagatttttatcttgttattgagtccagagtttctgattttccattttatttctcactgctataattttgagccaagggagcgctctttattcaaagtctcacctatc

SEQ ID NO: 576798 - DNA, 544 bp, Homo sapiens
tcttgtgccatggttttcagctccatcaggtcatttaaggtcttctctacactgtttactctagttagtcatttgtctaaccttttttcaaggtttttagctyccttgcgatggtttggaatatgctcctttagctcggagaagtttgttattaccgaccttctgaggcctacttctgtcaactcatcaaactcattctctgtccagttttgttctgctgctggcgaggagctgtgatcatttggaggagaagaggcactctgttttttggaattctcagcttttctgctctggcttctccccatctttgtggtttttgatctttgatgttggtgacctacagatggggttttggtgtggatgtcctttttgttgatattgatgctattcctttctgtttgttagttttctaacagtcagacccctcagctgcaggtctgttggagtttgctggaggtccactccagatgctgttcgcctgggtatcaccagcggaagctgcagaacagcaagtattgctacctgatccttcctctggaagctt

SEQ ID NO: 576799 - DNA, 589 bp, Homo sapiens
ttttttgtttaataacgtgattgaacatctttttatatgttgagaagccatttgcatctccttttctgtgaccagttgatwctgtcctttgtccagttttctattggtttgttgggtttttcttaatagtatgtagggattctttatcaaaagggaaatttaacccttttttgtaatgatacaaattacaagtactttttaccagtttcttgtttgtgcttgactttatttacagtggcttttcttatgtaaaatttctagctttatatactagtttgaaacatttttattgcatgtcttctgggttttatatagtagttagaaagagcttcttccaagtttgtagaagaattttctcacagtttcttctagtcttcttgattgttttcaatatttttacatttaagtatttacatcaagaaattatcctagtataaaatgtgagctatagattctgccttactttttagatgtttccctggctatcctaaaaaatcagtgaataatctctctttccctctcttatgtgagatgacgtatttatcatatataaaattcctgaacttggacttatttccacaccatctat

SEQ ID NO: 576800 - DNA, 578 bp, Homo sapiens
ggtaaatatgatactttaacaatgagtaggaaacttgtactatggaaagtgcattgaggaagtttggaaatattttctttattatatgatttgtaaataaaaatgttcatacatgaatgctttaaaaaattgaaagccgaatttttaagctccttttagaaaatattccaaaagaatagtcttactaagtattaccgaagccttygcaagaagaactgttttatatcaaacaagacagacatttacaatgaaacttaaaaaataatacctagaataatttttgagaagaaatggaggataatttactaaatgtgtctttctcccacttgtatctatagagttttagtagtatcctttccagctatgacagccattttgaaacaaactggattaagtcattgtttcagaaagatttaaaccagaatttttaaaagtaaacatattcatctatgctactaacaataaaacacaattttaagaaaagccaaaatactatgggcatgttattttttaagtttatgaatccttttgaaatttctcatcttgtgtatggcttacaagatacataatctattagc

SEQ ID NO: 576801 - DNA, 478 bp, Homo sapiens
tttaggatgggtttggatagagttgcaaggagtattccagctgaagtgcatttgaacaatgacacttaaggtaaattagttgagttgagcattggagagttgtggaaggacaagttgaaaagtgagtttgaggcttcaccacagagggccttgaaaaccaggaagcatttattcttttcatcgtgcagggatttgaaggcattgagatggcgagcaataaagatacaatctaaacttccttgtgcaaagattaatttacctatagtgtgtatgaaaactgtaaggtagagagaagagggaagggaacctattaatatttagataaaagatacagctgggcacagtggcaggtacctggagtcccagctactcaggaagctgaarcgggaggatcccttgaggccaggagtttgaggctgcagtgagctatgtgcctgtgaatagccactgcactccagcctgggcaatatagcaaggg

SEQ ID NO: 576802 - DNA, 487 bp, Homo sapiens
ttcatggtacaaagcctgataaatagtaggcacttacggaatgttagtctccttacttcattaaaagtgagacaggattttaaaaatcagccagacttatccttaactttgcacatggagaaactaagactcagaggaaagttagttgctaaatgtatcaacagattagtctggcactcataaattatggttgagattagttatattgaatcaaaagtaaaattaaaaagtgtgtttggaaagagggttcaacaacaacaacaaaaatctattatatgtgtaaggtaagttatgttgaatcaaagtgaaacgaaaatgtgtgtttggaaaaagggttacacaacaaaaaaaaaatcattacttgcattctgatgattacttgcatttgtacagtggcaggtacaaaaaatgtttgtaaaccacctgatggtacattaattatttttattttattgagtrtgtgttcttctataaaacaggtgtgata

SEQ ID NO: 576803 - DNA, 586 bp, Homo sapiens
acagaaacatctgccagatggaagctgtaaagagacgtttacgtaagtgttcagtattcaggaaagtggacaggaagaagtttaatgactgaaactaaaagaagccaagtggggttagtttggagatagcttccagaaggaatgcacttttttggcttggttatgggaaacattacctggttgcataaacttttatttctttgtagcattccccagatgaatactctattaagctgatgtgactatagttgtctttatttcccttcttcccccatttcctgtagaggacaacctggtcacaactatattggctgaatactctatcccaataagagacctggatcacagggctgtccattccagtctattccttacgctgtaatattttcactctgtttgccttatacctgagcctgctctcattacaacaccggggcatgtggccaastctcatcttcttactgttagtttctaacactaaaagccattcaattttctcttctatccttaaacacctcaagaaaggatttttttaaaaaaatattaagaattgctactgtgatggaattgcattgtgttaacttaa

SEQ ID NO: 576804 - DNA, 586 bp, Homo sapiens
acagaaacatctgccagatggaagctgtaaagagacgtttacgtaagtgttcagtattcaggaaagtggacaggaagaagtttaatgactgaaactaaaagaagccaagtggggttagtttggagatagcttccagaaggaatgcacttttttggcttggttatgggaaacattacctggttgcataaacttttatttctttgtagcattccccagatgaatactctattaagctgatgtgactatagttgtctttatttcccttcttcccccatttcctgtagaggacaacctggtcacaactatattggctgaatactctatcccaataagagacctggatcacagggctgtccattccagtctattccttacgctgtaatattttcactctgtttgccttatacctgagcctgctctcattacaacaccggggcatgtggccaagtctcatcttcttactgttagtttctaacactaaaagccattcaattttctcttctayccttaaacacctcaagaaaggatttttttaaaaaaatattaagaattgctactgtgatggaattgcattgtgttaacttaa

SEQ ID NO: 576805 - DNA, 483 bp, Homo sapiens
actctagggatttcaaggacatcactgatagcaaacttctcacwatatatgaatagtacaaagctgggaggtttaactaagttttaaaaaatgttaagtcaggatggaataatgggctaaatttaacagattgaaaagtattagggataaatgtgcagccctgtttttagtttccaagacctagcttcaaaaaagcaatatgggaaaaaataagaacaatcttaggatacataatggaaatataacatccaagatgaaaagtaatatttcccctttaccatgtactgaaaaggatgtattatattccattaggtactacatttgaggagaaaaatagtcaacatagaacacactcagagagggcagttagaatgaacaaactcaaaacacagttacctgagaaatagcaaaagacactagaaattttaagcctggagggaaaagaaaaagtttaatgggatataagggagaccataagatatg

SEQ ID NO: 576806 - DNA, 483 bp, Homo sapiens
actctagggatttcaaggacatcactgatagcaaacttctcacaatatatgaatagtacaaagctgggaggtttaactaagttttaaaaaatgttaagtcaggakggaataatgggctaaatttaacagattgaaaagtattagggataaatgtgcagccctgtttttagtttccaagacctagcttcaaaaaagcaatatgggaaaaaataagaacaatcttaggatacataatggaaatataacatccaagatgaaaagtaatatttcccctttaccatgtactgaaaaggatgtattatattccattaggtactacatttgaggagaaaaatagtcaacatagaacacactcagagagggcagttagaatgaacaaactcaaaacacagttacctgagaaatagcaaaagacactagaaattttaagcctggagggaaaagaaaaagtttaatgggatataagggagaccataagatatg

SEQ ID NO: 576807 - DNA, 483 bp, Homo sapiens
actctagggatttcaaggacatcactgatagcaaacttctcacaatatatgaatagtacaaagctgggaggtttaactaagttttaaaaaatgttaagtcaggatggaataatgggctaaatttaacagattgaaaagtattagggataaatgtgcagccctrtttttagtttccaagacctagcttcaaaaaagcaatatgggaaaaaataagaacaatcttaggatacataatggaaatataacatccaagatgaaaagtaatatttcccctttaccatgtactgaaaaggatgtattatattccattaggtactacatttgaggagaaaaatagtcaacatagaacacactcagagagggcagttagaatgaacaaactcaaaacacagttacctgagaaatagcaaaagacactagaaattttaagcctggagggaaaagaaaaagtttaatgggatataagggagaccataagatatg

SEQ ID NO: 576808 - DNA, 483 bp, Homo sapiens
actctagggatttcaaggacatcactgatagcaaacttctcacaatatatgaatagtacaaagctgggaggtttaactaagttttaaaaaatgttaagtcaggatggaataatgggctaaatttaacagattgaaaagtattagggataaatgtgcagccctgtttttagtttccaagacctagcttcaaaaaagcaatatgggaaaaaataagaacaatcttaggatacataatggaaatataacrtccaagatgaaaagtaatatttcccctttaccatgtactgaaaaggatgtattatattccattaggtactacatttgaggagaaaaatagtcaacatagaacacactcagagagggcagttagaatgaacaaactcaaaacacagttacctgagaaatagcaaaagacactagaaattttaagcctggagggaaaagaaaaagtttaatgggatataagggagaccataagatatg

SEQ ID NO: 576809 - DNA, 625 bp, Homo sapiens
agaatagaaacattattggttgaaaagcctctttcatattggtgcattttcaggattccgtcctttgttctcttttcaccttatttctacctcgacaaccccgtctaaattcagtttcaactccatctatttgaaaacagcacacacacacacacacacacacacacacatataatacatataaaatacaaatatattagttgtatatacacacataaatgcattatatataatacatatatattagttgctatacatatatatatctataacgttggactctctgctgaactctagaccccatatgtattagggtctgctacttatcacacatcttaaattacatgtcatcaaggcaacagacaactctcagtatgtttaaaattaaactcatctttccttctcccaaaatatctcctccgttgttgtatattttatttatacaaatagaaacctagttattcctctgaactcctcgtattcctttcctaccactccatatgatttctcgagtgtgtatattctatcttctgaatatctcctgaatgtacacagttctctccaacttggttwcaatttccttagttcacatgcccttcatttcatgcctgaaatgctgtaaaat

SEQ ID NO: 576810 - DNA, 657 bp, Homo sapiens
tcctactgtttgcccaaagcacgggcatggagaaaaccttccagagcccattcacagggtgtgacaagaataagtgacccagaacctgcttactggggatctcagtaaagagtaagccctggaatagatttggggctcctcaggatacaactgggccaggtgtataaaaaataaagcaactcaccagaaaatcacaggtttcccagaagtcttttctgtgcaggtcatttttcatgaaaacagacatgtatatagcactgggaaccctcagatcttggagtactattccatacagttaacaacccttcaggtaaaaaaaaaaacacccccaatatctctagcttaatttccttctgttaccatagacagtatctgacaccagggctcaattaagggatcctcattttcttcctttccacttccttccctctttaatagtgtctttgatgaagctcctccctggttttggggaggggactacctattctgggccttccagccacaaagctccgaggaggcaaggggaaggagctattgaagaggatgcaccaaaggcccttgtaagcaacttacggaaacactgaggcagctctccggtccaggacccatttccctcacaggtgaacacygcgggcagggagagctggtacccctcca

SEQ ID NO: 576811 - DNA, 530 bp, Homo sapiens
tacagacatatcttcaaggcagacagaatgttcccctgacaatttcagtttataaaggttttacagcaaaagagattgaagttagacttagggctgaacttcactgatggcctaagagatgccaggtgagaggtggataaattctgaggggtgtggaatagtaggagggcttacctatcttctgttttggttacagcaattacctgtggacacccaggcaaccctgtcaacggcctcactcagggtaaccagtttaacctcaacgatgtggtcaagtttgtttgcaaccctgggtatatggctgagggggctgctaggtcccaatgcctggccagcgggcaatggagtgacatgctgcccacctgcagaagtgagtcaccctttctctcccaatccagtccccaccatctctgctatatgtggttctgtagctcagaaaaagaagccagtgaattcattctggcatcattctgatccasatagggaagatggagcagagaagggtcataaatgaggactctctcaaccct

SEQ ID NO: 576812 - DNA, 608 bp, Homo sapiens
ttccctatttcagaaaatgtacatgtttttcatttctgaaaaatatctgtttgtcttttccgtctttttcacccttctcccgtcttgaaagattgtcaacagaagtctacaaatcagaaattattatgcacttacattttacaatttagaggtttaaggtttatacagcattttcaagcagattgcctctgcaagacttttttaagtgtcccaagatataatgaaaccaggcctggacactcaaactcaatttcaagtaccacatattcagtcaccaccctcagcctargcatccatcacttttacctactttttttttttttaacctctccaataaaaaagtcatcatccttcaagttttctaagcttggaaaaaatgaaaatcacaagtgaatgacagtgttgactgtacaattaaaaccttcaatgcacaaaaatattaaatggatgatctctgcaaaaacctctgcaagaaattataaatggcaactaccattaacttttagtttagaataaatctataaaaccaaaagaacagactagacaactcacaagaaggtgacaaatctttgggaaaaacactcaatgcctatcaagctcccccaaaa

SEQ ID NO: 576813 - DNA, 507 bp, Homo sapiens
tgggtggattgcctgagctcacaagttaaagactagactgggcaacatggcaaaaccccatctctacaaaaaatataaaaattagctgggtatggtggcaggtgactgcagtcccagctatttgggaagctgaggtgggaagatggcttgagcctgggaggtggaggttgcagtgtagccaagatcacccccctgcactccagcctgggtgacagaaccagaccttgtctcaccaaaaaaaaaaaaaaaaaaaaaaaaaaaawtgcagttgctaaaaaacaaaaaactcaatggaaaggttaaaggttaaataataaactaaacttaattggaaaagtaaatgtatgacagatccaaggaaatcaccaatgagatttaaaaaataaaaaaatttgaaaaatttggttaaaaaacatagagatataaggaaaatccaacccacatttaataaaatctccaagggaatggaaaatgaaagggaaacaatatttaaagagataacagctg

SEQ ID NO: 576814 - DNA, 507 bp, Homo sapiens
tgggtggattgcctgagctcacaagttaaagactagactgggcaacatggcaaaaccccatctctacaaaaaatataaaaattagctgggtatggtggcaggtgactgcagtcccagctatttgggaagctgaggtgggaagatggcttgagcctgggaggtggaggttgcagtgtagccaagatcacccccctgcactccagcctgggtgacagaaccagaccttgtctcaccaaaaaaaaaaaaaaaaaaaaaaaaaaaattgcagttgctaaaaaacaaaaaactcaatggaaaggttaaaggttaaataataaactaaacttaattggaaaagtaaatgtatgacagatccaaggaaatcaccaatgagatttaaaaaataaaaaaatttgaaaaawttggttaaaaaacatagagatataaggaaaatccaacccacatttaataaaatctccaagggaatggaaaatgaaagggaaacaatatttaaagagataacagctg

SEQ ID NO: 576815 - DNA, 507 bp, Homo sapiens
tgggtggattgcctgagctcacaagttaaagactagactgggcaacatggcaaaaccccatctctacaaaaaatataaaaattagctgggtatggtggcaggtgactgcagtcccagctatttgggaagctgaggtgggaagatggcttgagcctgggaggtggaggttgcagtgtagccaagatcacccccctgcactccagcctgggtgacagaaccagaccttgtctcaccaaaaaaaaaaaaaaaaaaaaaaaaaaaattgcagttgctaaaaaacaaaaaactcaatggaaaggttaaaggttaaataataaactaaacttaattggaaaagtaaatgtatgacagatccaaggaaatcaccaatgagatttaaaaaataaaaaaatttgaaaaatttggttaaraaacatagagatataaggaaaatccaacccacatttaataaaatctccaagggaatggaaaatgaaagggaaacaatatttaaagagataacagctg

SEQ ID NO: 576816 - DNA, 384 bp, Homo sapiens
ctcggcctcccaaagtgttgggattayaggcacgagccaccacacccagccttaaaatctgtcctagagccaatattcaagggtttttcccatatgagaaccaatgatggtcttatgtgtgctgctcccataataaaagccatatttcaaatcacatctaagtctaagacttctaggtctactgctgctggtgctgcccaccagctcctacctgtgggctggggaacagtcattgctctgccgtcccgttctctgggagaaatgcctgagagacagcaccaggatcacactccttgaagacttcagaatttttcaggtttctcattagctccaaaatttttataattgtaaagtgactaagatcacaaaataaaatcagaattc

SEQ ID NO: 576817 - DNA, 535 bp, Homo sapiens
cagtccctaggctgggtgtggtgcctcatgcctgtaatcccagcactttgggaagctaaggtgggtggattgcctgagctcccaagttaaagactagactgggcaacatggcaaaaccccatctctacaaaaaatataaaaattagctgggtatggtggcaggtgactgcagtcccagctatttgggaagctgaggtgggaaratggcttgagcctgggaggtggaggttgcagtgagccaagatcatgcccctgcactccagcctgggtgacagaaccagaccttgtctccccaaaaaaaaaaaaaaaaaaaaaaaaaaaaatgcagttgctaaaagacaaaaaactcaatggaaaggttaaaggttaaataatagactagacataattggagaagtaaatgtatgacagatccaaggaaatcaccaatgagatttaaaaaataaaaaaatatgaaaaaattggttaagaaacatagagatataaggaagatccaacccacatctaatagaatctccaagggaatggaaaatga

SEQ ID NO: 576818 - DNA, 535 bp, Homo sapiens
cagtccctaggctgggtgtggtgcctcatgcctgtaatcccagcactttgggaagctaaggtgggtggattgcctgagctcccaagttaaagactagactgggcaacatggcaaaaccccatctctacaaaaaatataaaaattagctgggtatggtggcaggtgactgcagtcccagctatttgggaagctgaggtgggaaaatggcttgagcctgggaggtggaggttgcagtgagccaagatcatgccmctgcactccagcctgggtgacagaaccagaccttgtctccccaaaaaaaaaaaaaaaaaaaaaaaaaaaaatgcagttgctaaaagacaaaaaactcaatggaaaggttaaaggttaaataatagactagacataattggagaagtaaatgtatgacagatccaaggaaatcaccaatgagatttaaaaaataaaaaaatatgaaaaaattggttaagaaacatagagatataaggaagatccaacccacatctaatagaatctccaagggaatggaaaatga

SEQ ID NO: 576819 - DNA, 534 bp, Homo sapiens
gcctgtaatcccagcactttgggaagctaaggtgggtggattgcctgagctcccaagttaaagactagactgggcaacatggcaaaaccccatctctacaaaaaatataaaaattagctgggtatggtggcaggtgactgcagtcccagctatttgggaagctgaggtgggaaaatggcttgagcctgggaggtggaggttgcagtgagccaagatcatgcccctgcactccagcctgggtgacagaaccagaccttgtctccccaaaaaaaaaaaaaaaaaaaaaaaaaaaaatgcagttgctaaaagacaaaaamctcaatggaaaggttaaaggttaaataatagactagacataattggagaagtaaatgtatgacagatccaaggaaatcaccaatgagatttaaaaaataaaaaaatatgaaaaaattggttaagaaacatagagatataaggaagatccaacccacatctaatagaatctccaagggaatggaaaatgagagggagacaatatttaaagagataaca

SEQ ID NO: 576820 - DNA, 527 bp, Homo sapiens
caaggaacattcacccctgaacttaaaagttttttttttaaagaataccattacatctcagagttgcactcttaagcacaagttgaaatgaaatttaatataatgaatttatttcctctttacaaacaaaattgargcttgggagtcttcagttactcagaatgatttatttgtgttaatttcaataatttataggcagatttttgcaatcctcctgtggatagataggttaagcaccatttagcacaaggcactgaaaaataagtaaaaaccataattcatttctacagtaacgttctccgcatttggcctagtggatagaagacaatcaacatgtgcacctttggaataaaaagcttatggtacttatgtttaactcttctcctgggccatggttgcccatttattcctctcttgcaccctggagagctgttaagagcaaggtttagggctcagaatatcaggttagtagagcagatttgatgccagtgcagtagtgccattgttagattaggctctgacattgt

SEQ ID NO: 576821 - DNA, 527 bp, Homo sapiens
caaggaacattcacccctgaacttaaaagttttttttttaaagaataccattacatctcagagttgcactcttaagcacaagttgaaatgaaatttaatataatgaatttatttcctctttacaaacaaaattgaggcttgggartcttcagttactcagaatgatttatttgtgttaatttcaataatttataggcagatttttgcaatcctcctgtggatagataggttaagcaccatttagcacaaggcactgaaaaataagtaaaaaccataattcatttctacagtaacgttctccgcatttggcctagtggatagaagacaatcaacatgtgcacctttggaataaaaagcttatggtacttatgtttaactcttctcctgggccatggttgcccatttattcctctcttgcaccctggagagctgttaagagcaaggtttagggctcagaatatcaggttagtagagcagatttgatgccagtgcagtagtgccattgttagattaggctctgacattgt

SEQ ID NO: 576822 - DNA, 535 bp, Homo sapiens
aatatcattaactaatggttctagaataatgaatattcatctgtaagaaaaatgaaatcccacccttgcctaatatcacatacgaaaattagattaaaataaatcatagacctaattgtgagcacttaaattacaaatatctcagaaaataaacatgagagaaaatctttgtgcccttaagtttaacagagatttcttaaatagtacacamcaattatataaattacatgacttaatcaaaacttttaaaactcttttaaacagactcaaaagaaaataaaaaggcacaacacaagctaatagaaaatgttttataagtacatatcgaatagataattttattcagattctaaacctacagatggcaaataaatgcttgaaaagatggtcaaccttattaatcatcagaataataaaaattaaacaacaaaaataccattggcctaaccattagatggctaaaatttataaagctaaccataaaaagcattggtgaggaataacagaaattctaacttgtttgtggagatctaaa

SEQ ID NO: 576823 - DNA, 586 bp, Homo sapiens
aaaatgcttttaagaagcccaaaatgcttttaatcagtcactctaaatttattcatgtgttgaaataagcactgaaacaccaacaggaataaaagagtataccaagattaaattcagaggcttcttaaaataacaatygacaaggcagtcacagacactaacaagtcctggtttctttgggattatttccaagaaaggaaaataaagatcccaaggcctaggttgctgctattgaacagaaaagcaaataatcaaataattaagacaattccagtgattattcacaggagatgtgactacttgatttggctgttggctatttctccctttagatttttcttccttatgaaggggaacatcacacaccagggcctgttgtggggtggggggagggaggagggatagcattaggagataacctaatgttaaatgacgagttaatgggtgcaccacaccaacatggcacatgtatatatatgtaacaaacctgcacattgtgcacatgtaccctaaaacttcaagtataatttaaaaaaaaagatttttcttccttataagaaaacccttaaaaaagtagttttcccca

SEQ ID NO: 576824 - DNA, 549 bp, Homo sapiens
tggggtggggggaggggggagggatagcattaggagatatacctaatgttaaatgacgagttaatgggtgcagcacaccaacatggcamatgtatacatatgtaacaaacctgcacgttgtgcacatgtaccctaaaacttaaagtataataaaaaaaaggttccaatgaaaatagtagacaacataaaagaataagtgggtaatataaacatagagatgatagcctaagaaataatcaaaagaaaatactggaaattaaaaatagccacaatggaaataattgatttgataggctaaaactaaagagatggaaattgataggccatgctaaaactaataaagtcaaagtggctatattaatcagacaaatatcactttagaacatggaaaattattagggctaaaggggacataatataatgataaaagagtaattctccacacagaaaaaaaatattgattatatatgcaactagcattattctatgacaatataagaggcaattaggcaagaagactcccacctctgtggaacctaatgcagcaac

SEQ ID NO: 576825 - DNA, 620 bp, Homo sapiens
  misc_feature 1, 2, 3, 4, 5, 6, 7, 8, 9, 10, 11, 12, 13, 14, 15, 16, 17,18, 19, 20, 21, 22, 23, 24, 25, 26, 27, 28: n = A,T,C or G
nnnnnnnnnnnnnnnnnnnnnnnnnnnntaagctctacccagtatcagacggacactagacttytcctcatggcacgtctttgcctggcttttcccacagcctaagtcgctttccttatttcctcaacaaatagcttataacattatcccatctcaggctctactttcagggggtcagacataagacaaaatataatacgcttagatactattgttaactccacgtttcaaacacactcagactcattgcttttattcttgttttatcatttttcctatgtctgatagtttaaacacatttgtgataaagcaggatactttttgcacccaaagagtacttaaaatgaagtttatgattattttctgatcctatttcatgctactagatctatctgaggcattcttaatctgaactggaaatatatctcatagagccaaaagaccaattatatccagattcttttatatcccaaagtgtttctggttatctgtagcatgttacctatcctgtttaaatctgtagttcttgaactataaagtgagactgtcaatgccatttctatgtaatttttcatagttgttgcaaagattatataaaataatgaatgtaaaaactcttt

SEQ ID NO: 576826 - DNA, 621 bp, Homo sapiens
gaaccatcttatatcccttgtataaatcctacttgatgataggatactatctttttgatgtgaagttggattcaatttgctgttattttcttaaagatttttgcatctgtttatcacgatattgacctacagttttctggatttttttgttgtgtccttgtctagttttggtatcaaggtatcagggtgatgctagccttgttgaatgagttaggaaaaattttctcctctttgatttttaaaaatagtttcaggagaattgatactagtccttctttgtacatttgttagaattcagctgggaatacatcckgtctggggattttctttgttagaaggatttttattactgactcaatcttgctactcattatgggtttgttcaggagatcaatctcttccaaattgaatcttgggaggttgtgtttttccaggaatttccccatttcctctcggttttctggtttgtgagcatatcattgttcataataatctctgttaatcttttgtatttctgtagtattagttgtaacgtctccttttgcatttctgattgtatttattggatcttctctcttcttagtttagctaggggattattaattttatttgtccttttga

SEQ ID NO: 576827 - DNA, 592 bp, Homo sapiens
ttttgtttttgcttttttccatctggtcacttacatttcttctctcagtccttgggcatcgggcagtccgtcttctctgtcaagtcacatcacctttacatcactgccttaagcagaacttgagggcttcagcctattctactgaatgcccactcygacccatgagtaatattcatgcatttttgtccccactattggtagaaatagggctcactcatactgttatcctctctcccttcctttcatgccatgggctgtgatagggtttggctctgtccccatgcaaatctcatcttgaattgtagctcccataattcccacatgttgtgggagggaacaggtgggagataattgaatcatgggggcggtttcccccatactgttctcgtggtgaataagtctcatgagacctgatggtttaattagaggtttccccttttacttggctctcactcctctctcatctatggccatgtaagatgtggctttcaccttctgccatgattgtgaggcctccccagccacttggaactgtgaatccattaaatctcgttttctttataaattacccagtctcaagtatgtctttatc

SEQ ID NO: 576828 - DNA, 404 bp, Homo sapiens
gaaaaaacaatcctaaaattcatatggaaccgaaaaagagcccgcaaacccaaatcaagactaagcaaaaggaataaatctggaggcattacattacccattcaaactatactataaggccatagtcaccaaaacagcatggtactggtataaaaatagacacacagaccaaccaaacagcatagagaacccagaaataaagccaaatacttataatcaactgatctttgacaaagcaaacaaaaacataaagtcaggaaaggacaccctattcaacaaatagtgctggrataattggtaagccacatttagaagaatgaaactggatcctcatctctcaccttatacaaaaatcaactcaagatgaatcaaagacttaaatttaagacctgaaaccataaaaa

SEQ ID NO: 576829 - DNA, 537 bp, Homo sapiens
gctcaggaatgataatactggactaccgctgaaacagcagcaagacacagcaatattctctggggaagagtacttaaagaagcccagagacaagagagaatatagaaacaagagtactagaggagtttgaagcctctggcaactacagtcataacaaacataaaacacagcccaagacctaaccagattagcataaatcctcacattaaaggcctatttacctgagttcctattacttgatacaacatgcccaggctccaacaaaaaattataaggcayaccaaggaggagaaaaaccacagcctgaagagacaaaacaagcactgaaaccagattcagctatggtacagctgttggaagtgttagataggaaatataaagtaactaagattaatatgctaagttcactaatgaagaaagtagacatcacacatagacaggtaatgtaaccagagagattagaattatatgaaaaaacttttttaaaatgttaaaaataaaatgatgaatgaactcccattcatgattgctacaaag

SEQ ID NO: 576830 - DNA, 535 bp, Homo sapiens
acagtttctgactacagtacaattgtgctggaaatcagtgacaagccacagcaatgcccaaacattcttttttcattattatttttcttgtaacatttttaataaatcataaaaaatcataataaaaattaaaaactacttaagatttaacttaagaaaatactatatatctaaatttgtggtatgctgataaaatattgggaagtttatattcctaagcacttttattagaaaataagaaaaactgaaagtaatcatctgatatggtttggctgcatccccacccaaatctcatcttgaactgtggttcccataatttccgtgtgctgtgcaagggacctggtgggacgtaattgaatcatgggggcgggtttttcccttgctattctcatgatagtgaataagtctcatgagacctgatggtttcataaggagtagtttccctacacatgctytcttgcctgcttccatgtaagacatgcctttgctcctcttttgccttctgccatgattgtgaggcctccccagtcatgtg

SEQ ID NO: 576831 - DNA, 610 bp, Homo sapiens
aattcttagtttgtgaactaggggattttttttttcatcctttcttgaagagcagttttccagcctggtcaagtgaattaataagggtcagacctccatcaagactgaatttgtgtgcactcaaatgtaaagacagttggacacaacagcaaatcctcatgcctaggcacgccagaaaaatcaaggggctcaatttattacttctaagaaagataaattgggactgcggaaataaatcacatacaaatgcagcatgacattaaatgcagccgttgttttgcttccaaggaagtggcgctcacgagcttctaaagctcagcctcacaacagcttttacgtttgattttgttcagatctctgcttccatygagttacaatgaggcaccttcggtgccggtttttagccttttttgggatgagatcacacattgtcatcaggattttatctggaagccggaagggcaggagcttcctgtgaagtgttctgcacaggcagggtgaagtgacttaacagtgaaatccgttcgtggttccgtcattccagggattggaaagtcgaaaaaaatctgtgaatgtgaaatgagccacttctaaacattcaagcacttat

SEQ ID NO: 576832 - DNA, 563 bp, Homo sapiens
cttgtcttgtgcaggttttcaaagggaatgcttcctgcttttgyccattcagtatgatattggctctgggtttgaaatgaaaacatgtattctttagttattaatatcaactttaaatgaaacctctaattttgttataataccaggtcttccaacagtacaactccatttacactatcccacctcctcaacatgcataccttttatgctgctgttgtacaatacttaaattctacatatattttaaaccacctagatagattgattgttttaagcagtaactatttgtgtaaaaacatccttcaatattgcccttagcgtgactctgtcactaaatgattttctcccattttatttgtttgatgatgtctttgaccttccttcctgaagactcctcattctcaatatttttcttagttagagactgatactgtgacagtgttaaggtttctattgtctcggctcatgtaagacatcattgcatttcattttcgtttccactggttctatggagaactcagctgagtccaaatgctgtctcttttgaaggaaatatgtcagtc

SEQ ID NO: 576833 - DNA, 546 bp, Homo sapiens
gccaaggagcagaaatcacttgaggccaggaattcaacactagcctgggcaacacagcaagaccttgtctctaaaacaattatttttaaaaattatctgggcatggtggcgcgggcctgtagtttcagttactcaggaggctgagccaggaagatcccttgagcccaggaatttaaggttgtagtcagcctgggcgacagattgagactctgtctcaaaaaaaaaaaaaaaaaaaaaaaaatcctaaattcaacagtaagaacaccaccaatggattctcttttcttatgctattaatacaattacaaatttaaatgatcatattttcagttgtctcatatttggatcgtgattttcttcctaraatttactatcgttacaaaacaatcctatgggggaaaactacccccataaattttcatttaagcaaaatgaataagctgtagagatatgttataaaacatcagatttatagtgaacaataatgtattgcacacttaaaaatatgttaatgctcatgttgtgttcttatcacaataaaataaa

SEQ ID NO: 576834 - DNA, 585 bp, Homo sapiens
taatattcaacatttgatttgctagtttaaaaaatgagttggtttctcagcatcttctaaaagacaaccatatattgtttttcttttaatattaatatataggctcatttatttaaatcttttaggtaatttttaatccattgcattttcatacctactgatgttagattgtctcagttcaggctattgacaatatctttaagtaggctcctgagtcattttattattaccctggtagtctttctttctctgctttggtatgacaaaatgttccaggagcatcttgtatgtattctgctcaaaatgtggaatcggccatttcataagggattctcatattcttttagatagaaatgatatttagagaccactttgaggtctagagattttatttgatcattgcttctaggatttttcagtggacagagctaagaaatttattttcttttctttamtatatcatggatacttgtaattcatattcaagactatatagtttttacttaatctcatctctctgatatctatatcctgtttctcccttgccaaaactccttggttctcaatggcaccaggataattgtg

SEQ ID NO: 576835 - DNA, 588 bp, Homo sapiens
tttaaagataaaaatctataaatcacttgctagactaaccaaggaaaaaaagagcaagacccaaataaacaaaattaaaaatgaaaaaggagacgttacaactgatatcacagaaataaatacaaaaggtcatcagagaccgttatgaatagcaatactctaacaaactggaaaacctagaggaaatggataaaaaataccaagattgaatgaggaagaaatagaaaacttgaacagaccaataatgagtaatgacattaaatcagtaataaaaattctccccatgaagaaaagcccaagaccagatggctacatggctgaattctatgaaacttgtaaagaagaactaacaccaattattttctaactattctacaaaattgaagaggaggaaattctccctaactcattctataagcaagcattacttatagacaaggacacaacaagaaagaaaactacagggtatagtcctgatgaacataractaaaatccttaacaaagtactagcaaaccaaatccaacaacagcacatcaaaaagataatacatgatgatcaagtgggatttatcccagcaatgtaagaa

SEQ ID NO: 576836 - DNA, 476 bp, Homo sapiens
gaatattgaggtccacaaatcagtcaagttgaataaagaggaaattctaaggaaaatattaaaaattacagaaagaggaagctggggacrctgagcataaactttgatgacatcaattttaccgtgtgcctatccactattcctccacttagtttctcagatcttgccagcaaccttagggcttgcatcctccatttctttgctcagggcatgctgaatacatgtctatgtgttttctgttttatttcctgtgtaggttttatgtgtgcacactgggaatgccctttcatctttcccatgaaccaatgtccccctccataaatactgtgggttccctttctgggcatatttcaaagatcagtgtaacaaaattattttatatgagtattaccattcccagcagagtctttaaaactagataggaaactggtgtaagtctaaaatactgtaagggccagagcttagggaaaagagca

SEQ ID NO: 576837 - DNA, 419 bp, Homo sapiens
tgtggtatttttaaaactgctaaaatatcttcaaagtgagtaagcctcttgaaagtataaatgagcaatgaatcaccaggcatttaaggaaagcctccaaagtaaaagagagaggccaaagccaaagacaattactataaatcggctagaattccaaacccagccaaatgtacaacaagcagagggcaggaaaacagttgtcaatcatgcaaaaactcaaaagatttacctcccctgcaccatttcttaggaagctactaatggatacacaccaacaaaacaaaggcgtaaaccaaaaaagaggaagacaaaggaaacatgaaatcaaacaaggaaagaggctgagggaagtcccggggtaactgctttgtaacaggccttgaaaacaacaccagytggacagaagcaggaggacagga

SEQ ID NO: 576838 - DNA, 349 bp, Homo sapiens
tgaagtgaaaaatataaggtgtaaagcactagttattataggatctatatgtgtaaaacastaatatacatacagatacatatatgcattaaaaatatctggcaggacacttaaaaaaatataattactggccagccacggtggctcacacctgtaatcccaacactttgggaggccaaggcaggcagatcacctgaggtcaggagtttgagaccagccgggccaacatggtgaaaccccatctctactaaaaatacaaaaaattagccaggcgtgatggtgggcgcctgtaatcccagctatcgggaggctgaggcaagagaatcacttgaatctgggaggcagaggt

SEQ ID NO: 576839 - DNA, 603 bp, Homo sapiens
tgaagtgaaaaatataaggtgtaaagcactagttattataggatctatatgtgtaaaacactaatatacatacagatacatatatgcattaaaaatatctggcaggacacttaaaaaaatataattactggccagccacggtggctcacacctgtaatcccaacactttgggaggccaaggcaggcagatcacctgaggtcaggagtttgagaccagccgggccaacatggtgaaaccccatctctactaaaaatacaaaaaattagccaggcgtgatggtgggcgcctgtaatcccagctatcgggaggctgaggcaagagaatcacttgaatctgggaggcagaggttccagtgagctgagatggcaccactgcattccagcttgggtgacaagagcgagtactccatgtcaaaaaaaaaaaaaagaaaaagaaartataattcttttttaaaagtagggctggtactgcaatagtcttgtccaagaaaagaaaaaaaaaaaagagacagtagggttggaagtcagggttaagatcaaatgttgtgttttagtttatttctttcaattctgttcaagttatatatttacgcatttttaaat

SEQ ID NO: 576840 - DNA, 571 bp, Homo sapiens
tatggttttatgtcaagctttttttatgttgtatttctttttttatttttattattattatttttttgagacagagtttcattcttgttgcccaggctggagtgcagtggcacgatctcagctcattgcaacctccgcctccctggttcaagtgattctcctgcctcagcctcctaactgggattacaggcatgtaccaccacgccgggctaattttgtattttttagtagagatagggtttttccatgttggtcaggctggtctcaaactcccgatctcaggtgatcctcctgcctcagcctcccaaagtgctaggttttatgttgtatttctacagaaatttattatatataacatatatattgttatatacagacatatacaatacataaagagttagttaccaattcttatgtgtatatcaattaaccagaacacttccttccyaaacattttgaataaatatacatattcaaaattagaaggttaatgtggttttatttgaaaagcatatttaattatacagtattttgctgatatttatttgtatcattactttttagtaatgtt

SEQ ID NO: 576841 - DNA, 571 bp, Homo sapiens
tatggttttatgtcaagctttttttatgttgtatttctttttttatttttattattattatttttttgagacagagtttcattcttgttgcccaggctggagtgcagtggcacgatctcagctcattgcaacctccgcctccctggttcaagtgattctcctgcctcagcctcctaactgggattacaggcatgtaccaccacgccgggctaattttgtattttttagtagagatagggtttttccatgttggtcaggctggtctcaaactcccgatctcaggtgatcctcctgcctcagcctcccaaagtgctaggttttatgttgtatttctacagaaatttattatatataacatatatattgttatatacagacatatacaatacataaagagttagttaccaattcttatgtgtatatcaattaaccagaacacttccttcccaaacattttgaataaatatacatattcaaaattagaaggttaatgtggttttatttgaaaagcatatttaattatacrgtattttgctgatatttatttgtatcattactttttagtaatgtt

SEQ ID NO: 576842 - DNA, 551 bp, Homo sapiens
aagggtcaattctatttgttttyacagtgataacacaattacaaaccttggttgagtacagcatcatagaaagaacaatgttcttactaaatttaaaaaatggtgaaacagaaataaacttggacttggctgtggttcacatataattcacagctgtgcccaaaactgcaatatattaccaatcaaaattgggggaaacatattttacaactgaatccacaaaagatgtgacattctaccaattaaaatttacaaacgtttatacacacacacagggttaaaaaaattgaactaaggctgggtgtggtggctcacacctgcaatcccaacattttgggaggacgagatgggaggattgcttgagcttgggtggtcaaggctgaagtaagctgtgatcacaccattgcacttcagcctgggcaacagagtacacccctgtctcaaaaaaaaaaaaaaaactaaaatatttgtgacaaagctgatgctgaattaaaaaaaaaaaattccagcatgatagtccatgttttctttttgttatctatcttagaatt

SEQ ID NO: 576843 - DNA, 551 bp, Homo sapiens
aagggtcaattctatttgtttttacagtgataacacaattacaaaccttggttgagtacagcatcatagaaagaacaatgttcttactaaatttaaaaaatggtgaaacagaaataaacttggacttggctgtggttcacatataattcacagctgtgcccaaaactgcaatatattmccaatcaaaattgggggaaacatattttacaactgaatccacaaaagatgtgacattctaccaattaaaatttacaaacgtttatacacacacacagggttaaaaaaattgaactaaggctgggtgtggtggctcacacctgcaatcccaacattttgggaggacgagatgggaggattgcttgagcttgggtggtcaaggctgaagtaagctgtgatcacaccattgcacttcagcctgggcaacagagtacacccctgtctcaaaaaaaaaaaaaaaactaaaatatttgtgacaaagctgatgctgaattaaaaaaaaaaaattccagcatgatagtccatgttttctttttgttatctatcttagaatt

SEQ ID NO: 576844 - DNA, 580 bp, Homo sapiens
gacagtctcgctcttgcacaggctggagtacagtggcaaaatcatagtgcattgcagccttgacctctaggactcaagtgatcctcccatctcagtctcctgactaactgggactacaggcatgcaccactaccccaggttaatttttttttttttaagatggggtctcactatgtggcccagaacagtctcaaattcctgggctcaaggaatcctcccaccttggtctcctaaattgctggtattaaaggcaagagccactgtgcctagccctctcaccattattaatataaatgttctacttggattatttagttcttctaactgaatttataaatacctttttcatttattttattttattttattttatttttgagacagagttttgctcttgttgcccaggctggagtgcagtggcacaatctcagctcactgcaacctctgctttcyggtttcaagctattctcctgccccagcctcccgagtagctgggattacaggcgcctgccaccactcccggctaattttttgtatttttagtagagatggggattcaccatgttggccaggctggtct

SEQ ID NO: 576845 - DNA, 507 bp, Homo sapiens
ctgaagccccagtaattgtccaggccagccctcgagaatatttttgccagtttgcaacgagtgtagattttggactcggcgcctgtgaccaggcagccaatgagggtcagaatgcccgcagccttcatcctcaaagcctgccggagacagaacctgccaaagagccggagaacaggtcagacgatcttgattcaggaacttcgaaatccagcatcggtgactgtgcacagccctgcctagatgctgcctgtcactttggtcattcagtgccaccctcaggcaaaaccggccactctacggtccagggaaggaatgtgactgcagcctgtctccttaatgcttttccatacagtaactttcaagtcaatgctgtgttctcagggttaagtaagtgaaaaaattaaccttccttaatacacatccaggtgaaaaccacarggggcatttttaggatttctattttaattctatgaatgaaaaatagaatacaggggtgaaacattccct

SEQ ID NO: 576846 - DNA, 613 bp, Homo sapiens
ttacagttctgaacaacactctatgtattatagatatgagaatgcactcctggtgcatttcagtgagtagaaatattttagactagaaaatcagagagaaatctgaggtagtctcatgtaaatatacttaggtttgctttagggattatgctagtgacattttaaagragctcttaaaaatccagtgctctaaagtgtgctctgctattaactatagagttttaatttatttccttgacttatcaatttttggaagaggtgactttatgtctttgtcatgtcccagcccagatacctttccatgattttcttctagtgatgtaggaccagctctttattcatttattttacctttaagctctgtgtgacttgaaggaccagctctttaaatgatgcatcatttggctattttggattgtacgtacagaaaacacaacctaagtcaatttaaaaaataaaatagcttcatttctcagacattgtctcagctcggccctgcttcttgtatcagcttagttctcacaccagctttcctcatgatcacaacataaagagtctcttgggctatgtgctccctcactcaagtccagagacaataaacttgtctttttat

SEQ ID NO: 576847 - DNA, 582 bp, Homo sapiens
ttgccaccctgtttgttaggaaataatcttttttactttggtgaaatttgcttttgtatggctttcatacatcattctttgggcccaagtgtaatcctttttcacctgggaggtctttcagtctttggatacagctatcatcgtcctcaagtcagtttgtcctcaagttaatcacttcctatttcttcatctgatcttcagagaacaccattctaagttccatatggaagtgataagggagcaagccttgaggtctgtctgcctggatttgattcttggctccatctcttattagttagatggctatttgtaagttacttaacttttcagggacctgatctcttcatgtgtaaactagaggataattataatgcccatctcataagtgactatgaaggttaagtgagagaatgttggtaaaatgcctatcatgatactgggcatgtgatcaaacattcaaaaattattaaatattatttttatacataatactcattagttggtctataccccacacttaagatgtggcatttaaaacagaataccatatactccatayttacattatatattattttgtac

SEQ ID NO: 576848 - DNA, 579 bp, Homo sapiens
ctgaggattaactggcaagacgctgtctcctgttactgagtttcttccttcccgagcggcccggcaaacagcagcccaccactattcccgggctcggagctcggccccagcccgcagccccgcctgcctcagcgtcctcgcgcacctacttgccattcccagggtctggaattgtggttagaaagaaaaacactggccctcagtgccacagtgtggaatggcamtgggaggaaatgacacagacacacgaagcacggagagagggtttcttacacaaacaagctcagggaggaacagactatgaaaacaaaggtgaagccggggaaagcagccccggggcccgcgggagagtgcggtcaaggccggcgcctgtggcacctcggtgaccaagtcttgggggctcctgaagtctcaagcagcagagaagccaagaaggcaccgaagaaccgtgtgtacccgtgggtttggagtctctggaaaggcctccgtgcgcccctccatgtgggagtcaggagcaagctgcgtgcccctttgtgcctccccaaacaacaccgcggggcatataccagaggagtgtgt

SEQ ID NO: 576849 - DNA, 579 bp, Homo sapiens
ctgaggattaactggcaagacgctgtctcctgttactgagtttcttccttcccgagcggcccggcaaacagcagcccaccactattcccgggctcggagctcggccccagcccgcagccccgcctgcctcagcgtcctcgcgcacctacttgccattcccagggtctggaattgtggttagaaagaaaaacactggccctcagtgccacagtgtggaatggcactgggaggaaatgacacagacacacgaagcacggagagagggtttcttacacaaacaagctcagggaggaacagactatgaaaacaaaggtgaagccggggaaagcagccccggggcccgcgggagagtgcggtcaaggccggcgcctgtggcacctcggtgaccaagtcttgggggctcctgaagtctcaagcagcagagaagccaagaaggcaccgaagaaccgtgtgtacccgtgggtttggagtctctggraaggcctccgtgcgcccctccatgtgggagtcaggagcaagctgcgtgcccctttgtgcctccccaaacaacaccgcggggcatataccagaggagtgtgt

SEQ ID NO: 576850 - DNA, 579 bp, Homo sapiens
ctgaggattaactggcaagacgctgtctcctgttactgagtttcttccttcccgagcggcccggcaaacagcagcccaccactattcccgggctcggagctcggccccagcccgcagccccgcctgcctcagcgtcctcgcgcacctacttgccattcccagggtctggaattgtggttagaaagaaaaacactggccctcagtgccacagtgtggaatggcactgggaggaaatgacacagacacacgaagcacggagagagggtttcttacacaaacaagctcagggaggaacagactatgaaaacaaaggtgaagccggggaaagcagccccggggcccgcgggagagtgcggtcaaggccggcgcctgtggcacctcggtgaccaagtcttgggggctcctgaagtctcaagcagcagagaagccaagaaggcaccgaagaaccgtgtgtacccgtgggtttggagtctctggaaaggcctccstgcgcccctccatgtgggagtcaggagcaagctgcgtgcccctttgtgcctccccaaacaacaccgcggggcatataccagaggagtgtgt

SEQ ID NO: 576851 - DNA, 553 bp, Homo sapiens
tcacgctgatgcaagaggttggttcccatggtcttggatagctccacacctgtggctttgcaaaatacaacctccctcctggctgctttcacatgctggcattgagtgtctgtggcttttccaggcacacagtgcaagctgtagttggatctaccatcctggggtctggaggatggtgtccctcttttcacagctcccttaggcaatgccccagtagggactctgtgtgggggctcccatcccacattttccttccacactgccctagcagaggttgtccatgagagctgcacccctgcagcatacttcagccaaggcatccaggcatttccatacatcttctgaaatctaggtggaagttcccaaaccctagttcttgacttctgtgcacttgcaggctcaacaccatgtggaggctgccaaggcttggggcttgcaccctctgaagatacagcccaagctatacatttgtccctttcagccacagctggyacagctgggacacagggcaccaagtccttcggctgcacacagcatggggatactgggtcca

SEQ ID NO: 576852 - DNA, 481 bp, Homo sapiens
ccttttttcttcttggtcagaatsgttttgactatttgggttatttggtggttccatatgaattttaggagttttttctttctatttatgtaaaaaaaggcactgagattttgacaggatttgcaatgaatctgtagatcacttttagtagcatggacattttaaccatattaatttttccaatccatgaatatgggatgtcatattatttatttgtgtttaatttcttttgtcaatgttttatagtttttaatgttcaagtctttattctctttggttaagtttatttataagtattttatttcttttgatgccattgtaagaatgttttctttaatttctttttcagatagttcattgctagtgtatagcaatgcaacagatttttgtatgttgattttgtatcctgcaacactgttgaatttatttgttctaacagatttttgtgtttgtgtgtgtgtatgtgtggagcctttagtat

SEQ ID NO: 576853 - DNA, 654 bp, Homo sapiens
taatggacatttattagttccccaaattaatacttttgtaatttcttatgcctgtctttactgcaatctctaaacataaattgtaaagatttcatggacacttatcacttccccagtcaatacccttgtgatttcctatgcttgtctttgctttaatctcttaatcctgtcagctgagaaggatgtgtatcatctcaggacsctgtaataattgcgttaactacacaaattgtacagcatgtgtgtttgagcaatatgaaatgtgggcaccctgaaaaaagaacagaataacagcaattgttcagggaatacgagagataaccttaaactctgaccgctagttagccgggcagaacagagccatatttctcttctttcaaaagcaaatgggagaaatatcgctgaattctttttctcagcatggaaagtccctgagaaagagaatgcgcacctaggggtaggtctctgaactggccctcctggggcgtacctgtctcttatggttgagattgcagaggtgaaataaactccagtctcccatagcgctcccaggcttattaggaagaggaaattcccacctaataaattttggtcagactggttgatctcaccctgtctcctgataagatgttatcaatgacagtggtgcccaaa

SEQ ID NO: 576854 - DNA, 654 bp, Homo sapiens
taatggacatttattagttccccaaattaatacttttgtaatttcttatgcctgtctttactgcaatctctaaacataaattgtaaagatttcatggacacttatcacttccccagtcaatacccttgtgatttcctatgcttgtctttgctttaatctcttaatcctgtcagctgagaaggatgtgtatcatctcaggacgctgtaataattgcgttaactacacaaattgtacagcatgtgtgtttgagcaatatgaaatgtgggcaccctgaaaaaagaacagaataacagcaattgttcagggaatacgagagataaccttaaactctgaccgctagttagccgggcagaacagagccatatttctcttctttcaaaagcaaatgggagaaatatcrctgaattctttttctcagcatggaaagtccctgagaaagagaatgcgcacctaggggtaggtctctgaactggccctcctggggcgtacctgtctcttatggttgagattgcagaggtgaaataaactccagtctcccatagcgctcccaggcttattaggaagaggaaattcccacctaataaattttggtcagactggttgatctcaccctgtctcctgataagatgttatcaatgacagtggtgcccaaa

SEQ ID NO: 576855 - DNA, 536 bp, Homo sapiens
acagggacactttgacttcttctgtttcaatttggatgtcttttatttcttctgttgcctaattgccctggccatggacttacagtgctgtgttaaataattgtggtgagaatgggtatccttgtcttgttccaattcttagaagaaaggcttttagcttttcctgttcagtatgatgttagctgtgggtttgtcacatatggcctttattattttcaggtacattccttcctaaataaaggtatttatttatttatttccttcctaaattaggtaattcctatgtaaatacctaatttaagtttttatcttgatgagatgttgaattctgttgaatgcttttgctgcatctattgagatgattgtatggtttttgtccttccaccgatgtgatatttgatgtttattaatttatgtaggttgaaccatccttgtagcccttggataaatccttyttggtcatggtgtgtattgttactgataatgttggattcattttgctagtattttgttgagcattgttgcatatgttcatc

SEQ ID NO: 576856 - DNA, 570 bp, Homo sapiens
acactaccagacttcaaaatataccacaaagtagtactaaccaaaatgacaggtactggcataaaaacagacacatagatcaatgaaacataatggagaacacagaaattacatatctacagccaactgatttttgacaaagatgccaagaacaaagatgacttggagaaaaaataayctcttcaataaacggttctgggaaaactggatatccatatgcattagaattaaactagacccctcacctcttgccctatacaaaaaacaacggaaaaatggatcaaatacctaaatgtaaggccagaaacaataaaactactagaaaaaaacgccaggggaatgcttcaggacatggatctgggaaaagattttatgaatacgacttcaaaagcacaggcaacaaaggcaaaaattaacaaatataactatatcaagacaaaaaacttctgcacagcaaaggaaacaatcaacagagtaaaaagacaatccacagaatgggttgcaaactattcatctgacaggatattaagagccagaatacataaggaactcaaacattgcaacagcaag

SEQ ID NO: 576857 - DNA, 570 bp, Homo sapiens
acactaccagacttcaaaatataccacaaagtagtactaaccaaaatgacaggtactggcataaaaacagacacatagatcaatgaaacataatggagaacacagaaattacatatctacagccaactgatttttgacaaagatgccaagaacaaagatgacttggagaaaaaataatctcttcaataaacggttctgggaaaactggatatccatatgcattagaattaaactagacccctcacctcttgccctatacaaaaaacaacggaaaaatggatcaaatacctaaatgtaaggccagaaacaataaaactactagaaaaaaacgccaggggaatgcttcaggacatggatctgggaaaagattttatgaatamgacttcaaaagcacaggcaacaaaggcaaaaattaacaaatataactatatcaagacaaaaaacttctgcacagcaaaggaaacaatcaacagagtaaaaagacaatccacagaatgggttgcaaactattcatctgacaggatattaagagccagaatacataaggaactcaaacattgcaacagcaag

SEQ ID NO: 576858 - DNA, 570 bp, Homo sapiens
acactaccagacttcaaaatataccacaaagtagtactaaccaaaatgacaggtactggcataaaaacagacacatagatcaatgaaacataatggagaacacagaaattacatatctacagccaactgatttttgacaaagatgccaagaacaaagatgacttggagaaaaaataatctcttcaataaacggttctgggaaaactggatatccatatgcattagaattaaactagacccctcacctcttgccctatacaaaaaacaacggaaaaatggatcaaatacctaaatgtaaggccagaaacaataaaactactagaaaaaaacgccaggggaatgcttcaggacatggatctgggaaaagattttatgaatacgacttcaaaagcacaggcaacaaaggcaaaaattaacaaatataactatatcaagayaaaaaacttctgcacagcaaaggaaacaatcaacagagtaaaaagacaatccacagaatgggttgcaaactattcatctgacaggatattaagagccagaatacataaggaactcaaacattgcaacagcaag

SEQ ID NO: 576859 - DNA, 618 bp, Homo sapiens
ctcttttgcttcctgggctgtgacactttttatcttcatccccccatgaaccccactaaatttgttttcttatctgctttccccaggaacataagcaagctagatctggcatggtcaaccggtatcacgatggtcccagcagcactccattctcaggcatttattctcagggcccagtcaatgtcataagtggtatgatctgatctaagtcatcaygtctgggctacaggacgctaagaaattatgctgattatcatatggggaaaataaatgagagtctccaacttgcaaaaaattggtttgtattgttcccagaaacaagctgaaatgtccacagaagccagaaggataagataaatgtgtgaattcggtagatctaagaaaataagacttagtatggattgtggggaaatgagagtaaatctcaccaaaaggtattcagattagagaaaaaactgtgctagaagttcctacaaaataaagtctgctgacctgccatcctgccacattcatctatatccttaaaaaataaatttgttatgtttttagctaggaattttagttagattctaggttaagctacaaatgaaaagactttaaaattcagtggctcaaata

SEQ ID NO: 576860 - DNA, 618 bp, Homo sapiens
ctcttttgcttcctgggctgtgacactttttatcttcatccccccatgaaccccactaaatttgttttcttatctgctttccccaggaacataagcaagctagatctggcatggtcaaccggtatcacgatggtcccagcagcactccattctcaggcatttattctcagggcccagtcaatgtcataagtggtatgatctgatctaagtcatcacgtctgggctacaggacgctaagaaattatgctgattatcatatggggaaaataaatgagagtctccaacttgcaaaaaattggtttgtattgttcccagaaacaagctgaaatgtccacagaagccagaaggataagayaaatgtgtgaattcggtagatctaagaaaataagacttagtatggattgtggggaaatgagagtaaatctcaccaaaaggtattcagattagagaaaaaactgtgctagaagttcctacaaaataaagtctgctgacctgccatcctgccacattcatctatatccttaaaaaataaatttgttatgtttttagctaggaattttagttagattctaggttaagctacaaatgaaaagactttaaaattcagtggctcaaata

SEQ ID NO: 576861 - DNA, 547 bp, Homo sapiens
acattagacaaggatcccagttgagaaatgtatgtggacagtgccyctctcaggaacacagctccgagtcctggggctctgtaatggctctcacgtgcccttctcagagagcatgcagaggagcaagagtgacaggatccaaagttcctgggccaggctgggaagagctccccctggaagtagctatggctccccagaacattcatgcaagtgggaggggctgtggcatgaccagaactggggagaccagggtataaagtcttacttaggtatcaactttattaattacacagcttcaatcacatcactcagcctttctgagcctcccttctttaccctcaagtagaaatgaggattctgaaccaccacctctcagctgttttgaagagtaagtaatatcaacaaagaatgttcagaaggacatgaaatgacagctgagatcaccacccgtttgaacttttcagccctgcttttcccctgccatcctggtcctaaggccacttcacacccagagcacagcttgctctagaagacttttctcccagaa

SEQ ID NO: 576862 - DNA, 547 bp, Homo sapiens
acattagacaaggatcccagttgagaaatgtatgtggacagtgcctctctcaggaacacagctccgagtcctggggctctgtaatggctctcacgtgcccttctcagagagcatgcagaggagcmagagtgacaggatccaaagttcctgggccaggctgggaagagctccccctggaagtagctatggctccccagaacattcatgcaagtgggaggggctgtggcatgaccagaactggggagaccagggtataaagtcttacttaggtatcaactttattaattacacagcttcaatcacatcactcagcctttctgagcctcccttctttaccctcaagtagaaatgaggattctgaaccaccacctctcagctgttttgaagagtaagtaatatcaacaaagaatgttcagaaggacatgaaatgacagctgagatcaccacccgtttgaacttttcagccctgcttttcccctgccatcctggtcctaaggccacttcacacccagagcacagcttgctctagaagacttttctcccagaa

SEQ ID NO: 576863 - DNA, 550 bp, Homo sapiens
ggcccacaagacaccttagaaccaaagtttttgggttgaggagtcctgtatcttgcaggaatggacctgtaactcatcctgctgtgcaaggttattgttggggagtagcccactggggagctttggaactgttgtggtggtgggtccagctgtcaaaaagtaactgggtctccctctgagccccaattcctattttayaggacaagaggctaatcagccacatttgggttatgttcattgctgaccagggagggcagggtcatagatattaattatcatgggacgggaggggtggagtaatttccagaaaagtgacagaagaggcagagactagtaccaacagacaactcaataggaaaatattcaataaaaggtgccaatattactcatggtgtcactttaaaatagttcccagcatagatagtgtgacatatgaaattgacaactagtgtaaacatcaactctaagcattcaactgtcctaacagaagtcccacattttaaaggtggccagctggcaatacatcagaaacaccaccctttagaggaga

SEQ ID NO: 576864 - DNA, 515 bp, Homo sapiens
accaaaaaatacacatggtgtatgactctatttatgtaaagtcctcttggggaagggaccaggcacstgttataatatacggcatttaaggatgcatgtgagtttcggtggcaaagtcatttttaaaaagcaaaggagtgattactttaaaaattaactctcttatgctgggttagactggaagtggactcagagggagttttgcatgcagaagatttattgacaagtgctttcatgaacaacacatgtaaagaggaaagagaagcagtactggacagaagaggaagttaaactgcaatgcaatcacaaggccttagctgatccacaaaaaactctataggtgggatgttctttatagttatgcccccattgaagcaaggtggttaggcctttgtgccccatacaaatcaattatcagacacaggcttcccctaaggaggggacctatttggagtgaagcaatacccaaatgtgatttccagagaaggaatatttctggtagctgaggaaatgaa

SEQ ID NO: 576865 - DNA, 584 bp, Homo sapiens
tgcattcctataaagaaatacataagactgggtaatttataaagaaaagaggtttaattggcttatggttctgcaggctgtacaagaagtacggcaccagcatatgctcagcttctgcaaaggctacagggagctttcattcatgacagaaagcaaaacaggagcaggcatctcacatgacagaytggaagcaagagagagtcagggcgagcggtgccacacacataaaacaaccaggtctcacaggtacacactcactattgcaagaacagcatcaagccatgagggatccacccccataacccaacagttcccactaggctccacctctaacattgtgcattccaattcaacatgagatttgggcagggacagctcatgcctgtaatcccagtactttgggaggccaaggcaggcggatcacttgagatcaggagttcgagaccagactggccaacatggggaaagcccacctctatgaaaaatgcaaaaattagccatgtgtggtggcgggcacctataatcccagctacccaggaggctgaggcaggagaattgcttgaaaccaggaggcagaggttgca

SEQ ID NO: 576866 - DNA, 558 bp, Homo sapiens
gatgatcactttgggtaatatagccattttagcaacataagttcttctaattcaggaatacatgatatcctttcatttatttgtgtcatactcagtttttttttcattaacgttttatagttttcagtgtagagatctttcaccttcttggttargtttatacctaagtatcttattttttttgtgtgaaattattttcttgatctctttttcaaatggtttgctattagtatacacaaatgctactgagttttgtatgttgattttgtatccttcagctttactgaattcatttatagctctgttttttggtggcatttttagggttttctttttttaactttttattttaagttcaaggtacatgtgtgggtttattacataggtaaacttgtgtcatgggggtttgttgtacagattatttcatcacacaggtattaagcccagtaccaattagttatttttcctgattcttctctcctttctcccattcttcaccctttaataggccccagtgtgtgttgtttcccctttttgtgtcaatgtgttctcatcatt

SEQ ID NO: 576867 - DNA, 599 bp, Homo sapiens
tcagtttttttttcattaacgttttatagttttcagtgtagagatctttcaccttcttggttaagtttatacctaagtatcttattttttttgtgtgaaattattttcttgatctctttttcaaatggtttgctattagtatacacaaatgctactgagttttgtatgttgattttgtatccttcagctttactgaattcatttatagctctgttttttggtggcatttttagggttttctttttttaactttttattttaagttcaaggtacatgtgtgggtttattacataggtaaacttgtgtcatgggggtttgttgtacagattatttcatcacacaggtattaagcccagtaccaattagttatttttcctgattcttctctcctttctcccattcttcaccctttrataggccccagtgtgtgttgtttcccctttttgtgtcaatgtgttctcatcatttagctcccacttgtaagtgagaacatgtggtatttggttttctgttcctgcattagtttgctaaggataatggcctctaactccatccatgtccctgcaaaggacatgatctcattcttttttatggctaca

SEQ ID NO: 576868 - DNA, 654 bp, Homo sapiens
tcccaggagtgcagtggcaccatcatagctcactgcagcctctaactcctgggctcaactgatcctcccacctcagccttcctagtagcttgaaatacagacacacaccaccatgcctggctaatcttttttttttttttttttcaatttttttttgtagagatgggatcttgctatgttgcccaggccagtcttgaactcctggcttcaagcaatcttcctgcctcagcttcccaaagcactaggattataggcatgagctaccatgcctaacctcaaaccttatactaagcttttcttacctccaaaccttttgtaaagtcttgtctgaagacttgaggtaatgaagggagtgtgaattatagccaagcaatcaatgtattatcaaatgaggtgaatctcctcctaaaatttctttgatcatcctggccttacagctcactcagaagtcacctttttccacagggaactgttctctgaacttgctaagttgacctctttctctcaacagacttcgaattttgtgtaggcagccttttagctcttyacttctattcaattctatctacctctgtagatgcaaaacctgactggcacattaagcactagaaaagggacatgtgtctctgtgttgtatgcttaccagcaccaaag

SEQ ID NO: 576869 - DNA, 537 bp, Homo sapiens
gtttcattgtgttaggcaggatggtctcgatctcctaacctcgtgatccacccgcctcggcctcccaaagtgttgaaattacaggcgtgagccaccgygcccggcagggattcttaaaaagagcaaacgtccctcttatatccctctttggaaccgtggggatgcatgctaagtgctaactctgccaagacagagatgtgtacagcctgtgaatcttgaacgattacctaaataaaatgttgatgtggatttgaaaaacacaatgtttcaggtcaaaggatcagatccgagaggaagcaattataacaaagaaaaagatcccacttcttgtgtgtaagtgtgcttagaagctaagaagaaaacacattctggatgaaaatgttttctgagatattctctcaagtaaagattggtccttgcttgaagtaaaaattgaaatggaaagaaaaacatattcagggagacaaaaagcttacaacagagttttggaaaaaggtctttttagactaatgcagttttggaattgttttttggaaa

SEQ ID NO: 576870 - DNA, 537 bp, Homo sapiens
gtttcattgtgttaggcaggatggtctcgatctcctaacctcgtgatccacccgcctcggcctcccaaagtgttgaaattacaggcgtgagccaccgcgcccggcagggattcttaaaaagagcaaaygtccctcttatatccctctttggaaccgtggggatgcatgctaagtgctaactctgccaagacagagatgtgtacagcctgtgaatcttgaacgattacctaaataaaatgttgatgtggatttgaaaaacacaatgtttcaggtcaaaggatcagatccgagaggaagcaattataacaaagaaaaagatcccacttcttgtgtgtaagtgtgcttagaagctaagaagaaaacacattctggatgaaaatgttttctgagatattctctcaagtaaagattggtccttgcttgaagtaaaaattgaaatggaaagaaaaacatattcagggagacaaaaagcttacaacagagttttggaaaaaggtctttttagactaatgcagttttggaattgttttttggaaa

SEQ ID NO: 576871 - DNA, 537 bp, Homo sapiens
gtttcattgtgttaggcaggatggtctcgatctcctaacctcgtgatccacccgcctcggcctcccaaagtgttgaaattacaggcgtgagccaccgcgcccggcagggattcttaaaaagagcaaacgtccctcttatatccctctttggaaccgtggggatgcatgctaagtgctaactctgccaagacagagatgtgtacagcctgtgaatcttgaacgattacctaaataaaatgttgatgtggatttgaaaaacacaaygtttcaggtcaaaggatcagatccgagaggaagcaattataacaaagaaaaagatcccacttcttgtgtgtaagtgtgcttagaagctaagaagaaaacacattctggatgaaaatgttttctgagatattctctcaagtaaagattggtccttgcttgaagtaaaaattgaaatggaaagaaaaacatattcagggagacaaaaagcttacaacagagttttggaaaaaggtctttttagactaatgcagttttggaattgttttttggaaa

SEQ ID NO: 576872 - DNA, 537 bp, Homo sapiens
gtttcattgtgttaggcaggatggtctcgatctcctaacctcgtgatccacccgcctcggcctcccaaagtgttgaaattacaggcgtgagccaccgcgcccggcagggattcttaaaaagagcaaacgtccctcttatatccctctttggaaccgtggggatgcatgctaagtgctaactctgccaagacagagatgtgtacagcctgtgaatcttgaacgattacctaaataaaatgttgatgtggatttgaaaaacacaatgtttcaggtcaaaggatcagatccgagaggaagcaattataacaaagaaaaagatcccacttcttgtgtgtaagtgtgcttagaagctaagaagaaaacacattctggatgaaaatgttttctgagatattctctyaagtaaagattggtccttgcttgaagtaaaaattgaaatggaaagaaaaacatattcagggagacaaaaagcttacaacagagttttggaaaaaggtctttttagactaatgcagttttggaattgttttttggaaa

SEQ ID NO: 576873 - DNA, 475 bp, Homo sapiens
gcaaacaatgaagtattattcagccttagaaaagaaggaaatcctacagtatgagacaacatggatgaatgtggaggacattacactatgtgaaataaggtagtcacaggacaacaaatacttttttagatgcttcatataagtggttccacttacatgaagtatctaaaaatagccaaagccaaacccgtacagagagtaagaagactggttgccagaggctggcggcgggragggggaaatggggagttgatattcattgggtataaagatttagttatacaagatgaataagttccagacatctgctgtacaattaaatgtctatagctaatacttaaaagtttgttgaaagaataggtctcatgttaaatgctattactacaatttttaaaaagagaaatgctagaaatcaaaaacactgtaagagaaatgaagagcctttgatgaccttgttagtagactgaatatgact

SEQ ID NO: 576874 - DNA, 548 bp, Homo sapiens
ggaggggctattgggcaatccrgggatgagcatgagtgtccgcctccaaggaatcattcttgtgagccactttgccagaggctgagaattgtaataggagttgaataagagagataattggaatgggaaaaagggaaggagaaatcaagtaaaataaattacacaaagtgttttattctgaaagtcaaagttatatcctgtgtgtactttatttcctctaccttgccctgctcacttttccatatcacagatgacaccacatcccccagtctcacacagatcttgtgctctgggcctcagaaacatgctagactctattgctcaatgcacaaagtcagaggacaagcttttttttttttttaacttgtcatttttccacagtaagaactcatataacaagaacatttgtgaaagccatattaatatgtttactatattcagaatttgattgttgtgaatttttatcatttattgtgtttcacatttgaagaaaattctgaagatttatttttaacaataaaaatatagcaggtttacttttagaattc

SEQ ID NO: 576875 - DNA, 579 bp, Homo sapiens
  misc_feature 1, 2, 3, 4, 5, 6, 7, 8, 9, 10, 11, 12, 13, 14, 15, 16, 17,18, 19, 20, 21, 22, 23, 24, 25, 26, 27, 28, 29, 30, 31,32, 33: n = A,T,C or G
nnnnnnnnnnnnnnnnnnnnnnnnnnnnnnnnncttttaaatttatagtcagtgagctagttaacactgagctattacccatcattctgtgaaagccatggaatagttcccagagtcaagctctcactcatcaagggaaaacaatcacacataatatacaccaacgaagtggagctaagaaaaacaggtaatattactattgtaatgactttaattttcwtaggcttagatcagttaactttaatacttcattaagggagttgttttgctttatacaactttgaaagggaagagttcctcaatgtagtttttgtttgtaacatcataaatgctacacaggaattctcatttgtattcagttggtgttaaggcatttcatactctgtttgcttggaagtattccacacacatgatgaatttatcgattcagttgaactgatgacttatccatatagtcatcagcaaatatcagtctcattcttatacatcattttatccagataacatagcacacatggcaatattgattaatattcctttacacttaatttaaccccaaatattcctccaaaagtgtaa

SEQ ID NO: 576876 - DNA, 481 bp, Homo sapiens
gccctggtctcctgcagtaccctcaggcttactaggattgggaaattccagcctggtaaattcttgtcagaccagttgtctgctcttgaaccctgtttcctgttaagatgtttattaagacaatgcatgcacagtgggacatagaccctcatcagtaattctaattttgccttcaccttgtgatctctatggccctttgaagcatgtgatccttgtgacctactccctgttcgtacaccccctccccttttaaaatccctaataaaaacttgctggttttgcagctcgaggtcgccatcactgtcctaccaatatgtgatgacacccccggaggcccagctgtaaaatttctctctttgtactctttctctttattcctcagaccagccaacacttagggaaaatagaaagaacctatgctgaaatactgggggctggttcccccaayagtatgtctccatcagagattttagatgatgac

SEQ ID NO: 576877 - DNA, 624 bp, Homo sapiens
caccactcctcttcaacatagtagttgaagtcctagccagagtaatcagacaagagaaagaaataaagggcgtccagatcagaaaagtggaagtcaaactgttgctgtttgctgatgatatgattgtttacctaaaaaccctaaagactgctccagaaagctcctagaactgataaaagaattcagcaaaatttctagrtacaaaattaatgtacacaaatcagtagctcttctatacaccaatggtgaccaaactgagaatcaaatcaagaactcaaccctttttacaatagctgcaaaaaaaaatacttatgaatatacctaatcagggaggggaaagaccgctacaagaaaaactacaaaacactgctgaactgaaagaaatcatagatgacacaaacaaatggaaacacatcccatgctcatggatgggtagaattaatattgtgaaaatgaccatactgccaaaagcaatctacaaattcaatgcaattcccatcaaaataccatcatcattcttcagagaattggaaaaaacaatcctaaaattaatatggaaccaaaaatgagcctgcataatgaaagcaagactaagcaaaaagagcaaatctggaggcatcacat

SEQ ID NO: 576878 - DNA, 624 bp, Homo sapiens
caccactcctcttcaacatagtagttgaagtcctagccagagtaatcagacaagagaaagaaataaagggcgtccagatcagaaaagtggaagtcaaactgttgctgtttgctgatgatatgattgtttacctaaaaaccctaaagactgctccagaaagctcctagaactgataaaagaattcagcaaaatttctagatacaaaattaatgtacacaaatcagtagctcttctatacaccaatggtgaccaaactgagaatcaaatcaagaactcaaccctttttacaatagctgcaaaaaaaaatacttatgaatatacctaatcagggaggggaaagacckctacaagaaaaactacaaaacactgctgaactgaaagaaatcatagatgacacaaacaaatggaaacacatcccatgctcatggatgggtagaattaatattgtgaaaatgaccatactgccaaaagcaatctacaaattcaatgcaattcccatcaaaataccatcatcattcttcagagaattggaaaaaacaatcctaaaattaatatggaaccaaaaatgagcctgcataatgaaagcaagactaagcaaaaagagcaaatctggaggcatcacat

SEQ ID NO: 576879 - DNA, 583 bp, Homo sapiens
tgggaggaacccagtgggaggtaattgaatcatggccacaggtttatcctgtgctgtattcttgagagtgaatgagtctcatgggatctgacagtttcataaagggcagttcccctgcacatgttcttgccagctgccatgtaagacgtgccttttctcctcctttgccttccaccatgattgtgaggcctccccagccatgtggaactgtgagcccattaaacctctctttctttataaattatccagtctcaggtatttcttcatagcagtatgaaaatagactaatgcacccactcctccccacttcatacccaagaacttggaaataaggggaatatagctgtcttgagaagtcaacaacagaatcttcaactcataataayagaagactcaagccatgaaatcataaaatttatttaaccctagatcagccaatgatgtgcttgttaaaagaaagggtgaccaagaaaaatgtaaagtcagtaagataaaatgtgatgatgtagatcaggcacagccaaggtggtgctgattctgagcctgcagacacacaaaaaaactaatcataagagaggactgt

SEQ ID NO: 576880 - DNA, 481 bp, Homo sapiens
cccaaagaaatataaatcattctaccataaagacacatgcacatgattgttcatttcagcactattcacaataacaaagacatgaaatcaaactaaatacccatcaatgacagattggataaagaaaatgtggtacatatacacgatggaatactatgcagccattcaaaagaatgagataatgtcttttgtgggaacatagatggaactggaggccattattcttagcaaactaacacmgggacagaaaaccaaatactgcatgttcttgtaagtgggagctaaatgatgagaatttatgaacacaaagaaggaaacaatagacactgtggtctacctgaggtgggagcgtgagaggagggagaggaacagaaaagataactactgggtactgggcctaatacctgggtgatgaaataatatgtataacaaaaccctctgaaatgtgtttatctatgcaacaaaccttcatgtgtacccc

SEQ ID NO: 576881 - DNA, 592 bp, Homo sapiens
atagatgtatagatacgtaataccaatttgtagctccagtggtgcaatcaattagcatgtggtacttataagaaatgcaatacagattacatttctacacagagttatgagaataacattttcaatttgttatcttttttattctttcaatcttaatatatgatcaatcatatcttattgttattataatttttatttctttgagtattagtataacagaatattgtttatattgtttaatgactatgtgtatgctttgtcagggtttccttccttgttatatctccagggcctaaaacaacctgacacatagtaggacatgaacatactttaatttgttattaactgtattttatatcttaatttattttcaattgtattgtattcctaatgtataaaaaactcagacactgacatatttagcaccagatttaatagttgttgactttgtttattgcttagattttccttttttatatttattttattttattttttttttttgagacagagctttgctctgtcgcccagactagrgtgtggtggcatgatctcagctcactgcaacctcagcctcccaagttcaagccat

SEQ ID NO: 576882 - DNA, 529 bp, Homo sapiens
attttacagtttcctcataacttcttcattgacccagtggtcattctgaagcatstagtttaatttccatatgtttgtatacttaacaaaatttctcctgttattgattcctgcttttattctattgtggtcagagaagacacttaatattattaatttttttggaatgttttaagacttgttttgttgtctaacatatggtctttctttgagaatgagccatgtgctgaggagaagaatactgtgtattctgcagccattggatgaattatatctattaggttcatttggtctacagtgcagagtaagtccaatgtttctttgttgattttctgtcagctctgtcaaatgctgaaagtggggtgtggaagtctcattattattttattggggtctgtctctctctttagctctttagtatttcctttatatatctctatgccccagtgttgggtgtatatatatttaaaattgctttcctttttactgaattgaatcctttatcattatataataaccttccttggct

SEQ ID NO: 576883 - DNA, 529 bp, Homo sapiens
attttacagtttcctcataacttcttcattgacccagtggtcattctgaagcatctagtttaatttccatatgtttgtatacttaacaaaatttctcctgttattgattcctgcttttattctattgtggtcagagaagacacttaatattattaatttttttggaatgttttaagacttgttttgttgtctaacatatrgtctttctttgagaatgagccatgtgctgaggagaagaatactgtgtattctgcagccattggatgaattatatctattaggttcatttggtctacagtgcagagtaagtccaatgtttctttgttgattttctgtcagctctgtcaaatgctgaaagtggggtgtggaagtctcattattattttattggggtctgtctctctctttagctctttagtatttcctttatatatctctatgccccagtgttgggtgtatatatatttaaaattgctttcctttttactgaattgaatcctttatcattatataataaccttccttggct

SEQ ID NO: 576884 - DNA, 529 bp, Homo sapiens
attttacagtttcctcataacttcttcattgacccagtggtcattctgaagcatctagtttaatttccatatgtttgtatacttaacaaaatttctcctgttattgattcctgcttttattctattgtggtcagagaagacacttaatattattaatttttttggaatgttttaagacttgttttgttgtctaacatatggtctttctttgagaatgagccatgtgctgaggagaagaatactgtgtattctgcagccattggatgaattatatctattaggttcatttggtctayagtgcagagtaagtccaatgtttctttgttgattttctgtcagctctgtcaaatgctgaaagtggggtgtggaagtctcattattattttattggggtctgtctctctctttagctctttagtatttcctttatatatctctatgccccagtgttgggtgtatatatatttaaaattgctttcctttttactgaattgaatcctttatcattatataataaccttccttggct

SEQ ID NO: 576885 - DNA, 597 bp, Homo sapiens
tcatccatagtcaagaagtcacgttgaagccattcccttccatccaccttccacaaagcagactaatcattaaatctgcttgaataaacctttaagcaatagtgactcagatacttccgtcaatgccagggagtggctggtggtaaatattgctgttygtgagaggtactttttgttgttgttgttaaatttgggttagcttaagaagtttcactacagtaaaaggtgatcataatggaaacctgtcagtttttgcctgcttttcctttccaggacactacagataagaccttgagcttttcatctgttcatatctggagctgcttctttcttgactttttaaaaccctcaggatgtcttttgtctaattttacaaactctgttcttattttataaactctaatttgttccgattttatagactgttttaagatttttagtggcactaaacattgtttagtggcactaaacaatttattttgtttagtgataccttaactgccaaaatattttggtgatagcttaactgccaaaataaaagttcctaaatattttgtcttaaggaaaccaaaactgctgggtggacactgtagtgtg

SEQ ID NO: 576886 - DNA, 597 bp, Homo sapiens
tcatccatagtcaagaagtcacgttgaagccattcccttccatccaccttccacaaagcagactaatcattaaatctgcttgaataaacctttaagcaatagtgactcagatacttccgtcaatgccagggagtggctggtggtaaatattgctgttcgtgagaggtactttttgttgttgttgttaaatttgggttagcttaagaagtttcactacmgtaaaaggtgatcataatggaaacctgtcagtttttgcctgcttttcctttccaggacactacagataagaccttgagcttttcatctgttcatatctggagctgcttctttcttgactttttaaaaccctcaggatgtcttttgtctaattttacaaactctgttcttattttataaactctaatttgttccgattttatagactgttttaagatttttagtggcactaaacattgtttagtggcactaaacaatttattttgtttagtgataccttaactgccaaaatattttggtgatagcttaactgccaaaataaaagttcctaaatattttgtcttaaggaaaccaaaactgctgggtggacactgtagtgtg

SEQ ID NO: 576887 - DNA, 597 bp, Homo sapiens
tcatccatagtcaagaagtcacgttgaagccattcccttccatccaccttccacaaagcagactaatcattaaatctgcttgaataaacctttaagcaatagtgactcagatacttccgtcaatgccagggagtggctggtggtaaatattgctgttcgtgagaggtactttttgttgttgttgttaaatttgggttagcttaagaagtttcactacagtaaaaggtgatcataatggaaacctgtcagtttttgcctgcttttcctttccaggacactacagataagaccttgagcttttcatctgttcatatctggagctgcttctttcttgactttttaaaaccctcaggatgtcttttgtctaattttacaaactctgttcttattttataaactctaatttgttccgattttatagactgttttaagatttttagtggcactaaacattgtttagtggcactaaacaatttattttgtttagtgataccttaactgccaaaatattttggtgatascttaactgccaaaataaaagttcctaaatattttgtcttaaggaaaccaaaactgctgggtggacactgtagtgtg

SEQ ID NO: 576888 - DNA, 604 bp, Homo sapiens
cctgtcacacacaaaaaaataagatgttttcattactttttttttattttaaaaaggaaactgctggtatatgcaaaggttaacataagttcatacaattttaggctgtaccatattttgtagtcgttaattgcgcagagataaatttaaggaaaccataaacttaacccagcttttttctttgtggaaattgtggaaaatacctcagtattgtcatttgtaagtcagatttgctaatattatttctctgttgtgccttattttaccaaatttttatctctgctggggataaccctatatactttctagcccctgccagaattatccatgaatatgcagagatgagcataaatgttatatctttgtagtcaccttctaccctttcaaagcaagtcctctcttattaytctgtacttcaacacttgtttccttacagcattcatcatattttataatcatttaattaatatacttatctacttttattttgtctgtttcccctatgaacactatgaagtacagtgtatgttggttttgctaaatactgtctgtagggcttaatacagcgcatgtttagagcctcaataaatatttactaggttag

SEQ ID NO: 576889 - DNA, 481 bp, Homo sapiens
tgtgtttgtgtgtctgtaattttcaactctaagctcatgtttcttagaactttaattcagaagtttttaaaggccattgttaaaggtacagtcttcaagacaggatatgtgtttgcacttagggggtgctatggactgaactgtgtcttcctcacattcatatatcaaaaccctaatcaccaatgtggcttatatttggatataaggctttagggaaataattaaggttaaatgagatcatgagtatggaacctgatccaataggaacacktgccttatacaaagagaaagaaagagaaatgtctctctctctcttccctccagtgtacagaggaagaaccattgtgaggataaagcaagaagacaaccgtctgcaagccaggaagggaaactttatcagaaagcaactgtgctggaaccctgattttagattttgtagtctttagaaaagaaataaaaattatttttgtttaagctaccc

SEQ ID NO: 576890 - DNA, 609 bp, Homo sapiens
aaatatatgattttatttttaatggctgagtagtattccattgtctatatataccacattgtcttatctagtcacccattgatggacaattaggttgattccattcatgattttaaaaaaaatagtgtaagaagacacatagttcccagaaatgggcaaaagatttgaacagacacttaccagagcaaatgtatagatgacaaataagcacattaaaagatgctcacttagctttattgttcagtatagcaatatgaaataaaccacaatgagatggtaccacataccactagaatggctaaaattcaaaagactgacaatgccagayattagtcatgtgaagcaacaattttgcagtttcttatgaagtcaaatatatatttatcacataatgcaccaatttgtctcctaggtatttacccaagtgaaataaaaatatatgtgtacataagcatgtattcaaacaattgtaacagctttctttatagtacccaattcatgaaacaaccaaaatgtccaccaactgctaaatagataagaaaactgtggtatatccatgtaatcgaatcctgcttagcaataaataggtgcaaactattgctaaatgca

SEQ ID NO: 576891 - DNA, 605 bp, Homo sapiens
tccttccttataatatccttctcaggtttaagttttaaagtaattctttcttcataaattgaactatggctagttttatagaaaagttgctgtgactttggtattatttccccatttaaaattgtaaaatccagtaaggctatctggggtactgccctccaatttcaagttctgttcagcaatctgttctcagaagcctctactgtaattgtcagrgagatacttctacaaatctgcaaggtccctaggacagtgtttctccaagtgtgctcctcacacaagtagcagcaatgtcaccaagaaacttgctagaaatgcaaatcgccaagccccttttaatacgtgctgaattagaaattctgaggttggggccatcagtctttgtttaaataaacttcccagatgactttgatgtgaaccgaaatttgagaactaccttaagagaaagcaactcaaatgtcagactctctttttttgccttctctgatgtcttggcagaaagtattcactatcttgttagtactacattgacatcgacatatatgaaaacaacataattatatgtataaaaaatattgaaagtataaaaactaactaacctagca

SEQ ID NO: 576892 - DNA, 519 bp, Homo sapiens
tcttgctttttatttattgtgtatctgttgtatgtttttggatttgaggttactgtgaggcttgcaaacactatcttatacttcattatttaaaactgatgataacactgattgcataaacaaccaatcatgcaaaaagaaaactaataaaaacattacacattaacttcatcctcctgctttttaactttttgttgtttcttttcatgtataattgtactatgtcttaaaaagttgtaataattattttttgttagttcatccatttttctttctacttagaataagagtagtttatacaccatgattgcagtgttatattttgtgcttttctgtgtgctattattagtgaggtttgtattataccttcagatgattacttattgctcattaacattttttctttcaatttaaaaattccytttagcatttcttgcaaggtaggtctcatgttgatgaaatccctccactgttatttttctgggaaggtctttatttatccttcatatttgaagggta

SEQ ID NO: 576893 - DNA, 587 bp, Homo sapiens
aaaacaaccatatgcaaagaaagaagttcttatattatctctaattaagatttttaaaaggaggatattgaagaatcacctgcctgatcctgtagctatgcctggggatattttttagaaaccaactctctgtgtgaactaaaacacgcttctgcctttcttaatctaacgtcctcattttaggatgaggaaactgagccccagattggtaaatgtcttgcctacccaataagtgtcagtgccatcaccayatactacatcaggggttggcgagccatagcctctaggccaaattcagtatttgttctgttatgtaaataatgttttattgcagcacaatcttgtccattagtttatgtatcgtcaatagctattgtcatgttactactgcagagttaattggttgtaacagagaccagaaacaggaacttctggtcctcaaagcctaaactacttactatctttccctttacagaaaacatttgctgacatctgccttagataagccaattctgatacttctctcactctttcctagtaaatactatccatgtgccagatttacccatacacaagtacatgtaaca

SEQ ID NO: 576894 - DNA, 645 bp, Homo sapiens
  misc_feature 1, 2, 3, 4, 5, 6, 7, 8, 9, 10, 11, 12, 13, 14, 15, 16, 17,18, 19, 20, 21, 22, 23, 24, 25, 26, 27, 28, 29, 30: n = A,T,C or G
nnnnnnnnnnnnnnnnnnnnnnnnnnnnnnaatcccaaattaattatgctgagtgacagaaactayatgtgtgtgtgtgggggcgggggatgtatacacattcatttatataaaattctagaagaagcaaactaatttataatgacagcataacagtggttgccaggggatatgggggcagaaaaggacaggagggagagattacaaaaggtcgtaaggaaattttggaagtgatggaaatatttgtcatcttaattgtggcagtagtttcaagaggggataaaaatatcaaaacttactttacacacatgcaatttattatgcaaggattatacttcagtaaagctgctaattttaaaactaattacaattaagtaaaattaaaagttcagtttcttacttaaactagtcacatttcatattcttcgtagccacatgtggctagtggctaccattttagacagcacaaatacagaacatttccatcattgttgaaagtactgttggataacactgatctaactcacacataaaacagcatctgtttctttcatttctcctccacctacctaccccaaactttagggatggtaatcagcatggcagtatggcactgatatataaattacccgagaactttaaaaa

SEQ ID NO: 576895 - DNA, 645 bp, Homo sapiens
  misc_feature 1, 2, 3, 4, 5, 6, 7, 8, 9, 10, 11, 12, 13, 14, 15, 16, 17,18, 19, 20, 21, 22, 23, 24, 25, 26, 27, 28, 29, 30: n = A,T,C or G
nnnnnnnnnnnnnnnnnnnnnnnnnnnnnnaatcccaaattaattatgctgagtgacagaaactatatgtgtgtgtgtgggggcgggggatgtatacacattcatttatataaaaytctagaagaagcaaactaatttataatgacagcataacagtggttgccaggggatatgggggcagaaaaggacaggagggagagattacaaaaggtcgtaaggaaattttggaagtgatggaaatatttgtcatcttaattgtggcagtagtttcaagaggggataaaaatatcaaaacttactttacacacatgcaatttattatgcaaggattatacttcagtaaagctgctaattttaaaactaattacaattaagtaaaattaaaagttcagtttcttacttaaactagtcacatttcatattcttcgtagccacatgtggctagtggctaccattttagacagcacaaatacagaacatttccatcattgttgaaagtactgttggataacactgatctaactcacacataaaacagcatctgtttctttcatttctcctccacctacctaccccaaactttagggatggtaatcagcatggcagtatggcactgatatataaattacccgagaactttaaaaa

SEQ ID NO: 576896 - DNA, 633 bp, Homo sapiens
gatgcctgaaaagtttccagaggggctggccaacacaggaggcagggtccctgtagctagaagacccagctgaaaaatttgccttcgacggaaacatgaacatgataggcaggtgagagtaggggcatcgtgtattggtctctgcctcctccatgaaggagcactgcatctccaccacacactgttctgctcagaaccaaagctggcaagcttagctaggctttctctttgtctctctctctctctctctctttctctctctctctctcctctctcctctctctcctatctctcctctctctcctctctctcctatctctcctctctcctctctttctccctttcctctctctctctcctctctcctctcttctctctcacctctctctcttctctctctcctctctctctcttctctctctctcttcctctaatctatgaacttttgttttttttggtgggagggggtgattctttattgtggtaaaatgtacatagcaaaatttaccattttaataattcttgagggtacaattccatggcattacctacatttacaatgttttacaagcatcaccactatccatctccagaactttttcatggttccaractgaaactgtgtacacatga

SEQ ID NO: 576897 - DNA, 553 bp, Homo sapiens
ggcgagcaaggagctgccagccggatggtgcgatgggaggtggggagsacagctctggaagtgtggggggctgtgtgcagccctggggactggggagagtggcagcaggatgcatctctacttcgtggaggggtactgaggtactgtctgggtgtcattctgtccagatccaagtgtttgagtgagaggcagagaacgggcagtcgatattagtaggaggcttggagggcatcactggggagaaggcccagcttggatggggatgaggaagagggggaggtaggctggagggaacttggtgggacacatctcgtgcccagagggccagggcacgagaggctggaggaggcacagtgggcctgcagaactagctggaaggcccgtgtagctcagtggctctgcaggagctcccacagcagaaaaggcccccatggcctgactcgctacgggcctctcggctgtcagtgtgagggacaggtggccggggtcctccaacgccctgcatcttcctggctcctcttcttccacgccctaaatgtcagaactctccaga

SEQ ID NO: 576898 - DNA, 673 bp, Homo sapiens
tcttttctatatatatatgatacatttatattataacaaaagttatgcatagcatatttgtaaattttaaaatataatagattttatgaatgtttatatgaatatttatacgaatgtttataatagtttagtgcataacttttctagtttaccttctagaatataaattcaaaagttgtatgtatctctttcaatggcatatttccaacaatttgaacaatgctttgcatatggtaggtatttaatcaagacaaaataatttattattcttttatagttggatttctataatttaaaatctagacagttccaacagtcacaaatgtcatctaaaagaaaagttagggatagatttttgaaagcakgaatggatagaagaaaaatctttaatctgtaagatgagcagttgtctataatcatttaaaagaaatagcttaattagaactctactttattttattgccaataaaggtatccaaccagcttgcatttttcactttctgctttggcttaatctataaaaataagaatataagtgatattttcaaaaatacttgtcagaatggtgataatttcagtggtaagtctaattttgtctctaatatggaagaaactattggcaattaggaaattatgttgggtagcatggaacgttacccaccagccaacgtaa

SEQ ID NO: 576899 - DNA, 611 bp, Homo sapiens
acaattaccaccagcactagtaccaatacaacaaaaatcgaaaccaagagtaccgtgtaaaaaatactttcacatagtttatttcatttggacttctcattaatattcccagcactcttctataagacttgtttctaagtgattaatygcatgttattaaaatgcttcttacatgggattgcctctagaagaaggctgagtggattaaatccccaccttagtcttgccaattctttcttaacaggtatcttaatccattttgtgctgctagaacggaataccacgggctgggtgattataaacaatagaagtttaattagctcatggttttggaggttagaaagtctaagatcaaggagccccatccagtgggagcctccttgctacagcataacatggtggaaggcatcatgtggtgaaagggcactcaagagactgaggaaagggatctcagccttttatgaggaatccgcatctaccataactaacctactcccaagataaccatgttaatctattcataagggtgaagccctcatgatctaatcacctttttaaagtcccacctcttaacactgtggcattggagattaagttaccaacacatgaac

SEQ ID NO: 576900 - DNA, 611 bp, Homo sapiens
acaattaccaccagcactagtaccaatacaacaaaaatcgaaaccaagagtaccgtgtaaaaaatactttcacatagtttatttcatttggacttctcattaatattcccagcactcttctataagacttgtttctaagtgattaattgcatgttattaaaatgcttcttacatgggattgcctctagaagaaggctgagtggattaaatccccaccttagtcttgccaattctttcttaacaggtatcttaatccattttgtgctgctagaacggaataccacgggctgggtgattataaacaatagaagtttaattagctcatggttttggaggttagaaagtctaagatcaaggagccccatccagtgggagcctccttgctacagcataacatggtggaaggcatcatgtggtgaaagggcactcaagagactgaggaaagggatctcagccttttatgaggaatccgcatctaccataactaaccyactcccaagataaccatgttaatctattcataagggtgaagccctcatgatctaatcacctttttaaagtcccacctcttaacactgtggcattggagattaagttaccaacacatgaac

SEQ ID NO: 576901 - DNA, 571 bp, Homo sapiens
agcttcagatttctttttatcattgtgtattamttttaagggaattagataaactgtgtacatttctttctagttttactgttcctgggtcctgtgatgtgggacatttcaccaataataatgcacacaaacatagtcaagagcgccttaacatagcggctggaattttcatatatgatcttggtagttgtgtgtgtgtgtgtgtgtgtgtgtgtgtgtgtgtgtgtgtgtgtgtattatattgctactaaatatatatgagaccagattggatagtgaatcagttgacgtttatttgaaattttggagagagtaggaaattacagtaacaaaaatattttcaaaaatctaatctgtaaggtaatactaataagattttaaaatgtgtgtttatatacagagtcataatgtctaaatctacaagtaatcttagaagccttgtatttcagtcctatcattttatacatgaggtttttgaggctcagagaggggtttggccttacattatgtaataggcagagttagaaacgaagctgagactacaaccaatttgtttctcttgatcccaagc

SEQ ID NO: 576902 - DNA, 530 bp, Homo sapiens
ggatcatgaagtcaggagatcgagaccatcctggccaacatggtgaaaccccgtctctactaaaaatacaaaaattagctgggcgtggtggcgtgcacctgtaatcctaactgggaggctgaggcaggagaattgctggaacttgggaggtggaggttgtagtgagccgagatcgtgccactgcactccagcctggcgacagagcragactctgtctcaaaaaaaaaaaaaaagaattgcaaatatatgagcctactgttgatgaggatactcagagctaactgaaaaagtatagtataatgtggattgttctacatacatgatatccagagagttataaaaagaaagaaaacaattcaggagaaaataaaagtcttactttagaaggacaatataaattatacagaaatggcacatactctatggcagcagagaaccagaggaaagtagttttgtattaataagtagtaagatacactggatagaacacattacattatgaagagtcttgagaagcaatgtaaacattt

SEQ ID NO: 576903 - DNA, 519 bp, Homo sapiens
atgttaggtcatagggtagatgcatataactttataagaaactgtaagacagttctacaaagtgattgtaccattttacacttctaccarcaacacatgagaattctatttgctctgcatctttagcaacatgtggtattgtccaccatggaatactatgcagccataaaaaagaacaagattatgtcctttgcagggacatggagggagctgggggtcattatctgtagcaaactaatgcaggaacagaaaaccaaatgctgcatgttctcataagtgagagctacatgatgagaacacatggacacatagaggggaacaacgcacagtggggtctattggagtttggaaagtgagaggaggaagaagatcaggaaaaatcactaatgagtaataggcttaatacctggatgttgaaataatctctacaacaaaccccatgacataccatttacccaggtaacaagcctgcacatttacccctgaacttaaaataaaagtttaaaaattaaaaacaaa

SEQ ID NO: 576904 - DNA, 519 bp, Homo sapiens
atgttaggtcatagggtagatgcatataactttataagaaactgtaagacagttctacaaagtgattgtaccattttacacttctaccaacaacacatgagaattctatttgctctgcatctttagcaacatgtggtattgtccaccatggaatactatgcagccataaaaaagaacaagattatgtcctttgcagggacatggagggagctgggggtcattatctgtagcaaactaatgcaggaacagaaaaccaaatgctgcatgttctcataagtgrgagctacatgatgagaacacatggacacatagaggggaacaacgcacagtggggtctattggagtttggaaagtgagaggaggaagaagatcaggaaaaatcactaatgagtaataggcttaatacctggatgttgaaataatctctacaacaaaccccatgacataccatttacccaggtaacaagcctgcacatttacccctgaacttaaaataaaagtttaaaaattaaaaacaaa

SEQ ID NO: 576905 - DNA, 519 bp, Homo sapiens
atgttaggtcatagggtagatgcatataactttataagaaactgtaagacagttctacaaagtgattgtaccattttacacttctaccaacaacacatgagaattctatttgctctgcatctttagcaacatgtggtattgtccaccatggaatactatgcagccataaaaaagaacaagattatgtcctttgcagggacatggagggagctgggggtcattatctgtagcaaactaatgcaggaacagaaaaccaaatgctgcatgttctcataagtgagagctacatgatgagaacacatggacacatagaggggaacaacgcacastggggtctattggagtttggaaagtgagaggaggaagaagatcaggaaaaatcactaatgagtaataggcttaatacctggatgttgaaataatctctacaacaaaccccatgacataccatttacccaggtaacaagcctgcacatttacccctgaacttaaaataaaagtttaaaaattaaaaacaaa

SEQ ID NO: 576906 - DNA, 584 bp, Homo sapiens
tgacatatgtcatgatggttcaatcataaggaagatttacttattttttttccttcttccaggaatgaggttgacgtacatgcatgatgactcagagagccttgctgatgattttacaatccaattgtcagatgggaaacataagatacttaaaaccatttcagtagaggtcatcccagttaatgatgaaaaaccaatgctgagcaagtaagctacctgaaaagagtccctttcagatttctatacaattctatgaaatctacaatactaggtacaggtgtgtgtgtgtctcccaaaaaagcaagtcttcgctagctcctgtcacagcttgcccctgccactcaggcatgaggaacctttagtgcaaatgttagttaaggtaacctcaccataacaatcagccgtttaattacttgattttcttctaaacatactaattagttgtaaagaataagaatgactgaacacacagtatggaatgaacaatctactaaacatataaatacatgcacttacaccaacgtgactgcacacctaccaaagtgcaattaatatatagmttcaactaaagtctaataacatta

SEQ ID NO: 576907 - DNA, 586 bp, Homo sapiens
aataccactagggtgcaatttccctggtcgaccttccctctccccccmcatagggccatctggctcaaaggttagttaatggaggtaggataaacagacttaactggggaagcctctattgtccctagtatttaccctatgacctaatgccctaaggtaagaacaagccgccttcagcctgttcaattattacaagctatgtaacctttcggccttccaaaaaggtttgtgactattccctataactttccctaatatttctgccaccatcctgagcaaattccaacacctgagtagctaggattacaggggaacactactgtgcctggtttacatgatgttttgagatacatcttcattgttgaatggcttaatcaagctaactaacacaggcattacttcacatacttagcattttttgtgtgtggagggaacacaaaatcttctagctattttcaagaatacaatacattgtcattattatagtcaacatgatgtacaatagattttttttcaaagtgaaagcaagtttattaagaaagtaaaagaaaatgaaaatggctactccataaacagagcagcccca

SEQ ID NO: 576908 - DNA, 586 bp, Homo sapiens
aataccactagggtgcaatttccctggtcgaccttccctctccccccccatagggccatctggctcaaaggttagttaatggaggtaggataaacagacttaactggggaagcctctattgtccctagtatttaccctatgacctaatgccctaaggtaagaacaagccgccttcagcctgttcaattattacaagctatgtaacctttcggccttccaaaaaggtttgtgactattccctataactttccctaatatttctgccaccatcctgagcaaattccaacacctgagtagctaggattacaggggaacactacygtgcctggtttacatgatgttttgagatacatcttcattgttgaatggcttaatcaagctaactaacacaggcattacttcacatacttagcattttttgtgtgtggagggaacacaaaatcttctagctattttcaagaatacaatacattgtcattattatagtcaacatgatgtacaatagattttttttcaaagtgaaagcaagtttattaagaaagtaaaagaaaatgaaaatggctactccataaacagagcagcccca

SEQ ID NO: 576909 - DNA, 565 bp, Homo sapiens
cactgttattcaacatagtactggaagtcctacctagagcaatcagacaagagagaaataaaggacctctaaaaggggaaggaaggagtcgaatcatccttgtttgcagagatgtgattttatgtttggaaaaacctaaaggctccacgagaaaactaataaactgataaacaaatwcaggaaaatttcaggatacaaaatcaacatacaaaaatcagtagcatttctatatgctaacagcgaacaatcagaaaaagaaattttaaaaagtaatcccatttacaatatacacaaaatacaatactaggaatttgcttaaccaaagaagtaaaagatctctacaataaaaactataaaacattgatgcaagaaattaaatgttaatggattgggaaaatcaatatttttaaatgtccatactacccaaaacaatctacagatttgatgcaatccctatcaaaataccaatgatattcttcatataaatagaaaaaaactctaaaatttatatggaaccacaaaagacacagaatagccaaagctatactgagcaaaaagaacaaac

SEQ ID NO: 576910 - DNA, 426 bp, Homo sapiens
caggctggtctcgaactctcgacctcaggtgatcctcacccgccttggcctcccaaagtgctgggattacaggcatgagccaccatgcccagcctctatttttttaataccccatctcccactcaccctcccattacccttcccagcctctgttaaccatctttctactctctatgtccatgagttcaattgttttggtttttrgatcccacatataagtgagaacttgtgatgtttgctttctgtgcctggcttatttcacttagcacaatcacctccagttccatccatgttgctacaaatgatagaatctcattctttttaatggctgaatagtactccattgtgtgtaagaaccacatttttttttattcattcatctgttgatggacacttaggttgcttccaaattttagctattctgaa

SEQ ID NO: 576911 - DNA, 588 bp, Homo sapiens
atataaaaaataatagaaagagtaaatatatggaatgatctaaacaaataaggctttatggaattttaaatgcatataggaaatatagcatacgacaatagcacaaatgatgrgagaagggtaaatagaattaatgtgttgaagattcttgcattgtctgaaaattttatatggtactttaacaagtcaagcatgcatgttgtaatcgctagcacacaaaaagaagagtaaaataatggataacaagctaaaagagagaaaaaatggaataataaaattgatctgtttaaaaaataataaagggagaaagttatatgaaacattgtaataaatggaaattaaatcttaaaatgtcatatttaccccaaatacactattaacaacaggaaatgtgaatctctttcttacattaagcttgagtaaattaaagattaatgagtataactactaaaaataaaatagtgaaagaatgtaaaaccaacaatggaaatactagattaattcagaagaatgccaaaaacagagtaaaaagtaaagtagaacatgtggaacaaatagaaaaaaaaaatgtagactatttaaagccaa

SEQ ID NO: 576912 - DNA, 588 bp, Homo sapiens
atataaaaaataatagaaagagtaaatatatggaatgatctaaacaaataaggctttatggaattttaaatgcatataggaaatatagcatacgacaatagcacaaatgatgagagaagggtaaatagaattaatgtgttgaagattcttgcattgtctgaaaattttatatggtactttaacaagtcaagcatgcatgttgtaatckctagcacacaaaaagaagagtaaaataatggataacaagctaaaagagagaaaaaatggaataataaaattgatctgtttaaaaaataataaagggagaaagttatatgaaacattgtaataaatggaaattaaatcttaaaatgtcatatttaccccaaatacactattaacaacaggaaatgtgaatctctttcttacattaagcttgagtaaattaaagattaatgagtataactactaaaaataaaatagtgaaagaatgtaaaaccaacaatggaaatactagattaattcagaagaatgccaaaaacagagtaaaaagtaaagtagaacatgtggaacaaatagaaaaaaaaaatgtagactatttaaagccaa

SEQ ID NO: 576913 - DNA, 588 bp, Homo sapiens
atataaaaaataatagaaagagtaaatatatggaatgatctaaacaaataaggctttatggaattttaaatgcatataggaaatatagcatacgacaatagcacaaatgatgagagaagggtaaatagaattaatgtgttgaagattcttgcattgtctgaaaattttatatggtactttaacaagtcaagcatgcatgttgtaatcgctagcacacaaaaagaagagtaaaataatggataacaagctaaaagagagaaaaaatggaataataaaattgatctgtttaaaaaataataaagggagaaagttatatgaaacattgtaataaatggaaattaaatcttaaaatgtcatatttaccccaaatacactattaacaacaggaaatgtgaatctctttcttacattaarcttgagtaaattaaagattaatgagtataactactaaaaataaaatagtgaaagaatgtaaaaccaacaatggaaatactagattaattcagaagaatgccaaaaacagagtaaaaagtaaagtagaacatgtggaacaaatagaaaaaaaaaatgtagactatttaaagccaa

SEQ ID NO: 576914 - DNA, 332 bp, Homo sapiens
ttttttttcaggtgtattttatgtgtgaatctccattttttttttttttttgcatttaatttaaaaaatttaggtcaccgtgcagatcaaacagagcatgtttctgggccaccatgtgaactgtactttagagcatgccacaaaaagaacattaaaaggtttctcactgtggtttagatttgcatttccctgaygattagagatgctgaacattattttttcatatatctgttgacagtttgtgtgtcatcttttgagaaatacctattatgatcttctgcccattttttaatcaggtcatttgtttttaagttgatgagttgtttaagttc

SEQ ID NO: 576915 - DNA, 624 bp, Homo sapiens
tggagtgtgggaagactgcccaaagmcaaaattgagtggcaaatgtagagtgcaccccagaagtaggtgctagaattgggctttctcccatcactgaacttgagcaggaggagaattgccgaagctgcaggttctcctgagtggtgtaatctctggccaggaacagctttgtagcttgagactggactgcctctgtcattgctgggtgccccagattgctcccttggtcaatcaggagacagtgccccaccagttctgaggtgcaagagggaggcagaccctactcttcctcacccggaatgggaacgtgggccacatctctcttcccttgcaaagaacttggtgcagtggtgctccttcttctccacacctgggcatatttccaggcatttggtacaaccacttgcctggaataggggcctgagttgcccctttattcccctgcaaagacctttctgcatcagctattaaaatgttatgcaggagttactccacttcttgccagagtacatatctccaggtatttggcacacctgctgcctgaattaggagcctgagtcacctcttctttcctgtgcacaaatctgggtgcagtggtgccctttcctctccatacccaggcat

SEQ ID NO: 576916 - DNA, 274 bp, Homo sapiens
ctttcaggacccctaggggttttgtgtaggtgcctcaggggcaggccaggtgctagtggcagctgtgtgtgtgtgtggtgtgtgttgggggacagtggctaccccacgcctcttcagccaggcccactgctttctgttcctagtctcatgctaactctgtagctggggtctagggacacagagccaggaggcacacgtttgcctgaggcttgytccttcccctcacatgtcctaagtggcagggacattttccttttcctggaagaggtgattg

SEQ ID NO: 576917 - DNA, 477 bp, Homo sapiens
ccttggaacacagccgctctccagttccttctcagcaaaaaacctggttgctttgaaggcagccagtgattccccataggtggggatgctgcaaatttcagagagctttgcaaagacaagaaaggctactccttcctgcctccamtatcctcctctacagaagggatgtgcagagacagcagaggggagggcatttatcagtatccaggtgcacattatctagaagattagaaaaacccagtctcttcacccgaactgcttatgtctgcagttttccaaggtccagtggaaattgttaatacggttgttgaataacagcagtcagcaaggagtatggtcattgactagaacataaaattaggctagaaatttaagaaaatgaattgattccttttctctctgatataaaaaaaaataataagaacaactcagagtttctcagcctcagcactatcgatgctctgggcaggagaattc

SEQ ID NO: 576918 - DNA, 477 bp, Homo sapiens
ccttggaacacagccgctctccagttccttctcagcaaaaaacctggttgctttgaaggcagccagtgattccccataggtggggatgctgcaaatttcagagagctttgcaaagacaagaaaggctactccttcctgcctccactatcctcctctacagaagggatgtgcagagacagcagaggggagggcatttatcagtatccaggtgcacattatctagaagattagaaaaacccagtctyttcacccgaactgcttatgtctgcagttttccaaggtccagtggaaattgttaatacggttgttgaataacagcagtcagcaaggagtatggtcattgactagaacataaaattaggctagaaatttaagaaaatgaattgattccttttctctctgatataaaaaaaaataataagaacaactcagagtttctcagcctcagcactatcgatgctctgggcaggagaattc

SEQ ID NO: 576919 - DNA, 628 bp, Homo sapiens
taaagtgagtctcttatagacaacacatagttgattttgktttttgttaatctatttagccactctctgtcttttggttggggagtttaatccatctacatctaaagcaattattgatatggttagttttatgattgctgttttgcttattattttctatttgtcttgtagttcttttgcctctcttttcttcttgccatttttctttgtgttttattgatgtttttgtattgatatactttgattctgttatcatttacttttctgtaacttctacagatattttctttgtggttactatggggcttacctaaaatatcttataatagtctatttgaagtttataacatgtaaacttcaattacatacaaacacttgacacttttactccgtctctatgctttatgttactgatgcagtcatttatagctacttatattgtgtatctattcacatatttttaagttatagtatagtatatattatatagtatatataatagtatatattatatagtatacataatagtatatattatatagtatacataatagtatatattataatatacataattgtatatatcatatagtatacattatagtatatatcatatagtatacattat

SEQ ID NO: 576920 - DNA, 628 bp, Homo sapiens
taaagtgagtctcttatagacaacacatagttgattttgttttttgttaatctatttagccactctctgtcttttggttggggagtttaatccatctacatctaaagcaattattgatatggttagttttatgattgctgttttgcttattattttctatttgtcttgtagttcttttgcctctcttttcttcttgccatttttctttgtgttttattgatgtttttgtattgatatwctttgattctgttatcatttacttttctgtaacttctacagatattttctttgtggttactatggggcttacctaaaatatcttataatagtctatttgaagtttataacatgtaaacttcaattacatacaaacacttgacacttttactccgtctctatgctttatgttactgatgcagtcatttatagctacttatattgtgtatctattcacatatttttaagttatagtatagtatatattatatagtatatataatagtatatattatatagtatacataatagtatatattatatagtatacataatagtatatattataatatacataattgtatatatcatatagtatacattatagtatatatcatatagtatacattat

SEQ ID NO: 576921 - DNA, 628 bp, Homo sapiens
taaagtgagtctcttatagacaacacatagttgattttgttttttgttaatctatttagccactctctgtcttttggttggggagtttaatccatctacatctaaagcaattattgatatggttagttttatgattgctgttttgcttattattttctatttgtcttgtagttcttttgcctctcttttcttcttgccatttttctttgtgttttattgatgtttttgtattgatatactttgattctgttatcatttacttttctgtaacttctacagatattttctttgtggttactatggggcttacctaaaatatcttataatagtctatttgaagtttataacatgtaaacttcaattacatacaaacacttgacacttttactccgtctctatgctttatgttactgatgcagtcatttatagctacttatattgtgtatctattcacatatttttaagttatagtatagtatatattatatagtatatataatagtatatattatatagtatacataatagtatatattatatagtatacataatagtatatattataatatacataatwgtatatatcatatagtatacattatagtatatatcatatagtatacattat

SEQ ID NO: 576922 - DNA, 628 bp, Homo sapiens
taaagtgagtctcttatagacaacacatagttgattttgttttttgttaatctatttagccactctctgtcttttggttggggagtttaatccatctacatctaaagcaattattgatatggttagttttatgattgctgttttgcttattattttctatttgtcttgtagttcttttgcctctcttttcttcttgccatttttctttgtgttttattgatgtttttgtattgatatactttgattctgttatcatttacttttctgtaacttctacagatattttctttgtggttactatggggcttacctaaaatatcttataatagtctatttgaagtttataacatgtaaacttcaattacatacaaacacttgacacttttactccgtctctatgctttatgttactgatgcagtcatttatagctacttatattgtgtatctattcacatatttttaagttatagtatagtatatattatatagtatatataatagtatatattatatagtatacataatagtatatattatatagtatacataatagtatatattataatatacataattgtatatatyatatagtatacattatagtatatatcatatagtatacattat

SEQ ID NO: 576923 - DNA, 507 bp, Homo sapiens
aattgggcagcactttattccataaaatagaatgagcatatatatatatgtgtgtgtgtgtgtgtgtgtgtgtgtgtgtatgtgtgtgtgtgtgtgtgtgtgtatatatatatatatatatatatatatatatatatatatatttctttctttctttctttcctttttttttgatggagtcttgctctgtcacccaggctggagtgcagtggtgcaatctcggctcactkcaagctccacctcctgggttcatgccattctcctgcctcagcctcctgagtagctgggactacaggcgcccgccaccatgcccagctaatttatcttttttttgtattttttagtaaagacaaggtttcaccatgttagccaggatggtctcgatctcccgacctcgtgatctgcctgccttgacctcccaaagtgctgggattacaggcttgagccactgtgcctggccgctcttttatatatttttagtagtgaaacattgtgtaaacaacatat

SEQ ID NO: 576924 - DNA, 507 bp, Homo sapiens
aattgggcagcactttattccataaaatagaatgagcatatatatatatgtgtgtgtgtgtgtgtgtgtgtgtgtgtgtatgtgtgtgtgtgtgtgtgtgtgtatatatatatatatatatatatatatatatatatatatatttctttctttctttctttcctttttttttgatggagtcttgctctgtcacccaggctggagtgcagtggtgcaatctcggctcactgcaagctccacctcctgggttcatgccattctcctgcctcagcctcctgagtagctgggactacaggcgccygccaccatgcccagctaatttatcttttttttgtattttttagtaaagacaaggtttcaccatgttagccaggatggtctcgatctcccgacctcgtgatctgcctgccttgacctcccaaagtgctgggattacaggcttgagccactgtgcctggccgctcttttatatatttttagtagtgaaacattgtgtaaacaacatat

SEQ ID NO: 576925 - DNA, 541 bp, Homo sapiens
ttcttcctttctctcactctttcttcaataaataagtattgaattcttgacacctactgatcgctgtgataggcaggcagagggaacaaagcagtagaaaagacatagtccctgtcttcaaggagcttatactatagtgaaagacctataaataagcagctatcacactaagaggagcccactggaataattacaagttgctctgaacttacttaggacttcacagaaggctttctgaagaggaatgagacagcattgctggtacctgaagtgctaatgggatacagccagtagatgagagggtgggcagatgacccaagatgaagaaacaccatgtgtaaaaacagaattgataaaggaaaggctcactgacaaagcaacatatatcttcatgccccaagaggtgagtgaggctgtgaattaagagaggagtcagattgccgggcgcggtggctcacgcctgtaatcccagcackttgggaggccgaggtgggtggatcacaaggtcaggagatcgagaccattttggctaacacggtga

SEQ ID NO: 576926 - DNA, 541 bp, Homo sapiens
ttcttcctttctctcactctttcttcaataaataagtattgaattcttgacacctactgatcgctgtgataggcaggcagagggaacaaagcagtagaaaagacatagtccctgtcttcaaggagcttatactatagtgaaagacctataaataagcagctatcacactaagaggagcccactggaataattacaagttgctctgaacttacttaggacttcacagaaggctttctgaagaggaatgagacagcattgctggtacctgaagtgctaatgggatacagccagtagatgagagggtgggcagatgacccaagatgaagaaacaccatgtgtaaaaacagaattgataaaggaaaggctcactgacaaagcaacatatatcttcatgccccaagaggtgagtgaggctgtgaattaagagaggagtcagattgccgggcgcggtggctcacgcctgtaatcccagcacgttgggaggccgaggtgggtggatcacraggtcaggagatcgagaccattttggctaacacggtga

SEQ ID NO: 576927 - DNA, 539 bp, Homo sapiens
gattatttgtgtaaagtgcagcaagaataattgtttttatataggcctttaaaattggctttgatggaactttgttccataaaaggaatctcagataagagtttttttaaagctgagcacagtcatgggtttgtaccctcaaatacctatgagttgagtaaattcctctcctcttgagatcccaagataacaaggggctcctaggcctgttagaaagtgacattctttacttaccacaggtcaggaaccctgtacagggactgtgcagacaagataggaggccagttttcccaaggggcttttattggctctatgccccacccaagctggcaattcaggatctctgggagtggccctggcttcctaggtgattccaatgtgcagctctagaagtcactgcctcacaggamggtgtgatggtcttagcacttaatatggttcagctgtgtccctgtatgaatccgttctcacgctgctaataaagatatacctgaaactgggtaattgataaaagaaagaggtttaatggactcacatgg

SEQ ID NO: 576928 - DNA, 449 bp, Homo sapiens
agacatagagaaaaaatactgaaatatttataaatctatacagtgtctacaactttttaaaataataattagactcgggcagaaataatcttttaagaaataatgaccaaattttcccyaaattgaaaaatattaatctataagttcagaaatcctagtgaatttcaaacagaataaatacaaagaaactatgccatggcatgtcatagtcaaactgctgacagagcaaagcatagagaaacttttcagcatagataagctgctgaaaaccaatgataagacaattttaaaaacaaccatgaaaaaagacagcacatccaggggaacaatgggaagaatggcaattgacttcttactagaaatggaagccagagaagagggaataaaacacatctttaaattactaagaacaaacaagcaagaagaaacaacccatcaacttagaattc

SEQ ID NO: 576929 - DNA, 449 bp, Homo sapiens
agacatagagaaaaaatactgaaatatttataaatctatacagtgtctacaactttttaaaataataattagactcgggcagaaataatcttttaagaaataatgaccaaattttccccaaattgaaaaatattaatctataagttcagaaatcctagtgaatttcaaacagaataaatacaaagaaactatgccatggcatgtcatagtcaaactgctgacagagcaaagcatagagaaacttttcagcatagataagctgctgaaaaccaatgataagayaattttaaaaacaaccatgaaaaaagacagcacatccaggggaacaatgggaagaatggcaattgacttcttactagaaatggaagccagagaagagggaataaaacacatctttaaattactaagaacaaacaagcaagaagaaacaacccatcaacttagaattc

SEQ ID NO: 576930 - DNA, 609 bp, Homo sapiens
cagtgtgccataaagttttgggattttccatgtaacawataatctgcaagaagaaaattgttttttaaatatacggcctagtttatagttctagtaactagtaataacctaacaaatatatatttgatgatgattatcagggttgttggaaatgttaaatcatcaaggaaaatttcattttcaggaaatcatatgccataattccttggtataaaatattctgttatttagaagattttatatagtggcaataacaaatattgttgaaatttgacacctagagaaactattcaactgctctgttctacatttttaaaaaatgatatatttttgataaagttatagcatttttaatggattttaataaaccttatttaaagaaaagtattaacttcctgcacaagttttagaagggttattattaaaagtagtgacaaatattatgacaaagacattacatttctcatgcctacattagcccgtttctaaatagtatgtaattctatgtgtgtggctgatgaggagtgagaggggtaactgccaggggacagacttgtaggaggcagccctctgccaacttgtttaaagttacacacaatttggagcata

SEQ ID NO: 576931 - DNA, 573 bp, Homo sapiens
actcactgcaacctctgtctcccgagttcaagtgattgtcttgcctcagccttctgagtagctgggactacaggtgtgcaccaccatacctggctaattttttgtatttttagtagagacagggttttgccatgttggctgggctggtcttgaactcctgacctcaggtgatccacctgcctcagcctcccaaagtgctgggattacrgatatctttaaaaaatgtgacatattcagagaattatgttcatttcacgtattgtgacttataacttgaatatacttagtataaactaggcttataaatttataattatataatctataagttaacatgctatgttgagagatatcattacagatttctcatgaacttgcctattaggtaaaagggatttattttttctaagagattatagcagagtatttaattttataaaagatccacttaattttccaattaaaatatccataaatgcattttggattttcatctaagctgctaataatatgatctcataacaaatgcctaaaacttacttcagaactcatgaaaaatgacttgtaattgaa

SEQ ID NO: 576932 - DNA, 502 bp, Homo sapiens
tgctatctactaatacttcaaaatattactaagaaagtacgtaagatactacttataaaatgtctgacacatagttgctaagtaaatagcacttttccccatactcctatgtatgttatttccattaaactctctaaggcagttctgaggtcttgaaagagcactagaacttagatttttgaagattttagaaagtttcctttgaatcttggtcatgttagtttagtagttgtagctgatagttacttcatgcattcattcagtcagtctttcattatgcaaatgtttattaaacaactaccatttggtgacatcatgctaaatatcagggaatgaaatttagcacctctgccagggacgaactaaaagtattcataacagtaagtacataaaggttttagtagggttatgtacagaatgtaagtaggacacactctgactggctaatttgatcttgggtttgtttgtttagaaattrgtgttccagcaggtgcaatggctc

SEQ ID NO: 576933 - DNA, 420 bp, Homo sapiens
tatgggtgaaattttctatataaaatgaaggatggatcaatgttcatatttctgcatactggtaaccaatttgttccagtaaaatttgttgaaaagattatctttcctctgctcagttgcctttgcacctttctaaaaggtcagctgcccacatgtgtggctcataattttcttgtttcaatcaataacagcaaagttaaataattactagatttggttaagataattttacacgccaacttggctaatccatggtacccacaaatttggtcaaatatgtcattacatttctctgaaggtatcttttaraagagattaacattaggatccatagactttgactgaagcagattattctccataatgattgggtgggtctcctccagtctatgagggccttaagataaaaaagactgaggt

SEQ ID NO: 576934 - DNA, 581 bp, Homo sapiens
gacagaaagagatgccaggggtattcaastgaattgtttgagtgagtcaatgtgagaggcaaagaaaaagaagagtcaaagatgactccaacactgaacctgattgtttgaccttgaccttggaaccctgcttcgggaaggctggttgcaaacaaagagtaagccctgctagtagaaaagaagagctgaaagatgctgagggtgggggaaagagaaattcaataatagaagagtggaaaaaggagaagattgctagccaagtaaatagttgagtttaggaagcagagacctgcattcctgagagcacagacgacagaggcagccaccatagatccctccactgctcccaattattggtgatatttgatcagtgtatgattccatttaagatttctgttgtgtcttcatattattgatgtgcattatcccttccatcctatggtaacccccttaaagcccagaacatcccacctcagctcctcctacactatcgtcatataaatgaattctaatacttaaaatgcatttaaggggacccgtgtggtgggtttctttccttatcattttatacaaaattgtga

SEQ ID NO: 576935 - DNA, 481 bp, Homo sapiens
tcggcctcccaaagtgctgggattacaggcgtaagccactgcgcccrgccttgttagactcttataagtactttaggaaggtctgagtagaacaaattgaaaaatatttgggagtgcaattcatgtacctatgttttatttttttaaatatgcagtaagaattattttaagaagatattcatagccttaccagtataatgtgagctaacaactcaagttactgctagtgtaatagttaaatcagtaagtgcattcaaaattaggtcagacttaatgttcagcagttggtgttatgttacctttgtatttggcataagatttttcatatcacacttaaccttgatataaaataaaaaggtacatgttagagaaagaagtcctgcagatttgtcatttgcagccctaattgcacattagaatcacctggcatgtttttaaaatctaactgctaggccccatgtaagacaaattaattccagtt

SEQ ID NO: 576936 - DNA, 555 bp, Homo sapiens
caaacgtttatatctacactgaacctcctttctatatgcttggaggaagagatgtcctcttttctagttcaaagtagtcatctcaactctctcctttgggatgttactccatcagtcatttactctaattcctgaagctctttaattctgcttacttcttccctacagcctgaagataaactcaagtcatactgtcttaaaaagaaaatcaaacaaaaccccaaacgcaactccttcagctttgtcctcttctaactcttatctcctctttccactggaattaaggttctcagtacactacgctgtttgtattttcttttattcataggaataacctaataaaaaaaaatcaaaggaaaactgaagaattactaaaggccaataagcatttgcaaaagtttagcctcactattactcatagaaatgcaaattgcatcaactataagaatatttactcaaaaattagggatttaagagtatggggagatgtttactctygaatattactagtgggaatataaattgatgcaatctttctgaaaagcaatttggtaa

SEQ ID NO: 576937 - DNA, 426 bp, Homo sapiens
catagcaaaagaaactattaacagagtaaacagacaacttacagattgggagaaagtatctgcaaattatgcatctggcaaaaatctaatatccagcatctataagggatttaaataaatttacaagaaaacaacaaccccattaaaaagtgagcaaaggacatgaacagacagtttttaaaagaagacataaatagagtcaacaaacatgggggaaaaaaagctcagtatcgctcataatyagagaaaggcaaagcaaaaccacaatgagataccatctcacaccagtcagaatggctactattaaaaagtcaaaacataacagatgctggcgaggttgtgaagaaaagggaacacttatatactgttggtgagagtgtaaattagttcagccattgtggaaagcagtgtggtgattcctcaaag

SEQ ID NO: 576938 - DNA, 464 bp, Homo sapiens
gaattctttgttaaagaaatggctctgaaagttgcttttttaccccaaccttaaatttatgtacatggagcaaaaccttatccacctctctgtcccatgtcaattgtgcgtgtgtgtatgtctctgtgtgtgtgtgtatatgcatgtaaaaggattcagtgagatgcctgttattttaggattacatatttcagggatcatgtacacatctgctttcataattggctatggataattctttattgaacttcagaatagattaatctaaattccaattatgaaraattatggtcaaatatattctaatataaatacaaatcaatgtgaatcactgagttagataaaatcttctactcacagagtaaaaatggagcagttgagttagttcagggaggagagctaagcccctcatacctacctcttctccttctctactcccccagtggcttctaaggggacttcaa

SEQ ID NO: 576939 - DNA, 464 bp, Homo sapiens
gaattctttgttaaagaaatggctctgaaagttgcttttttaccccaaccttaaatttatgtacatggagcaaaaccttatccacctctctgtcccatgtcaattgtgcgtgtgtgtatgtctctgtgtgtgtgtgtatatgcatgtaaaaggattcagtgagatgcctgttattttaggattacatatttcagggatcatgtacacatctgctttcataattggctatggataattctttattgaacttcagaatagattaatctaaattccaattatgaagaattatggtcaaatatattctaatataaatacaaatcaatgtgaatcactgagttagataaaatcttctactcacagagtaaaaatggagcasttgagttagttcagggaggagagctaagcccctcatacctacctcttctccttctctactcccccagtggcttctaaggggacttcaa

SEQ ID NO: 576940 - DNA, 613 bp, Homo sapiens
ttactgatgaactgtttcatcggacaacaacaatcaactatctaatttatctcgtgtttgagagaagaatgcttgctgttaatgaggaattctatcttctcaagatgagggctttagaaggaatatctgacctgttaatagtttgaaaagactttaagccaatctcaagtcgcagtaaatctcaaactttgtaattaaaattaagcaaatgttcatgcatcgtttttaatttgtgttgtattgaaaagcttaggaaaagaaaactatgtgaagagattaggagccagggtgggcargcctgaatctcacagcgaggaaggaggaaccaaagtgtgatgaatcttacagagtgtgatgataaagttatgagatagacacccatgagaataaatgaacttgccttacagactagatggttgcaacttcatagcttcctagggaattttactatgtttactatcttacttacatagtttgtttttagcctatgtcaaccatataggctatcaaacatgtggcaaagctagacgttttaatttcctgcctttcccaaagtaacaagttagttcttttccagtctgtatgatggtttggaaaatacaataaactaaac

SEQ ID NO: 576941 - DNA, 592 bp, Homo sapiens
ctagcttgggcaacagagtgagactctgtcttcaaatatatatatatatatatatatatatatatatatatatatatatatgtaggatatatcaggttaaagttaatttcatctttttttttacttatttgatgtctctagaaaatatatatgtatatatgtacatattacacatatttctattggacaatgctggtttaagaatattcattgtgacaaatgatcctttgatattccatggtgagctgtgaaaagttattggaaccccagtcaccaggtcctgacattcagggatcctatcccaagtgtctcctctgagccataactcctggcagtatccactctcctgtctttgctccatatttgctgtgcccctcttagctatagctgctgttcctgtcattgccttgagacagggcttacttttgctccactcctatcgctrgtaaatgggagaggaaacagggtccctatctgttacaagtgcctttatgtatttatttctttaaggaaccaaataatttgactctgtttgttatagtttgcctgatgctagacgttgttcattaaccttcctctttaagtttgttat

SEQ ID NO: 576942 - DNA, 466 bp, Homo sapiens
caggccatagttgaaagaactaatagaacactcaaaacycaattagttaaacaaaaagaagggggagacagtaaggagtgtaccactcctcagatgcaacttaatctagcactctatactttaaattttttaaacatttatggaaatcagactactacttctgcagaacaacatcttactggtaaaaagaacagcccacatgaaggaaaactaatttggtggaaagataataaaaataagacatgggaaatagggaaggtgataacgtgggggagaggttttgcttgtgtttcaccaggagaaaatcagcttcctgtttggatacccactagacatttgaagttctacaatgcacccatcggagatgcaaagaaaagcacctccgcggagacggagacaccgcaatcgagcaccgttgactcacaagatgaacaaaatggtgacatcagaacagatgaagttgcca

SEQ ID NO: 576943 - DNA, 466 bp, Homo sapiens
caggccatagttgaaagaactaatagaacactcaaaacccaattagttaaacaaaaagaagggggagacagtaaggagtgtaccactcctcagatgcaacttaatctagcactctatactttaaattttttaaacatttatggaaatcagactactacttctgcagaacaacatcttactggtaaaaagaacagcccacatgaaggaaaactaatttggtggaaagataataaaaataagacatgggaaatagggaaggtgataacgtgggggagaggttttgcttgtgtttcaccaggagaaaatcagcttcctgtttggatacccactagacatttgaagttctacaatgmacccatcggagatgcaaagaaaagcacctccgcggagacggagacaccgcaatcgagcaccgttgactcacaagatgaacaaaatggtgacatcagaacagatgaagttgcca

SEQ ID NO: 576944 - DNA, 498 bp, Homo sapiens
cttctcacttcttccactgagatagcaatgtgctatttttcccccaaactattgtttattgatatattaacccaatcacaaagtcaagaatcatggcatactgttcataaagttatttcacaattattaatgcatttgaaatcaagccaccagtctagttttttttttattttctccttttaaaataagcctctgacctctcattttcaggcaatacattgtggtttatgatttgtttgtttgtttgttttccctttgatgaagacrgtggtacaatatagcactttattatactttgctttcaaacatgagtgattttcctacagttttgtcagtttcgggaatgagaaaataggttttgtctaaacaagttctctaatagagttattctggtaggctggatccctagaatcatatgtatttgcttacatttacttttcagctaaattgccaaaaagccttggcttgtcagaacagagcctgagcaaaaggaaagct

SEQ ID NO: 576945 - DNA, 480 bp, Homo sapiens
ggcaacacagcaagaccctgtctcaaaaaaaawaataataaaaaaagctgggtggccgggcgtggtcctgaaggctgcagctgtgcatgtcatcacttagtcacttgcctggtggtcacctatgagtcaatgattcaaaggtttccatcccagggatacatctgcttcttaataggaatttacagggacaatcctttgaccaggggagccacctaagggactgagacttgatcccagagcaatcaggcagagactctgtgcagcttcctttcccttcctgcccagacatgctgcccctccctccgaccctgggcctcccctttgtgaatttaggtctctgtggttgtctgtgggctgaggcagcaaaaagagcattttggagtgagccagagctaaatccaaatcctggttctattactaactagctgtgtgaccttggtccaatttcttatctgctctgagtcagttttgcagaaaatg

SEQ ID NO: 576946 - DNA, 469 bp, Homo sapiens
gaggacaaaaccccaaacggacctgagcagacgtcctgttagcgggtggtgcctggaagagcctggggtgaggaatgcagtgagaagggtgttgcagttcttcaggagagaggtaacggggttctaagctgagcaggtggcagtgagtgtggaagagtgacgggcgatgtggctgtttgtatttggtagatttgtttgaacctgaaacttacagcyttatgtgtgattaagaagatggtgccagtgacaggaggaggtattttatggagtttgagttttatcgaatttgaaacagtggtttacatggagattgtagaaagactttaaaaaaaattatgagaattaagcccgaaagactttcaaggtgagacccaaaacagatgaagtttcatataaaagggtaagaagtatttttgtttaggagaaagttatcaatgacataaaatgctgcaatggtcagaggaggaag

SEQ ID NO: 576947 - DNA, 580 bp, Homo sapiens
attttcaatcctcagctggtcaaattcaaggatgcagaactgtggctacagagagccaactctgtagtaccttattgtggagttaaaggcagggtaggatactctggacagaggttttcaggatacctctggagctctccccacaccattaattgtgtttgtgcttttgtatctttctctgtttctctttttagtctagtggcaataccagtgtatgtgaaacatagtatcagctttaaggagaacagttcttgcggcagatttgatataacaattggaccaaagcagaatatggggaaaactattgaaggaattacagtgacagttcacatgccaaaagttgtgctgaacatgaacctgacacccacacaaggcagctatacatttgatccagtcaccaaggtacagccacttcaaatcaagagtgagcaagtgtttctgcaatctattttgtgatttgtggggaggaatggagggaaaggtttggcacyttgtttaaaactaaagttcgtatcaaaacctagagagcatactgtgctgtgcttctgccactggctgcagaaggaatcctgcagctgct

SEQ ID NO: 576948 - DNA, 572 bp, Homo sapiens
tgactattcatcaaaacaaaggagaaacctgacctaaaagttcttgctaaagtaacatatccatcatttaaagcattttttatacaaatgcattttattgttttaaacagaacaaaagaagaggcagaaaatatttgcatataacaaatcctagcttataaatgtagttttttagcggtgatgtctctaatcatcattcagggattttttttttttttttttttaatttgcttcactgtgtctcgagcactgatattggagaaaagcacatccggcataaagtgtaaaccagtgtctcaaaccactggaagaaccgggagagcaaacatgatttttcttatttcctctaagtaatctttctttagtaaaacaacaagtgatctttggcatagattcatactttaaaggcattaatattgcatttatatcaggcaagcaactatacaaatatgctgagggccttgaaaataatcatcctcattwtaaaggaaatagtgaaagcctgagtgtaaaggaccaacttaagttgtacacattcgatgttgggaactaacacacagcgatgggtggga

SEQ ID NO: 576949 - DNA, 609 bp, Homo sapiens
tgtgtaaagaataaaggcaaataggtggtgggaataaagatctagggtcataaaaacattaaaaaaaagatctagggtcatattagaaacagtttagaactaagagctacctttcactgcagggttagcaataatattcctcttatctagaaaagctactgctcacttttcatcatttaggggaaaataggcaaaagttattcatagggcaagactgctgtagcatccatatttttaccaaccacattaatatttacaccttcagatttgctgagtaagagacagcctggagctgtcttgagttgacaggtgaaatgattctgagaaaggacaaaagcacatggcttctaagataccaatctacttgcttctgtggaaaaaaaaaraaaatgcaaacatttcatctagctttagcacagcccacacaattcatatttggagctctgatcattagcaatgtagcatctaaaaacatttgcagttccaagaaagataagcaatttctaaaagaccccaaatgctaaggtcaaggcacctggcactctaatggacaaaggacaggaatcctcttctcaaatcacaggcaccctgactctggcttttgcaagc

SEQ ID NO: 576950 - DNA, 544 bp, Homo sapiens
gacagggcgagactctgtctcaaaaaaaagaaaaaaaaattagcctgatgaggtggtgtgtgcctgcagtcccagctgctcaggaagctgaggcaggtagatctcttgggcctaggagatcaaggctgcagtgaaccatgatcattccactgagctctggactggacarcagagtgagaccttgcctttaaaaaaataaaaaaagaataccaataagagagtacaatgatagttctaattatcttgatattaatgaatattaagtatgttttcattaaaacatttttagttcctgaaattttgtgattcagatttcatatacacttagtcactgatgcttcacgagtatacttgtttctctgtctgaggaagattggcatgggaaaacagggaaatattggtcagcagtgacacttgtttttctaagcaaagtggtttttctcaacttcctgtttttcattattctacatactgaagaccttgggggatgattttaagtagagaaagctgagcaattcaagttgtgatgtgatttatctaaaac

SEQ ID NO: 576951 - DNA, 541 bp, Homo sapiens
ggttgagaatcatttgtagattatgtataagcctgaaatgatctcaatcaactctagttttggatccttacggaagtaacctgaccacctgaccatatcagtaaaagaaaaaaaaaaaracaaacaaaaaaaagcagcaaagaaatctaacacagatttagtacttactcctggagatgcagccttataagcacaaacggtaactcttattacaatgaactatttaaaccttagtttaaaaagcaatacagtgaaaaggttaccttacaagtattatgactacatacaaaaataaactttaaaaaaaacttttcttggccaggcatggtggctcacacctgtaatcccagccctttgggaggccaaggcagacatatcacttgagcccaggagctcaagaccagcctggacaacatggcaagaccccatctcaacaaaaaatacaaaaattagccaggtgtggtggtgcacagtggtagtcccagatactcaggaggctgatgggaggattgcttaagcccacaaggtcaaggctgcagtg

SEQ ID NO: 576952 - DNA, 566 bp, Homo sapiens
atttgtagattatgtataagcctgaaatgatctcaatcaactctagttttggatccttacggaagtaacctgaccacctgaccatatcagtaaaagaaaaaaaaaaagacaaacaaaaaaaagcagcaaagaaatctaacacagatttagtacttactcctggagatgcagccttataagcacaaackgtaactcttattacaatgaactatttaaaccttagtttaaaaagcaatacagtgaaaaggttaccttacaagtattatgactacatacaaaaataaactttaaaaaaaacttttcttggccaggcatggtggctcacacctgtaatcccagccctttgggaggccaaggcagacatatcacttgagcccaggagctcaagaccagcctggacaacatggcaagaccccatctcaacaaaaaatacaaaaattagccaggtgtggtggtgcacagtggtagtcccagatactcaggaggctgatgggaggattgcttaagcccacaaggtcaaggctgcagtgagtcatgatcacgccactgcactccaacctgggcaa

SEQ ID NO: 576953 - DNA, 541 bp, Homo sapiens
ggttgagaatcatttgtagattatgtataagcctgaaatgatctcaatcaactctagttttggatccttacggaagtaacctgaccacctgaccatatcagtaaaagaaaaaaaaaaagacaaacaaaaaaaagcagcaaagaaatctaacacagatttagtacttactcctggagatgcagccttataagcacaaacggtaactcttattacaatgaactatttaaaccttagttwaaaaagcaatacagtgaaaaggttaccttacaagtattatgactacatacaaaaataaactttaaaaaaaacttttcttggccaggcatggtggctcacacctgtaatcccagccctttgggaggccaaggcagacatatcacttgagcccaggagctcaagaccagcctggacaacatggcaagaccccatctcaacaaaaaatacaaaaattagccaggtgtggtggtgcacagtggtagtcccagatactcaggaggctgatgggaggattgcttaagcccacaaggtcaaggctgcagtg

SEQ ID NO: 576954 - DNA, 549 bp, Homo sapiens
tttatttttaacctaattttgcttttgttttacatttatgtggttcaaatatcaaagtgctgcaaaaagatatacctgataagtcttcctcctaacctggttcccatccactctaccgctcctcaccctctaagagtaatcatttctattggttaycaaaatagaaaaaaattttaccctgaaaatagaaattggtagctaggattttggctctttttcagttttgtagcattacgcatctttcattgctccactgtaagcagtgaattaatcagaccttttgtctgactgtgactgctgggttcccattctgtttaatgcatacagtgtctttcacctcttctcgcccctaccaataaataattaactttgtcttaccatacttgtttcatgcctccccattggtgcagtattcttctggaaagtgatgattcctctagaaaagtgggggaagaaagtaagtggaaaaaattcttggtaaaagtgcgtcttgccgaataagttaagattttaaagaggcaatgcaataactgattattttacctttta

SEQ ID NO: 576955 - DNA, 630 bp, Homo sapiens
tgactagacctggtctttttatacttcactctttcaacacccacaaaccccctgaaaaacaaaccaaaaacagataagaaattggtagagacttttctttttcccaaagttgagcttttacagagaagaatactcaaatgaaggtgcagtttttctctcttctatttcatatctgaattatactgacctgaaatatacagacctacatgacaaggtttagcaaaatggtttgtggtacaaagcatggctgaccacaagggttacgattattttcaccctttataaatatatccccaaattgacttctgtcctagttgtccagtgaatttgtttatgtcatattcattgtttgtatacttacatgcttatgacagaattctgtcaattctataataaatattgcctttcaaaagaartatatatgaaagtcttaggagaaaaaaattcccttagacatgtttgtttttactagatatgactaacataaaatggttacttataacctactgttttccagaaagaatttaagatggctctttcagttattgttttaaatctctgaaattgtctaaaattaatgctgttaaaaattttggtaacttattgaaagtcgcagttattaaatgcagc

SEQ ID NO: 576956 - DNA, 651 bp, Homo sapiens
taaagataagacccaaataggttattgaactaggctttattgattttctaatctaatatttattctgttttagattaatatttgaatgaatgtgaaaaacctaaagtaggttggaggtgctaaatactattaaattgttagagtctgttttcatcatccatattcttaccacaagctacttagtatctccaaatagatacagttccaagtatctttttttgcgtgtctgttgttgaaacctcaccctatggtttaagggcactgcttggctgttagctatcagatatgttgccttctattcactcgtcttgtttaaaatcatccattccttggtgaatgaaatgacttgtaaagtatcctctctaaataatgaatgtgtcaacaatgtagwtattgaatatctctttattttaggggatgctggtgagcaggccatcagacagatcttagatgaagctggaaaagttggtgaactctgtgcaggcaaagaacgcagggagattctgggaacttgcaaaatgctagggcagatgactgatcaagtggctgacctccgtgccaggtaaaagttcctctgtccttacagagcagtagtgggtaactcactcctaacagggtgattcagaaaacaagcctctgccagttttgagt

SEQ ID NO: 576957 - DNA, 442 bp, Homo sapiens
ttctaacggtaaaaatagcaagtggaaagttgtagggctagaacaatgagyggcgtgttgaaagaacagaatcgtaactgtgccataggctatggaatgggaaaattatgagaatggaagatggttttagcaaaattatgaaagactgtggatgtgaagataaaagatacagattttatttgaggaggttttgcaggttttttaaaaaggtgattatataatcttaattgaattgtaagaagtttgcattactgcttgcaatgatgataccctgaagacaaggtgagagaagtcaagaaactaaactggaaaactgatgtggaatagaacataatttttctttggaaagtaggtcaaaaagtgaactgtatagtcgaatatgtaataaaagacttttggttccactttattgtttttcttttcaactttattttaggttcag

SEQ ID NO: 576958 - DNA, 442 bp, Homo sapiens
ttctaacggtaaaaatagcaagtggaaagttgtagggctagaacaatgagtggcgtgttgaaagaacagaatcgtaactgtgccayaggctatggaatgggaaaattatgagaatggaagatggttttagcaaaattatgaaagactgtggatgtgaagataaaagatacagattttatttgaggaggttttgcaggttttttaaaaaggtgattatataatcttaattgaattgtaagaagtttgcattactgcttgcaatgatgataccctgaagacaaggtgagagaagtcaagaaactaaactggaaaactgatgtggaatagaacataatttttctttggaaagtaggtcaaaaagtgaactgtatagtcgaatatgtaataaaagacttttggttccactttattgtttttcttttcaactttattttaggttcag

SEQ ID NO: 576959 - DNA, 442 bp, Homo sapiens
ttctaacggtaaaaatagcaagtggaaagttgtagggctagaacaatgagtggcgtgttgaaagaacagaatcgtaactgtgccataggctatggaatgggaaaattatgagaatggaagatggttttagcaaaattatgaaagactgtggatgtgaagataaaagatacagattttatttgaggaggttttgcaggttttttaaaaaggtgattatataatcttaattgaattgtaagaagtttgcattactgcttgcaatgatgataccctgaagacaaggtgagagaagtcaagaaactaaactggaaaactgatgtggaatagaacataatttttctttggaaagtaggtcaaaaagtgaactgtatagtcgaatatgtaataaaagacttttggttccactttattgkttttcttttcaactttattttaggttcag

SEQ ID NO: 576960 - DNA, 554 bp, Homo sapiens
tggtgggaggtaattgaatcatgggggcaggtcttttccatgctgttctcgtgatagtgaataactttcatgagacctggtaaccacttataagaaggagtttccctatagaagctttctttctgcctactgctatccatttaaaatgtgaattactcctccttgccttcttccatgattttgaggcctcccaagccatgtgaaattgtgagtccattaaatctctttttcttcccagtctcaggtatgtctttatcagcagcatgaaaacagactaatacagctagctttggggttagtttgttcttgcttttttctaattactctaggtgcaatattatattgttaaattaaggtctttataatgtcttaatttagatatttagcattataamcttttaacactgatttagctgtatcccagatattttattatgctgtgtctctattttcatttatttcaaagattatttaaaatttctgccttaattttattgtttaccccaaaatcattacagagcaagtttgttaatttccatgtaattgtgtggttt

SEQ ID NO: 576961 - DNA, 539 bp, Homo sapiens
tagctttggggttagtttgttcttgcttttttctaattactctaggtgcaatattatattgttaaattaaggtctttataatgtcttaatttagatatttagcattataaacttttaacactgatttagctktatcccagatattttattatgctgtgtctctattttcatttatttcaaagattatttaaaatttctgccttaattttattgtttaccccaaaatcattacagagcaagtttgttaatttccatgtaattgtgtggttttcagggagttccttggtattgatttctatttttcttccactctgtgctgagactatggttagtatgattttgattgttttcaatttatttggacttgctttatggccaaacatgtggttgaacttacatacgttccatttgcagatgagaaaaacatgtattctgtggtcgatggatggagagtcctgtaagaatctattaggtccaattggtcaagtgccaaatttaagtttaggatttcttagttttctgcctcaataatgtggctg

SEQ ID NO: 576962 - DNA, 539 bp, Homo sapiens
tagctttggggttagtttgttcttgcttttttctaattactctaggtgcaatattatattgttaaattaaggtctttataatgtcttaatttagatatttagcattataaacttttaacactgatttagctgtatcccagatattttattatgctgtgtctctattttcatttatttcaaagattatttaaaatttctgccttaattttattgtttaccccaaaatcattacagagcaagtttgttaatwtccatgtaattgtgtggttttcagggagttccttggtattgatttctatttttcttccactctgtgctgagactatggttagtatgattttgattgttttcaatttatttggacttgctttatggccaaacatgtggttgaacttacatacgttccatttgcagatgagaaaaacatgtattctgtggtcgatggatggagagtcctgtaagaatctattaggtccaattggtcaagtgccaaatttaagtttaggatttcttagttttctgcctcaataatgtggctg

SEQ ID NO: 576963 - DNA, 539 bp, Homo sapiens
tagctttggggttagtttgttcttgcttttttctaattactctaggtgcaatattatattgttaaattaaggtctttataatgtcttaatttagatatttagcattataaacttttaacactgatttagctgtatcccagatattttattatgctgtgtctctattttcatttatttcaaagattatttaaaatttctgccttaattttattgtttaccccaaaatcattacagagcaagtttgttaatttccatgtaattgtgtggttttcagggagttccttggtattgatttctatttttcttccactctgtgctgagactatggttagtatgattttgattgttttmaatttatttggacttgctttatggccaaacatgtggttgaacttacatacgttccatttgcagatgagaaaaacatgtattctgtggtcgatggatggagagtcctgtaagaatctattaggtccaattggtcaagtgccaaatttaagtttaggatttcttagttttctgcctcaataatgtggctg

SEQ ID NO: 576964 - DNA, 581 bp, Homo sapiens
gtaaagttaatgctaccaggactgatgttggagcttgaagttagtaagacagaccagtaaggaagagaagataaattggaagagaaaactacagaatggaatccgtaaactcaagctgragctcacatggatgggctgaaacatgcttcagttctattcacatccttagacttgctggtgccctgcagacgctggcacctaataaattaggctaagtgcactctcacttctccaagaggcagaaaagctgaagaaggatcaaggagaaggtagaatatttgtagatatggacattgcctcaccctaataggtgaatccgttgataaacaacaaaatgtggataaacaacaatacaatatggctgagtctttacttccaccctccaaatctcccactaaaatttcatctgaggctcatgctaaccagaagcatgtaggagagacaattctgagaaattcatcgcagactgagttgacacattacaaaactacaacttaatacaggtaacttcgacagtatacttccactcccctgaatttgtctctctgttattaccataaattttactgctagatatgcta

SEQ ID NO: 576965 - DNA, 594 bp, Homo sapiens
tagactaataaacgtgtgtaaacgtaagaatgaataaaatctcctttttatccatgatatttcttgagagcagagtgccaggcattgtaagtttatgtcatagggcctgcttgttacttaataaatgacagtagaaaacaataagttcatacacagcttttgaatttcaaaattattttttaaacaaaagacaaagccaacaactatagtagctttcargaataatttgtgggtgttcttgatcatcacccatttctatatactatgttctaccatatagaaacaagtacttcacatgaaaacaatgtgcttgctaggaaaaagcaatagttctaacacagaaactaccataaataaaagtatcctagctgttttccacccagctagtcactccatgccctcctgcataaaaactgcgtgtcactgaaaataccctggaaagaaaaactaaaaggttttatgaattataagaacttggcttttggtatataaaagcaaaaactgaagagaattaagacataaactttatactgccaacaactggcatgttctatccatgtgaccaagctaggtaaagaaaggtaatagagaaat

SEQ ID NO: 576966 - DNA, 586 bp, Homo sapiens
cctctagaaggacagaacttataggctagatgtatatataaaggggagtttattaaggagtactgactcacatgctcacaaagtaaagtcccacaataggccatctgcaagctgaggagcaatgaagccagtctgagtcccaaagctgaagaacttggagtttaatattcaaggacaaaaagcatccagcaagggagaaagatgtagsctgggaagataagccagtctagtcttttacgttcttctgcctgcttttattctggccagtctggcagctgattagattgtgctcctctagattgagggtgggtctgcctttctcagtccactgactcaaatgttaatctcctttggcaacacccttacagacacacccaggaacaatactttgtatttttcaatccaatcaatttgacactcagtattaaccatcatacatactaaaatgttgattgacagtttcttttgaaatattagaagaaccgaagtcactaggattgaattcccaaatatcagggctttctagtttgctacagtcccaattattctcaactgtatcagaagctatttaccattgaaactgtgc

SEQ ID NO: 576967 - DNA, 586 bp, Homo sapiens
cctctagaaggacagaacttataggctagatgtatatataaaggggagtttattaaggagtactgactcacatgctcacaaagtaaagtcccacaataggccatctgcaagctgaggagcaatgaagccagtctgagtcccaaagctgaagaacttggagtttaatattcaaggacaaaaagcatccagcaagggagaaagatgtaggctgggaagataagccagtctagtcttttacgttcttctgcctgcttttattctggccagtctggcagctgattagattgtgctcctctagattgagggtgggtctgcctttctcagtccactgactcaaatgttaatctcctttggcaacacccttacagacacacccaggaacaatactttgtatttttcaatccaatcaatttgacactcagtattaaccatcatacatactaaaatgttgattgacagtttcttttgaaatattagaagaacygaagtcactaggattgaattcccaaatatcagggctttctagtttgctacagtcccaattattctcaactgtatcagaagctatttaccattgaaactgtgc

SEQ ID NO: 576968 - DNA, 409 bp, Homo sapiens
gtttacacttaatacatgattgctttaagtaaatttatattgacaaatggttttaccttgttcatatacgtgtgtatgcatgyatgcgtgtatatatgttcatacatatacacatagtaaaacaataacataagtatttgaggattgtaaattttatcctatttaatgtagggattaaaggaaatattatgtgtcagttgtaactgctttataataataaatattgtaattttcatttctcttattattgccacttctcaatttccatttagctatgaacaattttggtttagatgaaattttaggtagatgaagttctgtttagtaatagaatataatatagccttctaacttctaatatccatttatgagccacctctcattctttggtaatacaatccgtagcctt

SEQ ID NO: 576969 - DNA, 365 bp, Homo sapiens
gtaatagaatataatatagccttctaacttctaatatccatttatgagccacctctcattctttggtaatacaatccgtagccttccttatcaacatctcgccctattgtgatgcttttgagtagaaagtgaatcaaggccaggtaaaatgcggtgaagtatatttttattttggaagttttttagcaaatgtkagtgtgctccaggctcccataagtgtgttgaggtgaagaaacttcttcaatttagtatgactcaacattttccaatgtatttgactacagaggattctttttcatacctattggaaatgaagtctggttccatgtggagtatgtgtgtgcttgtgtgtgtgtgtgtgtgtg

SEQ ID NO: 576970 - DNA, 436 bp, Homo sapiens
gtttaaattgccattctgtctctagctgttggtgtaagatccatattttacccattttctaagctaagcaaatactactctcagtgagggaacaatccctatgtccaaaaatacatggaagtacacttgtgtctttctcaagaaaaaagaaaataacttgtatttcttttcrctaatacacacacacacatacacacatacacagacacacacatatatactagtttattctgaagagaacctttatgctagaattaaaatttttagtttttggatactaacatttgacatgcacctgcattgttttattttaatgaagcagacatttcttggggttgtcaacctagaaaatttaatgattcagaaaatcaggtacaacctggttgtcaaaaaatcataaacatcgtatcactattttcaaattgtatgtttcttg

SEQ ID NO: 576971 - DNA, 455 bp, Homo sapiens
tgtacttatatttttctgataaggagtgcactgttyactggttatatctatataccagttaatgatgatggaatagatgaacactgagtaaataagagtattcctttcaaatgtttatttttagaaaactagtcacattttgttaattaagacattaattccactaatattcattgtgaccctattacatgcctggtgctatagagagttcctggggtatgataatacataatcctttaatccaagaggtatattatcttagagggaaaaatgcataaaccaatgtaaggcataatataagataagcagcccttgacattcagaacctgctctgacactatcgcccaggctttggtgtcactgtgagccagaatgatattcacagccaggacttggcgttcttctgttgaacataaataatgtcacagaacataaatatcagacaaagtcattct

SEQ ID NO: 576972 - DNA, 455 bp, Homo sapiens
tgtacttatatttttctgataaggagtgcactgtttactggttatatctatataccagttaatgatgatggaatagatgaacactgagtaaataagagtattcctttcaaatgtttatttttagaaaactagtcacattttgttaattaagacattaattccactaatattcattgtgaccctattacatgcctggtgctatagagagttcctggggtatgataatacataatcctttaatccaagaggtatattatcttagagggaaaaatgcataaaccaatgtaaggcatmatataagataagcagcccttgacattcagaacctgctctgacactatcgcccaggctttggtgtcactgtgagccagaatgatattcacagccaggacttggcgttcttctgttgaacataaataatgtcacagaacataaatatcagacaaagtcattct

SEQ ID NO: 576973 - DNA, 455 bp, Homo sapiens
tgtacttatatttttctgataaggagtgcactgtttactggttatatctatataccagttaatgatgatggaatagatgaacactgagtaaataagagtattcctttcaaatgtttatttttagaaaactagtcacattttgttaattaagacattaattccactaatattcattgtgaccctattacatgcctggtgctatagagagttcctggggtatgataatacataatcctttaatccaagaggtatattatcttagagggaaaaatgcataaaccaatgtaaggcataatataagataagcagcccttgacattcagaacctgctctgacactatcrcccaggctttggtgtcactgtgagccagaatgatattcacagccaggacttggcgttcttctgttgaacataaataatgtcacagaacataaatatcagacaaagtcattct

SEQ ID NO: 576974 - DNA, 548 bp, Homo sapiens
ggctattttcttttcccttttaattttactttttcatttataatgtttccaatttgataacttatggagtctgtaaaatggacctgtgtgtaagtcttggtatttcctatttgccacaagctttcttcttgaatgtagtgtttgtccctgtttaatagcattttaaatcattttttctggcaaaataaacctgtacatgtagggaaacagatataattttcrtattaccagttggtgaactggggaaatcggtccagctcaaggtcatagtaattacagtcaaagcacacacataaaagaagaatctcctacaagttgattttgagaggctaataaagcatatctacagtattttgtaaactgcaagacatgatactttaaatattcttattataatactcatattaagaaacattctcaaatataaatcatagatgaattgtttcaaataaagtgtgagtttatgcctccattttatttgtgttattttatttgtgcaaataaagaactatgtttactttccttttgcttatgtgcttaaacaatta

SEQ ID NO: 576975 - DNA, 548 bp, Homo sapiens
ggctattttcttttcccttttaattttactttttcatttataatgtttccaatttgataacttatggagtctgtaaaatggacctgtgtgtaagtcttggtatttcctatttgccacaagctttcttcttgaatgtagtgtttgtccctgtttaatagcattttaaatcattttttctggcaaaataaacctgtacatgtagggaaacagatataattttcgtattaccagttggtgaactggggaaatcggtccagctcaaggtcatagtaattacagtcaaagcacacacataaaagaagaatctcctacaagttgattttgagaggctaataaagcrtatctacagtattttgtaaactgcaagacatgatactttaaatattcttattataatactcatattaagaaacattctcaaatataaatcatagatgaattgtttcaaataaagtgtgagtttatgcctccattttatttgtgttattttatttgtgcaaataaagaactatgtttactttccttttgcttatgtgcttaaacaatta

SEQ ID NO: 576976 - DNA, 454 bp, Homo sapiens
aataaatcaccgattttgtttttaaattagaaatataatgtgccagrttttgttctataattaatgttttttcctcttttacttcaatactacttatgtagagttcactgatttacaatctatgttatacaatatgtacctgaaaatattaagactttgttttcctattataatcagacctcatatttatctaacactcaactaatgaacatttgtcactttaaaggtgtgtcatttattataatgccatcttactctcttaaatataagattaaccctgcagtttaatgaattctgaattgaataaacatgtagtccaataattgttagaacagaaaaaatactcctggcatatttattaaaacttctggagagaatatttcaggaaataatgtgcaaataggtgattcaaatatatggagatatctgttgaaaatgggctataatactatct

SEQ ID NO: 576977 - DNA, 454 bp, Homo sapiens
aataaatcaccgattttgtttttaaattagaaatataatgtgccagattttgttctataattaatgttttttcctcttttacttcaatactacttatgtagagttcactgatttacaatctatgttatacaatatgtacctgaaaatattaagactttgttttcctattataatcagacctcatatttatctaacactcaactaatgaacatttgtcactttaaagrtgtgtcatttattataatgccatcttactctcttaaatataagattaaccctgcagtttaatgaattctgaattgaataaacatgtagtccaataattgttagaacagaaaaaatactcctggcatatttattaaaacttctggagagaatatttcaggaaataatgtgcaaataggtgattcaaatatatggagatatctgttgaaaatgggctataatactatct

SEQ ID NO: 576978 - DNA, 454 bp, Homo sapiens
aataaatcaccgattttgtttttaaattagaaatataatgtgccagattttgttctataattaatgttttttcctcttttacttcaatactacttatgtagagttcactgatttacaatctatgttatacaatatgtacctgaaaatattaagactttgttttcctattataatcagacctcatatttatctaacactcaactaatgaacatttgtcactttaaaggtgtgtcatttattataaygccatcttactctcttaaatataagattaaccctgcagtttaatgaattctgaattgaataaacatgtagtccaataattgttagaacagaaaaaatactcctggcatatttattaaaacttctggagagaatatttcaggaaataatgtgcaaataggtgattcaaatatatggagatatctgttgaaaatgggctataatactatct

SEQ ID NO: 576979 - DNA, 541 bp, Homo sapiens
tttcacatatttgttaatttttcaagactccagctgttgttaatttctagttttatagcattgtatctgaaatgatactagatataattgtaatcttaaatttgttaatacttcttctgttacctaacatggtccaaactgaaggatgttatatttacactggaaaaaaaatgtatattctgctactgttagatggaaagttctgtatatatttattaggttcatttgattaaaaatgcaattgaagttcaatatttccttattacttttctgtctrttgatgtattccttgttgaaagtggggtccttaagtcttctcatattattgtcttgctatctctttctttgtttatgtccattaatatttgcattatgtatttaggtgcttcaatttgagggacacaattggttatgtcctctttatcaattcacccctatataattaaacaatgaccttctttgtcttttgcaaccgtttttgaattgaagtctatttaatcacttgtaagtatagccacctctgctctcttttggttagcat

SEQ ID NO: 576980 - DNA, 541 bp, Homo sapiens
tttcacatatttgttaatttttcaagactccagctgttgttaatttctagttttatagcattgtatctgaaatgatactagatataattgtaatcttaaatttgttaatacttcttctgttacctaacatggtccaaactgaaggatgttatatttacactggaaaaaaaatgtatattctgctactgttagatggaaagttctgtatatatttattaggttcatttgattaaaaatgcaattgaagttcaatatttccttattacttttctgtctgttgatgtattccttgttgaaagtggggtccttaagtcttctcatattattgtcttgctatctctttctttgtttatgtccattaatatttgcattatgtatttaggtgcttcaatttgagggacacaattggttatgtcctctttatcaattcacccctatataattaaacaatgaccttctttgtcttttgcaaccrtttttgaattgaagtctatttaatcacttgtaagtatagccacctctgctctcttttggttagcat

SEQ ID NO: 576981 - DNA, 586 bp, Homo sapiens
aacattacttcctactaggaaatgactgatgaaaaatattgtcttgggttccataaaatgaagagaattataatacaaattattaaaagggcttattttttttgcctagaaatagcaaaaagtaccaaagtaattttaataatactttgcatttaatagtatttatgatttaaccaaacaagattaaatgcataaaacaatctatcctatgctgtaacagcagcctcagatggttgctaaatctaaaggcaaargcattttgtatattttatttcacagagagataaaaagtatttacataaatttatattttgtatactgcagacaatatgatctcaccataaaaaaatacacaaatcagaacagaaatcatgttatgaatacaacggcacttttttctgcattcaagaattcatacagtgcagaactgtctgtaagattttgtcttcttttcaacatgcacaaagtctttattattctaactagtaaactttaaaaatttattttctggttataaacatgtcattgaatatagtcagatgatcccattgtttaagtagctaatgagtcccccactacaaggaac

SEQ ID NO: 576982 - DNA, 586 bp, Homo sapiens
aacattacttcctactaggaaatgactgatgaaaaatattgtcttgggttccataaaatgaagagaattataatacaaattattaaaagggcttattttttttgcctagaaatagcaaaaagtaccaaagtaattttaataatactttgcatttaatagtatttatgatttaaccaaacaagattaaatgcataaaacaatctatcctatgctgtaacagcagcctcagatggttgctaaatctaaaggcaaaagcattttgtatattttatttcacagagagataaaaagtatttacataaatttatattttgtatactgcagacaatatgatctcaccataaaaaaatacacaaatyagaacagaaatcatgttatgaatacaacggcacttttttctgcattcaagaattcatacagtgcagaactgtctgtaagattttgtcttcttttcaacatgcacaaagtctttattattctaactagtaaactttaaaaatttattttctggttataaacatgtcattgaatatagtcagatgatcccattgtttaagtagctaatgagtcccccactacaaggaac

SEQ ID NO: 576983 - DNA, 586 bp, Homo sapiens
aacattacttcctactaggaaatgactgatgaaaaatattgtcttgggttccataaaatgaagagaattataatacaaattattaaaagggcttattttttttgcctagaaatagcaaaaagtaccaaagtaattttaataatactttgcatttaatagtatttatgatttaaccaaacaagattaaatgcataaaacaatctatcctatgctgtaacagcagcctcagatggttgctaaatctaaaggcaaaagcattttgtatattttatttcacagagagataaaaagtatttacataaatttatattttgtatactgcagacaatatgatctcaccataaaaaaatacacaaatcagaacagaaatcatgtyatgaatacaacggcacttttttctgcattcaagaattcatacagtgcagaactgtctgtaagattttgtcttcttttcaacatgcacaaagtctttattattctaactagtaaactttaaaaatttattttctggttataaacatgtcattgaatatagtcagatgatcccattgtttaagtagctaatgagtcccccactacaaggaac

SEQ ID NO: 576984 - DNA, 490 bp, Homo sapiens
gatcacagcagtggaaatattcatggaacactgccaagcacctgctaggtggtacagtattccagtcactgggaatatagagataaataattcacttcccttgaacatccttcagagttatttaaagtcaagcttaatctgtatgtgtacaatcatatccagccaaatatgggtaatctcataaatcatatttttaaaaaattgatataaaagtaaaacgagagagagagagagacaaaggaaattttatgttktttttattgtgctctccaggaagttaaaatacatgaaatttataatttgatacaatcttgttgatggcaacccaagaatattcagtttgactagatcacagacaatatgatttttaaacatttgcatggaatctagacaatttagattataaaatataaagtgtgatttttaatatgtcgtcttagtcatttctggcttctgtaacaaataccataggcttaaacaaatctattga

SEQ ID NO: 576985 - DNA, 490 bp, Homo sapiens
gatcacagcagtggaaatattcatggaacactgccaagcacctgctaggtggtacagtattccagtcactgggaatatagagataaataattcacttcccttgaacatccttcagagttatttaaagtcaagcttaatctgtatgtgtacaatcatatccagccaaatatgggtaatctcataaatcatatttttaaaaaattgatataaaagtaaaacgagagagagagagagacaaaggaaattttatgttgtttttattgtgctctccaggaagttaaaatacatgaaatttataatttgatacaatcttgttgatggcaacccaagaatattcagtttgactagatcacagacaatatgatttttaaacatttgcatggaatctagayaatttagattataaaatataaagtgtgatttttaatatgtcgtcttagtcatttctggcttctgtaacaaataccataggcttaaacaaatctattga

SEQ ID NO: 576986 - DNA, 490 bp, Homo sapiens
gatcacagcagtggaaatattcatggaacactgccaagcacctgctaggtggtacagtattccagtcactgggaatatagagataaataattcacttcccttgaacatccttcagagttatttaaagtcaagcttaatctgtatgtgtacaatcatatccagccaaatatgggtaatctcataaatcatatttttaaaaaattgatataaaagtaaaacgagagagagagagagacaaaggaaattttatgttgtttttattgtgctctccaggaagttaaaatacatgaaatttataatttgatacaatcttgttgatggcaacccaagaatattcagtttgactagatcacagacaatatgatttttaaacatttgcatggaatctagacaatttagatkataaaatataaagtgtgatttttaatatgtcgtcttagtcatttctggcttctgtaacaaataccataggcttaaacaaatctattga

SEQ ID NO: 576987 - DNA, 490 bp, Homo sapiens
gatcacagcagtggaaatattcatggaacactgccaagcacctgctaggtggtacagtattccagtcactgggaatatagagataaataattcacttcccttgaacatccttcagagttatttaaagtcaagcttaatctgtatgtgtacaatcatatccagccaaatatgggtaatctcataaatcatatttttaaaaaattgatataaaagtaaaacgagagagagagagagacaaaggaaattttatgttgtttttattgtgctctccaggaagttaaaatacatgaaatttataatttgatacaatcttgttgatggcaacccaagaatattcagtttgactagatcacagacaatatgatttttaaacatttgcatggaatctagacaatttagattataaaatataaagtgtratttttaatatgtcgtcttagtcatttctggcttctgtaacaaataccataggcttaaacaaatctattga

SEQ ID NO: 576988 - DNA, 463 bp, Homo sapiens
aaccacacaactacatggaaattgaacaacatactcctgaatgactcttgggtaaataatgaaattaaggcaaaaatcaataagttctttgaaattattaagaacaatgtatcagaatctcggggacacagctaaggaagtgttaagagggaaattgatagcgctaaatgctcacatggacaagttagaaagctctctagttaacaatccaacaccaaaaagaagtagagaaccaagagcaaacaaacctcaaagctagcaaatctcaaagcaagatcagagctgaactgaaagagagacatgaaaaacccttcaaaaaaataaatgaatccaggagctggttttttgaaagaattaataacatagrtagactgctaggcagacaaagaagaaaagagaagattcaaataaacacaatcagaaacgacaagggagatgttaccactgaccccaaagaaataca

SEQ ID NO: 576989 - DNA, 415 bp, Homo sapiens
agacataatataaaaatgtaatgtatgtcagtttttaaacaactgattacatattgaaagattctattagttacattaggtaaaatattactgaaagccagtttcacctgttcctttgggtatgggttcattaggtaaatattcctgtagtacctctccccccagcatctgcatcaatcaataactaaaagggtaatattacattcaccatgattcagcccaacattcagtagtagcattatcctgctttttttcctattatgtatacagttacatgtaacagtcactttgtatgacttatgtttttggatccccaagtaacttcgagttatttttgcttgtacatatgtccactatgctttgtaaaggaatatatatatatatatatakagagagagagagagagagagagaga

SEQ ID NO: 576990 - DNA, 555 bp, Homo sapiens
ggaatgtcagagccaaaagcacctatggccacctcaccatttcctggattgtgttccagggagcaccagtcctacaaatgctctgagatcacatacactgagggaataggacatccaggagcctccttttggtgagtcacaaggcactgaaacaatcaatactctgagaagttctgcagtaaaggaacctgctacttgtcttgagctctgttttctcacacttgttggaccacaaatgcttttgaccacatatcatttattaccatacagtggaacagaatttttttttagcatttctttttttatattcatgttatcactttttatagcacttttttttattatactttaagttttagggtacatgtgcacaatgtgcaggttagttacatatgtatacatgtgccatgctggtgtgctgcacccattaactcgtcatttagcattaggtatatctcctaaagctatcccttccacctccccccacccaacaacagtccccagagtgtgatgttccccttcctgtgyccgtgtgttctcattgttcaattccca

SEQ ID NO: 576991 - DNA, 374 bp, Homo sapiens
aatttatagatgagaaaaacagasgcccagagaggctaaccagcctgtctaaggttatgagatgagatttgcacccagacatggtttgactccagggcttgtgcgcttaaccactaagggatgccgtttctcaaaaaggctgactacagcacattttgggaaaacttttgcagagaaaatagcatcatgaagtcaagtccatggtcacctaaatgcagttgagtgccaggatggcaaagtggcaccctatgcaccctatgtagggtgaaaggtagaaatgctggaagagcatgacaagagtgtatttacagtcaggcagtgggggttgcaatttgggaggatagggtgaaaagatcacttgaggtcaggaattc

SEQ ID NO: 576992 - DNA, 374 bp, Homo sapiens
aatttatagatgagaaaaacagacgcccagagaggctaaccagcctgtctaaggttatgagatgagatttgcacccagacatggtttgactccagggcttgtgcgcttaaccactaagggatgccgtttctcaaaaaggctgactacagcacattttgggaaaacttttgcagagaaaatagcatcatgaagtcaagtccatggtcacctaaatgcagttgagtgccaggatggcaaagtggcaccctatgcaccctatgtagggtgaaaggtagaaatgctggaagagcatgacaagagtgtatttacagtcaggcagtgggggttgcaatttgggaggatagggtgaraagatcacttgaggtcaggaattc

SEQ ID NO: 576993 - DNA, 518 bp, Homo sapiens
ttttctagatcctcttagaactgactcctccttcactattgacttttctcaactcagaaaccacctccccagaatgccccactgaccatgctacctaaagcagtccttctactgccaagattggtcatattgtatcacattgcttacgtttattttttgcagcatttttcactacctgcatttttttgtttgttttgttggttggtttcatgtttactggctatctccctcacctaaaatataarctctttcaaagcagggaatctatctgtcttgctcattgctgtacccttagaacctacagcagtgcttagcaaataagtagatcttaatagatacttgttgagtgacctaacatggctaaaagtccctgaataatttggaatctgtttatctgtagtgcacagtgaatagctattattctttacttcctaccatttatccaaccttcttctggtaacagcaccctcgattttctctaaaacatcatcctttatgctactgtccatccacatgga

SEQ ID NO: 576994 - DNA, 587 bp, Homo sapiens
gtgcaggtttattatataggcaaactgtgtgttttggaggtttagcacacaggtaatgttgtcacctgagtaataagcatagtacctgatgggtacttttctgaccctctccctcctcttaccctctaccctcaagtaggccccagggtctgttgttcctctcctagtggatccatgtgttctcattgtttaggccccatttataagtgagaacgtgaatattcatttttctgtttcctgcattagtttgcttaggataatggcctccagctccatccatgttgtcacaaaagatgtgatcttattcttttttgtgactgcatagtactccagggtgtataggcaccacattttctttatctagtctactgttgatgggcatttaggttaattctgtctttgctgttgtggatagtgctgcaatgaacataccatgcatgtgtctttatagtagaatgatttatattccttkgggtatatacccaataatggaattcctgggtcaaatagtatttctgtttaaagagctttgagaaatcaccacactgctttccacaatggctgaactaatttacattcccaccagc

SEQ ID NO: 576995 - DNA, 544 bp, Homo sapiens
gtaaatgacgagttaatgggtacagcacaccaacatggcacatgtatacatatgtaacaaacctgcacgttgtgcacatgtgccctagaacttaaagtataattaaaaaaaaagaaatcaacttcagttatactaatacaggcaataaaattaattttaatattaattaataatttaatatttaaaaggatcagcaacttagaacaaaaacgtttaggcacacaggaagatatttaagtctgaatagtttcatttgtgggtataggaagaaaactgcaaaatgtaacttgctatcattgagaagtcaagatacacaatctacattctatcaaagtgaaagcgcttttattttyaactcagcaaacactttgtagttcaatacacaactcacaggagtcaaacagggagacttcgtgttaaactggtatctgagagggatgtagtgctacagtatgaaagggggttggtgtcagcctctgccctccttagtccctgctgttaaaggcctgggactcgccatagtggatgcacatttagcatgtgt

SEQ ID NO: 576996 - DNA, 464 bp, Homo sapiens
acagcacagctactctatgaaagtgtggccggactacttctttaagcagatttccaatcctgtttcccctgactgggtgagacctcccaagcagggtctccagccatatcctacaggtgcattcyggctggcaacaaatccatacctccctgggacagagctctcagaggaaggagcaggccaccttctttgctgttttgcagccttcactggtgatatggtttggctctgtgtccccaccgaaatctcatcttgtagctcctataatttccacatgttgtgggaaagacttggtgggagatggttgaatcctgggggtgggtctttcccatgctgttcctgtgatagtgaatgggtctcacaaaatctgatcgtttttaaaaacagagtttccatgcaaaagctctttgcctgccatcattcacataagatgtgacttgcttctccttgtcttccaccatgat

SEQ ID NO: 576997 - DNA, 511 bp, Homo sapiens
tgagtgccctgcacctgcagcaaacttctgcctggacatccaggcatttccatacatcctcttaaatttagatggaggttcccaagcctcaattcttggcttttgtgcacctgcaggcttaatatcacatggaagctgccaaggcttgggacttggaccctctgaagttatgtcccaagctgyaccttggcccattttagtcacagctggagtgactgggacacagggcaccaaatctctagactgcacatagcacagaaaccctcggcccagccaaggaaaacagtttttcttcccctcaatgagaggggctgctgcaaaggtctctgacatgctgtgtagacattttccccattgtcttggtgattaacattcagctcctcattatttatacaaatttctgcagccagcttgaatttctcctcagaaaatgggatttttctagcattgccaagttgcaaatttttcaaacttttatgctctgtttccgttttaaaactgaatgccttta

SEQ ID NO: 576998 - DNA, 527 bp, Homo sapiens
ttaaaaatatgtagttgggcattgattttcttaaagtttaatttggtaatctatgcattttaattagagtttttaatttatatacaatagattcattgctctagttaggtttaatctataatatgctacttattttataattgtctcatttttttccttgtgtattgtttttcttattttatttttttcctttcctgcattctgttggcttgagtatttgcttagtttcccataattttcttcatcagctttagctatatcattgatatgatttggctatgtctccacccaaatctcatctttaattgtagctcccataattcccatgtgttgtgggagggactcagtgggaaattattgaatcatggggtcagtttcctccataccgttctcatggtagtgaataagtctcaggagatctggtggttttataaaaggaaaccccttttgcttggcyctcattctctcttgtccactgccatgtaaaacatgcttctttcatattagcctatatactacctatttgt

SEQ ID NO: 576999 - DNA, 527 bp, Homo sapiens
ttaaaaatatgtagttgggcattgattttcttaaagtttaatttggtaatctatgcattttaattagagtttttaatttatatacaatagattcattgctctagttaggtttaatctataatatgctacttattttataattgtctcatttttttccttgtgtattgtttttcttattttatttttttcctttcctgcattctgttggcttgagtatttgcttagtttcccataattttcttcatcagctttagctatatcattgatatgatttggctatgtctccacccaaatctcatctttaattgtagctcccataattcccatgtgttgtgggagggactcagtgggaaattattgaatcatggggtcagtttcctccataccgttctcatggtagtgaataagtctcaggagatctggtggttttataaaaggaaaccccttttgcttggctctcattctctcttgtccacygccatgtaaaacatgcttctttcatattagcctatatactacctatttgt

SEQ ID NO: 577000 - DNA, 583 bp, Homo sapiens
aatacaaaaattagctgggcgtggtggcacrtgcctgtagtcccagctactcaggaggctgaggcaggagaatcacttgaaccttggaggcagaggttgcagggagctgagatcgcaccattgcactccagcctggtgacaaagcaagattccgtctcaaaaataaataaataaataaaatagcaatttcaagttaataagaatttacatagtaaaatgcatgtatttcagtgatagcacatttttattgatattttaatgtcagatcattttcaagttggatgttttgtgaactgaaatgagtatcatgcattttttgtaaaatgaatgactttgccttttatctttttgtaaagtatctgcatcttcatttatccaaatgctgtatagacactctttttccaaaataccatatgggcagactatgttgttccaagctggataccaaagatgaatagcacaaatagcttttgatacaaacaacaaacaacaactaaacaattcctatagataggcacagaagtatttcacttgatgtgataattatagcccacacatatctaccagtgtttatgagctcagt

SEQ ID NO: 577001 - DNA, 505 bp, Homo sapiens
acttttgcaccaaccttatatattctattatatatgtattctattatacatgtatgtatataattgaacactattcaactataaagaagaaaaaattgctgcaacatggatgagactggatgccattatcgtaagggaaacaactcaaacggacacctcatgctctcacaagtgaaagctaaataatgcatgcacatggacaaaatgaggagtaataaatgctggagactaagaaggctgggagagtgcrgaggggaagagggataagaattacttaaaggtggcaggtcacggaggctcacgcctataatcccagcactttgggaggccgaggcgggtggatcacgaggtcaggagatggagaccatcctggctaacacgatgaaaccccgtctctactaaaaataaaaaataaaaataaaaataaaaaatagccaggcctgttggcacctgtagtcccagctactcgggaggctgaggcaggagaatggcatgaactcgggag

SEQ ID NO: 577002 - DNA, 593 bp, Homo sapiens
aacattttgttcagtaatgatgacttactataccatactaatatatgttattaatagaataaaattggggtagttatatggaacctctttgtattaattttgcaaattttctgtgaatttaaaagtattataaaattaaaggtttattttaaaataaacattaaagaacaacagattaaacagagaaattcaataatcaatgaacttgggatattatgtagccaattgttattttcattcttaaagcttttttgcaatactgatagtatttacatataacaccatataaaagatattaaataatgcatttcactataaccaatttggttttgtgtataggtataacatcatatcttcatatacattaatgctactgtcaaatgtgactgggaagtmagttttattattagtaggatgcaaagtttttaaactttgaatactccccctcaatgcaattgtattatttgtatgtgaaataaatccaaatttttatcataggaaatttggtcttaacttttagtttttggagcacagtaacttattttttaaaatattttcagttggatatctgcatttttttaattgacacaatt

SEQ ID NO: 577003 - DNA, 585 bp, Homo sapiens
tgtttgtctggttgctttactgatctgtgtacttcattgtgttttcgtagtgactggtaatggtcttttctttccatattagtgtttccttgaggagstcttttaaggcaggtctactggtaacccaatttcctcagcatttgcttgtctgaaaagaatcttatttctccttcacttatgaagcttagtttggcctgatatgaaattctgggttggaatttcttttctttaagaatgttgaatagtagccctgaatctcttctggcttgtagagtttctgctaagaggtctgctgttagtctgatgaggttacctttgtaggtaagcagacctttctctgttactacctttaactttttttcttgtatttctaccttggagaatctgataattacgtgtctgtggaatgaacttcttgtgaattatgttactgaggctgtccctatttcctgaatatgaaatttgggctctctagctaggttgaggaagttctcatgaatgatatcaaaatgtgttttccaagttgctttccctctccccatctctttcagaaataccaatgagtcatagatttggtctcattac

SEQ ID NO: 577004 - DNA, 492 bp, Homo sapiens
gggtgtgtctgtgagggtgttgccaaaggagattaacatttgcgtcagtggactgggagaggcagacagacccttaatcagggtgggcacaaagtaattagctgccagtgtggctagaataaaagcaggcagaagaacgtggaaggactgggctggctgagttttccagccttcatctttctcacatgctggatgcttcctgcccttgaacattggactccaaattctttagcttttggactcttgaacctacaccagtggttttccaggggctgtcaggccttcagccacagactgaaagctgcactattggcttccctacttttgaggtcttgggactcatactgatttccttgmtcctcagcttgcagagggcctactgtgggacttcactttctgatcatgtgagtcaatacttttaataaactcccatatatacatctatcctattagtgctgttcctctggagaatactgactattacaagtggca

SEQ ID NO: 577005 - DNA, 645 bp, Homo sapiens
ctgtacaaatgctatgaaatggaatgatcagggaaacttttgtaaaggcaatgctttctctttctcctcagaaaaaatttctggtccttgagctgacattttgaaaagtaatatatgtctatagaagtgggaacaatacacaaatatatattttcatggttaatgtcaatgcttttctaccagcaatctattttgaacttaggaagatctcagaatttgaggcctctgaaactgctctgggtttcatcagggaaagtaacacattacaagatcaaccacattaacaacaaatacctatattagccacagtatgtaaaaatttgctttgggggagatgaaatggacattgatagtgaaaggaagagatacataaaaaaagggaaagagaaaatagtaaaaagattagtagagttaaataaaagcgtatgtcatgtgtgtctttcaggataacttgaaggtaacgttayggaataaacactagtttccaaattcttttcttaaaggggaaagaatcagtagttttcaggtcatgacatttcagctttcaatcttagagctttctgaggtatacgcagaaccctaggaagaaattttttcatgtgcatcaattttaaagaatagtattaataaaaaataaataaataa

SEQ ID NO: 577006 - DNA, 509 bp, Homo sapiens
cattctaactggtgtgagatggtatctcattgtggttttgatttgcatttctctgatggccagtgatgatgagcattttttcatgtgtcttttggctgcataaatgtcttcttttgagatgcatctgttcatatcctttgcccactttttgatggggttgtttgtttttttcttgtaaatttgtttgagttcattgtagattctggatattagccctttgtcagatgagtagattgcaaaaatattctcccattctgtaggctgcctgttcactctgatggtagtttcttttgctgtgcagaagctctttagtttaattagatcccatttgtcaattttggcttttgttgccattgtttttggtgttttagacatgaagtccttgcccatgcctgtgtcctgaatggtaatgcytaggtttcttttagggtttttatggttttaggtctaatatttaagtctttaatccatcttgaattaatttttgtataaggtataagtaagggatc

SEQ ID NO: 577007 - DNA, 602 bp, Homo sapiens
acccattttttccctttgtttccactcttctttttctcctctctctctctccatctctttctctctccagttcccatgcctgctttcccctagacattatgggagactaccttaatctaaagtgacctctttatctgcgctcctcccccactgctggctttatttttctggttttgtattacaccctaaagagagttgggagggagagagttagcgatacccaccaaggacactttctcaaatgaatcatgattgcattctcattcctcaaccccagttgaaaaccatcaaatatctagtgaactatgttccactgattgaaagttaacaaacttgatttacttaattttgcctatgattattttatctctattactttcttgatttatgtcacaatcttctactaaaaagtaataaatcactcaatagagtgaaaatgcaacttacagaatgtgagaaagtatttacaaactatgcmtctgaaaagggattaatatctaaaatatataaggaactcacaaaaattaatagcattatacacacacacaaacatatatatatatatatatttaaaatgctgttgagatgtgtgagctcctata

SEQ ID NO: 577008 - DNA, 576 bp, Homo sapiens
ttgcttttctaattctttagaatgcatcattagattgttcatttgaagtttttcctcttttttgacgtaggcacttatagctataaacttccctctgagtactgcttttgctgtatcccataagtttggtatgttgtatttccattatcatttgtttcaaaaaatttttaaattttcttaattgctttattgatccattggcattcaggagcatactattttccgtgtatttgtatgctttccaaaattgctttttatttatttctagttttattccattgtaatcagagaagatgctagatattatttcagtttttaaaaaatgtttgaagacttgttttgttacataacrtatggtctatctctgagagttatctatgtactgaggaacagaatgtgtattctgcagcatttggataaaatgttctgtaaatatttattagatatatttggtttatagtgcagattaagttcaatgtttctttgttgattttctgtctggaagacctgtccaatgctgaaagtggggtgtagaagtttccagctattattgtattggggcctatgtctctcttt

SEQ ID NO: 577009 - DNA, 558 bp, Homo sapiens
gttcccttccactgaacatgtacaatggaacacatagccccaaatgttactcagaatgaaacagtctttgaagaacggaatatgaagaaatgaaaagaaaatgggtcctcagtgacacattaagctgttgggtcagccaaacttgaagcccgcactatgtttggatttccattcacttgaaccaataactctatttatttatttacctattgggcccaaatttctctttcaattcaattttcctattgacatagtatataataaatcagtgggaataaataaacataggttttgaattagtatttcttttactttttattttgaaataattatagatttatagcaagatacaaataaatgaataaaaatgcccatgtgcygttcgctcagcctctcacaaagttaatgttattttgcataattattgtgtgatattaaaaccaggtaattgaccttggtataatccatgaacgcattctgattttatgttatacatacgtacattacacatgtgtttgcatgcatgtgtgagtatgcagtttgatgaacttcaattac

SEQ ID NO: 577010 - DNA, 591 bp, Homo sapiens
tcacttatgcaaaaatctaaaatgtacaaaagtaatatacattttatgaatctaattgcatagtaaaggtcaggtgcagtggctcacacctgtagtcccagaactttgggggtccgaggtgggcggatcacttgaggccaggagtttgagaccagcctggtcaacatggcaaaaccccatctctactaaaaatattaaaaaattacccaggcagggtggcccacggctgtaagcccagctactcaggtggctgagacaggagaattgctggaacccaggaggtgcaggttgcagtgagccgagattacaccactgcactccagcctgggcaacagagtgagactctctctctctctctctatatatatatakatagatagatagatagatagatagatagatagatagatagaaacatttttgtacttttactgtatatatatatatatgtatatatatataacagaatgagactgtctctgtatatatatatatatagaaacgtttttgtacttttactgtatatatatacagtactttttgtaatatatatacagtatatatattcgtatctatatacagtatatatat

SEQ ID NO: 577011 - DNA, 623 bp, Homo sapiens
ggctaagctttcttggctccttagaacttgagagatcatcaccttaatcaggagaaaaaaatctgttaaaaaaaaagaacatcaccatgaatcatgagtgattatttcattgtgactgtgtaagcaaaagaaggcattaaggatccaatgaaaacaagactaagatatcctccttttagacgctcattccactttctcctccacccttaccattctgtgagtttacatgaccagatgtttctcattcatagtgcttatcacaaatgtcctttttgcacaggtttgataagtccagaaaaggactcgtttgttgagtctgaggcctggaaacattttcagtgatttagtcagttcttagaatcgtgatgagcttgtaaaatagctgaccctctcaggggcatcatagagataggcrctgtttgaattcatgtctgtcccatcccaaggttggatcttccagctttataggctggaggaggaaacagggtcagagggagaaaagagagcttcatgtgggatttaccttcactagcctggcccacctgggttgccctggaaggtctagagtggggtgaaggcaacaaagtagacatttgcaattaattcaaatacttatttttctc

SEQ ID NO: 577012 - DNA, 599 bp, Homo sapiens
atgatcaacataacacaaccacaatgaggacactagtacatttccttctttaggtgtttctggttgaaatcgtcgtgcccaacattccaccaggttcctcacatgttgaatacatcaaagcctactccacccatctggtgagtcttgattttaactcttagagaactcaaagttgtactcttctattgctgctctgatactatttttataaaaggactacattatttttgttcaaagcaaccaaattaaatccatagaatccacaaaagataaatttaaccaacagctcaaaggcttgactttctcaccttttcccaagaaggcatttttgacaattttatcagttatctaggactgccataacaacataccacaggccgggtggcttaaacaacagaaatttatttctcacagttctagaagctggaaggccaagatcaagctgtcagctgggtaggaatttctcctgaggcctctctcttcagcttgcagatggttccctggtyactgtgccctcacatggtcttttctctgtgcatgtgtgcctctctgctgtctctcttctttcttacaaggacgtcagtcatactggactaggg

SEQ ID NO: 577013 - DNA, 354 bp, Homo sapiens
gcctaacccttcattcacttcagccttgatgtgaactcctcaaataaacaactgagccatatcagtaacatccatagactcamccagagccgacaaagactgctcatcatctgccttgctttttcttttttaattattattttgagacaggatctcactctgtcacccaagctggagtgcagtggcatgatcctcagctcattgcagcctccacctcccaggctctgatgatcctcccacctcagtctcccaagtagctgggactacaggcatgtaccaccacacccagctaattttcatattttttgtagagagggggtttcgccatgttgcccaggctagtcacagccatct

SEQ ID NO: 577014 - DNA, 354 bp, Homo sapiens
gcctaacccttcattcacttcagccttgatgtgaactcctcaaataaacaactgagccatatcagtaacatccatagactcaaccagagccgacaaagactgctcatcatctgccttgctttttcttttttaattattattttgagacaggatctcactctgtcacccaagctggagtgcagtggcatgatcctcagctyattgcagcctccacctcccaggctctgatgatcctcccacctcagtctcccaagtagctgggactacaggcatgtaccaccacacccagctaattttcatattttttgtagagagggggtttcgccatgttgcccaggctagtcacagccatct

SEQ ID NO: 577015 - DNA, 643 bp, Homo sapiens
gactggttaatttatttatttttttaaaaaaagaggtttattttgggtcatgattctaraggctcaggttgccaaatctgatcatcttctggtgagggtctcatgcttcatcataacatggggggtgagcctgagtgcttgccaaaagggcaaatgcaaggacagcctcactttatagcaactcgcttttgtggtaattaatccagtcccatgaaggggaggactcccacattcataagaattaacccagtcctgtaagagcagtgttaatccctcttaacaacccaatcacctcttaaagcccccatctcccaacaccaccacactggggaccaaatttctaacacatgaattctgggggacacactgaaaccatagcatttcacacctgccccccagaatttcatgttcttctcacaatgcaaaatacaattattccattctaatagtcccaaaggtcttaacttgttccagcacaaactcaaaaatccaaagttttacctatgagcagcttgtggaatcaaaatgagttatctacttccaagatacaatgaatggacaggtataagatagacatttcccttctaagagagagagagagagacagacagacaggcaagaagaaaggagtatcaggccccaa

SEQ ID NO: 577016 - DNA, 643 bp, Homo sapiens
gactggttaatttatttatttttttaaaaaaagaggtttattttgggtcatgattctaaaggctcaggttgccaaatctgatcatcttctggtgagggtctcatgcttcatcataacatggggggtgagcctgagtgcttgccaaaagggcaaatgcaaggacagcctcactttatagcaactcgcttttgtggtaattaatccagtcccatgaaggggaggactcccacattcataagaattaacccagtcctgtaagagcagtgttaatccctcttaacaacccaatcacctcttaaagcccccatctcccaacaccaccacactggggaccaaatttctaacacatgaattctgggggacacactgaaaccatagcatttcacacctgccccccagaatttcatgttcttctcacaatgcaaaatacaattattccattctaatagtcccaaaggtcttaacttgttccagcacaaactcaaaaatccaaagtyttacctatgagcagcttgtggaatcaaaatgagttatctacttccaagatacaatgaatggacaggtataagatagacatttcccttctaagagagagagagagagacagacagacaggcaagaagaaaggagtatcaggccccaa

SEQ ID NO: 577017 - DNA, 308 bp, Homo sapiens
tccagccttggcagcttccatgtggtgttgagccttcaagtgcaaagaagccaaaaaytgatgtttgtgatcctctgcctagatttcagatgtatagaaatgtctgggtgcctaggcagaagttcacacaggggcagagccctcatggagaactgctagggcagtgtggaaaagaaatgtgggatcagagcccctatgcagagtccctaccagggcaccacctagtggagctgtgagaagagggccaccgtcctccagatcccagaatggtagatccaccgaaagcttgcaccatgcacctggaaaag

SEQ ID NO: 577018 - DNA, 404 bp, Homo sapiens
tttattctcatgttctttatatgttaagaagttcagcccctaactattttgttttgtacctattaaccatcccacctctcatccagccctgaccccaacccccaactttcgccccctgcaacctgcaaatataaatatatttatatttatttttattctgatataaaaaatggctgctacttwaagatattaaaagccttattaagccgggtgcagtgactcacacctataatcccagcattttgggagaccgaagcaggcagatcacctgaggtcaggagtgtgagaccagactggctaacatggtgaaaccctgtctctattaaaatatgaaaattagccggtcatggtgtctcacacctgtagtcccagctactgggtaggcagaggttgcagtgagccga

SEQ ID NO: 577019 - DNA, 603 bp, Homo sapiens
attgtgtgtgtgtgtgtgtgtgtgtgtgtgtgtattccagcactttcttactttctggaataactttaagctccaagatcatcctgtatatttcctgccctaaatttagaattaactatttatcctttcattagagaatattagaaaccatatacaaatatataaaatacttctatatgaagccatttgtatttaatatctccaactagaatgatacatgtagtaatggattagagttggagacatgagtaaaaactcattcttgagagtcctgcatttttatgtgatatcaactttttaagatacatttgtatataagaaagaaacaaccactttgattatgtgataataaatttttwtgtgaataaaaaatgtatccaactttgacttaaatcacttttttaaaaaagtttgagatagccctgctccattgtccaggctgaagcacagtggcatcattctggctcactgaaacctctgcttccccacctcaagtgatcctcccaactcagcctcctgagtagctgggactacaggtgcacacaaccatcccctgctaatttttttgtattttttgtagagatggggttttgctatgttgcc

SEQ ID NO: 577020 - DNA, 519 bp, Homo sapiens
tctcccacactagattgtaatctttccagagtttgtcagtgagagaaataggaaaagacatcttcaaaattactaataaaagatacacagaaaaatactyataagtaccagaaatgatgttcttgtttgtttctctttctttgagtttactgttgaatcacaaactatataaagaatttagccctgggacggagacttctgtgaccaaacaattttatattcataccttcctgatatcctattgcttaagatgatgatttttccattgtattcaaatgatgtaacctgacgccatccaattcatgtactttataaattcatatgtaaggcttactctgagccagaccctgctctaagcactttacagctaagtcattgaaatctcccagcagcactatgagataggtactgcattatcaccactttcaactagaggtatgaaaccaagggagaggcagtaacattcctgagtcacatagctggtcggagggagagacttctatctcctgagactgtcct

SEQ ID NO: 577021 - DNA, 519 bp, Homo sapiens
tctcccacactagattgtaatctttccagagtttgtcagtgagagaaataggaaaagacatcttcaaaattactaataaaagatacacagaaaaatactcataagtaccagaaatgatgttcttgtttgtttctctttctttgagtttactgttgaatcacaaactatataaagaatttagccctgggacggagacttctgtgaccaaacaattttatattcataccttcctgatatcctattgcttaagatgatgatttttccattgtattcaratgatgtaacctgacgccatccaattcatgtactttataaattcatatgtaaggcttactctgagccagaccctgctctaagcactttacagctaagtcattgaaatctcccagcagcactatgagataggtactgcattatcaccactttcaactagaggtatgaaaccaagggagaggcagtaacattcctgagtcacatagctggtcggagggagagacttctatctcctgagactgtcct

SEQ ID NO: 577022 - DNA, 519 bp, Homo sapiens
tctcccacactagattgtaatctttccagagtttgtcagtgagagaaataggaaaagacatcttcaaaattactaataaaagatacacagaaaaatactcataagtaccagaaatgatgttcttgtttgtttctctttctttgagtttactgttgaatcacaaactatataaagaatttagccctgggacggagacttctgtgaccaaacaattttatattcataccttcctgatatcctattgcttaagatgatgatttttccattgtattcaaatgatgtaacctgacgccatccaattcatgtactttataaattcatatgtaaggcttactctgagccagaccctgctctaagcactttacarctaagtcattgaaatctcccagcagcactatgagataggtactgcattatcaccactttcaactagaggtatgaaaccaagggagaggcagtaacattcctgagtcacatagctggtcggagggagagacttctatctcctgagactgtcct

SEQ ID NO: 577023 - DNA, 560 bp, Homo sapiens
acacacacccacacatataaatacaatgcacaaataatgtattgcttgtaggatactctttgcagtgtatagattaactatgtacagagtttcatatctgttacttctttagaatactctttacacgtttgggaattaggtttagaagaaaagacttccaagcacctaggggcccaggcgatcaaaacatttttcccccctcagggatatttattttgtaaacgatagtgttctttttaatttttctgtaaacatgtatttagcagaaatgttaaatgttttcacttacatttgctaccaggatttatgaagtaaaatgtataagaaaacttttctcagataaagaggaaagaaacaaacttattttttatttttggcacccaccttttcctataggaaaaaaaatagaagaaatattaccatggcacttgctgcatgcctgtagaccaagaaaataatatttgtaaatctgtataattctgatagtggcagtaaatgcaaggccactgttctagccttacaccttaaagatatatrtgtgtgtgtgtgtgtgtgtgtgt

SEQ ID NO: 577024 - DNA, 499 bp, Homo sapiens
catataaaattataaaataaataaaaatacataaaattatgcctttttataattaataagtgatactaatgtacttttttctggacaatttttttgatagagtctggtaagtgagcactaaaagtcctaagtttccaartaaatccattggtattataacatgctactaatcatatttatgttttaattaattgatatttctaatagacacatgcaattaaacatatttaattgctttaaactgacgaacagtttaatgttttaatatgtatttctgttgtgtagtgatcaaatcagggtagttaatatatccatgaccacattcattcttcatttctttgtggtgagaacattcaaaatcctctcttacagctgtttcgtaatacagcactctgctgttaccatagtcactctactgtgtattagaacacttaaatatattccttctatcgtattgtaattttgtacccattgaccagcctctctccatcctcccctt

SEQ ID NO: 577025 - DNA, 590 bp, Homo sapiens
actttcatgattcaattatctctcactgggtcctcccatgacacatgggaattatgagagctgcaattcaagatgagatttgtgtggggacacagccaaaccatatcatctatatgatctgctgttaatataggtactttgaattcttttgattaatgtttgcatacttttacattcaacctgcctataatgttatatttgaagtgaatttcttacagacagcatatagcaggattatgttttttaatccattctgaaaatctcttttaatagcctatttagaccatttacrtttaattgacatgtcaatgcttaagcctaccattttattttttgttctgtgtatattttctctttttcatttctgttttctttttcctgccttctttcacattaaacttctaagatatatttatatataatatttttgcattatttatgtttatttttattcaatttgtatttatctgtagtgtttttgagtatatctctttgtatcacttttacctggctgctttaagaattacattatataaaactcactcaaaaccacacaactacatggaaactgaacaacctgggtaaataag

SEQ ID NO: 577026 - DNA, 590 bp, Homo sapiens
actttcatgattcaattatctctcactgggtcctcccatgacacatgggaattatgagagctgcaattcaagatgagatttgtgtggggacacagccaaaccatatcatctatatgatctgctgttaatataggtactttgaattcttttgattaatgtttgcatacttttacattcaacctgcctataatgttatatttgaagtgaatttcttacagacagcatatagcaggattatgttttttaatccattctgaaaatctcttttaatagcctatttagaccatttacatttaattgacatgtcaatgcttaagcctaccattttattttttgttctgtgtatrttttctctttttcatttctgttttctttttcctgccttctttcacattaaacttctaagatatatttatatataatatttttgcattatttatgtttatttttattcaatttgtatttatctgtagtgtttttgagtatatctctttgtatcacttttacctggctgctttaagaattacattatataaaactcactcaaaaccacacaactacatggaaactgaacaacctgggtaaataag

SEQ ID NO: 577027 - DNA, 590 bp, Homo sapiens
actttcatgattcaattatctctcactgggtcctcccatgacacatgggaattatgagagctgcaattcaagatgagatttgtgtggggacacagccaaaccatatcatctatatgatctgctgttaatataggtactttgaattcttttgattaatgtttgcatacttttacattcaacctgcctataatgttatatttgaagtgaatttcttacagacagcatatagcaggattatgttttttaatccattctgaaaatctcttttaatagcctatttagaccatttacatttaattgacatgtcaatgcttaagcctaccattttattttttgttctgtgtatattttctctttttcatttctgttttctttttcctgccttctttcacattaaacttctaagatatatttatatataatatttttgcattatttatrtttatttttattcaatttgtatttatctgtagtgtttttgagtatatctctttgtatcacttttacctggctgctttaagaattacattatataaaactcactcaaaaccacacaactacatggaaactgaacaacctgggtaaataag

SEQ ID NO: 577028 - DNA, 627 bp, Homo sapiens
agcaaaaccaatctctgatgayagatgagtagtaacctttgcgaggataatgaccgggggacacagaatggtttgtgggatgctggaaatgttctatattatcatcttggtggtggtcacatagatatgttcacttacaaaatattaaccaagtgctacactcagaatatgtgtctttactatatatttgatatgctccagtaaaaatttttaaaataagacaaattacccaggagtaatcagaagtttgttaaatagagggaacaaaccccacttttaatttacagatgaagaaagatgtactgagggaaagactgcaacttgctgaatttcacatgagaagtggccacatcaggactagactcaaacctctgaggtcctaccactatactctacttcctccaaggaaatgctcaacacacattcgtgaaaaatatgacagggattaagagtgggggccagctgtgcctctgtcacctttgttgaattatttaacatttccttagtctctgtttgttgatctgtaaaggcagaaatagcacattccacatagagtagttgtgatgatcaaatgaaataataataagcttgtcccatgcttagcatggtgtccagcacacaggcagt

SEQ ID NO: 577029 - DNA, 609 bp, Homo sapiens
cgggttggtgaggtagggtatggcgagggtgctgacaagacagggagaggaaggcaggcaagcaaagcaggggagcaaagatttaacagcacaaggcaggccttactgccagggccaacccctgctctgaagatccaaaaatgcaactccataaaatgccccatgtttatacaaacttggctcacgtttctctgtgtgcttgctgagaggtttgaggctggctctgcagcctcaccaactgtcctccacccacaataacctcctgccactccttcacaagagccacccagcgctgcacccacatcctcccctcagagcccctggaggscccctcacccactgggacctgcctcctggccacaggcaaatggatctgggaagatatttccccaagctgagccaataaggctctgccccttgagaacctgaggatacagacagaactcaaatgagacagtctggggcccagagctgcagcaagggctatactcagagctctctggaaagaccagtctctggagagaacaggcagaggagggagaaatggagaagggagacagtgtggctcagaagggagttgggagacagacttccaatgcctctaagcct

SEQ ID NO: 577030 - DNA, 609 bp, Homo sapiens
cgggttggtgaggtagggtatggcgagggtgctgacaagacagggagaggaaggcaggcaagcaaagcaggggagcaaagatttaacagcacaaggcaggccttactgccagggccaacccctgctctgaagatccaaaaatgcaactccataaaatgccccatgtttatacaaacttggctcacgtttctctgtgtgcttgctgagaggtttgaggctggctctgcagcctcaccaactgtcctccacccacaataacctcctgccactccttcacaagagccacccagcgctgcacccacatcctcccctcagagcccctggaggccccctcacccactgggacctgcctcctggccacaggcaaatggatctgggaagatatttccccaagctgagccaataaggctctgccccttgagaacctgaggatacagacagaactcaaatgagacagtctggggcccagagctgcagcaagggctayactcagagctctctggaaagaccagtctctggagagaacaggcagaggagggagaaatggagaagggagacagtgtggctcagaagggagttgggagacagacttccaatgcctctaagcct

SEQ ID NO: 577031 - DNA, 535 bp, Homo sapiens
cacttttccagtcctgggaagcatgcggagagggatggacccacagcctcaactgctccaggggcaagggcaatgcggaaagacatggcagggtacatcgccataactcacaaagggtaaagagcatgaggctagttgaggactgtaccacatctgcctctcactgaagcaagaggaagatcatctcttttcctttttctcacttagaggggagtgcactcccaaatctgcaattctttggctgctattggttgttgttgctgctgcttgcattctctggattaaaatgaaacacacgttccaaaccgtgaaaggtcagcaagaaagagagaagtgtccacaggctgcagtctgaggatttgatgagctggttcttgaacttttgtgggaaaatctgagaagggaaagccggttaaagggccagggttcagcaagcctggcttcttggggcagcatctctccacttgcaggggtgccctgttctggacagcagaggaataggaytgccctcccaaatgcccaggagggtgtgtct

SEQ ID NO: 577032 - DNA, 577 bp, Homo sapiens
aaggggagatggttctttgctaatctaacaggattcttgctggggcagcagatataacctggagtattgtgaaggatgaggaacttgatcagacattaaggggaatcagatatcaaaggtgggagttctctctaaactaaattatcagkattcttgccaaaactggtcttagcaaggacagagtcaagattgagctctcattgagaagaaggcttataggaacctgactaaagctttgtcaaggaggggggctctgtcaggccaccagacccctgtgacacaaaagaagcagatttctggtttctgctatcactcagcctccattctcagtccagacagtgagagaggcaaagttccagcctggaacacatacatgcttagaagccaaagttaatggtgagatcgatttgaccctgcaatcctattattgggtgcatacccaaaagaatataaatcattctgttataaagacacatgtacatgtatgttcattgcagcactattcacagtagcaaagacatggaatcaacccaaatgcccatcaatgataaactggataaagaaaatgtggtacata

SEQ ID NO: 577033 - DNA, 373 bp, Homo sapiens
ggatcacatctcactgtatcctcaacctcctgggcttaagcgatcctcctgcttcagcctcctgagtaatggggatcacaggtgcatgccaccatgcctgcctaatttgtgtaattgcttttttcgtttgtttgttttttagagacacgttttgccatgttgctcaggctggtcttgaactcctgggctcaagcagtcctcctgccttggcctcccaaagtgctaggatwataggtgtgagccactgtgccagataattggtttattttataaagaatatttaccacttatatgtgtagattcagtaattaattgactgaaactacattttcactattaaaaatcagcaatgtttcaacataaagcacagaaa

SEQ ID NO: 577034 - DNA, 373 bp, Homo sapiens
ggatcacatctcactgtatcctcaacctcctgggcttaagcgatcctcctgcttcagcctcctgagtaatggggatcacaggtgcatgccaccatgcctgcctaatttgtgtaattgcttttttcgtttgtttgttttttagagacacgttttgccatgttgctcaggctggtcttgaactcctgggctcaagcagtcctcctgccttggcctcccaaagtgctaggataataggtgtgagccactgtgccagataattggtttmttttataaagaatatttaccacttatatgtgtagattcagtaattaattgactgaaactacattttcactattaaaaatcagcaatgtttcaacataaagcacagaaa

SEQ ID NO: 577035 - DNA, 503 bp, Homo sapiens
tgactactctgccattaaaattaaattgggtacaagataaggcaggcaaagaaaccagttatgaaagaccatatgaagcatattaaataattggtgcattattcagaaagtaataaacagcttttaattaacctggggaacaatatgatcagatttgcttttcgaaagaccacagcagctgcccttaaagaaatagatacaagaaaaacaatactggaggaaaaatatagttagacatttgttagagaaaactaggtagaatagcagtgatccaaattagggtaaggaatacagataagagggagaactatgggagaaatcacatgacttagccattgatatgtgataaatgctatggttgttttatgaaccaaacttcttatcagttagccattcatactatggaatctataagaaaaatgacataaagttttgggcctgttttaaaatatgctggctcaattgcraaacacagaaagtagaacaaataaagtggtaaaaag

SEQ ID NO: 577036 - DNA, 502 bp, Homo sapiens
gtctttccctgaatagatacatgatgtttcaaaaaaaattaaggattagagaatctgtgtgcctataatcaaattgtcactatattatatctccataactatgtgcagttaaataaataagaacatgtaagtaaactaggttattggcctctggtactatttaaaataagtgctattactccgatgcttgcttrctcatattactagatatgatgagagaaaatctttctatgcagtctaatttcccaagtgctaattttcagtttctttttaccataacaaagtagaagtgggaggaggttagatggaatatatcctgtccaaaaaagaaaaaaataccatgaattttactattttcaaaaatgtacatacaaatctactgcattttaaggagtaaaagattaaaacacagatatcagaaatatgtagattttaccaatacatacattacattttacctatacattaatatcacatattactctcctcatattttacatag

SEQ ID NO: 577037 - DNA, 513 bp, Homo sapiens
ccacatacaccatatagactcaaatggaactaaatgtaaaaaaaataaaataarataaaatacgactttaaatagaaaacaaagatatataaatactagtaaaaaaaactacgtgatttctttttggaaaaataattttgtgaagcaattttattgtatttatatttgaacataaattatcttgtctatagaaaacgtattatttggatttaggaatatcagtttaaatttaatttctgtcaattttctaatgtttcctgttaatttctagattttagatttacagaataacctaaacccatgctgagttttaggggaaagaagttaagcagctggtctggaatccatttatctccaaattacaaggaaaagttgctggggaaagatgccataggggaaaaatggtgacttgatcttatctccttgtaaatatactactatcttgatcttctggtaaacaaactactgatatttgctagaaggagagtattatctatggatttgtcttagcag

SEQ ID NO: 577038 - DNA, 513 bp, Homo sapiens
ccacatacaccatatagactcaaatggaactaaatgtaaaaaaaataaaataagataaaatacgactttaaatagaaaacaaagatatataaatactagtaaaaaaaactacgtgatttctttttggaaaaataattttgtgaagcaattttattgtatttatatttgaacataaattatcttgtctatagaaaacgtattatttggatttaggaatatcagtttaaatttaatttctgtcaattttctaatgtttcctgttaatttctagattttagatttacagaataacctaaacccatgctgagttttaggggaaagaagttaagcagctggtctggaatccayttatctccaaattacaaggaaaagttgctggggaaagatgccataggggaaaaatggtgacttgatcttatctccttgtaaatatactactatcttgatcttctggtaaacaaactactgatatttgctagaaggagagtattatctatggatttgtcttagcag

SEQ ID NO: 577039 - DNA, 391 bp, Homo sapiens
aaggcattgtatatcctgtttggccctacttttctaattaattccctgagtaatttggaagacttgtaattttgaattgggcccacagcaagaaaggatctataataggtccagattgctgtgctaaatgccctgccactgggacttatgattcggaaaccactgttatccatagtgcctgggtaagagggataatgttcatggagccttgacaaactcagtgagagattaggagtctcaaattacagaatttgggtgtaaggttatgcccttttctgttttttttatttatttattttattattactatactttaagttctagggtacatgtgcacaatgtgcargttagttacgtatgtatacatgtgccatgttggtgtgctgcaccc

SEQ ID NO: 577040 - DNA, 545 bp, Homo sapiens
agatcttatattgagcattttatccatctttagttaatttttatacatagaaagragtaggtgtccagtttcattcttctgcatacagctagccaattttccagcaccatttattgaatagggtgttctttctccattgttcatttttgtccacctttcaaagatcagttggctgtaggtgtgtggctttatttctagattcgctgttctgtttcatttatctatgtgtctatttttgtaccagccccatgctgttttggtttctgtcgactttcaggatagtttgaagttaggtaatgtgatgcctggctttgttgttgttttgcttatgattgctttggctgtttgggttctttttttggttccatatgaattttagaacagtttttttctaatgcaatgagaaatgatgttggtaatttcataggaatagttttgaatctctagactgctttgggaagtatggacattttaacaatattgattcttctaatccatgagcatggaatgtttttccatttgttttgtgttgtctacaatttttt

SEQ ID NO: 577041 - DNA, 554 bp, Homo sapiens
tttagttaatttttatacatagaaaggagtaggtgtccagtttcattcttctgcatacagctagccaattttccagcaccatttattgaatagggtgttctttctccattgttcatttttgtccacctttcaaagatcagttggctgtaggtgtgtggctttatttctagattcgctgttctgtttcatttatctatgtgtctatktttgtaccagccccatgctgttttggtttctgtcgactttcaggatagtttgaagttaggtaatgtgatgcctggctttgttgttgttttgcttatgattgctttggctgtttgggttctttttttggttccatatgaattttagaacagtttttttctaatgcaatgagaaatgatgttggtaatttcataggaatagttttgaatctctagactgctttgggaagtatggacattttaacaatattgattcttctaatccatgagcatggaatgtttttccatttgttttgtgttgtctacaattttttttttcagcagtgttttgtagttctccttgcagagatc

SEQ ID NO: 577042 - DNA, 562 bp, Homo sapiens
ggtggggggatcacttgagctcaggagtttgagaccagcctgggcagcagggcgaaactcatctctactaaaattacaaaaattagctggactgtggtggtgcacacatgtagtcccaactactcaggaggctgaggtgggagaatckcttgaacccaggagacggagattgcagtgagccgagattacaccactgcactccagcctgggcaacagaacaaggctctgtctcaaaacaaacaaacaaacaaacaaacctttcaaattttgaaatgtaacccatatccaaaaaagtgcataaaatataaatatacagtatagtgaataaggatgaatagaaacatacttgtaaaaaatattcaagtgaagaaacaaaacattgccccttgagtgatatctctgaatcggaagcactgacttttatagtcagtcccctcacttgactttctttataatttgcccaactatgtatgtatttctaaacaataaagtttaggttttggtagttttcctgttttggctatattggatatatattttaaaccattctatctttcttcta

SEQ ID NO: 577043 - DNA, 436 bp, Homo sapiens
ttattggactgggcaaaaatttatttagtaataacctacaagcacaggcaatctaagcaaaagtgaacaaatgggatcacatcaagttaaaaagcttctgcacagcaaaggaaactatcaacaaaatgaagacataacccacagaataggagaaaatatttgtaaactatctttctgacaagaggttaataaccagaatatataaggaattcaaacaactccatgagaaaaaaaatttaataatmcgattaaaaatgggcaaaagatttgaatttctcaaaaaaaaaaaaaaaaaagacatacaaatggcaaacaggcaaaaacaggcattttatagttttcattgcagagatctttcacttatttggctaattccttgatattttatttgtgttatagcaattgtaaatggggtttctttttcagattgtttgct

SEQ ID NO: 577044 - DNA, 436 bp, Homo sapiens
ttattggactgggcaaaaatttatttagtaataacctacaagcacaggcaatctaagcaaaagtgaacaaatgggatcacatcaagttaaaaagcttctgcacagcaaaggaaactatcaacaaaatgaagacataacccacagaataggagaaaatatttgtaaactatctttctgacaagaggttaataaccagaatatataaggaattcaaacaactccatgagaaaaaaaatttaataatcmgattaaaaatgggcaaaagatttgaatttctcaaaaaaaaaaaaaaaaaagacatacaaatggcaaacaggcaaaaacaggcattttatagttttcattgcagagatctttcacttatttggctaattccttgatattttatttgtgttatagcaattgtaaatggggtttctttttcagattgtttgct

SEQ ID NO: 577045 - DNA, 520 bp, Homo sapiens
acattcaagataacacagagaagaaattcagaatcctatcagctaaatttagcaaagagattgaaagaattaaaaacaaaaaagtagaaattctggagttgaaaatgcatttgacataatgaagaatgcctcagrgtctcttaacagaagaattgatcaagcagaagaaagaataagtgagcttcgacaatataataagatataaatagaaccaacaaaaacttagcggactgggagataaagtgtagaatttttattactgttcttttttgcttaattgtttgtttctttttgcaatcaaagttaagttgtcatcagattaaaataatgggttataagatgttacttgcaagccttgtagtaacctcaaatcacaaaacttaaaacagatacacaaaaaataaaattcaagaaattaaaacataccaccagagaaaatcattttcactaaaaggaagacaagaagaaaggaaagaagaaagagaagatcacaacacaaccagaaaacaaataacaaaat

SEQ ID NO: 577046 - DNA, 331 bp, Homo sapiens
tcacccataggtctttccccaactcttcctgctcactcagtgcaagttaaaagagtagacgcttgggtggctgcaaagtccaggcccttaggacctctgaaatacatggtgggggaaggacacctacatcacctgagcttctgtccttctccatttataaaaatgaagatgatcacacctccctacaggtggcaggatattaaatatgataacttctgtaaaatgggaacccagtgctcagaggyaacaggcagccaactcatcttagctctcctccttttgaaaaatttctatagcagaggttctgagttgtgaaactgcgctgtgcatt

SEQ ID NO: 577047 - DNA, 243 bp, Homo sapiens
ttgtattccccactatttgggaggttgaggcaggaggatcacttgagtctgggaggttgaggctgcagtgagccgtgattgcaccactgcactccagtctgggtgacagagcaagaccctgcctcaaaaaaaaaaaaaaaaraaaaaaatttttttacaagaggaaaattgatcatgatcatatttcttccttttccagctataactcccggaaataggtataaacaaatgctggtgtgtggg

SEQ ID NO: 577048 - DNA, 243 bp, Homo sapiens
ttgtattccccactatttgggaggttgaggcaggaggatcacttgagtctgggaggttgaggctgcagtgagccgtgattgcaccactgcactccagtctgggtgacagagcaagaccctgcctcaaaaaaaaaaaaaaaagraaaaaatttttttacaagaggaaaattgatcatgatcatatttcttccttttccagctataactcccggaaataggtataaacaaatgctggtgtgtggg

SEQ ID NO: 577049 - DNA, 628 bp, Homo sapiens
catgtgtgcaggtatcacctggtcttctttgccctgcaggattggaaattaatataagaaaatattgacattctgcctattgttatttctgtgagtaatatttattgctgactcaggagtcttgcatcttttatcagtacaatggactgaatgtttatgccctgcataaattcatatgttgaaatcctaaccctcaagataatggtattaggaggtaggatccatgggaggtgtaatggttaattttagatgttaacttgactggattaagcgacacctggatagctgataaagcattatttttatgtatgtttgtgagggctttttccagtggratgaataaagaatatcaccctcatcaatgcatcatccagtcagtttagggcccaaatagaacaaaaatgtagtggaagatttgctctctctgagctgggacatccagcttctcttgcccttagatatcagtgcttgtggttctcaggcctctggactcatactgagacttagactagtggctcccctggtttttgggctatcggacttggactgaattataccattggctctccagtgtgcagacagcagatcatgggagttctcagcctccataatcacatgaaccaatttt

SEQ ID NO: 577050 - DNA, 628 bp, Homo sapiens
catgtgtgcaggtatcacctggtcttctttgccctgcaggattggaaattaatataagaaaatattgacattctgcctattgttatttctgtgagtaatatttattgctgactcaggagtcttgcatcttttatcagtacaatggactgaatgtttatgccctgcataaattcatatgttgaaatcctaaccctcaagataatggtattaggaggtaggatccatgggaggtgtaatggttaattttagatgttaacttgactggattaagcgacacctggatagctgataaagcattatttttatgtatgtttgtgagggctttttccagtgggatgaataaagaatatcaccctcatcaatgcatcatccagtcagtttagggcccaaatagaacaaaaatgtagtggaagatttgctctctctgagctgggacatccagcttctcttgcccttagatatcagtgcttgtggttctcaggcctctggactcatactgagacttagactagtggctcccctggtttttggrctatcggacttggactgaattataccattggctctccagtgtgcagacagcagatcatgggagttctcagcctccataatcacatgaaccaatttt

SEQ ID NO: 577051 - DNA, 420 bp, Homo sapiens
tattgtggtaagagatagaagaagataaactttttttttcttcttgtcactgtttaattttcttagcaattaagccactagtaatgagtttagggatttcagagaagactgtttttttctgaggtctattaaactgtcttttttttaaacatgattttgcttctaaaatttgaaaatgagttgccatccaatggcatkatggaggcagcacaggttctgaaagtattcagacttaaattcaaactctgtattttcccttctgtttcaactaaggcaagttactgaatgggatattttgagattttagaaagttgttcttctgtacacaagtagatttaaaataatcacttcttcctccatcttttcagtagatagattgtacttcaggtgctttgattctgcacttggccatctgacatg

SEQ ID NO: 577052 - DNA, 541 bp, Homo sapiens
atgttatattttatttgcttaatcagaaattagtgctgttttttgcaattgaaggctgatatttttagtttcctctgttatagctacatataatgtstagtcctttatttagtggctaccacaatcataggcatagctctgggtacataggaaatgagtcttatactcataggtatatgaatctcttgaattaacaggctctgagcaattagaaaggaagaaggaacaaaaaagtaaagacggtcattattttatttacagactcagaataaaaatgatggaaacagtaggaaggaagaaagacctaaaacggaaaagagaatcattattttttaacttttaaaattttattataaaaacacttagtgtgaaatgttacttcttaacaaataaagtgtacactacactactgttatctataggtacaatgttgtacagcaggcatttagaacattttcatcttgtataacagaattttttttttttttttttttttgagatggagtctcattccgtcgcccaggctggagtgcagtggagt

SEQ ID NO: 577053 - DNA, 541 bp, Homo sapiens
atgttatattttatttgcttaatcagaaattagtgctgttttttgcaattgaaggctgatatttttagtttcctctgttatagctacatataatgtctagtcctttatttagtggctaccacaatcataggcatagctctgggtacataggaaatgagtcttatactcataggyatatgaatctcttgaattaacaggctctgagcaattagaaaggaagaaggaacaaaaaagtaaagacggtcattattttatttacagactcagaataaaaatgatggaaacagtaggaaggaagaaagacctaaaacggaaaagagaatcattattttttaacttttaaaattttattataaaaacacttagtgtgaaatgttacttcttaacaaataaagtgtacactacactactgttatctataggtacaatgttgtacagcaggcatttagaacattttcatcttgtataacagaattttttttttttttttttttttgagatggagtctcattccgtcgcccaggctggagtgcagtggagt

SEQ ID NO: 577054 - DNA, 541 bp, Homo sapiens
atgttatattttatttgcttaatcagaaattagtgctgttttttgcaattgaaggctgatatttttagtttcctctgttatagctacatataatgtctagtcctttatttagtggctaccacaatcataggcatagctctgggtacataggaaatgagtcttatactcataggtatatgaatctcttgaattaacaggctctgagcaattagaaaggaagaaggaacaaaaaagtaaagacggtcattattttatttacagactcagaataaaaatgatggaaacagtaggaaggaagaaagacctaaaacggaaaagagaatcattattttttaacttttaaaattttattataaaaacacttagtgtgaaatgttacttcttaacaaataaagtgtacactacactactgttatctataggtrcaatgttgtacagcaggcatttagaacattttcatcttgtataacagaattttttttttttttttttttttgagatggagtctcattccgtcgcccaggctggagtgcagtggagt

SEQ ID NO: 577055 - DNA, 541 bp, Homo sapiens
atgttatattttatttgcttaatcagaaattagtgctgttttttgcaattgaaggctgatatttttagtttcctctgttatagctacatataatgtctagtcctttatttagtggctaccacaatcataggcatagctctgggtacataggaaatgagtcttatactcataggtatatgaatctcttgaattaacaggctctgagcaattagaaaggaagaaggaacaaaaaagtaaagacggtcattattttatttacagactcagaataaaaatgatggaaacagtaggaaggaagaaagacctaaaacggaaaagagaatcattattttttaacttttaaaattttattataaaaacacttagtgtgaaatgttacttcttaacaaataaagtgtacactacactactgttatctataggtacaatgttgtacagcaggcatttagaacattttcatcttgtataacagaattttttttttttttttttttttgagayggagtctcattccgtcgcccaggctggagtgcagtggagt

SEQ ID NO: 577056 - DNA, 619 bp, Homo sapiens
ggttgtagtactggcaacaaatcagagtttctgttgctctacatccttatcagcatttgatactgtaaatgtcttggattttagccattctaataggtgtgtagaaacttattttcactccctcttcgaatggctctcagagctccactgtgatctttccattgctgactggcctcaaggcccttgtaaaactaggaacatcttaatgaaagtatccacctttgttcctctgtctccagtaatcacaaggcttggcatgtagagggttccaaaattgaatgtgatcttctgactacaattgttttttcttaactgtccttggaatcagtctctttccagccaccttattctgaacacttcatcctgtggctgtgtgaccttaggcaagtcacataatctccctaaatatctatttacttatctaaaaaaagaatcttcawtaatctttatgacaatcttaaagattttggtatacattggtaaaatatgaagcactctatatgatgtaaagcactatataaatatccctccttgtatcctcaaatacattacagaacattacacacgcgcagacacacacacacacacacacacacatacaaaattaatgtcttaattg

SEQ ID NO: 577057 - DNA, 560 bp, Homo sapiens
gtactactttacctccatcaractgaaatagccatttcggctgcttgatatggggaaagtttacttcaagtattgctggcggaaattcaaagaacttctgcctttggaaaacaatctagcagtagcaatttaactttaaaaacatttattctttgaggtaataatctcatttctgggaatcaagagcctggaaatcaaagcacctatatataatgctcatgatgggagtaggggatgggaaagagaatacccactgatcagtgaacaggtgtataaattgtggcatattcacaatatgaaaaaaataattattcaaatgaatgagtatagtgaagtttaacaacgtgtgtataatagccattattgtaaaacaaattacaactaaggaaaagcacaccatcaggttagcctatacagcactttaagagcacggagaaaaatatggaaagatatagattgatgcatacgttatcttgttggtggtggcaggtcttacataccgatttatgtaaaaccaattgtggggatgtatatagaaaagcttgaggaagagaataaca

SEQ ID NO: 577058 - DNA, 604 bp, Homo sapiens
ttttgggccaaggcaagggatcgcttgagtccaggagttggagactagcctgggcaacatagcaagaccatctctacaacaacaaaatttgccaggggtgatggtggcacgtgtctgtaacttcacctacttaggagactgaggtgggaggatcacttgagcctgaaatgtcaaggacacagtgacttgtgattgtgctactctactccagcctgggtggcagagcaagacyctatctccaaaaaaaaaaagaaagaaaaagaaaaagaaaaaaattgcctttaagattcatgaatgttttggtttgggttatttgtagttttgaactatgcactatgaaccttcaagcacatgtatgctggtaaatataaataagcatttctatggagtttataccagtgcatgaaataggctgtactatactatgtcttccagatctatgagatatgaccaattgttttccaaagttatcttaacagtttacaatcctaccagcaaattgtaagaactctattgatctatatcctcgccaacacttagtattattacactattggatttttgccattctggtgactcatgagttgtatcttattgtgatttt

SEQ ID NO: 577059 - DNA, 560 bp, Homo sapiens
acatcacacactggggcctgttgtggggtgggggcagcggggaggkatagcattaggagatatacctaatgttaaatgacgagttaatgggtgcagcacaccaacatggcacatgtgtacatatgtaacaaaccttcatgttgtgcacatgtaccctaaaacttaaagtataattaaaaaaaaatcatgcttcctggaatgtgatgggaaatgtgatggttggaggttaagcgtccattctagatcaggaagatgaaggccttgtcagggataaaaagcagaaaactgcaagtgtacctcatggggccagtgtaccagtcatagacttcttttatgtaagagaagaatataattccattttgctgaagttaagtttctatgtctcacctgatagagtatgaaataaatattctttctcctaagatttagagtacttaaaattttaatgtataattaaaataaatagaaatagtgtagtattatagtaatagggtacataaggcaaagtgtatttttcatttcttcctaaataaatcacaactaaccttctagtaaaatgc

SEQ ID NO: 577060 - DNA, 564 bp, Homo sapiens
gggcagctttccataaagtgtcccatgtggtcttaggaaaagcaggagtctagagaagtggctggagtctagtgagtccctgcctctgactccttcaagtgcttttccctgaccagagaaatgcaagactattcatttagtattacatggtgtgtatttggagactggattactttgtgccttaatgtgatctttatttcactgtagtgacggatggctttattctcctcactaccagaccctgagctggaaaatttggcttagtaagcctgtgttagactcactggcactgttccatccttgtggctttgcctgactcctgaccctttcctgcccactccctctggggaaggagagccagtgcagctgaagtgatggaggactttcagggtgccgacgcacacactccgcacccagcctcctcgtgctctgccagctcattttggtcaagcttctggaagacaaagtttaccttgcccgcttctgtacacacacmccccccccccccgcccacgaaactagtacagaacctgacaaactgcccacacacaaaacaatttttga

SEQ ID NO: 577061 - DNA, 543 bp, Homo sapiens
tttgggcttagtttgttcttttttagttccttgaagtgtgaagtgaggttgaggttatttatctgaagtatttctttttccttaacatagacatttatcatggtaacttccctcttaggaatgctcttgctgagtcccataaattaggtatgttgtgttgccatttctgtcttaagatatttaaaattttccttttgatttcttctttgatccattggtcaaagagcctggggctggagcttgggaggccagccttgcacgagggttcagtggcatgagcctggygctggggtccacagtgaagttggtgctcacttcactctccttcccccaggaggagtatctttcttgacactgagcttgggagacatcatgtgaaactgtccttcctaccctctttaatgcatctctacttctgtgctctacagaagcacatatttctcacctggattccttagcaattatgaagccatttttgcatgtggatggttgttcaaatggatgtatctatgaggggactagagactcctattctgccatcat

SEQ ID NO: 577062 - DNA, 533 bp, Homo sapiens
ttcctcaactcaccactatctgaattccatcttccctgcttcacagagaagctcttgtaggttcaagctaaacttcattcttgccaaattaaaggactatcaatccttgtcatgaggaattccactgttgcatttgcctttgtcgatatcttccttcacttaaaacattctcttcccttaatttccattcatacgtttgggtctgtctccatcatgataccctctttctcctctaattccttaaatgctgagacattttaaaaggcttagtcataaatcagctgcttttctctcttttytttccctcccagggcaatactattcacacaaatactgtagattatccaatacacatatgctggccattctgaaatccctagttcttattctgatctaaactgttttaaagtttaggggacataaatgtacttcatgtacatagcaagagatattatagccattttaaagaacatatttaatagattttacaatataatatattttatgcttcacatagaagtttggacttgtac

SEQ ID NO: 577063 - DNA, 533 bp, Homo sapiens
ttcctcaactcaccactatctgaattccatcttccctgcttcacagagaagctcttgtaggttcaagctaaacttcattcttgccaaattaaaggactatcaatccttgtcatgaggaattccactgttgcatttgcctttgtcgatatcttccttcacttaaaacattctcttcccttaatttccattcatacgtttgggtctgtctccatcatgataccctctttctcctctaattccttaaatgctgagacattttaaaaggcttagtcataaatcagctgcttttctctcttttttttccctcccagggcaatactattcacacaaatactgtagattatccaatacacatatgctggccattctgaaatccctagttcttattctgatctaaactgttttaaagtttaggggacataaatgtacttcatgtacatagcaagagatattatagccattttaaagaacatatttaatagattttacaatataatatattttatgcttcasatagaagtttggacttgtac

SEQ ID NO: 577064 - DNA, 543 bp, Homo sapiens
ttttatttatttatttttggtagacaccctggtttgtgtcttagagcttcttgaatctgtggttttgtgtccatcattagtttttaaaacttctcagattcttcattctttcctcttgaatggcatttcaaagatgcatatattataycttttaatattgtcctgcatttgttgaatggatgttgtattattgtttattgatttattctttctctctgcatttcaatttaggaagtttttattgacctattttcaagttcattaattctttcctcagctgtgttaaatctccttatgtgtctgtcaaaggtacatttcatttctgctattgtgttttaaatttctagtacaggcatactttatcttattgtgcttcaatttattgtacttagcagttattgcattgtttacagattgaagtattttagtaactctgtgttgagccagtttattggtgtcagttttccaacagcatgtgctcacttcatctgtgtcacattttggtaattctctcaatatttcaaaatttgtcattatcattat

SEQ ID NO: 577065 - DNA, 543 bp, Homo sapiens
ttttatttatttatttttggtagacaccctggtttgtgtcttagagcttcttgaatctgtggttttgtgtccatcattagtttttaaaacttctcagattcttcattctttcctcttgaatggcatttcaaagatgcatatattataccttttaatattgtcctgcatttgttgaatggatgttgtattattgtttattgatttattctttctctctgcatttcaatttaggaagtttttattgacctattttcaagttcattaattctttcctcagctgtgttaaatctccttatgtgtctgtcaaaggtacatttcatttctgctattgtgttttaaatttctagtacaggcatactttatcttattgtgcttcaatttattgtacttagcagttattgcattgtttacagattgaagkattttagtaactctgtgttgagccagtttattggtgtcagttttccaacagcatgtgctcacttcatctgtgtcacattttggtaattctctcaatatttcaaaatttgtcattatcattat

SEQ ID NO: 577066 - DNA, 596 bp, Homo sapiens
ttatttgtaaccatttgagggaaccaattttaaaagttgaaaatgagttgcattggcattaatagttatccaatagtctttacattgtcattaaaatacatttcactttgttaagaaaaatggcaaacatattttaaaaaatattttgatatgaatacctgagtttagcaaaagaaatgcatcatccataattttaaggttaattatagcttcttcttttttttttttttttttttcttgaaactgagtctcgttttatcacccaggctggagtgcagkggcatgatctcggctcactgcaacctccacctcccgcgttcaagcaattctcgtgcctcagcctcccaagtagctgggattacaggtgcctgccaccacacccaactaatttttgtatttttagtagagatggagtttcaccatgttgaccaggctgggctctaactcctgacctcaagtgatcagcccacctggaactcccagagtgttgggattataggcatgagccaccacaccaggccaggttgattatagcttttaaacgcaatgcaaatatactcattaaaataaaacaataatatcttattttttctcaa

SEQ ID NO: 577067 - DNA, 577 bp, Homo sapiens
atggttgtactaataaagaatgatacttcatgaactttaatgaactctaaacatgaagcaaaataaagcctttagcaataaatggattctattaggttgatgcaaaagtaattgtggtttttgtcattatttttaatggcaacatacctaacagtaatattactttttaaaaacatattccataggaagtaggtyaatggatttgaagcaatgcttttgatatcttctgacaaggcaataagaaaggccagtaattaatatgcatcttgaggaaaaaaatatatattggattatggggtagagttagagctacgacagggaacttaagtttatttgaactttctgttagttatcctaacataactaataaaacacaaaggaccagaagactacatttaaaaatattttaagctattaggttgatgcacaagtaattgtcgtttttgctagggaacaacagatgctggagaggatgtggagaaataggaacagttttacactgttggtgggactgtaaactagttcaaccattgtgaaagtcagtgtggcgattcctcagggatctagaactagaaat

SEQ ID NO: 577068 - DNA, 527 bp, Homo sapiens
tgttctaaaattatataatgatgatagtttcatgactgtgtaaacatagtaaaaatatttggattttatggcataaataggtggattttaagctatcgaaattaaatctcattttcaagtctgttacaatgatgataaaaattaatttttcagcaagaaaatarttatattctgagtcattttagatatttaattaaaacattttattatattatttcaagtttattcttcctttctactatgggttcattatgttaaaattttaagaaatgtattttttatattatttatcattttaaaattatttttgtttagaaaattgtttcactaactggttactcattagatgtatggggttcaaatacaatttttaaataacagatgaaaaaaagcagatttcagattggttaaattatttaaattctttcaaaattactctcataaaaaggatgaaactcatgctcactattgacaagagaagctgtctacaaataccacctagtgaaaaacattgttctactcacaaa

SEQ ID NO: 577069 - DNA, 634 bp, Homo sapiens
tgtcttaccctgtatgttatctgtcacaccagctttttctgattgctccatagagggataattatgttctctggttttctgatgaccctgcaccagaaacatgatgcattataatatgcttcataggataagcataccttattttattgcactttgttttatcatgctttgcagatatttgggtttttttttctcataagttgagggtttgtggcaatcttataatcaaacaaatctattaacatgatttttccaacagcaaatcatcaatttatatctttgtgacacattttgctaattttcataaagctttaatctttttcatcattgctatattccttatgttgagctgtgatcagtgatttttcatattactattgtaattgtttgtgggtgtcacaaattatgcccatataagatatcaaacttattacatattatttgtctactgagtgccccatgaaccactttttcccatctctctccctctcctctggcctattcctgagaaacgacaacgttaaaattaaaccagttaataatcttacaaagctctctaagtgttcaagtgaaagagagagtaccacgtgtttcactttaaatcaaaagtyggaaattattaagataagtgagg

SEQ ID NO: 577070 - DNA, 268 bp, Homo sapiens
taatttctcaaaaatatctagctataatttacaaatatatttacttaaaagrtaatattattaagatcttagctcaaatccaaatgagtagttggtacaaggatttctgccacactctcaaaatagtccagagttcacttgaagaaccaaggataaaaggattagctaaatgagctgtgtaaactagactgttagaaaattgtttttatgggtacagtagaattaattgattatggagctcaaagagttgtttaaatatctatatgct

SEQ ID NO: 577071 - DNA, 514 bp, Homo sapiens
tgaaaactcataaaatacattaaaaaagcatataggtcattagtaaattgttgttgctttttcacactagaattatgactacctaaaatttttaatgcatataattattaaaattttttatctttttaaaattaagttttattttttaacttttaatttcaagggtaaatgtggaggtttgttacacaggtaaacttatgtcttggggtttgttgtatggactgtttcatcttacaggtagtaagactagtaccttttagttatttttcctgatcctttctctcctcccaacccccaccctccaataagccccagtgtatgttattcctctctatatgttcatgtgttctcatsttttagcttccacttataagtgagggcatgtggtatttggatttctgttcctgtgtttgtttgctagggataatggactgcagctcacttatgttcctgaaaaatacatgatcttgttcttttttatggctacataatatttcatggtgaacatgtacca

SEQ ID NO: 577072 - DNA, 499 bp, Homo sapiens
gagccagtgtcccacacctatagcgttttgggtgggctgggaggtggggagaggaaggaggagaaycaggagagaagtgtggcaggaacgaagatgtgtttggaggaatattaagaagaaatgggtggttgagagtggaaaggaccatggaaaatcactcacttggatctcagtatgaatctattgatgaatctcatgttgaatctattaggatggtcagaaaaagaaaatctgcctcacactggctccaccaccaaagggggatggactgagtcatataccaggaatgttgacagggcagctgagaactgcctgctggacagaccacatggctgctgaacaacatctgcccaaagaaatgctttctctttctccctttcttttcttttattttcttttcttttcttttcttttcttttctttctttctttctttctttctttctttctttctttctctttcttccttccttcctttcttctttctttctttctctttc

SEQ ID NO: 577073 - DNA, 562 bp, Homo sapiens
aatctcagctcactgcaacttctgcctcccgggttcaagcaattcttgtgcctcagcctccctagtagctgggagtacaagtgcgtgccaccacacctgactaattatttattattattattattattattatttttagtagagacagggttttgccatgttggccaggctggtcmcgagctcctgacctcaggtgatccgcccgccttggcctcccaaagtgctgggattacaggcgtgagccaccgtgcctgcccaaagcttcccatttatctatcatatgtccatgacaagttacttaatctttcagctttctcatctataggattgggattccacaaacaaggctgttgtgagagtataatgagatgagaatggaagcttttagaccagtgccagatgcagatgaagctttcgttcagtgttgattattattgtattgttgtattggtattatgatctggcgtggtccaaaacaccattagtaaaacactaatgttccccagaagcctaaacacaaggaaaagactaaaaataagcctagtatgtgaatcacacagca

SEQ ID NO: 577074 - DNA, 560 bp, Homo sapiens
ggggcacccagctttttccctgggcttgagaaacattattctaaagacccagcagccccctctggaagtggttcacgaggtgtgcagaattgatgaatggtccgctgtattcgcaaggagccacgaggaaggctgattttagccaggggctgaactcatccgaatttgtcactctgcacaaggacctctaatccacagggactcacatccctccagtccattacccggataacctggccttgggcggacgaataactggagaatcgattgttttctttgacactgagcagggcttcagggatacccttaatgaacgagggaatgactgaattaacccacacaaggacgccacggctctctcgggctggggttataagtcgatgctccaagcaaaatgtgtgtgtagtccaaaccgccttggagaaatcccttasatgggccagagagaagcaggacaaatgtcaccctggcgggggtttcttgcagccaccgttacagtccccgtcacgggctttacttcatcactcagaagggccgtgacttgctcagctccagctgcc

SEQ ID NO: 577075 - DNA, 577 bp, Homo sapiens
ctacacaatcatgtagatgacatggatggatgcgagagtagtttccttccttttttgggaagtccgcgacaaaggtcaaatgttcattctttccttgtttaaaaaaaaaaaaaaagagttttttctttatagctgacaagggaggaactgtggttaatctaacagggctgacaagggaggaactgtggttaatctaacagggctattgctccatctgatttggttttggaaagtggtttttattcgtggcgttttgttgaagcatgaggattgacaatgagagggggcaaaaagaaaaacaaacccccaaaagataaaagtcacatcacaaatttaaaaagtggaacgggacttacgtgagagggctcagcaattaatacctaatcaaattacactatttattatgaaacaatcaggcacaagttactcatatggggtaaaacactcaaaagttgagtagcagtctgtccttccagagggctagttaatgtctgttaaagagcttttaatcaagattagataagcatgtgtcyggaaatgggcagaaaaggagtataaaaacagtttctatgccata

SEQ ID NO: 577076 - DNA, 598 bp, Homo sapiens
cggctcaccacaacctctgcctcccgggttcaagcaattctcctgccttatcctcccaagtagctgggattacaggcatgtgtcaccacacctcgctaattttgtatttttagtagagatgaggtttctccatgttggtcaggctggacttgaactcctgacctcaggtgatcctcccacctyggcctcccaaaatgctgggattacaggtgtgagccaccacacctggccaataaatagctattattatttcaaggtttgaggaatactagcatggtatgctatggtattgactgtattcctacacacaatacttgattagtcattcattctgtgcaactaaatcaccagaacatagtcacatattgcagctctaatactgacaaatgaaggaggaatactttttacacataagagagatgaatacccagaaataaaagacgttgtgcaattaaaacaaaccattccatgcaaataagttccttcaaaaaattcaaaaggcgaatcattttgatcattttttaatagcaatgtgaagttctgcatttatcgcctgatgaaattcctgaaatgtattgtgcaactcaaaaggagccca

SEQ ID NO: 577077 - DNA, 598 bp, Homo sapiens
cggctcaccacaacctctgcctcccgggttcaagcaattctcctgccttatcctcccaagtagctgggattacaggcatgtgtcaccacacctcgctaattttgtatttttagtagagatgaggtttctccatgttggtcaggctggacttgaactcctgacctcaggtgatcctcccacctcggcctcccaaaatgctgggattacaggtgtgagccaccacaccyggccaataaatagctattattatttcaaggtttgaggaatactagcatggtatgctatggtattgactgtattcctacacacaatacttgattagtcattcattctgtgcaactaaatcaccagaacatagtcacatattgcagctctaatactgacaaatgaaggaggaatactttttacacataagagagatgaatacccagaaataaaagacgttgtgcaattaaaacaaaccattccatgcaaataagttccttcaaaaaattcaaaaggcgaatcattttgatcattttttaatagcaatgtgaagttctgcatttatcgcctgatgaaattcctgaaatgtattgtgcaactcaaaaggagccca

SEQ ID NO: 577078 - DNA, 563 bp, Homo sapiens
catgggcaaatactcatcaaaaatatgactttctaatccatctcctggagatttacaacccattttagtatattaaagagtctgaaaagtattactctagaaatccatttatggagtcccaaattttccatacttacataatcattcatttttttctgaagataatttctaaaattatcttcccaagaacactacttggaacatgctggaatagagaatctactaatccacccaagtgtgtatgggaatacagaatgtgaaaaccattgagagaaaacttaattagccaataaggcatagtaggaagaatagtgataccaggaaaactgactaactgtattttaaaaaaatgtaagaaagcaacagcagccagttttctaacatttcttataccgaaataaatttcaggcaaatcaaaatttaaaacataaaawctaaaactatgaaagaaaaaaattcaaaatactggctaatatgactgggcacagtggctcccaactgcaaccccagcactttgggaggcaggtggatcacctgaggtcaggagttcaagaccagcctgg

SEQ ID NO: 577079 - DNA, 620 bp, Homo sapiens
gtcactgaataagcatgttctaatcaaagttgagtgttgttttataattttattttacctatttttcctttagtttagtacacagaaaaacatttttgtaaacctaagctgtaaagtcttttctgctgctttttaggagaatctaaattgagttttaaataagggaagggaaattggagtataaatatccttatgtttataatacctttgcccttgtagttggatgtaggtgtcttttacacatggggagaattgggttcaatatgttttttaaagcaaaacaaatatcacaatctaaagtcaatatatattttcgacccaaattatattcatactgatatgattgaaaaagacaatgaaaaagtcaaactttygttccattgttggaatagtatatcatgaagaaagcatttgtgggttgtctcttaagaaatttggggggttattgaaaactttttattctctataataagaatcatcatttctctataataagaatcatcatctctataattggaatcatcattcaagttgttatgggacttgagagcatattcagaacttttctctgagggtctgttatggaatacagctagagaactccatctagtcaggtttaa

SEQ ID NO: 577080 - DNA, 552 bp, Homo sapiens
atttattttatttgtcctttcttttacttcttttctaatttcttgcaacttaaggctatcttttcaggatctggtgaagcacctcttggaaatcaagataattattttctaaacaactgtatagctagtgctggatcagaagctgtaaaaatgcagaagatgcrtgaaatgctgagcccacagaactttcttggccaaaaccagatgcaaaaattaggcacaaaataatccatgtcggggcctcttccacaatctccattaaagaaagacaatttatttgcaaataaaatttagtgccattaacttatttcagagccaatatagcaacatggacaaatataacaccttttaatcttcactttctagctaatacactggcattaaaatttacaacaaaatgataatatgaagaatcaggaaatctcacttgtttaatatataaaagcaatttgccttaggaaaatcaatcaagaacaaccaaacctagcatttgtaggagccagtatgtctaaatctatttttgttaatataaaacacatagaaatttatcta

SEQ ID NO: 577081 - DNA, 437 bp, Homo sapiens
tgggggtttaggttttcacaggacatgcaatagctagtgatggactaatgccatgttttaaaggttcaactgcctttaccttgacacgggacaaactacartgtaatttacacccgagagctctctgcacctgcaattgtaccttccttggttttttggcctttccccctcccatactggtttatcatcagagcccttgtacacgaattctacttttaatattcccttctagggaaacaagactgaaccacctgctaaacaattaggactacatgagtaactcaattagaattacagccttaatccaaggaaaaagtttaatgactcactatgcaaaccatgctcactatgcagtttatattaggtgtgatgaagtgtatctcaaaacatagtctgagaatcacctgcatcagaatctttttggatggttataacaa

SEQ ID NO: 577082 - DNA, 661 bp, Homo sapiens
atagatgatatatatacatatatatcacatgatagatgatayatatacatatatatcacatgatagatgatatatatacatatatatcacatatgatagatgatatatatacatatatatcacatatgatagatgatatatatacatatatatcacatatgatagatgatacatatacatatatatcacatatgatagatgatacatatacatatatatcacatatgatagatgatacatatacatatatatcacatatgatagatgatacatatacatatatatcacatatgatagatgatacatatacatatatatcacatatgatagatgatacatatacatatatatcacatatgatagatgatacatatacatatatatcacatatgatagatagatgatacatatacatatatatcacatatgatagatgatacatatacatatatatcacatatgatagatgatacatatacatatatatcacatatgatagatgatacatatacatatatatcacatatgatagatgatacatatacatatatatcacatatgatagatagatgatacatatacatatatatcacatatgatagatgatatatatacatatatatcacatatgatagatgatacatatacatatatatcacat

SEQ ID NO: 577083 - DNA, 661 bp, Homo sapiens
atagatgatatatatacatatatatcacatgatagatgatatatatacatatatatcacatgatagatgatayatatacatatatatcacatatgatagatgatatatatacatatatatcacatatgatagatgatatatatacatatatatcacatatgatagatgatacatatacatatatatcacatatgatagatgatacatatacatatatatcacatatgatagatgatacatatacatatatatcacatatgatagatgatacatatacatatatatcacatatgatagatgatacatatacatatatatcacatatgatagatgatacatatacatatatatcacatatgatagatgatacatatacatatatatcacatatgatagatagatgatacatatacatatatatcacatatgatagatgatacatatacatatatatcacatatgatagatgatacatatacatatatatcacatatgatagatgatacatatacatatatatcacatatgatagatgatacatatacatatatatcacatatgatagatagatgatacatatacatatatatcacatatgatagatgatatatatacatatatatcacatatgatagatgatacatatacatatatatcacat

SEQ ID NO: 577084 - DNA, 622 bp, Homo sapiens
gatagatgatatatatacatatatatcacatgatagatgatatatatacatatatatcacatgatagatgatatatatacatatatatcacatatgatagatgatayatatacatatatatcacatatgatagatgatatatatacatatatatcacatatgatagatgatacatatacatatatatcacatatgatagatgatacatatacatatatatcacatatgatagatgatacatatacatatatatcacatatgatagatgatacatatacatatatatcacatatgatagatgatacatatacatatatatcacatatgatagatgatacatatacatatatatcacatatgatagatgatacatatacatatatatcacatatgatagatagatgatacatatacatatatatcacatatgatagatgatacatatacatatatatcacatatgatagatgatacatatacatatatatcacatatgatagatgatacatatacatatatatcacatatgatagatgatacatatacatatatatcacatatgatagatagatgatacatatacatatatatcacatatgatagatgatatatatacatatat

SEQ ID NO: 577085 - DNA, 661 bp, Homo sapiens
atagatgatatatatacatatatatcacatgatagatgatatatatacatatatatcacatgatagatgatatatatacatatatatcacatatgatagatgatatatatacatatatatcacatatgatagatgatatatatacatatatatcacatatgatagatgatacatatacatatatatcacatatgatagatgatacatatacatatatatcacatatgatagatgatacatatacatatatatcacatatgatagatgatacatatacatatatatcacatatgatagatgatacatatacatatatatcacatatgatagatgatacatatacatatatatcacatatgatagatgatacatatacatatatatcacatatgatagatagatgatacatatacatatatatcacatatgatagatgatacatatacatatatatcacatatgatagatgatacatatacatatatatcacatatgatagatgatacatatacatatatatcacatatgatagatgatacatatacatatatatcacatatgatakatagatgatacatatacatatatatcacatatgatagatgatatatatacatatatatcacatatgatagatgatacatatacatatatatcacat

SEQ ID NO: 577086 - DNA, 625 bp, Homo sapiens
gtttgtaaacacaccaatcagcactctgtgtctagctcaaggtttgtaaacacaccaatcagcaccctgtgtctagctcaaggtttgtaaatgcaccaatcagcactctgtatctagctaaactrgtgaggacttggagaaattttgtatctagctagaggattgtaaatgcaccaatcagcacactgtgtctagctcagggatttgtaaatgcaccaatgagcaccctgtcaaaatggaccaatcagctctctgtaaaatggaccaatcagcaggatgtgggtggggccagataagggaataaaagcaggctgccctagccagcagtagcaacacacttgggtccccttccacactgtggaagctttgttcttttgcgctttgcaataaatcttgctgctcctcactctttgggttcccactgcctttatgaactgtaatactcaccgtgaaaatctgtagcttcactcctgaggccagcgagaccatgaacccaccagaaggaagaaactccaaacacgtttgaacctcagagggaacaaactccagacacaccatctttaagaactttaacactcatcacgacgatccgcggcttcattcttgaagtcagtgagaccaagaa

SEQ ID NO: 577087 - DNA, 625 bp, Homo sapiens
gtttgtaaacacaccaatcagcactctgtgtctagctcaaggtttgtaaacacaccaatcagcaccctgtgtctagctcaaggtttgtaaatgcaccaatcagcactctgtatctagctaaactggtgaggacttggagaaattttgtatctagctagaggattgtaaatgcaccaatcagcacwctgtgtctagctcagggatttgtaaatgcaccaatgagcaccctgtcaaaatggaccaatcagctctctgtaaaatggaccaatcagcaggatgtgggtggggccagataagggaataaaagcaggctgccctagccagcagtagcaacacacttgggtccccttccacactgtggaagctttgttcttttgcgctttgcaataaatcttgctgctcctcactctttgggttcccactgcctttatgaactgtaatactcaccgtgaaaatctgtagcttcactcctgaggccagcgagaccatgaacccaccagaaggaagaaactccaaacacgtttgaacctcagagggaacaaactccagacacaccatctttaagaactttaacactcatcacgacgatccgcggcttcattcttgaagtcagtgagaccaagaa

SEQ ID NO: 577088 - DNA, 303 bp, Homo sapiens
aaagaagtttctgagaatgcttctgtctagatttgatctgaagacaatcccgtttccaacgaaatcctcaaggctaggcaaatatmctcttgcagattccagaaaaagagtgtttcaaaactgctccttcaaaacggtggttcaattctcttagttgagtacacacatctcaaataagtttctgagaatgcttctgcctagttgttacgggaagatatttccctttccaacataggcctgaaagcgctccaaatgtccacttccagatactacaaaaagagtgtttcaaacctgctctaccaa

SEQ ID NO: 577089 - DNA, 303 bp, Homo sapiens
aaagaagtttctgagaatgcttctgtctagatttgatctgaagacaatcccgtttccaacgaaatcctcaaggctaggcaaatatcctcttgcagattccagaaaaagagkgtttcaaaactgctccttcaaaacggtggttcaattctcttagttgagtacacacatctcaaataagtttctgagaatgcttctgcctagttgttacgggaagatatttccctttccaacataggcctgaaagcgctccaaatgtccacttccagatactacaaaaagagtgtttcaaacctgctctaccaa

SEQ ID NO: 577090 - DNA, 303 bp, Homo sapiens
aaagaagtttctgagaatgcttctgtctagatttgatctgaagacaatcccgtttccaacgaaatcctcaaggctaggcaaatatcctcttgcagattccagaaaaagagtgtttcaaaactgctccttcaaaacggtggttcaattctcttagttgagtacacacatctcaaataagtttctgagaatgcttctgcctagttgttacgggaagatatttccctttccaacatrggcctgaaagcgctccaaatgtccacttccagatactacaaaaagagtgtttcaaacctgctctaccaa

SEQ ID NO: 577091 - DNA, 648 bp, Homo sapiens
agccaaatatccacttgcagattccacaaaaagaccatttcaaaactgctctatcaaaagaaaggttcaactttgttagttgagtagatacagcataaacaagtttctgagaatgcttctgtccagtttttatgggaagatatttcctttttcaccttagccctgaaagcgctccaaaagtccagttccagatactacaaaaggrgtgtttcaagactgctctatgaaagggagtgttcaacttttgacttgaatgcaaacatcagaaagcagtttctcagaacgctgctgtgtgctttttatatgtattcccgcttccagcgaaatccccaaagctagccaaatatccacttgcagattccagaaaaagagtgtttcaaaactgctccttcaaaacggtggttcaattctcttagttgagtacacacatctcaaataagtttctgagaatgcttctgtctagttgttatgggaagatatttccttttccaacataggcctgaaagcgctccaaatgtccacttccagatactacaaaaggagtgattcaaacctgctctatgatagggaatgttcaactctgtgtcctgaatacaaacatcacaaagatgtttctcagaacgctgcagtctgcaatttgtatgaatt

SEQ ID NO: 577092 - DNA, 389 bp, Homo sapiens
aggagcagttttgaaacactctttttctggaatctgcaagtggatatttggctagctttggggatttcgctggaagcgggaatacatataaaaagcacacagcagcgttctgagaaactgctttctgatgtttgcattcaagtcaaaagttgaacactccctttcatagagcagtcctgaaacacyccttttgtagtatctggaactggacttttggagcgctttcagggctaaggtgaaaaaggaaatatcttcccataaaaactggacagaagcattctcagaaacttgtttatgctgtatctactcaactaacaaagttgaacctttcttttgatagagcagttttgaaatggtctttttgtggaatctgcaagtggatatttggc

SEQ ID NO: 577093 - DNA, 402 bp, Homo sapiens
aggagcagttttgaaacactctttttctggaatctgcaagtggatatttggctagctttggggatttcgctggaagcgggaatacatataaaaagcacacagcagcgttctgagaaactgctttctgatgtttgcattcaagtcaaaagttgaacactccctttcatagagcagtcctgaaacactccttttgtagtatctggaactggacttttggagcgctttcagggctaaggtgaaaaaggaaatatcttcccataaaaactggacagaagcattctcagaaacttgtttatgctgtatctactcaactaacaaagttgaacctttcttttgatagagcagttttgaaatgstctttttgtggaatctgcaagtggatatttggctagttttgaggat

SEQ ID NO: 577094 - DNA, 589 bp, Homo sapiens
aacttccagatgaaggatcaggcagcaatatttgctgttctgcagcctctgctggtgatacccaggcaaacagggtctggagtggacctccagcaaacttcaacagacctgcagctgaggggtctgactgttaaaaggaaaactaacaaacagaaaggaatagaatcgatatcaatmaaaagcacatccacaccaaaaccccatctgtaggtcaccaacatcaaagaccaaaggtagataaaaccacaaagatgaggagaaaccagagcagaaaagctgaaaattccaaaaaacagagcacttcttctcctccaagggatcacagctcctcaccagcaagggaacaaaactggacggagaatgagtttgacaaggtgacagaagtaggcttcagaaggtcagtaataacaaacttctctgagctaaagaagcatgttctaaaccaacataaagaagataaaaaccttgaaagaaggttagatgaatggctaactagaataaacagtgtagagaagaccttaaattacctcatggagctgaaaaccatggcacaagaacttcgtgacacatacacaagcatcaatagctg

SEQ ID NO: 577095 - DNA, 589 bp, Homo sapiens
aacttccagatgaaggatcaggcagcaatatttgctgttctgcagcctctgctggtgatacccaggcaaacagggtctggagtggacctccagcaaacttcaacagacctgcagctgaggggtctgactgttaaaaggaaaactaacaaacagaaaggaatagaatcgatatcaatcaaaagsacatccacaccaaaaccccatctgtaggtcaccaacatcaaagaccaaaggtagataaaaccacaaagatgaggagaaaccagagcagaaaagctgaaaattccaaaaaacagagcacttcttctcctccaagggatcacagctcctcaccagcaagggaacaaaactggacggagaatgagtttgacaaggtgacagaagtaggcttcagaaggtcagtaataacaaacttctctgagctaaagaagcatgttctaaaccaacataaagaagataaaaaccttgaaagaaggttagatgaatggctaactagaataaacagtgtagagaagaccttaaattacctcatggagctgaaaaccatggcacaagaacttcgtgacacatacacaagcatcaatagctg

SEQ ID NO: 577096 - DNA, 428 bp, Homo sapiens
ataggaaaaagtatttgttagttaatgtgaaaaagtacagacacacgtagaatttgtagaaaagaggaattgtaaatccagttataaattttatgaatgtcaaatgtgtcaagtatttttcctgaaatcratagttttgttcttatttggagtttcagatgattttgccatttatagtaggtataatttcactcttagatttctttcctttcataggaacttcaaacatcgctcatttgggtcacttctcaatgtaacaagcattttaacaatatttttattaacaattttctagaaattttgagatcctcaatcactaccttgtgccaattaaggaaatatttggcttttcaacagttcagctggtctgagctaattctgatatatggtggggtgggggagtgctacttaaatgataataaattctg

SEQ ID NO: 577097 - DNA, 428 bp, Homo sapiens
ataggaaaaagtatttgttagttaatgtgaaaaagtacagacacacgtagaatttgtagaaaagaggaattgtaaatccagttataaattttatgaatgtcaaatgtgtcaagtatttttcctgaaatcgatagttttgttcttatttggagtttcagatgattttgccatttatagtaggtataatttcactcttrgatttctttcctttcataggaacttcaaacatcgctcatttgggtcacttctcaatgtaacaagcattttaacaatatttttattaacaattttctagaaattttgagatcctcaatcactaccttgtgccaattaaggaaatatttggcttttcaacagttcagctggtctgagctaattctgatatatggtggggtgggggagtgctacttaaatgataataaattctg

SEQ ID NO: 577098 - DNA, 422 bp, Homo sapiens
ttagtcctaatggaagtaactgagccatgaacgtcaacttcccctttctcagataacccatataaagttatgtttctcaaaacaaaatcaaaattsaactatcatatgatcaagcaataccactggatatatatcctactgagtatcaatccaaaggaaatgaaatcagtatgtctaagaaatatctgcacttccatgttaattaaaggtaaccattctataatgtaattctataatgtaaacatattttcaaacattattattcaccacaaatatacacaattctgatttttcacttaaaataaattataaaaaaagaaaaacatatattgcattatttttgtttgtgctacaaaccaaaaagacagcaatgaaggaggtagctgcaatcttagccttcgtagaccttataatttaactac

SEQ ID NO: 577099 - DNA, 604 bp, Homo sapiens
taaagcttccacatatgagtaagaacacatggcagttagttttctggtcctggcttatttcatgtaacataatatcctccagtttcattcttgttgctgtgaatggcaggatttcattcttcttcttggctgaatagttttccgttgtgtatatacaccacagttttaaatccattcctatgttttggccacttgggttaattccatatcttggctactgtgaatagtactgcaataaacatgcaataaacacggggatggagatatctctttgatatcctgattgcctttcctttgtataaatgcccagtagtaggattgctggatcacatggtagttctatttgtagttttctgaaagacatccatactgttctccatactagtttaccgtatgtttattagttcactgtagttgtagttgactgctgtagtttacattcccaccgagagtgcatgagttctcttttttccacatctttaccagcatttgctattttttgtcttttttgataatagccattctaactggagtgagatgatatttcattatartttttgtttgcatttccctgatgattagcaatattaaacttttaaaaata

SEQ ID NO: 577100 - DNA, 623 bp, Homo sapiens
gaattcagcgatatttctcctatttgcttttgaaagaagagaactatggctctgttctgcctggctctcakgcagccagacttaatggttatctcccttgttccctgaacatcactgttatcctgttcttttttcaaggtgcccagatttcatattgtttaaacacacatgctttatgaaaaatttgtgcagttaacgccatcatcacagggtcctgaggcaacatacatcctcagcttacgaagatgatgggattaagagattaaagtaaagacaggcataggaaatcacaagagtattgattgggggaagtgacaaatgtccatgaaatcttcacagtttatgttcagagattgcaataaagacaggcgtaagaaattacaaaagtattaatttggagaactaataaatgtccatgaaatcttcacaatttatgttcttctgccatggcttcagctggtccttccattcagggtccctgtcttcccacaacaggttaggaagctggaacaggacacggtttgggcagcaaagctgttgtgtgctgataaccttgaaatctgggccatattcagtgttgagctagagttggcccatacatattcctgagtgctgattggtaa

SEQ ID NO: 577101 - DNA, 623 bp, Homo sapiens
gaattcagcgatatttctcctatttgcttttgaaagaagagaactatggctctgttctgcctggctctcaggcagccagacttaatggttatctcccttgttccctgaacatcactgttatcctgttcttttttcaaggtgcccagatttcatattgtttaaacacacatgctttatgaaaaatttgtgcagttaacgccatcatcacagggtcctgaggcaacatacatcctcagcttacgaagatgatgggattaagagattaaagtaaagacaggcataggaaatcacaagagtattgattgggggaagtgayaaatgtccatgaaatcttcacagtttatgttcagagattgcaataaagacaggcgtaagaaattacaaaagtattaatttggagaactaataaatgtccatgaaatcttcacaatttatgttcttctgccatggcttcagctggtccttccattcagggtccctgtcttcccacaacaggttaggaagctggaacaggacacggtttgggcagcaaagctgttgtgtgctgataaccttgaaatctgggccatattcagtgttgagctagagttggcccatacatattcctgagtgctgattggtaa

SEQ ID NO: 577102 - DNA, 623 bp, Homo sapiens
gaattcagcgatatttctcctatttgcttttgaaagaagagaactatggctctgttctgcctggctctcaggcagccagacttaatggttatctcccttgttccctgaacatcactgttatcctgttcttttttcaaggtgcccagatttcatattgtttaaacacacatgctttatgaaaaatttgtgcagttaacgccatcatcacagggtcctgaggcaacatacatcctcagcttacgaagatgatgggattaagagattaaagtaaagacaggcataggaaatcacaagagtattgattgggggaagtgacaaatgtccatgaaatcttcacagtttatgttcagagattgcaataaagacaggcgtaagaaattacaaaagtattaatttggagaactaataaatgtccatgaaatcttcacaatttatgttcttctgccatggcttcagctggtccytccattcagggtccctgtcttcccacaacaggttaggaagctggaacaggacacggtttgggcagcaaagctgttgtgtgctgataaccttgaaatctgggccatattcagtgttgagctagagttggcccatacatattcctgagtgctgattggtaa

SEQ ID NO: 577103 - DNA, 623 bp, Homo sapiens
gaattcagcgatatttctcctatttgcttttgaaagaagagaactatggctctgttctgcctggctctcaggcagccagacttaatggttatctcccttgttccctgaacatcactgttatcctgttcttttttcaaggtgcccagatttcatattgtttaaacacacatgctttatgaaaaatttgtgcagttaacgccatcatcacagggtcctgaggcaacatacatcctcagcttacgaagatgatgggattaagagattaaagtaaagacaggcataggaaatcacaagagtattgattgggggaagtgacaaatgtccatgaaatcttcacagtttatgttcagagattgcaataaagacaggcgtaagaaattacaaaagtattaatttggagaactaataaatgtccatgaaatcttcacaatttatgttcttctgccatggcttcagctggtccttccattcagggtccctgtcttcccacaacaggttaggaagctggaacaggacackgtttgggcagcaaagctgttgtgtgctgataaccttgaaatctgggccatattcagtgttgagctagagttggcccatacatattcctgagtgctgattggtaa

SEQ ID NO: 577104 - DNA, 569 bp, Homo sapiens
tgagctgagcaagtccacttatatgcggattgttttcaatcaaatgaggatcgaaaatacagtattggagggatgcacaacccccgtatatggagggcagaattttcttctatgagggttccgcagggccaactgtgggacttgagtatgcttagattttggcatacgcagggggcctggaaccaatttcccgcttatactgaaggacaactgtatattcttaatatatctaatactcatttaacatattataatggttattttaaatatattttaatagtagtgctcatttaattggaaaacatatatctttgtttctcaattttcttcattctactttgtttttgcaaatcatccacattgccttcatttcttctgactgctacaaaatgttccattgcatgcagctagcattttactcattcactctaaggacagacataaaggttaccacctgttctttgctgccatcmttgccaatatagttggaaattcctaatatatctttctttatggagctatgtgctaatttttctgaggtatatacccaggatggaattgctagagta

SEQ ID NO: 577105 - DNA, 524 bp, Homo sapiens
agaacatcccgattagatgcctacaattgactcagatctggagcccacaccgggaatggactcacccagtcctccctcctccccatccagcytcggtgaggctcatcctgagaggtcttccaagttcgaagactttttctgccgatatgtgtgaccatcgatcgggatgactgcgactggggaagggagcaggaggccaggcctgttccctttgggggaaaggggaggggatccagtttgcagggctagggtgggagcgggcaggcggggtgtgcgccccggccgcttccagtcggcgcgggagctgggacggaagctgtgcgccctcggagcccctgcagtcccctcaccgggcgctcccaaacagcccgcggggcgctgggcgcggggccaggaaatccggcgccggcccttgaagcgcacccgggccgggagggggcggcgggggcggcgggggcgggctgggcgctggcaccacgaccgcccgctgagcaacgtgactgcgcgggctcgggtccccacca

SEQ ID NO: 577106 - DNA, 509 bp, Homo sapiens
gatctcaatgtaaaagctaaaaatagaaagctcttaggtagctggatgtggtggcatgcacctgtagtcccagctagctgggggcctgaggagggcagattgcttgagccctggaagtcaaggctgcaatgagctgtgttcatgccactgcattccagcctgggtggcagcgggaaactgtctcaaaaaaaaaaaaaaaatatatatatatatacacacacacacacacacacacacacacacacatataaatgacataaaataaagctcttagaaraaaataaagggtaaatcttcatggcctcagattaggcaataatttgttaaatctgacccaaaagtacaagcaaaaacaaacaaacaaaatagacaaattggatttcatcaaaattaaaacttttacgctgcaaaggacaccatcaagaaagcaaaaaacccatagaatgggagaaaatacttgcaaattatatatctgataagaaacttatatctacaatatacaaagaaca

SEQ ID NO: 577107 - DNA, 480 bp, Homo sapiens
ttccacatttaaatattgaatacttcaaaatcctatttggaaaaaagtacaggtcacagatcctacaatcctactgtggcttgtgtctctttttccgaggcmcatcctcaaccttggaaaaataaacttttaaattgattgagacttgcctcagtgattttctttggtgtatactctgtatcacttgaatactttccaattgaagacatgctttataatccagagtatggactgttttggccagatgttttctatatactggaaagaaatgtgtattctgctgttgttgaatggcatgttctataaatctcaaatacatcaagttggttgatagtcttgatgtcttctatatctctgtggattttccatttgttctagtgattattgagagaaaggtattgatatatctgcctataattctggatttatctacttctctttggagatttctccatttttgcttcatgtattttgaagccc

SEQ ID NO: 577108 - DNA, 480 bp, Homo sapiens
ttccacatttaaatattgaatacttcaaaatcctatttggaaaaaagtacaggtcacagatcctacaatcctactgtggcttgtgtctctttttccgaggcccatcctcaaccttggaaaaataaacttttaaattgattgagacttgcctcagtgattttctttggtgtatactctgtatcacttgaatactttccaaktgaagacatgctttataatccagagtatggactgttttggccagatgttttctatatactggaaagaaatgtgtattctgctgttgttgaatggcatgttctataaatctcaaatacatcaagttggttgatagtcttgatgtcttctatatctctgtggattttccatttgttctagtgattattgagagaaaggtattgatatatctgcctataattctggatttatctacttctctttggagatttctccatttttgcttcatgtattttgaagccc

SEQ ID NO: 577109 - DNA, 480 bp, Homo sapiens
ttccacatttaaatattgaatacttcaaaatcctatttggaaaaaagtacaggtcacagatcctacaatcctactgtggcttgtgtctctttttccgaggcccatcctcaaccttggaaaaataaacttttaaattgattgagacttgcctcagtgattttctttggtgtatactctgtatcacttgaatactttccaattgaagacatgctttataatccagagtatggactgttttggccagatgttttctatatactggaaagaaatgtgtattctgctgttgttgaatggcatgttctataaatctcaawtacatcaagttggttgatagtcttgatgtcttctatatctctgtggattttccatttgttctagtgattattgagagaaaggtattgatatatctgcctataattctggatttatctacttctctttggagatttctccatttttgcttcatgtattttgaagccc

SEQ ID NO: 577110 - DNA, 571 bp, Homo sapiens
gatttacagtgtttaatatatgttttttggtaactcggcctctatacaaattgtgaggtataacaagcaagcagtgctattacattttacacaacaggcaattgaggttgagtgagtgaatttatcctagttctacagttttctttatacaaggctatatatcaattagtgtttgctcaacagtaactgaacctgaaatgtgtggccaaatggtctgtgaaaaggtctcacaatgtgtttcctccaggactaaattactatcataactaaatggaaggcatgtttctatcatctcattcaacgttttgacaccaaaatgtggttctgcttaattttaataatttcatcaaaaacatttataaaacatattctacattgaatgtcaagcaatatgaccctgattaagataaataagacttgactttgtacattccttattcattttcaaaacacttttggtgttttactgtatgccaggtattaccatatattgggaggaaagactccaaaaaaaatacatagtccatgccctcaagcagcatcaaarcaactgaaacagagctgcaaaggc

SEQ ID NO: 577111 - DNA, 494 bp, Homo sapiens
ttttgctgaaagcacaaagagtttcagggggaasgtatcaccttttaaaacaaatgcttaatttctttataaaagacattgagtttttcatgtgagaaacttcttcaaggggcaggggcaatttaccttcaagcactgggagttaggccatttgaggttacatgagactactcatggcctctgagagtggagaccttggaagagctgagaatattttaggaagctctggaagaaaatcctagagacaattactttggctaacacatgaaaagctaggattccagacctagctttttttctttgtttgtttcttgaggaaatgaaaagtgctagctcacaatttacctaaatcttgagctttactgtttctgtgataaacacagagggttgctatttaaaagtgactttttctccctaccaatatccacaggagaatggctgaggatgatggcatgggggactacggctataagttattcccacaatgaacctca

SEQ ID NO: 577112 - DNA, 299 bp, Homo sapiens
acatgattgttatcactacatattactttatgtttggacacttagtgctcacgaaattaactgaatcatttgtatcaaggcacaggaagaattattgtactaaaaaatagaaaaataaaatcaagtaaaatagaataaagtctgtggacgtccagttacacaaaactagtaacaagtaacatgaaacaaccaacggatgtaagtttcagagtatttaatggcactcactacatagtagttctgtactataaragcaaggaaaatcctaggttgtcaaaagtgcattcatctaattttca

SEQ ID NO: 577113 - DNA, 299 bp, Homo sapiens
acatgattgttatcactacatattactttatgtttggacacttagtgctcacgaaattaactgaatcatttgtatcaaggcacaggaagaattattgtactaaaaaatagaaaaataaaatcaagtaaaatagaataaagtctgtggacgtccagttacacaaaactagtaacaagtaacatgaaacaaccaacggatgtaagtttcagagtatttaatggcactcactacatagtagttctgtactataagagcaagraaaatcctaggttgtcaaaagtgcattcatctaattttca

SEQ ID NO: 577114 - DNA, 584 bp, Homo sapiens
taaaatataaaatgatcgtttcactgaacttttgtcaaaggctaaatttgatatagaacatattccccaaaagaaaaaaaaaatagctgtatatgtttagtcacaatgtaattatgatcagctgagctgaggaggtaaggagccagaggcttggtaagcagaaaccagtaggacactgttatcagaggcagggtaggaggggcactccaaagttcacagaaactgccagcagcctggagagttataggaagtgaaagatcctgggtgagatgggtagaaggagttcgtggccccagmggcaaataaaagtactgaagcagcttgattgcctagtcttggttgtctttgtttgttccacccctggtgagagttcaccctgagagaacctgtacagcaggtgagaataactgaaaacagctggctgtcagtgagggcaagggtggagcagatgctgttttctggtagagattttttttttttttttttttttttctgacccctgggcaagtaacatgtagttgactcttttagccagacattgtaatggactttcctgtaatcccatgcgtgcaggctgccatttt

SEQ ID NO: 577115 - DNA, 432 bp, Homo sapiens
tttgtctgtctttgtactaataycatgcttttttgattactgtattcttatagtatagtttgaaatcaggtaatgtgatgcctccagctttgttgtttttgcttaggattgacttggctatttgggctcttttttggtttcatatgaatttaggattgccttggctatttgagctattttttggttccatgtgaattttcagaactatggttccctagttttttttctgattgtgtgatgaatgttgtaggtagtttgataggaatagtgttgaatctgtacattgatttgggcaatatgggtgttttaacaatattgactcttcctatcgatgaggatggagtgtttttccatttgtttgtgtcatcactgatttctttgagcagtgttttataattatcattgtagggatctttcaccttcctaattagc

SEQ ID NO: 577116 - DNA, 646 bp, Homo sapiens
atccaatgaaagcagccataacaacataacaaaatgcccttattggcttgaaattaagctttgttttttcccccctttgaattcatttgactcttgatagctaatagcacttgagagttaatgagtatttggattcatacaaattaggacatcttggtaaaacagcaaagcatgaagaatttttaaaaatagttctcctaagtttctttttagcatgttaaagcagaaggaagtctgagggcagatttcccagttaatgactagatatcaaggctttccctagaagctaaaggcatgttaatgtgtttttttcaatcagcatatttcttggtttattgtttatctccatgcagctgcattaaaaaagttcattgagaagatctacaaataatgttcctacaaaccacacagacagtggtgccagaccagtacaacttttcactaggaaaacagctaaagcatttcagtcctgacaaaacatctgaaaaactctactctgggctcattttaaagttcatcttttgcaagagccacaratgcttccacaagagggttatatatttgatcagtccatttggagaattacatcaaactctactataatcttttttcaaaaaaactttttccttcctacttgggttttaat

SEQ ID NO: 577117 - DNA, 567 bp, Homo sapiens
tggaaggagtttgcctgatttcagatgagactttggatttgagactttggagttaatgctgaaatgaatgaagactttggagagcctgtggggaagccatgatcatattttgcaatgtgaaaagaacatgagatttgggaggggccgaggggcgaatgatatggtttggatctgtgtccccacccaaatctcatgtcaaattgtaatctccaatgttggaggtggggtgtggtgggaggtgattgaatcatgggggtggtttctcattaatggtttagcaccattcccctagtgctgttctcatgatagtgagttctcatgagatctggttgtttaaatgtgggtagcacctcccmcttctctcttcctcctgctcacgtcatgtaagatgtgcctgcttctctttcaccttctgccatgattgtgaatttcttgaggcctctccagaaggagaagttgctatggttcctgtacagcctgcaaaactgtgccaattaaacctcttttatttgtaaattacctagcctcagatgtttctttacagcagtgcaagaatggactaataca

SEQ ID NO: 577118 - DNA, 367 bp, Homo sapiens
ggaaaactgccttagggctggaggtgggacacgcgggcagcagtactgctgtttaaggcattgagatgtttatgtgtatgcatatctaaagcacagcacttaattctttaccttgtctatgatgcagagacctttgttcacgtgtttatctgctgaccttctstccactattatcctatgaccctgccacatccccctctccgagaaacacccaagaacgatcactaaatactaagggaactcagaggccggcgggatcctccgtatgctgaacgctggtcccctgggcccccgtatttctttctctatactttgtctccgtgtctctttcttttccaagtctctcgttccacctaacgagaaacac

SEQ ID NO: 577119 - DNA, 367 bp, Homo sapiens
ggaaaactgccttagggctggaggtgggacacgcgggcagcagtactgctgtttaaggcattgagatgtttatgtgtatgcatatctaaagcacagcacttaattctttaccttgtctatgatgcagagacctttgttcacgtgtttatctgctgaccttctgtccactattatcctatgaccctgccacatccccctctccgagaaacacccaagaacgatcamtaaatactaagggaactcagaggccggcgggatcctccgtatgctgaacgctggtcccctgggcccccgtatttctttctctatactttgtctccgtgtctctttcttttccaagtctctcgttccacctaacgagaaacac

SEQ ID NO: 577120 - DNA, 469 bp, Homo sapiens
aagatccttcattgctactttgcctaatgcctaattataaattagaatacaacaaaaccctcaggttttctttgcaaagaaacttgactcatatgctgagtccacaacctccaaaatgcaaacttggcttcctaatgcaccggccagaatcactggagaagccaccccagagcagtaaactgaagcaactctttctttaccaggaattttatttttcctggctttcttcatttaacaaaataataaaatgattgctaacctccaattttcttctgttccacaaaaactttcctaccatggagggagctttaaaaacgtgcactatgaggccgggygcggtggctcacgcctgtaatcccagcactttgggaggccgaggcgggcggatcaagaggtcaggagatcaagaccatcctggctaacacggtgaaaccccatctctactaaaaatacaaaaaattagccgggc

SEQ ID NO: 577121 - DNA, 621 bp, Homo sapiens
tggcagtggcaatagaaagaaacggatggatttgagatacactttggagataaaacgaacaacatcattttggaaggtaaggaagacaaatataatatgtgtcctagctctccggcatgaagccacygggtagacagtgaaccatttactgagatggaaaagactgaggaaacaaaaaaaatggaggaaaacagagcttcattttgcacacgttatatttgaggtacctctcaaacatctgagggaagacatcaagtaggtagttgaataagcagttcatacctcagaagggagtcctgagctagatatgcaaacgtggaagttttaaatatagagatgaggtgaggtaatgcattgaatatattaaatgaaataatacatagaaagtagcagacactctatttggcatagtagcaaacatgtgctcaaaaacaatattagctgttggatgctgcttgtggttaggacattcttcacacagtgtaacttaagtttttttcactaaggataaatggcttttatattattttcttctcaatagaaatattaacaaccagtaggtgttaaaagttactcacgtatttgaaagcttatttagaatgttttacatattgatatgca

SEQ ID NO: 577122 - DNA, 569 bp, Homo sapiens
tttgctgctccttctccctaccccactccactctccaccctaggaaaccttttcatttgaatattttcaataagggcaagatcaccagcttacaagatgtcagaaagtaactttctgctctaaaaaaatggggccctcacaaaagtagtgagtagaggccctggcaggatttggaatttggtgtatttaatatgaagtttgacattattatgtaataacaaacttgatggcttttccccgtttcagagagctctaaatcctctaagacaaaactagtaccagagcactaagaaatcttgtttttgttcaaaactctagcccagaaaggcaccagttagcttttaaaagtatgtgctctctcctctttactaactgcggkgttagtggataattgagctaaggtttatacctgtattttccccctatttcaagatttgttgttggatctgcaaatgattccaatcaaatacaactgtacttggaaaaaaatcatccgttgttaagactttacattccttagttgcagaagtagttttttttcctgcacaataccttttaaaaaatgaata

SEQ ID NO: 577123 - DNA, 458 bp, Homo sapiens
ctctgcctacatcagtaagagtatgctaatttataaaattaaatatttaatcttagttcacttgtaaaccaaaatcaagtaaagtctgaatccaccttctattgctttgggggtttgagtctatattctaggattcatttaatagtttcatttctctaagcatcaagcaaaacagttaaaattacaaaacagaaacataaagttcayctcatcatgtagtatggatcactctgttattctttatctagaccttcaaatactttatgtaaaatgtttctatacaaaaggaaacacaggattagttcctcctctaatgcttctaaagagctctaccatggaaagctctctcccttccattttgcaagtctcaacaagtctgctgctgagtcagaacctccttttttccctgatgtaagaactatttctcccttgaaaattcataaagcttaggaataaat

SEQ ID NO: 577124 - DNA, 632 bp, Homo sapiens
agagaaagggaacctctctttcccagtagttttaactaaagttccagaattgattcccattagccttgccaggttcatcatcaccctggccatgcctggctcttggccagtctctggagctgagaggtgggctcagtcccatctgaaacacatgaatggaaattggaagagagatagctccccaaagggaaatcaggtggtgttaccagaagaaagaatagatactagatgagcaaaaataaaagatgtccactataatgcctcaatgttattggaaatctttacagcaattgcacattacttcatgaaaaaaaaattttttttttaatttgtttttttattgataatttttgggtgtttctcacagagggggatttggcagggtcatgggacaatagtggagggaaggtcagcagataaacaagtgaacaaaggtctctggttttcctaggcagaggaccctgcggccttccgcagtgtttgtgtccctgattacttgagattagggaktggtgatgactcttaacgagcatgctgccttcaagcatctgtttaacaaagcacatcttgcaccgcccttaatccatttaaccctgagtggacacagcacatgtttcagagagcacagggtt

SEQ ID NO: 577125 - DNA, 610 bp, Homo sapiens
acaggcatgagcacggacccagcttttttttttttttttttttttttgagatggagcctcgctctgttgcccagctggcatgatcttggctcactgcaacctccacctccagggatcaagagattctcctgtctcaatctcccaagcagctgggattacaggcgctcgccaacaygcttggctaatttttgtatttttagtagagacaaggtttcaccatcttggccaggctggtctgaaacttctgacctcaagtgatccacccgccttggcctcccaaagtgatgggattacaggcccaagccatcgttcccagccagaatgactattattttaaaaaaggaaaataacaagtgttggcgaagatgctgagaaactagaacccttgtacgttgctaggcgaatataaaatgatgcacatgctgtaaaacagtttgccagttcctcaaaaagttaaacatagaattaccatatggtccagcaattctacacctagatatattccccaaagaattaaaaacagggacacaaacaaatactgtacactgatgttcactgcagcattattcacatttgccaaaagacgaaaataacccaaatgtccactgac

SEQ ID NO: 577126 - DNA, 610 bp, Homo sapiens
acaggcatgagcacggacccagcttttttttttttttttttttttttgagatggagcctcgctctgttgcccagctggcatgatcttggctcactgcaacctccacctccagggatcaagagattctcctgtctcaatctcccaagcagctgggattacaggcgctcgccaacacgcttggctaatttttgtatttttagtagagacaaggtttcaccatcttggccaggctggtctgaaacttctgacctcaagtgatccacccgccttggcctcccaaagtgatgggattacaggcccaagccatcgttcccagccagaatgactattattttaaaaaaggaaaataacaagtgttggcgaagatgctgagaaactagaacccttgtacgttgctaggygaatataaaatgatgcacatgctgtaaaacagtttgccagttcctcaaaaagttaaacatagaattaccatatggtccagcaattctacacctagatatattccccaaagaattaaaaacagggacacaaacaaatactgtacactgatgttcactgcagcattattcacatttgccaaaagacgaaaataacccaaatgtccactgac

SEQ ID NO: 577127 - DNA, 537 bp, Homo sapiens
gatttggatataaaggcttttggctctacttagaataaaaacctgagacaaatctgatactgtcctttcatctagtgaacttgaaggaaaaaagaaggcactagaaacccccaaattacccccattaatcctacagatatcaaaacattctacctcctcccactatgtgtactaacaagacaatggagcacactggtcaagcgtcacagagtaaatattttttattcttccacattctcaagaaaccaacccataggacttgttytaaagtataagacacacttcccttaaaagctgcatggaagattcctgcatacattgggaactgaaaacaggcacatgttcattcacgaactcaaagccttttaagatttttttaatggaaaggaacatgcacacctgctgtctctttacagcttttggcatcttaacgtctacacttgaagagcattaaaacaaagggatctagaactagaaataccattttgacccagccattctattactgggtatatacccaaaggattataaaacatg

SEQ ID NO: 577128 - DNA, 417 bp, Homo sapiens
cattataatagctagttctttacactctcattgctgttagcctacattttcataactttatgcatatctttcttatgatactatcctttctacccattttaaaaagagaagaaaggtttgggaaagtgttagagactaactagatggctcataaaaactcctctgcagttagtaattcaaacttctgtgttaattggatctttgttgttctgttttaatcaactaaggataggacttttacattttacttaaactgttataatactataaataaataatactaatactataaataaaatcttttcactggagaaaagtgcaatcaataaawatgttaggtatccatcacagtaaacttcttcttttttttttttttttttgagatggagtctctgtcacccaggctggagtgcagtg

SEQ ID NO: 577129 - DNA, 552 bp, Homo sapiens
atatgcacatacatacataggcacatacataaacatacacacatacacaatggaatactattcagccataaaaaagaattatgtcatttgcagaaacatagaactggaagtcattatattatatgaaataagccaggcacagaaagrtaagtaccacatgttctcactaataagtgggaggtaaaaaagtagatctcatagagataagagagttgattagtgcttaccagggactagaatgggtagggggaagggcggtgaaaagcagttatttaacaggtacaaaaatacagttaataccagaaatgagacctagtgttttatagtacagtagaataaccatacttaacaataacatattgtatagtacaaaatagctagaaggttggtatgcaaaaagatcttaaaaagaaaaggaaaaaaatggaacagaataaagaaaaatgtttgaggtgattgatatccccattaccctgatttgatcattacacattgtatgcatgtatcaaaatatcacatgcacccccaaaatatgtacaactgttatgtatc

SEQ ID NO: 577130 - DNA, 552 bp, Homo sapiens
atatgcacatacatacataggcacatacataaacatacacacatacacaatggaatactattcagccataaaaaagaattatgtcatttgcagaaacatagaactggaagtcattatattatatgaaataagccaggcacagaaagataagtaccacatgttctcactaataagtgggaggtaaaaaagtagatctcatagagataagagagttgattagtgcttaccagggactagaatgggtagggggaagggcggtgaaaagcagttatttaacaggtacaaaaatacagttaataccagaaatgagacctagtgttttatagtacagtagaataaccatacttaacaataacatattgtatagtacaaaatagctagaaggttggtatgcaaaaagatcttaaaaagaaaaggaaaaaaatggaacagaataaagaaaaatgtttgaggtgattgatatccccattaccctgatttgatcattacacattgtatgcatgtatcaaaatatcacatgcamccccaaaatatgtacaactgttatgtatc

SEQ ID NO: 577131 - DNA, 298 bp, Homo sapiens
atgtatgtgcatgtatatgtacatgtatgtatgcatgtatatgtatacacaggtgatattaaaaagtatttaacaaataaaattacatgaaagtctaccagtcaaagtggatgtcagccataaacaaccaatatcactgtrcagggacacaggagctgaatataagcctatatgggccttatatcatgggaacaaaaaaattattaacaggtgaatttccaaagattcctgcttcaactctcccagtgaagatggggaggggagtggagaacagagagagcacaagaattggatgaat

SEQ ID NO: 577132 - DNA, 609 bp, Homo sapiens
accacacaacactggagaaaaaaaaatcttaccagccaaatgtgaagttttaaaagggagtaatttattcttctgattgtccaaaggcaatgtttatagaggaatcaatgagaaggtaaaatattaggtatataataaactgcaaatcatatgtaaaattcaaaaggataggggagatgttatttatttatttatttattttttaaacagagtctggctctgttgcccaggctggaggtcagtggcaggatctcagctcactgcaacccctgcctccagggttcaracaattctcgtgcctcagcctcccaagtagctgggactacaggcatgcgccaccacgcctagataatttttgtatttttagtagagatgaggctttggcgtgttgcccaggctgatctcaaactcctgagctcaggcagtctgcctaaatatggatataggtaagattgaagtagagtttcttataaaaaatatttcataatattttatttaaagataccaattttctatggagtcaatgtttcctataagaatacatttaaactttcatatagataataagatagattatctttactgagtgatttttcttggttccttgat

SEQ ID NO: 577133 - DNA, 391 bp, Homo sapiens
gatgtctcaaaaaaaaaaaatgatctagaaatttggataataaaatctttgatttaaaatttatatcaagattctccttgtgatcaatgtattatttcttccagtattggtgaaaagaaacctaatttttttattaatttttttatcagtgggagtctttagaattttcctttatttcttgaatttttcaaagtttgcattgttytcttataaatactacccagaataatatccatagggacattatttttctttcatcagaataattagtatctcccttctatttatttatttcacttcttcttatttcatattgtatcacctggattcatctgtcatttctctcatttttttcttccacaattagcctatctttaatttttctttcatt

SEQ ID NO: 577134 - DNA, 445 bp, Homo sapiens
gaaattacctcagaaaaggaccattgcaaaatattttcactggggaattgttttaaacttccaaatgaggcgggagtgttccctgaccctcttgtgggacttgcgatggtgggagggatggcttgttttgctcaccactgagttcaaaccccttgtgggagggagaggatacaggtgagtggatgcaggagctggggtgagtgcccttaratgcatttatgaaccattcttgtactggcccacagcagtgtctagtggttgaccgtgacctctagagccccagagggtgtgtgtttcaaacaatgcccttttagcagtggcagtccatagatggctaagtgttaaccagctcagtggagagtaagggtgatatataccctaccctcttggtacctgggttcttgtctggtatccaggaagtatcaggtcatgggaatttgaagga

SEQ ID NO: 577135 - DNA, 228 bp, Homo sapiens
cattctgcctgttggctaggaacatactgtaacagcagttcaacagtttctyacaaaattaaacttactcttagtactagataaagcaatcatgcttttggatattgatcccaaaggggctgaaaatgtatgtccaactccaaacctgcacatagatgtttacagcagttttattaattgccaaaactgggaagcaacccagatgttgaagaaaattcaaatatttca

SEQ ID NO: 577136 - DNA, 607 bp, Homo sapiens
tcattggtcattggtgatcaagttactttcagcctcattcccctctctggaggttggtaggtggtcttaaaatttcagccctctgggcaccgaactggcttccctggcaaccagccccacatcctgtggtttctaggggtttttcaaaaatcgccttattaacataagctcagatgtgttgaaagggcttgctgtaaatcacagaagactctttcacttttatcattcaggagctactttagtaactgaagtcaaagggtcaaatactttatcaaaagatatccttattgcttaagtsacttatgaaatgacaaggcttcccagagctgagagccatgggttgctttcactttttgctattgtgagtagtgatgctatgaacattcttgtataaaattttgtttgaacaccggttttcaatcctttgggtatgtacctagaagtcaaattgtcaggtcttgtggtaattctatatgtgacttgctgagaaatcaccgaacttgttttgcacagaggctgctctgttttacattcccatcagcaaagcatgaaggtttcaattttgccacattcttgtcaacacttgttattttctattattgttatt

SEQ ID NO: 577137 - DNA, 488 bp, Homo sapiens
caatcctcccatctcagcctcttaaagcaccaggattacaggtgtgagccaccatgtccagccatcaacttacattttacaaacattctgtgtgagaatgacttagttgctaccctacagttataattttctagcttagtttaatttaaattctgaatatgttattgtcaaaatgcaaggggttttgtttacactagcaaaagagcactgttcaccaatgacaggcttaatgttaaattgggccctatttctttgcagcagtaaagtaatcaaacaagaatgccatgcctctattaagcatttacattaggactgcctaaytacaccaggatttgtttgggtagcactggcagatgttctgaaagactgtgagaaaggcagctggggcttcacagaaagcaaacgcccacctaggaccattctaacattagtgcagggaacctgagtgcttgtgtggagcaagacatgtgctgggttcttcttaatat

SEQ ID NO: 577138 - DNA, 593 bp, Homo sapiens
tggttagccttttgtctaatcttttttcaaggtttttagcttctttgcgatgggttcaaacatcctcctttcgctcggagaagtttgttattaccaattgtctgaagccttcttttctcaactcgtcaaagtcattctccatccagctttgttccattgctggcgaggagctgcattcctttggagaagaggcgctctgatttttagaattttcaccttttctgctctggtttctcccatctttgtggttttatctacctttggtctttgatgatggtgatgtacagatggggttttggtatggatgtcctttctgttcattagttttccttctaacagtcaggactctcagctgcaggtctgttggagtttgctggaggtccactctagaccctgtttgcctgggtatcaccagcagaggctgcagaacagcaatattgcagaacgacaaatgttgatgtctgatcattcctctggaagctttgtctcagaggggcacccamccgtatgagatgtcatttggccccttctgggagatgcctcccagttaggctactcgggggtcagggacccacttgaggaggcagtctgtc

SEQ ID NO: 577139 - DNA, 551 bp, Homo sapiens
ctgttactctctgcatctctaagcccagcccttccacatgtctcctagatccaccccatcatttctcaacttctaactgaatcatctagttactagtaattatgaacctcatgcaagttctttctaatgcatcattgatttcaccctctcttactgtaccattcttcttaatatcaggcattctgcagtagctcccatgttaaataccaaayccaaacaaagcctttggtgattcccctctagctactgtgccatttctatttctctttacaggaatagtcctctaaagagttgtctacactttctgtttctgaggattctcctctcattttcctttgcccttacttcaatgggcttttatccccactattctaccaaaacattttaatcaaagttatcagtgacatccattgttctttaatttcctaaattcaatgggctttcctcaaagagatcactctctcctccttgcaatacttcccccacttgactttcaggccaccaggctctgcttacctttttttttttttttttttgtttgtttgtttgtt

SEQ ID NO: 577140 - DNA, 599 bp, Homo sapiens
ttttttttctaaaaaaaaatctttctttaaataaaaatctaaagaggcagcttgctaacatgstagagaacaaaaaagaataaagggagaaaaattaaaatttcccacaaagatgacttaaatctcccagtgtggtgcatttgttttcaattctctcctctttgcttctgacctctcaacttgcttgtttgtttgtttgtttgtcttttgagacagggccttactctgttgcccaggctggagtgcaatggtgcgattttggctcgccgcaaactccgcctcccaggttcaagtgattctcctgcttcagcctcccgagtagctgtgattacaggcacgcaccaccacgcctggctattttttgtatttttagtagagacagggtttcaccatgttggccaggctgttgtcgaactcctgacctcaagtgatccccctgcctcgacctcccaaagtgctgggattacaggtatgagtcaccatgctcggccctctctcaaccgttagctcccactcacacccctcccttgactttattttttacctaaaacattaacacttgattgtggaatagttagtagcaaacacagagagagaat

SEQ ID NO: 577141 - DNA, 431 bp, Homo sapiens
ttcccagccaaatctcatcttgaattgtagtttccataatccccgtgtgtcctgggagggacccggtgggaggtaattgaatcaygcaggtggttaccaccatgctgtcctgatgatagtgagtgagttcttatgagagctaatggttttataaggggcttttccccctcttcattcattcttctccttcctgccaccatgtgaaggtttgctactcctgccatgattgtaagtttcctaaggcctccccagccctgcagaactatgagtcaattaaacctctttccttcataaattacccagtctcgggtatttcttcatagcagcatgagaatggattaatacgagctataagactaactgagatcacaaagactatgagaatagacaggaaaataaaaataagagttctgggcactccaacattaaaa

SEQ ID NO: 577142 - DNA, 559 bp, Homo sapiens
aagaagtcaaaaatctaaacttctgacttgmaaataatacacaattgaaccgacagtctagggtggagggcacccaaaacaagactccaaagagcagcaaacatctatcttgaatagttagaacaaagaaatatcaattagctaatgaagtttgatttattttaatatttagtccacctgaaagtaatttgtttatgtgatctaattgcaaaccttgccttcaatcaccacgcatagcaagttaggtaaattcatcctttacttttctgtttatcagaaaacaagagaagcccgcattttttgcctcaaaagtgttttaaagacagaaaaacaaagggtcttaatgttttggtagagctcatgagaagatatatcaagtgcagtgtctacttgtttgcttctatcctttcaatttagggcaaatagtatgtactgcctatctgtcaagtgctgagcactgcactgtgtgctgggactacaaagattgaaaaaggagtttccttcctggaataatttatattttttaatattctttaacttacagatttgagtctgctgg

SEQ ID NO: 577143 - DNA, 638 bp, Homo sapiens
gaagaattaataattattcagtggaatacctatcaaagttctaatggtatttttctcagaaatagaaaaaaatcttaaacttcatatagaacctcaaaagatccctaataacaaacaattttgagcaagaggaacaaagctagaggcatcacacattctgatttcaaattgtgtcacaaaacaatagtaatcaaaactatatggtaccgacataaaaggtagacaattaacccagtgaaacagaatagaggtccccaaaataaatatatgcatatcaggccaattaatctttgacaagggctctaagaatacaaagtgaaaacaggatagtttatttagtaaattatgtgtcatgtatatgtgtrtatatacatacatatgtattttctttatccaatggaatattatttagtcaaatgaggaagaaaattctgtcacttgagacaacatggaaacatagatgggcctggaggacagtgtggtaagtaaaataaaccagatacagaaagacaaatgctacatggtcttacttatgtgtggactctaaaatagtctagtcataaacacaaagagtagaatggtgattgacatgaattgggggataaataggggttgaggaatggagaagtgatagttaa

SEQ ID NO: 577144 - DNA, 598 bp, Homo sapiens
acatcaaactaaaaaggttctgcacaagaaagaaatcaacaaagtaaagacacaacccatagaatgggagaacatatttgcaaaccacccatttcacaagggattcataaccagaatatttaagggacgcaaaaaattcaatagcaaagtcatcatcatcatcatcatccaatttaaaatgtgcaaaaaaatctgaatagacttttctcaaaaaacataaaaatggccaacatgtgtatgtaaaaaatactcaacatgactaatcatcagaaaaattcaaatcaatacaacagtgagataccatcttgccccagttaaaactactttataaaaaagacagtcaaaaatacatgctggcaaggatgtgaagaaaggaataccatcatttgtacactgttggtgggaatataaatgagtacagccactatgaggaacagtataaaagttcctcaaaaaaactaaatatagatctaccacatgatccataaattccactactgggtatatattcaaaagagaccaatatatcaaaactatatctgcattcccatgtttattacagcactattcacaatarccaaaatatggaattaaccta

SEQ ID NO: 577145 - DNA, 625 bp, Homo sapiens
atcttattatatcatgatatcacaaccacatacttgatcctctagcttccctctgtagctaggatgcagggtcatgacccagcattatggattagattttgaacccaaagctagtgatgttcaggaaaaaggtttgtgaagtttcctttctggaagctgcagttctcaggcaggattgaccatggtgttagtcatggggtcaagttcactgccagaagggtcagctaggcaagctgctcagwccagaactcagcagcggcatgtttcaggcattgtttctgcctgtggaggttttaagcctacttctcaagtcctctggaggttctatgaattccccttttaataagtttcttttctgctgaaaacagtaagccaacatctgtttctgtttacattcaattcagatctctgattagtagaacttctgtgttactaaggctttctccaaaagcctgtgttaactgtatacttttattatttttacttatttatttttgagaccgagtctcactctgtctcccagactggaatgcaatgttgcaatcttggctcaccgtaacctctgccgcccgggttcaagctattctcctgcctcagcctcctgaaaagctaggattacaggtgg

SEQ ID NO: 577146 - DNA, 625 bp, Homo sapiens
atcttattatatcatgatatcacaaccacatacttgatcctctagcttccctctgtagctaggatgcagggtcatgacccagcattatggattagattttgaacccaaagctagtgatgttcaggaaaaaggtttgtgaagtttcctttctggaagctgcagttctcaggcaggattgaccatggtgttagtcatggggtcaagttcactgccagaagggtcagctaggcaagctgctcagaccagaactcagcagcggcatgtttcaggcattgtttctgcctgtggaggttttaagcctacttctcaagtcctctggaggttctatgaattccccttttaataagtttcttttctgctgaaaacagtaagccaacatctgtttctgtttacattcaattcagatctctgattagtagaacttctgtgttactaaggctttctccaaaagcctgtgttaactgtatacttttattatttttacttatttatttttgaraccgagtctcactctgtctcccagactggaatgcaatgttgcaatcttggctcaccgtaacctctgccgcccgggttcaagctattctcctgcctcagcctcctgaaaagctaggattacaggtgg

SEQ ID NO: 577147 - DNA, 557 bp, Homo sapiens
tattcaaagacctgtgctaacattcttaaatatstgctagccgtaataaagaaatcaatatactttatgttcttagctcccacaatttagcctaaatatttgcttatactgatccaaggaagcattagatcatagcctgttcctcttccttatttaaaagtgtttttacctctctcagcattccacaagttacttcctccttcctttgttctcctctacctttgcctcttttaaaaagttctaagttgctagccaatagggacaaatacagaatgtgaggtcccattccagccaatggaaaccggacacagcacagggtggacgcgtcaggttataaatgaccctgtctcctttgttccgtgtagtctgctggcaaaactgctggcaagtgtaccctttctgcaggaagtaaaaatggccttactaaataaattaatgttcaagtgctatttctttacggcactgaaaaacaaacatttcaggcccggcgcagtggctcacgcctgtaatcccagcactttgggaggccgaggtgggcggatcacgaggtcaggaga

SEQ ID NO: 577148 - DNA, 557 bp, Homo sapiens
tattcaaagacctgtgctaacattcttaaatatgtgctagccgtaataaagaaatcaatatactttatgttcttagctcccacaatttagcctaaatatttgcttatactgatccaaggaagcattagatcatagcctgttcctcttccttatttaaaagtgtttttacctctctcagcattccacaagttacttcctccttcctttgttctcctstacctttgcctcttttaaaaagttctaagttgctagccaatagggacaaatacagaatgtgaggtcccattccagccaatggaaaccggacacagcacagggtggacgcgtcaggttataaatgaccctgtctcctttgttccgtgtagtctgctggcaaaactgctggcaagtgtaccctttctgcaggaagtaaaaatggccttactaaataaattaatgttcaagtgctatttctttacggcactgaaaaacaaacatttcaggcccggcgcagtggctcacgcctgtaatcccagcactttgggaggccgaggtgggcggatcacgaggtcaggaga

SEQ ID NO: 577149 - DNA, 610 bp, Homo sapiens
aaccccatctctactaaaaatataaaaattagctgggtgttgtgccgggcacctgtaatcccagctactagggaggtggaggaagaagaatcacttaaacctgggaggcggaggttgtagtgagccaagattgttccactatactccagcctgggtgacagagtgagactctgtctctaaataaataaataaataagcattcaagctgcacatagaaaagaattcataatgtgtgaagtaacaatttaaatcaacaagaactattgttttcttttaagtgggacagctaagcagtgcacgccaatatgcaaattatagtaaacwttttgttacctggcatggttgaaaacgaagaattctgattaatcaattattcaaacttttctatttttcatgtactttgctatgaattcacaacaaaatttgaatatgacaaaaaatacacttaatcctttatcctttagtatttatgatctagaaacctcttcaacatcaaatggtgatttctaatcattatgggtactttatcttttcttctaatccttgcagggggctgtttttctgaaagccacccctagtctccctcaacactgagacttcaaacgaagca

SEQ ID NO: 577150 - DNA, 578 bp, Homo sapiens
tgacatttattaacagtaagccattcaccaacatcaacagaaaacaccttctgttttgtagtagaatataaaataaaaattatttgatttgtcataatataaaaatattattatcatataacaatttcaaaagcctaaacttttgtaggttttgtctttctttctgatataacatatcatttatatgcatgtatcttacatattttatatattactctcaagaatctaagtttgaatgtttctatatattgctacatctgtttcctcagatgtgtattttctttttaccccaccagtataatttgrttttcatggttggttctttgttcttctgtaacccctaattctctctaacattttagaaaatctggccaagacagcatacttatttctttgattttttaaaaaatctgctttgctccattttagggcaatgttataaacttttttttttttttttttttgcatacaagaacctatttatagcatcaacatactttaaatagcttgtgttgtaaatagttgaatatttactgtctgttagttgagaatattcaaacatgcctgcgcattcatgg

SEQ ID NO: 577151 - DNA, 597 bp, Homo sapiens
cccagtagccctgctgggtggctagatccagaagagaaataataatcaccrcagtttcgctctcagtaagccacatccctaggaaaggaggagagtactacatcaaggaagcaccgcgtgggacaaaagaatctgaacaacagccattgagccccagaacttccctctgtcatagcctaactgaataagaaggaaccagaaaaacaattctggtaatatgacaaaacaaggttatttaacacccttgaaaaatcacactagctcacaagcagcagatccaaaccaagaagaaatccctgatttgccagaaaaagaatacagaaggccaattattaagctaatcaaggaggtaccagagaaaggtgaggtccaagttaatgaaataaaaaagtgatgcaagatatgaagggggagaaatcatcagtgaaataggtagcataaataaaaaacagtcacaacttctggaaatcaaggacacacttagagaaatgcaaaatgcactggaaaatctcagcaatagaatcaaacaagcagaagaaagaacttcagagctcgaagacaaggttttcaaattaacccaatccaacaaagacaaag

SEQ ID NO: 577152 - DNA, 597 bp, Homo sapiens
cccagtagccctgctgggtggctagatccagaagagaaataataatcaccacagtttcgctctcagtaagccacatccctaggaaaggaggagagtactacatcaaggaagcaccgygtgggacaaaagaatctgaacaacagccattgagccccagaacttccctctgtcatagcctaactgaataagaaggaaccagaaaaacaattctggtaatatgacaaaacaaggttatttaacacccttgaaaaatcacactagctcacaagcagcagatccaaaccaagaagaaatccctgatttgccagaaaaagaatacagaaggccaattattaagctaatcaaggaggtaccagagaaaggtgaggtccaagttaatgaaataaaaaagtgatgcaagatatgaagggggagaaatcatcagtgaaataggtagcataaataaaaaacagtcacaacttctggaaatcaaggacacacttagagaaatgcaaaatgcactggaaaatctcagcaatagaatcaaacaagcagaagaaagaacttcagagctcgaagacaaggttttcaaattaacccaatccaacaaagacaaag

SEQ ID NO: 577153 - DNA, 597 bp, Homo sapiens
cccagtagccctgctgggtggctagatccagaagagaaataataatcaccacagtttcgctctcagtaagccacatccctaggaaaggaggagagtactacatcaaggaagcaccgcgtgggacaaaagaatctgaacaacagccattgagccccagracttccctctgtcatagcctaactgaataagaaggaaccagaaaaacaattctggtaatatgacaaaacaaggttatttaacacccttgaaaaatcacactagctcacaagcagcagatccaaaccaagaagaaatccctgatttgccagaaaaagaatacagaaggccaattattaagctaatcaaggaggtaccagagaaaggtgaggtccaagttaatgaaataaaaaagtgatgcaagatatgaagggggagaaatcatcagtgaaataggtagcataaataaaaaacagtcacaacttctggaaatcaaggacacacttagagaaatgcaaaatgcactggaaaatctcagcaatagaatcaaacaagcagaagaaagaacttcagagctcgaagacaaggttttcaaattaacccaatccaacaaagacaaag

SEQ ID NO: 577154 - DNA, 597 bp, Homo sapiens
cccagtagccctgctgggtggctagatccagaagagaaataataatcaccacagtttcgctctcagtaagccacatccctaggaaaggaggagagtactacatcaaggaagcaccgcgtgggacaaaagaatctgaacaacagccattgagccccagaacttccctctgtcatagcctaactgaataagaaggaaccagaaaaacaattctggtaatatgacaaaacaaggttatttaacacccttgaaaaatcacactagctcacaagcagcagatccaaaccaagaagaaatccctgatttgccagaaaaagaatwcagaaggccaattattaagctaatcaaggaggtaccagagaaaggtgaggtccaagttaatgaaataaaaaagtgatgcaagatatgaagggggagaaatcatcagtgaaataggtagcataaataaaaaacagtcacaacttctggaaatcaaggacacacttagagaaatgcaaaatgcactggaaaatctcagcaatagaatcaaacaagcagaagaaagaacttcagagctcgaagacaaggttttcaaattaacccaatccaacaaagacaaag

SEQ ID NO: 577155 - DNA, 636 bp, Homo sapiens
tacactctgtcgccaggcgacagagcggagactccgtcacaaaaaaaaaaaaaaaagacacacaackgtctccctccctatccctgactcctggcaagcacccatctgtcctccatttctataattttgtcatttcaaggaggttatataaatggaatcacacagtatgtgacctttttggactggcttttttcactcagcataattccctggagaatcatccaagctgttgtgtgtatcagtagtttgctctttttatggatgaataatataccatggtatgcatgtgccatagtctgcttaaccatttatccactgaaggatgcctgggctgatttcaggttttggcaattacaaataaagctgctacaaacattcacatataggttttcatgtgagcataaattatcattcctctgggataaatgcccaaatgtgtaattgctgagtcctatggtagttgcatgtttaattttataagaaactaccaaaactatttttcagagtggctataccattttatatttccaaaaacaatatatgagtggtccagtttttctgtattctcattggcatttgctgtttgtatttttttggttaactttagccattcttataggtgtgtaatgatatctc

SEQ ID NO: 577156 - DNA, 512 bp, Homo sapiens
gtgggccagttcaaaaacgtctcccatttccactgcctttttttttttttttttggtcttcatggtatcacatcaccaggtcttatataacttgaacctgtattcatgcaacacttttcttactggattcccaaactctttatatctttctccactccatattacaaattaatttctatgacacaatttttttaaatcaaaacttcaatttcactctcttttactcagtatttaaacctcaaactacagcaactggtaattttaacacccttcctagaaagtcctaacaaatcttacctcccacatgggaaggagggccaacctgttaaactcactgtcccaagaataactatactaaattytccccttttatgtttctgctctcattcattctcttacgtaaagccatccctatttccttttacctttccaaatcccacccattcttcaaagccaagttcacatccctccttaaagatgttttcctggccgggcgcagtggctcacacctg

SEQ ID NO: 577157 - DNA, 560 bp, Homo sapiens
aagcttgcagccagtgagtaaggtctgaaattcaaccacctttttgtgcatggttctacctagaagtcccttatctggccaagctatgcatctaccccaaggagaatctgcatctagtcagcaaaagatattctataggctagaagcagccctaggctcacgttttttkttttttttttttaaagacagggtcttgctctgtctcccaggctggagggcagtgcattgttcatagctgactgcagccttgaactcctaggctcaagcgatcttcccacctcagcctcccaagtagctgagactacaggctacaggtacatgccaccatgcccggctaatttttttttttttttttttttttagacacacagtcctgctatgttgcccaggctgatgttgaactcctggactgaagcgatcctcccaccttggcctccccagaactgctgggattacaggtgagagccaccacgcctggccagaaacattttttaaatccaaaaaataataataataaaatttgatattttttaaagttagtataaatatattacctataa

SEQ ID NO: 577158 - DNA, 512 bp, Homo sapiens
atccctttcttattattactgagtgcattcagtccctttcctctcttcctgtattactttaataatccagcagcccttgcctgggctccatgtttttcttctctccctggcccaaaccattctctgcatgctgttggtgtccggaacagtgtctaacacaagagttggtactctataaatgttttttgaatgaatgaatgaatgaatatgtgaactgagaccatgaacaaatgacacatacacaaatggatacaagtggaaaagcacagccaattatttgacattagtgcttcccaaagtgtgactttggaaggtgcatggacaaacattttttattttattagttattcatatattttaacatgcataagaaaaatattgataaatacactaaactcatgttttattgtttagaacaatgctaagtgaaaaatggagtcaggttaaaattgattggaacatattaaataaaaaatagtrtagtaccattcagatatagcaaaaatgatgta

SEQ ID NO: 577159 - DNA, 522 bp, Homo sapiens
ttagtggattagcaacctaggcaagttgcttctctttttttagtctaacttttccacctacttaaagagcacaacgcatgatgttccctattaggtttcttccctatttaaaggagctatggtatatgaagcatatacgagtcaattagctaaaactagttctcccttcaaggttacccactgtacattttctacttgtatcttttgttctgaagtatgtttatgttacctgaaattcaaaaatgtaataatagaaatgtttgaaaaatttgcaccaagaataaaacagattgcaataagyataaacagtcaaaaatacttttaaaaagattacagctggtcggtatcagacccaagtaagcacagctatgtccccaacttcagtgaaaccaaatccacctctacatgggtaagagcattagcagaggcatgccaaatggcgggtggtgagctctaccagcatgactaatggtagagaaaaagagaaaggcagagggaaagaatctgttggtagaaacacac

SEQ ID NO: 577160 - DNA, 446 bp, Homo sapiens
tcaaaaagcactacagaagatattcraaagataatgattactggcattaatttctatgggtaagtttcccataaagtaatgccttgacttaagtcacagacttgatatataggacactctaggtcacatgaatagagttgtttagtaaagtagatttgacatcatgtcttgttctcaggtaattccttcaggctaagaattggcctcccatacagtcctattatcaaaggcaaattccactgaattactctagtaatacctcaagtcatgagcctcttttaatgaattatatttattgaatcaattttcccatcaacagtgagctctggagccagggacatgccatggctttattataaagttcttctttgtggttagacctatgctttgctcatctctgagaaaatgtgggcatagtgttgcatgaagaaatatcaagaagagta

SEQ ID NO: 577161 - DNA, 590 bp, Homo sapiens
ataagaattacactagacttctcttcagaaatgatgcaagcaagaagaatgtaaagtacaagatttaaagtgtcaaaagaaaaaagctatccacttagaattatgtgtctagaaaaattatcccttaaaagtgaaaatgaaataagacattttagataaaagtgaaggaatttgtcccaagacatgccttgtaagaaatgttaaaataatttctttagagtgaaggaaataatataggtcagaaactcagatctacataaagaaaggaagagtgttagagaagaaattatgagggtaaaataaaatcttttcttatccttaattgctctaacaatagttaacagtttgttmaaaataataatatattggatgatataccttatggatagtgacacaaagggcagcaatttcataagggatggaagggagggattgggcatattgtattacaagataactgtactagctatgaagtggtacagtgttgtttgaaagtggacttagattagttgtaaatgtatattgcaaactctaggcaaccagtaaaaatttttaaaaagaaggataattgaatgctaagagaggagaga

SEQ ID NO: 577162 - DNA, 516 bp, Homo sapiens
actgttggtaacttcaatgcttctagtttaccagctaatcaaaaaagtagacaatcagcaagggtatagaagatctaagtaacaccatcaaccagcttgatctaattgacattaaaaaacactttacttaccaatagcaaaatgcacattatttttaggtccatatgaatattcatcatgataaaccatatcttcaataataaaacaatcttgaataaatgtaaaagaattgaaataactcaaagtatgttctctgaccttaatgaaaacaaactagaaatcaataaagatatctgggccggatgtggtggctcatgcctgtaatcccagcactttgygaggctgaggagggtggatcacctgaggtcaggaattcgagaccagcatgaccgacgtggtgaaaccctatctctactaaaagtacaaaaaaattagccaggtgtggtggcacatgcctgtaatcccagctacttgggaggttgaggcaggagaattgcttgaaccagggagtcggag

SEQ ID NO: 577163 - DNA, 516 bp, Homo sapiens
actgttggtaacttcaatgcttctagtttaccagctaatcaaaaaagtagacaatcagcaagggtatagaagatctaagtaacaccatcaaccagcttgatctaattgacattaaaaaacactttacttaccaatagcaaaatgcacattatttttaggtccatatgaatattcatcatgataaaccatatcttcaataataaaacaatcttgaataaatgtaaaagaattgaaataactcaaagtatgttctctgaccttaatgaaaacaaactagaaatcaataaagatatctgggccggatgtggtggctcatgcctgtaatcccagcactttgcgaggctgaggagggtggatcacctgaggtcaggaattcgagaccagcatgaccgacgtggtgaaaccctatctctactaaaagtacaaaaaaattagccaggtgtggtggcacatgcytgtaatcccagctacttgggaggttgaggcaggagaattgcttgaaccagggagtcggag

SEQ ID NO: 577164 - DNA, 632 bp, Homo sapiens
tacattgatgtgccaaaagggtgatgcatcttgaagccacagggtgaggacacagaagcttcatatctgggaccctcccaggcctcacctatggggtatcttcattggctggtcctaattcttgtccttcataataaaactacagttataaatgcagctttcctgagttctaagaatcattctaacgaatgaattatcaaatctgagggggctgtgggaactcccaaatttgtagcaatttgtcaaaaatgtgggttacctattgattcctgaacttgtggctggcgtctgcagtgargtaagtcttgttagggactgttcccttaacctgtggagtgggctaactctgggtagttagcatcagaattgaattacagcattacaatgtttgacaaccagctctccaggagggaggggggaagccctaagccctagtttgtggtgtttgcatattttcatgttatgaatgctcccactatggccaatagcaagttaccaatgtgatgtcattgatcatggagttgggaagagatgcagagaaatcagctgcttgtaagcctgcgtgagttaactgtagcatacacacaccattgcttataccttttgaccaagcaacaccacttaacaaaatt

SEQ ID NO: 577165 - DNA, 577 bp, Homo sapiens
gttttttaaaaacttattctctgacagtaggaattccacaatatggtaactaacattaaaatcctccctcactcctctgctcttgagtgtgacccaaaaattagagcagatgccagaccattctggctcccaaaaagatgcaagtttgcaagtaaatagacaaagtgtttcaaagttccttgtgaggggactaggatctcatgaaccatctttggtagagactccctggggcactgaggctgcacatggcctacctgaaaagctcagccagcaaggtctgtgtacgagccgggcatatcttcacatgtatgctacacctaaactaggagagcttggacaaaatcttcctaacgaaaggggtggggaaaactaaaatgaaaaaagcaaaagagaattctcactgatatgacataagttacttgagaattttggactcttcagattgcaccttttctctgcaatatcattaactcacacatawcagcatggaccagaacatggctataatgaacagggggtggacaccgactttacccgagcattccatcctatgcctcttctattactatttgtttcc

SEQ ID NO: 577166 - DNA, 580 bp, Homo sapiens
gtagttctgttagctcttattgattgagagtggaagacagctcttggaatgtagggaaaaacttctacggatgtcatggaaataaagattcatgttttttaaataatggaatcacaatgaatcagaccagagtgacattaaactggatgtccctgtccttaaagttgaaggtgagatcctttcaggcaagcaggcaatgctgtcactgggagactctcatgagttctgggaagacaaggctcccrgtatagaacatctggtaacttcccaactgttacactatcttttaggaaccattaacataagtgtccagtcatgtcctggaattggcctaagttccatgtgtgctcttaaaatgaacttggaccctactctactccagcccaccagccttctcactgttcttccaacaccccaagtttgtttctaccttggaggccttacccactgttgcctctgtctgaaacattcctccttcagcttctttgtggctgagcccctctcactgttcaggcctcagttcaaatgtctcccctcagaggtgctgatgcctgatgccccctctgaggtagcccaccca

SEQ ID NO: 577167 - DNA, 476 bp, Homo sapiens
aaacaagctaacaacaaaaccccaggaactcagttcagaattctgcagagcagtacccttgttccagcgcacttgaccaggctatgtaacaagttaggaggaagtcacagggcacaggagaggggtccatggataataaactaaggagttactgaactaaacaaagtaaaayggatttctttgttgcaggatttttccaaaactttaatgtgctcattataaatctccaaaagggcaataaaatatgtcttatacagccaaggagcatttttatttattttttgagacagtgtctcgctttgttgcccagccttgagtgcagtcatgcaatcatattgggctgcagccttgaactcctgggctcaagcagtcttcccacctcagccttcctagtatttgggactacaggtgcattccactgcaccaggctaattttttaaatatattttatagagacaggatcttgctatgttgcc

SEQ ID NO: 577168 - DNA, 476 bp, Homo sapiens
aaacaagctaacaacaaaaccccaggaactcagttcagaattctgcagagcagtacccttgttccagcgcacttgaccaggctatgtaacaagttaggaggaagtcacagggcacaggagaggggtccatggataataaactaaggagttactgaactaaacaaagtaaaatggatttctttgttgcaggatttttccaaaactttaatgtgctcattataaatctccaaaagggcaataaaatatgtcttatacagccaaggagcatttttatttattttttgagacagygtctcgctttgttgcccagccttgagtgcagtcatgcaatcatattgggctgcagccttgaactcctgggctcaagcagtcttcccacctcagccttcctagtatttgggactacaggtgcattccactgcaccaggctaattttttaaatatattttatagagacaggatcttgctatgttgcc

SEQ ID NO: 577169 - DNA, 613 bp, Homo sapiens
ttttattatttaaaaagatagctttgccacaaaccagatatgtgacattgagtaagtcargccatgtaggtggctgggctttggttttctcatataaaatgtgaaatttagagctatagtcccttctacttctaaagttcactgagcctttgaatcccctcttaagcattagttcactggaagaatagtttctgtgcctagcagtgtgcaaggttgccaaagttcagattaaattcttaccaggaggttactagaacttgaaacacttcttgtgcatggatttcaatgtaattaatcatttgaaaggtgaaaacatgtgttccaatcctgggcagtgacttatcccagtgcccaggtgagttactagcaaatcttaggtcttgggcagttctttttgtcctgataccaaagctagagaaataaatctgctttatggctcctcagtcttatttatgaatcaaaaaatcctttcatatccaaaatctatattattctgcatctgaaacttttctgatcttcttcactcctttacaataatattatctaatgcatagataatgcatggttgcttccagagtactttgatttatataattacactcacttgctcctc

SEQ ID NO: 577170 - DNA, 349 bp, Homo sapiens
aaggtgtcagcaggattagttggtktcttctaaggcttctcaccttggcttgtaaatggccattgtattttccattttcaagctgctaataaagacattcacaagattgggcaatttacataggaaaaaggtttaatcagacttacagttccacatggcttgggatgcctcacaatcatggtagaaggcaaggaaaagcaagtcacatcttacatggatggcagcaaaaaaaaaaaagagcttgtgcaaggagattcctgtttttcaaaaccatcggatctcatgagacttattcactatcatgagaacagcatgggaaagacctgcccccatgattcagttacctccc

SEQ ID NO: 577171 - DNA, 551 bp, Homo sapiens
aagggtttgggcaagatgctctttgggatcccttttatttacatgaaacatgcccaaacttaaggggaaagaaagcaccaggtctgaaaataacaaaatagagacagttacttggagaaagactcagggcacctttctatactgttggaggttttgcctgtaatttccatcctatctcaagtcttcatcactagtctccatcccaatgctccccatgcatgaggttacaagactggcatcctttaagactcactcaacctgtcatcttttytaagaagtgttcatttgattttaagcctaccttagatgccattcttcaattttccctctataccttgtgcatgtgtcaatctttaggccttccacatcataatttgctttaaagcatctgtgttctaccattacccaccagactgtgagttccttaagggcagggatcttagtcatctttgtccatctaatactgaagcagtgcctctatttgacatataaaactccaataattgtaagttgaaatcaattcaacttatcagaaactatgtttttttttt

SEQ ID NO: 577172 - DNA, 463 bp, Homo sapiens
taatagtccacaccgcatgcaacataaaatcaacaagtatacacttggtacaacattgacttagggaacaatccttcctcattaggtaaaaataaagagtgtttcacagtacagagtgtgaacagaggtgctaccatctgaataaagtattgctttttaatcaccaaaacgtataccatgcaaatagtctcttaaccccaggcatgacccctaaaactgttaaagtcatttgtgtaaaatgctttaaagaatgtaggacaagcatgtsatttacagctagaaaaggttttcttcacagtcttgatttcaagagtagccaaatgactttaacatgcttgttcccccttttgtcactgtcatcaaaactatttcaaaggacatttaaaaatatgcactaatagtttccaaaactccaccttgccttagaaccccaagttcctctcctttctgaagtaaaccattg

SEQ ID NO: 577173 - DNA, 628 bp, Homo sapiens
atttaaaaagaaaaagaagatgttggttttcatgaaaacatagagctttttcttgtcagcaatggctgatatgctacatttttacaagaggcataaagtcatgcataagtcttgttttacagcgaatcagtgggaagtggcctacagtgggtcggctaccgaatacaccttcacccacttgaaaccaggcactttgtacaaactccgagcatgctgcatcagtaccggcggacacagccaggttggttttgtttccatatgaaagtaaacctcattgatcaaattcggacaaactgtctataacatcagaagcaaattgcagtttaaacaatgtatcttgrtaatgcaacctaatagtatcatgtcaggaaatgaaaaatagagctttctgaattgctgtttagaggtataagataggcctaaatgattccctactgaattgtggtattttcgggtacatttgtcactcactcatttctcagaaggctttgacataatcacctgtgacagttgaaaattgtctggaatttgcattgactaaataaaggagacctcggttattgcaatgattaaaaaactatagattttagagtaaaaagataagacctgcacagcactgctgttacca

SEQ ID NO: 577174 - DNA, 518 bp, Homo sapiens
ctgtagtcccaggtactcgggaggctgaggcaggagaatggtgtgaacccaggaggcggagcttgcagtgagccaagatcatgccactgcagtctagcctgggtgacagagtgagactccttctaaaaaaaaaaaaaaaaaaaaaaaaaaaaaaaaaaaaaaatggatacagcacaagtagttctaaaagcaaagtttaaagcaataaacacctacatcaaaaagsaagagagatcccaacgtaacattatacctcacggaactggggggagggagaaactaagcccaaagttagcagaaggaaggaaacaagatgaaaacagaaataattgaaggagactagaaaaacagtacaaagatcaacaaaactaagagttgtttttctgaaaagataaaaatcaacaaatctttagtacaccaagaagacacaaaatcagaaaaaaagattacagcaaataccccagaaatacacaggcacatttgagactattaggaacaaatatatgccaacaaattgg

SEQ ID NO: 577175 - DNA, 427 bp, Homo sapiens
tggtgcacccatcacccgagcagtatacactgcaccctatttgtagtgctttatccctcaccccccttcactcttccccccaagtccccaaagtccattgtataatttttaagactgcatccttgtagcttaactcccacatatcagtgagaacatacgacgtttggttttccattcttgagttacttcacttagaataatagtctccaagcrcatccaggtcactgcaaatggtgttaactcattcctttttatggctgtgtggtattccatcatgtatatataccagtttctttatccactcattgactgatgggcatttgggttggttccatgatttcgcaattgtgaattgtgctgctacaaacatgtatgtgcaagtatctttttctaagaatgacttcttttcctctgggtagatacccag

SEQ ID NO: 577176 - DNA, 586 bp, Homo sapiens
agctattattaaaaagtcaaaaaataacagatgctggcaaggttgcagagaaaagggaatacttacacattgctggtggaaatgtaaattagttcagctgctgtagaaagcagtttggagatttctcaaagaacttaaaagagaacttccgtttgacccagcaatcccattactgggtatatacccaaaggaatataaattgttctaccacaaagacacatgcatgagtatgctcagcacagcactattcacaatagtaaaagcayagaatcaatgtaaatgcccattgatggtggactggataaagaagatgtagtacatatgtaccatggaatactatgcagccataaaaaagaatgagatcagccaggcgcggtggctaatgcctgtaatcccagcactttgggaggctgaggcaggcagataacgaggtcaagagatcaagaccatcctggccaacatggtgaaaccccatctctagtaaaaatacaaaaattagctgggcatggtggcatgcacctgtagtctcagctacttgggaggctgaggcaggataatttcttgaacccaggaagcagagattgca

SEQ ID NO: 577177 - DNA, 482 bp, Homo sapiens
aagtcctcagcaaagcttcccttttaataaaaagcagcccctccattatttgttttctaacaaagagcagcctgaaaaactgagctgcagacatagacaagcaagctagaagcttgctcgggtgaatgcccgcagctgtgccaatagaaaagggccacctggaggctcgacatggsggttccaccttcccttttctttgtcaccacgtgtacagtaaggaacaggcaacatggtgctggtcaggtagagaacccatctgcataataaaagattaaagtggaggtggccagattttcgtgcactatgcaaatagcacaactggtctgatcaatcttctgtgccctatgtaaatcaaacgccgcctcctcaagcttatctacaaaacctcttactgttcactgtggaagcggcaacccattttcgctgggacccccctctctgcagcagagagagcttttctttctttcacctgttagacttcc

SEQ ID NO: 577178 - DNA, 491 bp, Homo sapiens; identical to SEQ ID NO: 184356

SEQ ID NO: 577179 - DNA, 544 bp, Homo sapiens
tctgcctttcccagtccactgactcaaatgttaatctcctttggccacaccctcacagacacactcaggaacagtactttgcacttttcaatccaatcaagctgacactcaatattaaccattacaacttggttccaggaggccacaagaaaggcaaggggcctgatctttatgtcagtagtaaatactgaagtctgaaggatttctagaagggatatcacatggtcagatctgcgttttagagagatcacaggtaggttaaaattcaaaagatggctgatggcatatccaggataaaaattgccctgccattgaaaaaaaactagaaactacacaaaatatatgaagcaattgttttcagatattggcagcacatgactgtgaggagagagacaagcaagttgatgctaacaatgtcctggttttctgactagagtttcttcccatgctgttgagtaaggaggggaaccagaacaacacagcartgccattgccttgaacgaagagagctcagagtctgagggaggctgagacagctagaaca

SEQ ID NO: 577180 - DNA, 634 bp, Homo sapiens
caaggtctcactatgttgcctaggctggtcttgaactcytgggctcaagtgatcgatccccccccactttggcctcccaaagtgctggcattacagtatgagctaccacgttaggtttggatatcttgcaagttccaatttttttctccaagtcagtcttggagacagtcagactgatgagtaggtggacaagcatgactgggaaggagtcaaggctacccagacacgccaaggctcctgggcctctggaccccgaggcaaccacagatagttcacttggtggcttcactcccatggaaaactagttttacttttttaaatgaggggaaggagaatctcaagacacagatgattgacactggaaaatcagcctttgaagaatcaagagtcagaaaaaatagcagttggagccaggtgtgctggctcatgcctgaaatctcagcactttgggaggccaaggagggaggagctcatccaaggtcacacagcttcaaagtgatgacatatggatttgcttctgggtctgtgtctgtctcctgcggcggctgtcaaaaattgccatggactgggtggcttcaaacagcagaaacttactttctcacagctctggtggatacgagtctgaaatcacggc

SEQ ID NO: 577181 - DNA, 634 bp, Homo sapiens
caaggtctcactatgttgcctaggctggtcttgaactcctgggctcaagtgatcgatccccccccactttggcctcccaaagtgctggcattacagtatgagctaccacgttaggtttggatatcttgcaagttccaatttttttytccaagtcagtcttggagacagtcagactgatgagtaggtggacaagcatgactgggaaggagtcaaggctacccagacacgccaaggctcctgggcctctggaccccgaggcaaccacagatagttcacttggtggcttcactcccatggaaaactagttttacttttttaaatgaggggaaggagaatctcaagacacagatgattgacactggaaaatcagcctttgaagaatcaagagtcagaaaaaatagcagttggagccaggtgtgctggctcatgcctgaaatctcagcactttgggaggccaaggagggaggagctcatccaaggtcacacagcttcaaagtgatgacatatggatttgcttctgggtctgtgtctgtctcctgcggcggctgtcaaaaattgccatggactgggtggcttcaaacagcagaaacttactttctcacagctctggtggatacgagtctgaaatcacggc

SEQ ID NO: 577182 - DNA, 634 bp, Homo sapiens
caaggtctcactatgttgcctaggctggtcttgaactcctgggctcaagtgatcgatccccccccactttggcctcccaaagtgctggcattacagtatgagctaccacgttaggtttggatatcttgcaagttccaatttttttctccaagtcagtcttggagacagtcagactgatgagtaggtggacaagcatgactgggaaggagtcaaggctacccagacacgccaaggctcctgggcctctggacccygaggcaaccacagatagttcacttggtggcttcactcccatggaaaactagttttacttttttaaatgaggggaaggagaatctcaagacacagatgattgacactggaaaatcagcctttgaagaatcaagagtcagaaaaaatagcagttggagccaggtgtgctggctcatgcctgaaatctcagcactttgggaggccaaggagggaggagctcatccaaggtcacacagcttcaaagtgatgacatatggatttgcttctgggtctgtgtctgtctcctgcggcggctgtcaaaaattgccatggactgggtggcttcaaacagcagaaacttactttctcacagctctggtggatacgagtctgaaatcacggc

SEQ ID NO: 577183 - DNA, 583 bp, Homo sapiens
agactaatacacattcaaaagtatcctaatgtacatacttctcaaagcacaaatacacaaagtggagatgtgcgggtgggctgctgtgcatcgtcctggtgcagttggctgccaagagggtgctcagatgtttacccatacatgcaaacatctagcaagcgcttgcatctcctatgacatcctgttctgcagccttctacctccaaggctgagccacgagacttcttgccttgaggaacccaggctctgggaataaagagcccatgcatcaacactttgtcttggaactgagtttattagaactattcagcaaaacaaggcaagtgaaacctagatgttgccctgagaatgggactttctaagttgtcttatcttgtagaacacatcaggaccaagcccaaaggtcacactgagcatcttccccagtgaaggggactctcctgctgcctgttaagtgtagggcagttggtgtgtccagtggcctttctgctctagggtattgagggggagaagagttggtgagaaggtccatgactctgcccagcatggacamcatggaagcctcaattctttatcaaaatca

SEQ ID NO: 577184 - DNA, 484 bp, Homo sapiens
aatgataatgaagaagcttttatggcattcttgggagtgtgaatttttttttttttttttttttttttttttgagatggagtctcactctgtcaccaggctggagtgcagtggcrtgatctcggctcactgcaatctctgcctcccatgttcaagcaattcctctgcctcagcctcccgagtagctaggactacaggcatgcaccaccatgcccagctaatttttttgtattttagtagagatgggggtttcactatgttggccaggatggtctcaatctcctgacctcgtgatccgcccgtctcagcctcccaaagtgctgggattacaggcatgagccactgcgcctggctgggagtatgaactttatccacggccatgggaagtcattttagatttgtaggcagttgtcaccgtcaggtttacatttcagaaagaaggccattattagaggagagagtggatttttgaaaatgagagaata

SEQ ID NO: 577185 - DNA, 433 bp, Homo sapiens
ttgagggttttttttgttaggtataaaagatagatattaatgttcactaaatagctggaaaggaatacaaagctaaaaaaaaaaaaaaaaaaccccaggattttcaacagctaattattacataatgtagatgaaatgtctcacaataactgatttcacttttctctgactcccctagagatcgtctagacctggcccagaggtgaatctacrttattaaaatggaataaagttaagttctctccaaaggatgatgtcccttctcacaggaggaatcttggggaaatctatagtaaattattcaaatttttcaagtttgtatttatctctttaaaattataaaacttaaaccatggtctgatcaaagcttccttatagttctaatagttcatgaaaaatcattttttaattttaaatatttatttatttagag

SEQ ID NO: 577186 - DNA, 433 bp, Homo sapiens
ttgagggttttttttgttaggtataaaagatagatattaatgttcactaaatagctggaaaggaatacaaagctaaaaaaaaaaaaaaaaaaccccaggattttcaacagctaattattacataatgtagatgaaatgtctcacaataactgatttcacttttctctgactcccctagagatcgtctagacctggcccagaggtgaatctacattattaaaatggaataaagttaagttctctccaaaggatgatgtcccttctcacaggaggaatcttggggaaatctatagtaaattattcaaakttttcaagtttgtatttatctctttaaaattataaaacttaaaccatggtctgatcaaagcttccttatagttctaatagttcatgaaaaatcattttttaattttaaatatttatttatttagag

SEQ ID NO: 577187 - DNA, 551 bp, Homo sapiens
cccagtgtattagcaaagatgctcattccatttgcatacttgctattccctcattaactcagttagcaaacattactgagtgcctgctattatccccgaactgtggtaggtactagagatcaaagatgagtatctcaagtggcttacagtctaatgaagagatagctttgtaaatgaaaaccttcaaaggctacagctgctcttatggaagcttatagagagcaaagggacataaaaatggttaatttttgctgggaagagattatttttactgggaagaggtcagaaatgcctttaaaaacagttcaccccttgtaaccccagcactttgggaggctgaggcgggcagatcacctgaggkcaggaggtcaagaccattcagaaataggagaggaagcagacatagaacccaccatggccaacatggtgaaaccccatctctactaaatgacacaaaagttagccaggcgtggtggtgggcgcctataatcccagcttctagggaggctcaggcaggagaattgcttgaacccgggaggcggaggttgccg

SEQ ID NO: 577188 - DNA, 547 bp, Homo sapiens
accccatctgtaaaatattaaaataagattagctgggcatggtgccatcaggctatagtcccagcttctatagaagctgaggcaggggatgatcacttgaacccaggagttggaggctgcagtaagctatgattgcaccactgcactccagcctcagtgacagagcaagaccttgtttctaaaaattaaaacaatttggcaaagggtctcagcaatcacaaggcagaagcaaagcatcctttcctcagagaagcccaagatcattaatggaggttctttttcttcaccttcaggacttgttctgattcagatttaaaattcagggtctcacattctcccaacctgcttatgtgaggagagcagtgagtgtggaacattgatttacaaaggaaatagttccattaacatctccatttattccccattaattccccaacctgtcatgtcrcctataaatccacaaattacaggttttgttatcataaacaacgtagacacacgcacttgatgtatccttctaaaagcatttcatggataaggactctat

SEQ ID NO: 577189 - DNA, 538 bp, Homo sapiens
aaaaaaaccaagtaaacaacaacaaaaaaaactttcacaacaatgactctatagctattcaagccaattttattcctgacatataattttttgcatgtggagtttttttttcccygcaacactcctattggagatcatcatatttgtcatttccttacattaccaaagagtctgtccaaatgtgacattctcagtgaggcattgctgataacccttttcctcttcacccctacctcctctggtcactcttcatgcttctaattttatttttcttcgtatcatttgtaaacttgaacttatataatttaaatcatttatttacatgtgtgtttgtttttctccccaactaaaatgtaagtggcaagaagaatgcagggactttggcttgttgatcaaatttttggcagctaaaaataaacatagtaatcactcaatatgtgtttgctaaaggaatgggtgtctggtttatcctgtaaaaatatagattcctttatctttcctctgtgtctgttttaagggcagtatttccctatgtaag

SEQ ID NO: 577190 - DNA, 449 bp, Homo sapiens
tgattttaagtcctgcaactttactctattcttttatgaattgtaccagatattgttggccttttagggttttgtgtgtacaagaacatgtcatcagcaaatagagaaaatttcactttgttcttcccctttggattcctttttcccctttttcttgtctaattgcactatctcgaacttccaatactattttgaataaaattcccattcttcttgactcatttgttcagaggttttattatgaaataatgttgaattttgtcaaatgctttttctacatctattsaggtaataataaggtttttgtccttcattttgttaatatgatgtatcacatttattgatttgcatatgttgaaacttccctgcatcctaaagataaattacacttgattatggcaaatgatacttttaatgtgctgtcgaatttaatttgccagtattttgtc

SEQ ID NO: 577191 - DNA, 296 bp, Homo sapiens
ttttttttctttttacccctgctcctccctatgcccagcatatttgagacggcatcaaatctatccacatagatactatcaaragaaactaatgttttcctttatcatttaacatcttagcctatgacctttcaaaagtatagcacatggttataaaattctgtctttttaaaaacagattaactttgtgactttagacatttttattaatttatttctactgcatatttctctggatgaccctctgatataaaagcaagaatctcatggcacataattgatttacagcactgagt

SEQ ID NO: 577192 - DNA, 296 bp, Homo sapiens
ttttttttctttttacccctgctcctccctatgcccagcatatttgagacggcatcaaatctatccacatagatactatcaagaraaactaatgttttcctttatcatttaacatcttagcctatgacctttcaaaagtatagcacatggttataaaattctgtctttttaaaaacagattaactttgtgactttagacatttttattaatttatttctactgcatatttctctggatgaccctctgatataaaagcaagaatctcatggcacataattgatttacagcactgagt

SEQ ID NO: 577193 - DNA, 456 bp, Homo sapiens
acaatatcattaaaaatccttgcaaaatttttcccaggggcttcctatgaatatatcataatttcccttacagtctattggcaagaaacattatttggcttctaatttgattttattataatagtactgtggttaatatttttatccctgcatgaaatcctgaatctctaaatatttttatttggaatctgttaataaaggatacattttaggtcaaaggatctacatgcacatacatacacactccacacatacataaaaaattccaaagatatcacatatatgttattktactacaaatatttcatgtcatgtatacacaagagggcattcaatctttttatgtaagtattatctggaacaacttatattttcatgtatgatttaacatcttaaccaatgtccttttaaaactatagtgcatgatcataaaattctttagtagagattaactgt

SEQ ID NO: 577194 - DNA, 573 bp, Homo sapiens
attaaatatagtatagtaacatttgtgcttatatttgtaaaaaacaaaacaaaacaaaacaaaactggaaggccaaaatgaaaactaataaaaacgtttgtttatacaggtggcagggaacagagggagaggataagaatgaaagtgagatgtttctgagcatatgttgttattaattctgacttaagacacgcaagatttgtatatattaaaaataaattacataaaagtgcaagtcttaaaaattcagatcaaactaaaacaaatgaacatatcaagttggtgattaaccacacaggcaaaaattaataatttcaacatgattcagaacatagtattgtggcagtacatccttaaaggggataggtacaaaggaaacctaaggcaaacctttattcagctttattgctctagttaggacaccactatggttrtttaaatgttattttatgtgttgtagaataaagtaaataaaagtttgtatttttaaaatttttcttgtaggagaaaggagttaaaattataaaattttaaaaagttaaggaaaaactataatattgaatttaatgttaa

SEQ ID NO: 577195 - DNA, 604 bp, Homo sapiens
tgaggcactattcacaatagcaaagacttggaaccaacccaaatgtccaacaatgatagactggattaagaaaatgtggcacatatgcaccatggaatactatgcatttttctttcctaatagcttttccactttaagtatttatttacacacatattcccccatattctgcttgatatgaagtgtcaaaaccttgcacttttggtgcaaatgctatctcttccaagtagactttgggcccatttccttcagccatgatgaaatctaactctaattacagttttggaagtaacaagaagggatgaaatgaatatcatgaagaagagtgactgcttcaagtgaggaaagtacaggatcttcaaatgaaaggattgtagcctcctcatgcagaagaaaaaaatgggtaaggtaggatcattgaatttaggtattcagcatactcatgttcatacaaatcctctcaaatgtcctcagtatgatattcaggttattgctatttccctattactgaaacatctggagsagacctgaatttaacttggttgtaaatctgttatgcagaatcaaactttagatctggtttcagaaacagaatttttaaaat

SEQ ID NO: 577196 - DNA, 604 bp, Homo sapiens
tgaggcactattcacaatagcaaagacttggaaccaacccaaatgtccaacaatgatagactggattaagaaaatgtggcacatatgcaccatggaatactatgcatttttctttcctaatagcttttccactttaagtatttatttacacacatattcccccatattctgcttgatatgaagtgtcaaaaccttgcacttttggtgcaaatgctatctcttccaagtagactttgggcccatttccttcagccatgatgaaatctaactctaattacagttttggaagtaacaagaagggatgaaatgaatatcatgaagaagagtgactgcttcaagtgaggaaagtacaggatcttcaaatgaaaggattgtagcctcctcatgcagaagaaaaaaatgggtaaggtaggatcattgaatttaggtattcagcatactcatgttcatacaaatcctctcaaatgtcctcagtatgatattcaggttattgctatttccctattactgaaacatctggagcagacctgaatttaacttggttgtaaatytgttatgcagaatcaaactttagatctggtttcagaaacagaatttttaaaat

SEQ ID NO: 577197 - DNA, 468 bp, Homo sapiens
ttggattatctagagcgtcacgttgatcagtaggtttggagaaatttgaatttattgtaggttctttttttcttttttctttcttttttttttttttgctaatctctgccctctggcggtacaagttggagtagccgttttgtttgtttgtttgttttgtctttgagacggagacttgctttgtckcccaggctggagtgcaatggcacaatctcgtctcactgcaatgcaaccaagttggagtagcttaaaaaatgttgatccttttctccccgcccccagcaattgtgaagctgttaggaaacatcaggttgccagaaacatccgttaacctaattgacattgagctttttgggggtgggggagactttttaaataattattttattaatttggcagatattgaaggagtcttactaaattcaagacactgcttctgtgcgtgtttgggaactacatagaccagat

SEQ ID NO: 577198 - DNA, 482 bp, Homo sapiens
caactctcttcttccccaacctagagctacctaggtgctgctagccatcagtcaattcactagcatacaaaaagacaccactttgtggagattctaaaaattgtaggcgttgtatgcctggaagcagggtctagaaccaaatatgtgtttcacaatatcacacctgtgcataccagctcaatcacaatacaaaatttcaaaaatgattcttaattttttttgaaattgagtctccattccaaaataatttaaccacatcctggacctcttgggggcccaagaggtcccaccttaacctccagattagctgggactacagctacatacatatatgcatacattcccaccttagyctccagagtacctgggactacagctacatacatatatgcatacattcatgtatttattcttttattttttaaaaaagggggtctctttctgttggccaggttggtctcatctcctgtgctcaatcagtc

SEQ ID NO: 577199 - DNA, 543 bp, Homo sapiens
tggtctgtctacctgatgttgatctgtggtatgtgattgtgaatggattggctaaaccaaagctgtgaatagttaggacaatagctccatttatttagttctttaagaagaataggaataataactcacatttatagagtgttcagtatctgttagccagttttctgagctatgtttcattgtttctgacctcatttaatcctttaaaaaggggagtcagagttttcataaaatttacaacaaatgwctctagtaagaagcaaatatgaggattcaagttctaagttcacagtctgtgttttctcaaagtaaatacttctgaaagtgttgaatacagaactagtgttgtatatgttgattttattggtaattgcatattttcatacacatctatggtaatatataaaatatatatatttttcatttttcaacataaaagattttggtcttatcttgaagaaggtgtttcccaaaatatggcacatagagctaacagacattaccagatgaaaccattggtacaaaaacatttttaaaaattaa

SEQ ID NO: 577200 - DNA, 605 bp, Homo sapiens
gcagtggcatgatctttggctaactgcaatatctgccccccagattcaagtgattctcctgcttcagsctcgcaagtagctgggattataggcacgtgccaatacacccagctaatttttgtatttttagtagagacggagtttcaccatgtgggccaggctggtctcgaactcctgacctcaagtgatccgcccacctcggcctcccaaagtgctgggattacaggtgtgagccaccgtgcctggccacagctgcactccttttaaggaaataccctgagtaggaaaaaagagattcctcaatctctgtctccaaaaagtggcttgagtagtcattgtagttctcaaagtttatttaaggagtgagggcactcataaactattatttagtttatctgttatcttttttgttttttcttggcaaggacattgtcattactaaattttacttgcatttttcccttattaactccggtttttagtatagtgcactcagaaatgttcaaagaatgagagatagtgacatctgggtttagattttctgtgagcatcgaattagcaaatggtcaaagtcatgccatcagatggctggatggatgtgcttc

SEQ ID NO: 577201 - DNA, 602 bp, Homo sapiens
tagccaatgccagttttataatgtttttattccaattttaattttagaaatttcttttaaatgtgatattcaatgagtataaggtagaaaaaaataagagggaatttctttcatctcttagctcagtgcccactaagacacatgccacaggtttttggttccttcaggttgttgtaatagttaaaccagagaacccattagtagaagaatcaatgtcattgatgttgctttcacagaaaagggactggctccatagtcatgatagtggagaagtttgggagttagtaaaggagccaacctatgtaagttttgcacaaaaagagttatataaaaatagccaacttctgaaccccatgtacataatgatagatgagaaaatataaatatatttggaagagrctaaggcacatttacagatgacagactcctaagtggctactctgaaaagcagagatatccttgagcattcagagtgatgaacttttgtttcttgtctgctgactgaacaccatgattccttgccttcactgcagtgataaaacgaataaagataaagatgggatagatgtcaggacatgctattacagcaaatatcatagcct

SEQ ID NO: 577202 - DNA, 448 bp, Homo sapiens
gttacatctaaaaatattacctatcattgaaagcaaatgctcacatgataaccacaactccaagtgttatggcttgcttatagtactgatgatgtgtcattgattagatatgatggtcacataagaatgataaggatcacacctagtacagggatcccggaaatcttgttggcatcaaatttggctacttggtcttcctaaacatcctaagctgaaagtgaagctgaatagaagatttaggacaagactttgtataaaatgcaaactttgaatgactgtatgcaatgagaaataygccaataattaaagggatacctgattttaatgagaaagaaaacactacattccctctgtagttttgaagtagaagaaacgcaggacttaattcctggtcccgagaggatgaagtgaagaaacccgcatgaagcagcagatggcgataagagca

SEQ ID NO: 577203 - DNA, 466 bp, Homo sapiens
ctgtgttcttcctaacatctacgttattaraaaacgtgaattattttgcttaaaacgcttaatactcgaatgtgtctgtactgtaaggtacttgagtattggctcaggagaaaacaaattcagtgaagcaggatagcaaatccggaaaagggctcaatgaatgacagccactgttccctttgatcagtattttttgacagtatgtttggtaaaaggtggatagttcaggacactggcatacaggtaggtatattagtatgctttttaaggaacttttaaaagttgcctaaatacttttataattagaaaactcaaagtatgatacaattatcatgaaacagaaattgtgtcctcaacagatagcattttcaagctaaagttgacggaatttggaccatggattattttagcagttcacggttaagaggtttccagaatatgactgtcaacaacactcattactttc

SEQ ID NO: 577204 - DNA, 453 bp, Homo sapiens
ggactttaatgattcctgagtggcctcactccagcttcaaagggcaggcttgaatttcttgccaaatttgaacttccyactgccattcctgtgggccataactccggacctgctggatgacttcaaaggatcataattgcgttggtattgggaaagttgtgaaggagcccttgtgacaaacaggaagcagcagacagtatgaaagacactgcagagacaagaagcgttgcctgatacatgaccctagcaactctctagctgctaagggaggaaacagagctgggaccaacacagccagtctacctgtgagagggctcaatttcccacatgaccagagcttcccatcctccatgcatgggaatctatgaccaaacatagatttccacaggatggtgggtgggtgggacaaagtctacagattctgagcagctggcaagtttcagggtaccagag

SEQ ID NO: 577205 - DNA, 453 bp, Homo sapiens
ggactttaatgattcctgagtggcctcactccagcttcaaagggcaggcttgaatttcttgccaaatttgaacttcccrctgccattcctgtgggccataactccggacctgctggatgacttcaaaggatcataattgcgttggtattgggaaagttgtgaaggagcccttgtgacaaacaggaagcagcagacagtatgaaagacactgcagagacaagaagcgttgcctgatacatgaccctagcaactctctagctgctaagggaggaaacagagctgggaccaacacagccagtctacctgtgagagggctcaatttcccacatgaccagagcttcccatcctccatgcatgggaatctatgaccaaacatagatttccacaggatggtgggtgggtgggacaaagtctacagattctgagcagctggcaagtttcagggtaccagag

SEQ ID NO: 577206 - DNA, 453 bp, Homo sapiens
ggactttaatgattcctgagtggcctcactccagcttcaaagggcaggcttgaatttcttgccaaatttgaacttcccactgccattcctgtgggccataactccggacctgctgratgacttcaaaggatcataattgcgttggtattgggaaagttgtgaaggagcccttgtgacaaacaggaagcagcagacagtatgaaagacactgcagagacaagaagcgttgcctgatacatgaccctagcaactctctagctgctaagggaggaaacagagctgggaccaacacagccagtctacctgtgagagggctcaatttcccacatgaccagagcttcccatcctccatgcatgggaatctatgaccaaacatagatttccacaggatggtgggtgggtgggacaaagtctacagattctgagcagctggcaagtttcagggtaccagag

SEQ ID NO: 577207 - DNA, 453 bp, Homo sapiens
ggactttaatgattcctgagtggcctcactccagcttcaaagggcaggcttgaatttcttgccaaatttgaacttcccactgccattcctgtgggccataactccggacctgctggatgacttcaaaggatcataattgcgttggkattgggaaagttgtgaaggagcccttgtgacaaacaggaagcagcagacagtatgaaagacactgcagagacaagaagcgttgcctgatacatgaccctagcaactctctagctgctaagggaggaaacagagctgggaccaacacagccagtctacctgtgagagggctcaatttcccacatgaccagagcttcccatcctccatgcatgggaatctatgaccaaacatagatttccacaggatggtgggtgggtgggacaaagtctacagattctgagcagctggcaagtttcagggtaccagag

SEQ ID NO: 577208 - DNA, 590 bp, Homo sapiens
catgtaggtcagtgatgctcaaggtgtttgtaagatgcctgggctaagcatgctccctgccctcctgtcagtcttcatgagctactgtgtataattagattgaagacacatatggtaacctctaaccatatcagaggttatatattacaggtttctgccttgagtcatcagaagatacgatttaaagttcaaagactataacatactaagtcctgagtagtccacgtaagtatcttttacacatgttttccaaattgctgacttaattagaagaacttctgaatttaaaggaagcactgcatgtttaggggagaaattacctaaatgtttttactccacacttctgaaccactccattaggctattaacattaaaagattgttttcagatgatttccaggaggctactgaacaagcctcagttgtattcttaggacagtcatagcattaaatgtatatcttattaaaatagatagcaaattccatgayacaagaaaataatattaagaaagagcaaaataataagagtcacagaataaacttaagggaaaaaggcagtaaatgaaaggtatgcatcattaacaaaaggaa

SEQ ID NO: 577209 - DNA, 630 bp, Homo sapiens
ggtatattgcagacagttttgcaacctaagggatttaatcagttttctgaaacttccctagcctgggcagtaaattcccagatcctagggcaccattccgaccacactacatgagactcactgggtgtgaatcrtggaatcttcacttttaaaggatcctggattccaactttcatggaaacttgtctgagaactagtagagcaggggagtagtctcctttcccagctgcacagcttctttctcctttgtgaaggtatagaagggacaggtttttttgtgttctctgatgtacaaacccaagatcttcaggtgaagacatgctgccgttatggtaatgacacactcagggcactgtctccaaatcatacccaggccaatcctttcaagtctccatctcttaactatttctgaagaaatcaaatgtctcttgcctgtgcagtcccatgctataaaattctaaatattttgctatagcctttggctcttacccttcagatcttacccttgcacaaatatgcagcacaatagagttttccatgatgcctctgacctgtgcctccaccactcagtgctggtgacactgagaaagttacttaacatctctgtgactcctttctccaatagtacca

SEQ ID NO: 577210 - DNA, 593 bp, Homo sapiens
aatgcagttattctttaagagccagagaattcctttggcaacaacctctcagacacacccaggaacaatactttgcaccctttgatccaatcaagttgacacttaatattaaacatcacctgcagacctggactttaatgattcctgagtggcctcactccagcttcaaagggcaggcttgaatttcttgccaaatttgaacttcctgctgccattcctgtggactgtaactccggacctgctgaatgagttcaaaggatcattatagtattgggattgggaaagttgtgaaggagcccttgtgacaaacaggaagcagcagaaagtatgaaagacactgtagagacaagargagttgcttgatacatgaccctagcaactctctagctgctaagggaggaaacagagctgggaccaacacagccagtctacctgtgagagggctcaatttcccacatgaccagagcttcccatcctccatgcatgggaatctacgaccaaacttagatttccacaggatggtgggggggtgggacaaagtctacagattctgagcagctggcaagtttcagggtaccagagtaaacactgtc

SEQ ID NO: 577211 - DNA, 481 bp, Homo sapiens
agtgattttgctgttatattttgtattttttcttaatgacattcatgtatggaaagtcacatatagggcctttcaacctaakaattactttaattaaggttaacaacaacattttcaagatacctcaacaggagatgagtgtcaagactataggatttgtcataggctcaccaatacattgatctaatccttcagaaaattacatttaagttatgattaaaatgctatccacgaggccatcttcaggtttcctaggtagctgtgtgtttataatacacaatggtaaagtatgggaaatgcaggtgtgctgagacttatcctcagattgtcattaaaaataagatatcataatacaggaaaacaaacggggacatctttgcatcacatttattaccacagtagcctacaggcttttattgcacaacactgaggaaaagaataggatcatttccttatttatcattcttgtctggctgctcca

SEQ ID NO: 577212 - DNA, 569 bp, Homo sapiens
tgtaaggtggttcagaccccagaagcctgactgcaaagccgaaacactatcagatacagacacaaattgggtgaaagccatattgaaccatcaaataggaaagcattttgttacttctaagtataaccaacagctaacaattttcagattactttgtaatttctgtttctcacaaatatataatgcatttgtaataccactttgtatgaaatatactgatctctgaaggagattctagtaccagctccaacacgatttgtgagattctggacaaatcacatcaatcctacacccatttttgcttttattgaaagtagtgaatgcatatcaaatagattaaaatccatttcagtgctgatttctgcatgctatggttctgttggagagaatacacagatattctgattttcatgattttttcatcataacaatcagctttagtccaattaaaatatctgagttgagatttcattgctcctaagaaaatgagwaggcactctgcttgatgcttgttttcctgtatggagaccttcatgagtgtttttggattttgtcaaatcctgaattct

SEQ ID NO: 577213 - DNA, 552 bp, Homo sapiens
gtcaggtttttgtgacccatgaagtagggagaatgcatgtaggtcagtcatgctcaaggtggttgtaagatgcctgtgctaagcatgctccctgtcctcctgtcagtcttcatgagctactgtgtrtaattagattgaagacacatatggtaacctctaaccatatcagaggttatattacaggcttctgccttgagtcatcagatgatatgatttagagttcaaagtctataatgtactaagtcctgagtagtccacataagtatttttcatacatgttttccaaattgctgacttaattagaagaacttctgaatttaaaggaagcactgcacgtatagggaagaaattatctaaatgtttttactccacactgctgaaccattccattcgactatttacattaaaggatagtttacagacgatttccaggagcctattgaacaagcctgaattgtattcttaggacagtcatagcattatatgcgtatcctattaaaatagacagcaaattacatgatacaagaaaataatacttagaaataaaaaaaa

SEQ ID NO: 577214 - DNA, 552 bp, Homo sapiens
gtcaggtttttgtgacccatgaagtagggagaatgcatgtaggtcagtcatgctcaaggtggttgtaagatgcctgtgctaagcatgctccctgtcctcctgtcagtcttcatgagctactgtgtgtaattagattgaagacayatatggtaacctctaaccatatcagaggttatattacaggcttctgccttgagtcatcagatgatatgatttagagttcaaagtctataatgtactaagtcctgagtagtccacataagtatttttcatacatgttttccaaattgctgacttaattagaagaacttctgaatttaaaggaagcactgcacgtatagggaagaaattatctaaatgtttttactccacactgctgaaccattccattcgactatttacattaaaggatagtttacagacgatttccaggagcctattgaacaagcctgaattgtattcttaggacagtcatagcattatatgcgtatcctattaaaatagacagcaaattacatgatacaagaaaataatacttagaaataaaaaaaa

SEQ ID NO: 577215 - DNA, 570 bp, Homo sapiens
tgtgtgtgtgtgtgtgtgtgtgtgtgtgtaatttaattttcacatattattccaagttactatttttaatttttactatcaattgagttttttatatwgttttcatttttctaataaaaagtaaacgtgttttttgccacacaaagttatcagctttcaataatatcacaatctgaattaaggtttcattttctgttgactattcatcttaggttttgcaccaatgataccctgcatcaaacttcgcataaaaatctaatatgggggctgtttaggaggcttttcagtttttctactccactttataggtcttacccaaggagccaggaacccaatgtggggtccaagtacggtaaaaagtatattatactaattacatacttggtgaccagggaaatagccactgacagtgcctatagatttagtgaacccactgtgagctgactttgctgaggattccatttcattacctgaataccatgtgcacttgcaatggtactatagagtactttattctttcagtttgaaaacagataaggacaggaacactaggcaagggatcatgatctg

SEQ ID NO: 577216 - DNA, 435 bp, Homo sapiens
aatgaattctccctcacccacatttctgttccaacctcctaggttaaataccctcaaaatttagttccatgcatactctcggtgctcatgataacccatgctagcyaggttttgcagcggttttgtaatacttctttcccaaaccctcattgagttcagtatgtccccagttgcataaagctgcaacttctccctcgttacaagcctaatgaccaagagtggggatagggtcagttccttagagggacatatattgtctcacagtagagaagacattcttcagtttacttaggaaaagaggtttttgagtcttaagtggagagttgagccacttttctagggactgaagatacatgagaaattacaattttgagggacaactcagatagcaccatgccatatgtttgagtccctttattttccaagcagactttg

SEQ ID NO: 577217 - DNA, 645 bp, Homo sapiens
accatttattgaatagggtgtctttttgctagtatatccaasagcatattaaaaagacaacacaccatgatcaagttggttttattccagcaattcatggatggttcagcatatgtaaatcaacacatgtgattaaccacataaaacaaaaaccatttgatcatctcaatagatacagaaaaacatttgataataaaatctagcatcctttcttagtaaaaaccctcaacaaaatagtcatcaaagaacatatctcaaaataataaaagtcatatataacaaacccacaatcaatatcatattgaacagtggaacactgaaagcattcccagtaagaattagaacaagacaagtatgctcactttcatgactcctattcaacaaaatactgaaagtcctaggcagagcaattaggcaagagaaataattaaaaggcatccatattaaaaaggaggaagtcaaaatatctctgttcactgatgatataatcttatgcctggaacactcaagactcctccaaaagaatcctagatttgataaatgatgtcagtaaagtttcaggatgcaaagttgatgcgcaaaaattagtagcatttctaaatacccataatgttgaagcttagaaccacatcaagaactcaatcc

SEQ ID NO: 577218 - DNA, 495 bp, Homo sapiens
ggttaacttcctgtgctacataaaatagataattwgattaacatatgaagctttgtcattgaggggaattcccgtacctcatacttttcaagagcgttgcttagtacaactgctgtacatcttccacttacatttgtatcccatgccaacccttctgtaaaccaaggacaggcttttttcttttctatcagctggttacgtatgatcaaccatatggccatagaactcagggagggttgtgctgctactacagcattagtgaatgacatggtttctgggaaccctgccattgcaccttgatttttcacctacttaaaaacagatatgcaactgccaagcatagtatagatttcttcttgagtctgcttgaatttatgatttggtgcccaggatagaacttgatggtcagttacaaatacatagacacttggtgttcactgtttaattgcttaatttcttccagaccatgttaaaagttgttttgaaaatggaatt

SEQ ID NO: 577219 - DNA, 573 bp, Homo sapiens
ataataaacacctcccacctcacctcacatcatacacaaaaataaattccagaggctgaggcaggcagttcatttgaggtcaggagttcgagaccagcctgaccaacacggtgaaaccccgtctctactaaaaatacaaaaaaattagctgggcttggtggtgcatgcctatagcccagctacttgggaggctgaggccggagaatcacttgaactcaggaggcggatattgcagggagccgagattgcacctcccagcctgggtgacagagtaagactttgtctcaatcaatcaatttcagatgaattagagagttcaataaatcaaactayagaaatattagaagaaaacatagaatatttgcatattcttagcagggttttgcaaatctttctttattagacattaagcccagatgcctaaaagaaaatactgacagtttttactaaaaaattatttaattgtgtatcaaaagacatcataaagttaaaatcaagagagacactgagtgaaaatatttgccatatatagatgggtgtatatctacatgcacatatactcacatatataaa

SEQ ID NO: 577220 - DNA, 673 bp, Homo sapiens
tccattaaagctaggcaggccgaaagaaagaacagctactggggagcyagttaacagtgtctgctatgctttcatcatgtcactttcttgctctgcttcaaaaccctttcatgtcaccacatcgcctgttcaaagtgctctcaccttgctcagcagttattaagactcctccatgaggtagcccttccacttccccagtctcatcaccatggacctcctctgtatagctctactggtgccaaaccattctatcagctattacataaccatgatttgtactttgctgctgttatggtctgaatgtgttcctccaaattcatatgttgaaacttaactgccaatgtggtggtattaagcagtggcctttcggggatgacaaaatcatgagggtagcaccccatgaatggggttggtgaacttataaaagaagtttgagagagcaccccaacccttttagcccactctctgcaatgtgaggacgcagtgttgctccccatcagagaaagcaggattcaaggtgccaccttggaagcagagatcgggccctcaccagacactgaacctgccagcgccttgatcttggacttttccacctccagaactatgaggaatcaatttctattatttataaattacccagtctgcagtgttttgttatagcagcaggaataga

SEQ ID NO: 577221 - DNA, 673 bp, Homo sapiens
tccattaaagctaggcaggccgaaagaaagaacagctactggggagctagttaacagtgtctgctatgctttcatcatgtcactttcttgctctgcttcaaaaccctttcatgtcaccacatcgcctgttcaaagtgctctcaccttgctcagcagttattaagactcctccatgaggtagcccttccacttccccagtctcatcaccatggacctcctctgtatagctctactggtgccaaaccattctatcagctattacataaccatgatttgtactttgctgctgttatggtctgaatgtgttcctccaaattcatatgttgaaacttaactgccaatgtggtggtattaagcagtggcctttcggggatgacaaaatcatgagggtagcaccccatgaatggggttggtgaacttataaaagaagtttgagagagcaccccaacccttttagcccactctctgcaatgtgaggacgcagtgttgctccccatcagagaaagcaggattcaaggtgccaccttggaagmagagatcgggccctcaccagacactgaacctgccagcgccttgatcttggacttttccacctccagaactatgaggaatcaatttctattatttataaattacccagtctgcagtgttttgttatagcagcaggaataga

SEQ ID NO: 577222 - DNA, 585 bp, Homo sapiens
gtgaacaaaggtctctccatcataracaatgtaaagatttaatttctgtgctttagatatgcatatacctaaacatctcagggccttacagatctgtattgctgcccacgtgtcccacctcaagccctaaggtggttttcccctatctctgtagatggaacatacaattgggttttataccgagagattccattgcccaaggaaggtcaggagacagatgccttcctcttgtctcaactgcaaagaggcattccttcctcttatagtaatcctcctcagcacagacccagtagggtgttgggctgggggatggtcaggtctttcccttcctacgaggccatatttcagactgtcacatggggataaaccttggacaatacctggctttcttaagcaaatgtccctgtggccttccagtgtttgtgtccctggatagttgagattagggagtggtgatgactcttaaagaggatgctgccttcaagcatctgttaaacaaagcacatcttgtagagcccttgatcaatttaaccctgagttgccacagcactcatttcagggagcacatggttttcggggtaaggt

SEQ ID NO: 577223 - DNA, 478 bp, Homo sapiens
ctatgtatatagctagaaactgtccaatttgaatagaaaagtcaagtaaaataatgaaaatgcaatacatggtatgtacatacagtattactaagcctttttaaggaaggaaattctgccatatgcaacaatattaatgaacctagaggacattatactaagtgaactaggccagtcataggaaatattgtataatcccacctatataagctatctaaaatagtcaaaatcatcgaagcaggraacagaatggtggttgtgaggggatgagaggaggaggaagtgagttgttcaactagtataaagtatcagttatgtaagatcactaaattatagagattttctgtagagcatcatgcctatagttaacaatattgctttatacacttaaaaatttgttagggtagatctccagctaagtgttcttaccagacaaacaaacaacaaaataaacaggatgaagagggaggaattttgg

SEQ ID NO: 577224 - DNA, 576 bp, Homo sapiens
aagcttccaaaggaaagaacaggaagcaatctttgctgctctgcagcctctgctggtgatacccaggcaaacagcgtygggagtggacctccagcaaactccagcagactagcagcagaggggcctgactattagaaggaaaagaaatagacagaaaggattagcacatccactcaaagatcccatccgtaggtcaccaacatcaaagaccaaaggtagagaaatccacaaaaattagaaaataacagtgcaaaaaggctgaaaattctaaaaccagaacacctctcctcctccaaaggatcacaactcctcaccagcacaggaacaaaactgaatggagaatgagtttgatgaactggcaaaagtaggcttcagaaagtgggtaataacaaactcctctgagctaaaggagcacgttctaacccaatgcaaggaggtaagaaccttggaaaaaggatagccgaattgctaaccagaataaccaatgtagagaagaacataaacgacctgatggagctgaaaaaacacagcacaacaacttcgtgaagtattcgcaagtatcaatagccaaatcga

SEQ ID NO: 577225 - DNA, 513 bp, Homo sapiens
ctctgacctaaaagagaacaagrcccaatactacagaaattctgatatttctccttaagttcaattggattttccagctggggagacatgtcagaaataagggcacaaggctgggagtgggggctcatgcttgcaatcccggcacttcgggaggctgaagtggggggatctcttgacagtaggagttgagaccagcctgggtaacatagtgagaccttgtcgctacaaaaaaaattttttaaaaagttatccaggtatcatggcgcctgcctgtagtcccagctacttggaaggctgaggcaggaggactgcttgagcccaggagactgaggctgcagcgagttacagttgcaccactgcactctagctggggtggcagagtaagaccttgtcttggggaaaaataaataaatatatgagggaaaaggaaaggccacctcactaaaacttatgtggcatacctaacaatttggtcatttttaatataatgaaaaaattcaaaattattataat

SEQ ID NO: 577226 - DNA, 513 bp, Homo sapiens
ctctgacctaaaagagaacaagacccaatactacagaaattctgatatttctccttaagttcaattggattttccagctggggagacatgtcagaaataagggcamaaggctgggagtgggggctcatgcttgcaatcccggcacttcgggaggctgaagtggggggatctcttgacagtaggagttgagaccagcctgggtaacatagtgagaccttgtcgctacaaaaaaaattttttaaaaagttatccaggtatcatggcgcctgcctgtagtcccagctacttggaaggctgaggcaggaggactgcttgagcccaggagactgaggctgcagcgagttacagttgcaccactgcactctagctggggtggcagagtaagaccttgtcttggggaaaaataaataaatatatgagggaaaaggaaaggccacctcactaaaacttatgtggcatacctaacaatttggtcatttttaatataatgaaaaaattcaaaattattataat

SEQ ID NO: 577227 - DNA, 513 bp, Homo sapiens
ctctgacctaaaagagaacaagacccaatactacagaaattctgatatttctccttaagttcaattggattttccagctggggagacatgtcagaaataagggcacaaggctgggagtgggggctcatgcttgcaatcccggcacttcgggaggctgaagtggggggatctcttgacastaggagttgagaccagcctgggtaacatagtgagaccttgtcgctacaaaaaaaattttttaaaaagttatccaggtatcatggcgcctgcctgtagtcccagctacttggaaggctgaggcaggaggactgcttgagcccaggagactgaggctgcagcgagttacagttgcaccactgcactctagctggggtggcagagtaagaccttgtcttggggaaaaataaataaatatatgagggaaaaggaaaggccacctcactaaaacttatgtggcatacctaacaatttggtcatttttaatataatgaaaaaattcaaaattattataat

SEQ ID NO: 577228 - DNA, 517 bp, Homo sapiens
tcttggggaatcatttttcctaaacagaaatcaagtgctttctccagttttacattgtcacagctccgtatccagcacccacaagtgaaaagtgctctggtcatatctgctgttccaccttcgtaatctgtcacatcaacgaactgtctgataatattagcctacttcatctaaagctcttccaaacctcacatctgaaaayaaaacttaaaacaaaaatgcacaatttaaaaaggaagatgagattgaatgtcaccaagagttttacaatctacacagaaatttggcagacatcaaaactaccagggtttcccaagaaaataatgatggtgcctctatcagtgaacacgaaagtgacaatgatgggcatctcacttatctagaaaaaaaatacaccttagatataaatggtaaaatggtagcaaagttaaccataggatgaagatgaaggtaaaggaaactttttaaaaaacataataatgaccctgagtttcatcctccaaatcaaggactggcc

SEQ ID NO: 577229 - DNA, 533 bp, Homo sapiens
tagggaaaggaaggcagatttattagagaaagtaggaaaatatgttgccagagagagaacgggctgccggaaactgactgactgtaaagaaacaaaggcttgctggagatttataggttagtgtttatgctgtctgtcaaagagagctttctgcagtactgataatgccaaggttgcagtgagctaacttgcaggtgtcttgtgatagttgggcacagagagattgtgagttacttgcacaggagggctgtgtgtcctggatcttgaagaaaggcagacttgtagcttatctcctttctgtcttcgctttcccctactcccaccagcctgactccttttgcctaattaggattccacagtgaccagggctcagatcttttaaagatgatatttgggcaacccatccaagtgagccacctagactaggcaatgtgctgacaaatagcgagaggaatctggaataggtagtagagaagagagatggtaagtaytaagttatgcctttaggaccagcaccattatgagctttgttt

SEQ ID NO: 577230 - DNA, 420 bp, Homo sapiens
ttatgctaaatgaaataagccagacatagaaagacaaatactgctgatctcacttatttgtggaatctcaaaaagtcamactcataaaaaacagagcagaatggtggttgccaggggctgggagtgagggaaatggggaaatgttggtcaaggcgtacaaagtttcagttatgcagaatgaataagttctggagatctaacgtatagcatgatgactataggtaacaatattgtgtcatatacttgaaatttgctaagacagtagatcttaagtgttctcatcacacacacacacacgcacacacacacaaagtaactgtgaggttataaattgttaaatagcttgattatggttatcattttacaatgtgtacatagatcaaaacatcaagttgtaaacattaaatatatacaattttt

SEQ ID NO: 577231 - DNA, 587 bp, Homo sapiens
gtatggtttggctttgtgtccccatccaaatctcatcttgaatcgtaatcccataatctccatgtgtcgtggaagggacccagtgggaggcaactgaatcatgggggcagtttcccctcatgctgttctcatgatagtgagtgagttctcacgagatttgatggtttcataagcgactggcattacccctgctggcactcatacttctccttcctgctgccatgtgaaaaaggacgtgtttgctttcccttctgccataattataagtttcctgaggtctccccagcctggtggaactgtgagtcagttaaactttgtttctttataaattacccagtctcaggcagttcttcacagcagcatgagaacagactaatacaattttagaatcctttaatcacctcaaaaggaaatcctgtacccattagacaggcactcctccattttctcccagtcctagkcaatcagtctactttctgtctctgtagatttgcctatttgggacattttataaatggaatcatatagtatgtggtattttgtgactggcttcttcacttagcgtaatgtatcaagactgtagcaca

SEQ ID NO: 577232 - DNA, 512 bp, Homo sapiens
gggctttggggagcctaccctttcagcagatccaaaccacacagatcacagagatctatggaaaataatgtcttcctcatgagttgactcaatgttagcaatagtctttggtttggctcagtggcactctgggtggagaaatgatgcaaagagctttttctctaagaaaagggggcaacaaagttggcaaaggacatgctctgtaacctcaagaaaggccttcccaagatagcatttgctttctgttcagggaagcaccatgggctttggttctgtgactagtgtttccagttrtatttcttacctattattatcaaaccataaaactaatatggatgcagctgtctataaatttgattcttccccaaaccctgagaggtaactgtcatatatcccattttacaaataagtaaccaagttaatataaaccaaaatgattttaattttaagcaagatcaagttagaagcagagtacattcaacaacatggacaaatctcatagatcttaagtc

SEQ ID NO: 577233 - DNA, 475 bp, Homo sapiens
ttcgctaccacacctgaagttgacacaaaatctgctaatctacatactcttcagaagctgctgtgaatttctaatttctggtagggttgaggaacaaaagccatctatatccaagaccagttttacatgtrggtgaagtcagtggtttattatttcaacaaaaattaattgagctcctcctatatgtggggccctgtgctagatgctagaaatgtagtgtaaatgtgacaggaaatgtcctgattatgtttcaacagaggagacagacaacaggtcaacaaataagtaggcggtgtcattccagggggtgataagtcctctgatggtgtgaaaggataggaagtggctaggtgggtggctgtcttaataggatagtcagggaaggcgtctctgaggagatgttgtttaagcaaatatcaaaattggtggctcatgcctgtaatttcaacactttgggaggccgaggcaggaggat

SEQ ID NO: 577234 - DNA, 475 bp, Homo sapiens
ttcgctaccacacctgaagttgacacaaaatctgctaatctacatactcttcagaagctgctgtgaatttctaatttctggtagggttgaggaacaaaagccatctatatccaagaccagttttacatgtgggtgaagtcagtggtttattatttcaacaaaaattaattgarctcctcctatatgtggggccctgtgctagatgctagaaatgtagtgtaaatgtgacaggaaatgtcctgattatgtttcaacagaggagacagacaacaggtcaacaaataagtaggcggtgtcattccagggggtgataagtcctctgatggtgtgaaaggataggaagtggctaggtgggtggctgtcttaataggatagtcagggaaggcgtctctgaggagatgttgtttaagcaaatatcaaaattggtggctcatgcctgtaatttcaacactttgggaggccgaggcaggaggat

SEQ ID NO: 577235 - DNA, 573 bp, Homo sapiens
atgctttctgtacagcctgcagaactatgagccaattaagcctctttcccgtataaattacccagtctcaggtatttctttayagcaatgcaagaacagacaactactaagactttattgaaaaaattatagttgcaaagacaatattgctttggtcagggatacaaaaatgagccaattgaaaaaaaacagaaactacagaaataaactcatgtatacttaataaatcactgaagttatataaaaatctaatgtggaagtattcactattcaataaatagatctgggtgaaatagactgatctacatggggaaaaaatgtctgtaagggtcaaatgtttattatcttgaggtaggaaagaatttcttacataagatactgaaaggtgaagatggctgggcttttgggtcaggtggggacttggagaacttttctgtctagctaaaggactgtaaacacaccaatcagcatcctgtgtctagctaaaggtttgtaaatgcaccaatcagcactctataaaaacacaccaatcagcgctctgtttctatctaacagtttgtaaaagcaccaatc

SEQ ID NO: 577236 - DNA, 573 bp, Homo sapiens
atgctttctgtacagcctgcagaactatgagccaattaagcctctttcccgtataaattacccagtctcaggtatttctttacagcaatgcaagaacagacaactactaagactttattgaaaaaattatagttgcaaagacaatattgctttggtcagggatacaaaaatgagccaattgaaaaaaaacagaaactacagaaataaactcatgtatacttaataaatcactgaagttatataaaaatctaatgtggaagtattcactattcaataaatagatctgggtgaaatagactgatctacatggggaaaaaatgtctgtaagggtcaaatgtttattatcttgaggtaggaaagaatttcttacataagatactgaaaggtgaagatggstgggcttttgggtcaggtggggacttggagaacttttctgtctagctaaaggactgtaaacacaccaatcagcatcctgtgtctagctaaaggtttgtaaatgcaccaatcagcactctataaaaacacaccaatcagcgctctgtttctatctaacagtttgtaaaagcaccaatc

SEQ ID NO: 577237 - DNA, 573 bp, Homo sapiens
atgctttctgtacagcctgcagaactatgagccaattaagcctctttcccgtataaattacccagtctcaggtatttctttacagcaatgcaagaacagacaactactaagactttattgaaaaaattatagttgcaaagacaatattgctttggtcagggatacaaaaatgagccaattgaaaaaaaacagaaactacagaaataaactcatgtatacttaataaatcactgaagttatataaaaatctaatgtggaagtattcactattcaataaatagatctgggtgaaatagactgatctacatggggaaaaaatgtctgtaagggtcaaatgtttattatcttgaggtaggaaagaatttcttacataagatactgaaaggtgaagatggctgggcttttgggtcaggtggggacttggagaacttttctgtctagctaaaggactgtaaacacaccaatcagcatcctgtgtctagctaaaggtttgtaaatgcaccaatcagcactctataaaaacacaccaatcagcgctctgtttctatctaacrgtttgtaaaagcaccaatc

SEQ ID NO: 577238 - DNA, 634 bp, Homo sapiens
gaatagtgctgcaatgaacatatatgcatgcatgtgttgttatgatataatgatttatattcttttgggtatatactcagtaatgggattgctgggttgaattgtagttctgtttttaggtcttcaaggaattccacactgtcttccacaatggctaaactaacttacactcccacaaacagtgtataagcattcctttttcttcccaaccttgccagcttctgttatttttttactttttaataatagccattctgactctgactggtgtgagctggtattccattgtggttttcattcgygtttttctaatgctcagtgatgttgagcgtttttatcatatgcttgtaggccacatgtatgtcttcttttgcaaagtgtctattcgtatcctttgcccactttttaatggggttgtttgtttcttaaaaatctgtttaagttctttatagatgctagatattagacctttgtcagatgcctagtttgcaaaaattttctcccattttataggtcatgtgttcactctgttgatagtttcttttgttgtgcagaagctctttagtttaaatagatcccatttgtcaatttttgtttttgtttcaatgcttttgggtcttcgacatgaaatctt

SEQ ID NO: 577239 - DNA, 584 bp, Homo sapiens
  misc_feature 262, 282: n = A,T,C or G
tgttttctgaatgatgcaaataaaacaatgaaattcctgtatagaggatagagcttctattttatatggatgccaaggtaagtcctctctgttgaagggtaagatgtaaattctctgtagtaattctgaataaccagagtatcatcacttttgttcaaacagaagagattctgtagataaaaattaattgcaggtttttgtcagaaaagttgatttgccttgctgcccaacccctccagctccttcctcatgtaatgcattntgtcttttaacaaatggtanagagcactcctttgtgctacaaactgttctacatgctgagccatatagcagtcagtaagagaaatagcaataaagtctatgtctttataagatttaattccagtaggggagacagacaataaatagacaaacgaataagtgtgtcaaattgtcagaggtgtttgaaccagagcaactccatcttgaataggggctgggtaaaatgaggctgagacctactgggctagattctgagatggmtaaggcatgctaagtcacaggatgcaataggaggtcagcacaagatacaggtcataaagacc

SEQ ID NO: 577240 - DNA, 509 bp, Homo sapiens
aagtggttaatggaatatttagaccaggtaaagaagcagtgatgggttgaatcagtgaattaacagcagagattaaaaggtgggagacaatatgcaggtaaacttgtcaggatttagcattggtcagatttagtagcctaaagaacagggaatggctcctacatttttagcttgagctattggcaagagagtggagccattaacacaaatgggttagaaatccagggcaagagtagtccaatctgaagagttgaaaaataaaatgtctgacatgtagttagaagctggaagtgtgtggttttttttctgtgtgtgtgtgtgtctgtctgtctttctagctcagagtagaagtaaagacatgaatttgrgctgggtgcagtggctcatgcctgtaatcccagcactttgggaggctgaggcaagcagattacttgaggccaggagtttgagaccagcctagccaacatggcaaaaccctgtctctactaaaaatacaaaattagctggac

SEQ ID NO: 577241 - DNA, 543 bp, Homo sapiens
gtaccaaaatctgtattagtcagggttctcgggagggacagaactaatagggtatatgtatctatgaaagggagtttattaagaagaattgagtcacactatcacaaggtgaagtcccaccatatgccatctgcaagttgaggagcaaggaagccagtaatggatcagtctgagtcccaaaacctcaaaagtaggaaagctgacagtgcagccttcagtctgtggccaaaggcctgaargccactggcaaaccactggtgtaagaccaagagtccaaaagctgaagaacttggagtctgatgttcaagggcaggaagcatccagcacaggagaaagatgaaggctggaagactcagcaagtcctcccacgttcttctgcctgctttaatatagccatgctgacagctgattagatggtgcccatccacattgagggaggctctgcctctcctagttcactgactcaaatgttaatctcctttggcagcaccctcacagaacacggaagaacagttctttgcacccttcagtccaatcaagttg

SEQ ID NO: 577242 - DNA, 543 bp, Homo sapiens
gtaccaaaatctgtattagtcagggttctcgggagggacagaactaatagggtatatgtatctatgaaagggagtttattaagaagaattgagtcacactatcacaaggtgaagtcccaccatatgccatctgcaagttgaggagcaaggaagccagtaatggatcagtctgagtcccaaaacctcaaaagtaggaaagctgacagtgcagccttcagtctgtggccaaaggcctgaaagccactggyaaaccactggtgtaagaccaagagtccaaaagctgaagaacttggagtctgatgttcaagggcaggaagcatccagcacaggagaaagatgaaggctggaagactcagcaagtcctcccacgttcttctgcctgctttaatatagccatgctgacagctgattagatggtgcccatccacattgagggaggctctgcctctcctagttcactgactcaaatgttaatctcctttggcagcaccctcacagaacacggaagaacagttctttgcacccttcagtccaatcaagttg

SEQ ID NO: 577243 - DNA, 370 bp, Homo sapiens
taatgtgattaatcacgggatccrtttcttgtgctgatgttcagctctgaccccatcctcctgtttacctcaaatcaagagacaacatccctggtgtgactgggacagagaatcaagcctgtggttttgcattgccactgctccattgtctagggttgaggttgtttacagaagacaggttcccagataatggaaacctagccttactgtctttatattttaaatacctttgatggaaatagtcctagagatttcatagatttcccaaagcatattaagcatgataaatcttttttgatgtctcaaggtagcatcaggaacatgttctttgaaagtccatttataggaggcaatgacctctgacattttt

SEQ ID NO: 577244 - DNA, 553 bp, Homo sapiens
gctcattaacagataaacagataaagaaaatgtggtatatatacacaatggaatattatttcaccataaaaagaatgaaatacagtcatttgcaacaacattaatggaactggaagacattatgttaagtgaaataagccaaagacacaaaggcaaatggcatatgttcttactcatatgtgggagccaaaaaataggctgggaagaatagtggagaggaagggataaagagaggttgcttaatgggtacaraaatacagttagaaagaaggaatatgatctagtatttggtagcacaaacacttagggcgactttagctgacaatagttcattgtatatttcaaaataactagaagagtagaattggaatgttcccaacacaaagtaatgataagtgtttgaggtgatgggtatcccgactacccatatttgatgattatacattgtatgcttgcatcaaagtgtcacatatgtttcaaaacatgtacaactataatgtgtccatacaaattaaaaataaattagttaaaaatgtaaaggcagattttctta

SEQ ID NO: 577245 - DNA, 592 bp, Homo sapiens
cttgtttcaaaagcaaaaaccaaaaagccactctttttgtttttttgtttttgtttttccttgaaaagcttgcattaattcaggagggtaacttaatatccatgacatcctaacagtgagagaaaacagtagagaatcttttcctaaagtccgaacagaaatcagattgtgaatatgtgcttatgtgcaaaggacttcatctggaaagtaatgagagggagcacagctgctgtaagcaagtgagtgcatagattgaattggattcaccatagyaattagtcaaaactagtacagaggaaggactagaaagaagcaggaggcaaaaactaaggtcagcatttagaggatctatttctctgggacagaaaaagtcagaacaaatcccagagacatttcagaatggaacctccaatatgcagttgtcattctgatgtaggccacggttgtgaggaaggggataggcacatgatgaaagccttattgatcctattactcagtcctggaacttgcagggagaagaatgattggccttcttgagtatattctcaagaagtagctcatattcaagggtaggtaagctgtgatgaaagag

SEQ ID NO: 577246 - DNA, 488 bp, Homo sapiens
tatgttagtatgtttaggcataggttttagtgaggtgggccaatatttgttttcaaagctatgttaagactatatacctaagggattcttctcacattggatgctaaagattgtgcagaataccttattctgcaagaaaaatttatctatagacatttttggaattctcattactctagcttaaaacagccagactatcatactctcctcatttgactatarcaacttacaagcacaaaagatgatcagcactttccttgctttaattaaaaaaaaaaaagtgctacacactgagagccatcactttgtaggataaaagttatcccaacaggaggtcctagaaataaagcagttaaaagaaaaatgataattttacatttttttagactgctgcatacctcttagcaaatttatcatgagtcttggcgtacattataaaatgacaaatctcttttaattatgtgcttttttttgaacaatcataaatg

SEQ ID NO: 577247 - DNA, 606 bp, Homo sapiens
agaatactgattggattgcagaatggtttaatctctatggaagaggatgaagaaaccactagcaaaactacacatccaattcccctttcattttgcaatctcaatgtctaggaatctactttgcagctgcacctccacaaatatgaaataaatgcaatattttttcattgcagtgttatttgtgatagcaatatattggaaatgacccaaatgttcacaagtaagggactaaatgatggtccatcattggggtactatgcatttgtagaaaagaatgaggagtatctytatgagctggtgtggactgatatctaggctatattgttaaggaaaatatcaatcaatattataatatgctatttttgtgtgtaagaaacaaagagaaataacatgtatatatatttgcttatgtgcttacatatatttgcttatacatatttgcaaaagaaagccaaggaaagataaaacagaaatcaatgaaaatgattatctataaaggaagcatgaaaatgaagtggtgggataagaatgagagtgagagttcctggaatatattcccacaaaagtatgttctgttgacttttttatatggttttaaattaagtg

SEQ ID NO: 577248 - DNA, 583 bp, Homo sapiens
agggttgagttgcattcatttactttcccagagccaagctcagtcagtatctttcccatactaagtactcaagtaaatattttgaattgaacttcatgtgtaaagttggtgaatatactacagaactggaatctaggtatgtttcattcttaatttagaaaacagtacttctggaaatagtcaactaagttttcttaaggcatatgaccatactatgattcaagttaaaaaaaaaagtactttcagttatttaactatctttcagctactcattccacttctacttaatctttggtaagaaaatgagaaagaaagtgttgtgagcagggtccagaataagggatttaaacaaacctatttccagctgctcttgaatcctagctgcacagggcagtttctgaggtgggcagggaggwtgctgagtaagaagactcacatatgctttggaatcacacacacctaactttgatttactactaatcattggaaggctccttggcctttcctaacttatttggtagagtggtcatgctaaataaaagagatcatgtgcactaagcagctgagatataataggggttca

SEQ ID NO: 577249 - DNA, 560 bp, Homo sapiens
cacttctcactgaaaagttgtggtttttttttagtaatatttaaatatctttgcatttgtgrccacagtttttacatctggggtagggctttcatctatcaatgatgttgatctgctgaggaaaaatgtaccttcagtacatttttcaatgtatattcaatcatttttctctttgactctgctgataaatggaacccaacgtacattttacaggatcgaagaacaaagacagaattcagatgggccttttgtcagagcattcaggtacttactgattgaggaaggcaaagaggtacctcatcactataaggaccgacctgggcaaagtcaggaggagtttgcggatgtgaagcgccctctcatagagattatctattcctacagacagaagatgacatggtcagagtcctttcacttgccacatttaaaacagaacactgcagtacatgtattaccggtacacatctgaatataagcaacaccctgctcttgtgtgagatccaattgtaaccaaaacagcgaataaatgatcggcttgggtataccaccattccagaggg

SEQ ID NO: 577250 - DNA, 387 bp, Homo sapiens
tgtgtgggtgagtgggaagggaggagttaaacacctagacagctccggaaacatccctgtctctatgaaacctggacactgaaggttttatatgtgagtaacatagattttgtttgtttgaacttctagtatagctctgcggtaacaagattagtgtcaaaatcstagatatccccaggagggaggggaagggttcctgggaaaggacaagagtccttccagtaatattccatgtacttgctgaacctagaaaacaaaactacaggatgcatatttatgtaagaatttcagataaataaagaataatttttttagtataagtatgtcccatgcaatatttgtgttttatttggtaaccctattgaatgagagcaatttcctcaaaaa

SEQ ID NO: 577251 - DNA, 387 bp, Homo sapiens
tgtgtgggtgagtgggaagggaggagttaaacacctagacagctccggaaacatccctgtctctatgaaacctggacactgaaggttttatatgtgagtaacatagattttgtttgtttgaacttctagtatagctctgcggtaacaagattagtgtcaaaatcctagatatccccaggagggaggggaagggttcstgggaaaggacaagagtccttccagtaatattccatgtacttgctgaacctagaaaacaaaactacaggatgcatatttatgtaagaatttcagataaataaagaataatttttttagtataagtatgtcccatgcaatatttgtgttttatttggtaaccctattgaatgagagcaatttcctcaaaaa

SEQ ID NO: 577252 - DNA, 387 bp, Homo sapiens
tgtgtgggtgagtgggaagggaggagttaaacacctagacagctccggaaacatccctgtctctatgaaacctggacactgaaggttttatatgtgagtaacatagattttgtttgtttgaacttctagtatagctctgcggtaacaagattagtgtcaaaatcctagatatccccaggagggaggggaagggttcctgggaaaggacaagagtccttccagtaatattccatgtacttgctgaacctagaaaacaaaactacaggatgcatatttatgtaagaatttcagataaataaagaataatttttttagtataagtatgtcccatgcartatttgtgttttatttggtaaccctattgaatgagagcaatttcctcaaaaa

SEQ ID NO: 577253 - DNA, 549 bp, Homo sapiens
gctatgccctggagatatgaagatgaaccaaaccatctcttccttctaggagttcatagtctaactggtaggagatggattatcagggaataaacacagatgtgctgtcactcactagtatgtgacctggaacagactttgatgggatgcwttatagtaaccttcatgttgggggacaattctctatggatctctctctctgcatgtcttgttagcagaagcaatgacaaccttttgctctgaattatcttttcaaggatgttttttggagggagaacagccttggaagataggcatagtgtttttctatggagcagagagcagatttgcttattttccataataataatgtgtccttttggggcaaagttcagggtaggtttgctggcagtacattacaaaataattggattcctaagcccaggattcctcagctgtgtaacacaaactcactgcacactcagcatctacctcaactgctccacattagctccatgcagctggagggctgggatagagagggtgactggcgtgaacatgaagctcatg

SEQ ID NO: 577254 - DNA, 549 bp, Homo sapiens
gctatgccctggagatatgaagatgaaccaaaccatctcttccttctaggagttcatagtctaactggtaggagatggattatcagggaataaacacagatgtgctgtcactcactagtatgtgacctggaacagactttgatgggatgctttatrgtaaccttcatgttgggggacaattctctatggatctctctctctgcatgtcttgttagcagaagcaatgacaaccttttgctctgaattatcttttcaaggatgttttttggagggagaacagccttggaagataggcatagtgtttttctatggagcagagagcagatttgcttattttccataataataatgtgtccttttggggcaaagttcagggtaggtttgctggcagtacattacaaaataattggattcctaagcccaggattcctcagctgtgtaacacaaactcactgcacactcagcatctacctcaactgctccacattagctccatgcagctggagggctgggatagagagggtgactggcgtgaacatgaagctcatg

SEQ ID NO: 577255 - DNA, 602 bp, Homo sapiens
aattctgatagataactcactgcagcctcagttgttatttatttccttcataggtagtttctagctatgaactgttttatacatatcaaaatatttttttacaatatcagaaaatagccatggacagttactgtgttttcctctgttatctattttgccactttcataggcacatttcttatggtgagatcagatcttttgcatgcataatagtaataaattatgtggctgtttaagtactgagtaaatgttaagaaaatagacatgatgataccttaaaattggcaaccatctcacaaaaataccagctccctgtcattgtgtttattcaccaaggagtctgctatgtctttgtgtaagcagcttctggttttgagatttaaaaataaaatagagtttcttttcagrtactcttgtcctttcaaggatggtgttagctcaaaaatcaatccccaaaagtctaaggtgtacaggaaggttttttcacttctccatgaactcatttatttaaatgccctacctaacttccatgataacacaagaacttttacaaagttttgacacctaatttatcagaaaaatgttccatcattaggaaaatg

SEQ ID NO: 577256 - DNA, 596 bp, Homo sapiens
ccatgataacacaagaacttttacmaagttttgacacctaatttatcagaaaaatgttccatcattaggaaaatgggtctctaaagctgtctttacacattagcaattagggaacttaagatttatgaaccaaagctaaagaagttgtgagatatgaatcaatgatttgacctgtaccagcccagaaatccagagtaaggtttggtggctaaattaggaaacgctcaccttttactcactgatttaaaaaaaatcaccacgaatacaacttcttttaatttaagctcctgagttatgtaacttgactggttgaccagcatgtttgtatatcattgtttaaaaaggaaaaaaaaagcttttctgaaaccattctgaatagcatcccatgtagtaaaatgaattcaactcaagcagttaatattttccatatatttcttagtcttttttattaaacttacaaatttaaaaggaacttgtttggggtgtgtgtcttaggggttgtctactatgtataagcaaacaatataaaattttatatatatttatgatgaataattttgttggcaagaattttactttggtagaaacaccagttc

SEQ ID NO: 577257 - DNA, 503 bp, Homo sapiens
tgcacagcacagcctgacactacctttttattctcactcattttatccacaggaaaatttctcttggtcctaggcctggttgaagagtgggggttggtggtggcagggcagagctagatccttctgtctgatttggctacaacccctgagctggattctagctcctatattttaatctttattgtgtaaatttggcagttcactgrgagaatacagagctctgttttctcacttataagatggaaagcttggaatagccagtgtaagttctttctagaacttcagatctgtgatttctctcataccactttcatatatgcccgtaagtcattttgaaatcctggttggattttgaaataaggaccttctaaattctttgccttctttcttcagttataatgcttagttacttttcccaaacctactaacattttccttatttatttttttatttatttatttagagacagagtcttgctctgtcacccaggctggagtgcagt

SEQ ID NO: 577258 - DNA, 581 bp, Homo sapiens
gaactcctgacctcaggtgatccacctacctctgcctgccaaagtgctgggattacaggcatgagctactgcgcctggccacattttccttatttttgattcaactctgtcctttttaagttatataagttcttaaaacttactcttttcttccatatttttgatccaagtgtctcgccttttctcaattacatcaggcactttctccacaatgttactgagctcttttctcattggtgactggtgtttatactggtaactctaatgccctcttttaagtactgcttctatatgacatccctgcaacattggcaccattccgtcttttagagtccacaaaaaggttgcttttcctccttccttccctcctgctcttctttctttttgttttgtgctagtttgttacaacaaactagactaatatcttcctagtccctttccaaactctcctttgcaactcagagtagaggcagtaaaaytaaatcttctagattttctctttctgcagagttctgagttagattctgccaaagagaagcatggcactagatttggaagatagaagaaaggtgaagccattt

SEQ ID NO: 577259 - DNA, 628 bp, Homo sapiens
tatttattctcttctgtgcatgcctccaactggcagtggctattacctcttgcatgagctctgcacccttttctgctttgtgttgaaaaccagggcaatgtagatgagaaaagacttttacttagaaattggtgattctgaagttttcaaatctgtgaaaaattcagcataagtcctccctttcattcctcccctcagtttaaaactttttattctcagtttgcaggagaaatcttatctacaagttattcctgacttatttgacacaacctcaccaaaaattaatcctgggaaatgtcttctgtgtatcttttccctgctatgcacttataatgttctgttgactagaactcccctcacatagaaatgaaagcttagaggtagaagcagattttcaacactttccactcctaatttgttttggagcttgctaggtgctgctgtgtggctggctgacttgacaaagatgtccaggtgctgtcacatcctcaagcccacgtttgtggtgctgacagcatctgtggagatggcccctccctgaggttcacatcagctgacagtcactatccacacagcaacacaaaaggtattgtcaaacacatcayctttcctggcaacagcaaatgac

SEQ ID NO: 577260 - DNA, 431 bp, Homo sapiens
agccccattttcctatgtccagaatgtcataggagcaaactgtttttaaaaatggagacttgcgacacagatacacagatacaaacttagaaaagactcaacaaggttatcagcagaaggaatcttcctgattcttctcagctttagtagttgaaccttcaacctcaatgacgaaatttaaaatgctaagtaaagactggctatctatgcttgatatattcatgtggcagggcagtgattatgtgatgaaaatttggtaaatatgacactcttctcgtatttacctcttgtcttttacggatcatttccagcacttgcatcttatgcaaatattgtctgttctcagaagtatacattggagtttgcattttcttttctagtacctgcyatgaaagacaacacacttgttagtatggggtaatttgttactg

SEQ ID NO: 577261 - DNA, 555 bp, Homo sapiens
gtgggactgccgaatcaaatggtaaatatacttttagttttttaaggaacctccatactgttttccatgatggttatmctagtttacattccccccagcagtgtaaaagtgttcccttttcactgcatccatgccagcatttattattttttgatttttaaattatggccattcttgcaggagtaagttggtattgcattgtggcttcgatttgcatttccctgataattaatgatgttcagcattttttcatatgcttgttggccatttgtatatcttcttttgaaaattatctattcatgtccttaagcccactttttgatgggattgtttgttttttattgctgatttgtttgagctccttgtaaatactgaatgttggtcctttgttgcattcatagtttgtgaagattttttccccctctgtgggttgtctgcttatgctgcttattttaatgtcaattttttttttttttttttttttgctgtgtggaagctttttagtttaattaagtctcatctatttatctttgtttttgttgaatttgcttttgg

SEQ ID NO: 577262 - DNA, 555 bp, Homo sapiens
gtgggactgccgaatcaaatggtaaatatacttttagttttttaaggaacctccatactgttttccatgatggttatactagtttacattccccccagcagtgtaaaagtgttcccttttcactgcatccatgccagcatytattattttttgatttttaaattatggccattcttgcaggagtaagttggtattgcattgtggcttcgatttgcatttccctgataattaatgatgttcagcattttttcatatgcttgttggccatttgtatatcttcttttgaaaattatctattcatgtccttaagcccactttttgatgggattgtttgttttttattgctgatttgtttgagctccttgtaaatactgaatgttggtcctttgttgcattcatagtttgtgaagattttttccccctctgtgggttgtctgcttatgctgcttattttaatgtcaattttttttttttttttttttttgctgtgtggaagctttttagtttaattaagtctcatctatttatctttgtttttgttgaatttgcttttgg

SEQ ID NO: 577263 - DNA, 555 bp, Homo sapiens
gtgggactgccgaatcaaatggtaaatatacttttagttttttaaggaacctccatactgttttccatgatggttatactagtttacattccccccagcagtgtaaaagtgttcccttttcactgcatccatgccagcatttattattttttgatttttaaattatggccattcttgcaggagtaagttggtattgcattgtggcttcgatttgcatttccctgataattaatgatgttcagcattttttcatatgcttgttggccatttgtatatcttcttttgaaaattatctattcatgtccttaagcccactttttgatgggattgtttgttttttattgctgatttgtttgagctccttgtaaatactgaatgttggtcctttgttgcattcatagtttgtgaagattttttcccmctctgtgggttgtctgcttatgctgcttattttaatgtcaattttttttttttttttttttttgctgtgtggaagctttttagtttaattaagtctcatctatttatctttgtttttgttgaatttgcttttgg

SEQ ID NO: 577264 - DNA, 583 bp, Homo sapiens
gatttgctagtgctcctcccagggcagaggactgtgtgcacgaggggccttgaagctgaagcttcctgagcttcatggtacgttgcctccacctgtttgctacttcaggagggcaacatctgtggactacagcacagtaataatggcagcaagacatgttttggtagagagtgcctgagataggcccctcatctccctgccccataggttatggagaatatttaagaagtttccaaggcttccaaagcagagtagggggaggggagctgagaattgagagccatggggatttcttagcacagcatgaggcatggacagcctaccttagggactgtatagaagatatagttgattatttaaggatgagtcacaccctctagactgaggtggtgaccatctcagcaggagaaaaccactgggcttcttcctgagcaatcattacacaaggctagtgctgagagtatggtgggaagtgacaccagccagggaggttggggtagatgctcaggagagaaaggccgatgcccaagatcatcaagatgggtatcgttcagtcgakgccagtttggacaaaggatggcac

SEQ ID NO: 577265 - DNA, 546 bp, Homo sapiens
tttgggaagtgagcaaagatctggagagagactgaggtgcccagtacacaggagcacacacatgtctaaacttgttgaaatgcccacccaacagttataaactgtgcagttggtaaactcccccacaacaaagttgagcgggaaaagataaagaagcagaatgtattgctatgatcctagcatgctcagacactcatcacaaatcatttgtggattgcaattacagttgctcagcagcagcctctggaacactgttatagccagtaaacatgctcccagacgccagaacatcagtcacgctgaagagatcatatttcaactcttgtttggaggatttgatatattccctgaagttacatagcccagtaccacccacaacaaaatacttcattccacagataaagaactggagactgatctattatcttactctctcatacagcttaacatcaatrtaatttttcttctgttatcagacaaagttcaaaaccctaggaaaggtaggcagggtaaatatcacaaatgagaaaatgtattcagatgtac

SEQ ID NO: 577266 - DNA, 599 bp, Homo sapiens
gcaccaccacgcccagctaattttcgtatttttggtagagagggggtttcacaatgttggccaggctgactcaaactcctgacctcaggtgatctgccacctcrgcgtcccaaagtgctgggattacaggcatgagccaccacggccggcatgagccaattttttcttgatctcacaagtgaaggaagtttccgcatttcagcaagttgtttcctttctgttaacctgctacactgtaaactcaagaacttctgttagttactgttttcttactctttgaggcagggttccagagtcagcttttcagcaagttgttccttttcttatctgctatcctgtaagctcaagaatttactcactggtttctttgactctttgaggcatagtttcagtttccccagactatgactgaacgttacattctacagactgggcagctccaccacctttctctcctactgcttttctttcccatgacaaagtgcctgaacagtagcgaagttaagtccagcccccagattaaacaagaacaagactcatgtcccctcaggacattcaaggagggaagaggagcacggtggcatttgtcagcaatcaga

SEQ ID NO: 577267 - DNA, 571 bp, Homo sapiens
actattaaatattttatagctggattagaattacataaaatgtaatcaaaaaataattctatcaatgcatatttaaaaaatccacttttgatgatacccaaaattagtttatacttatatatttcttcttacttcgttaaaattaacatcgattttctaataaacagaaaaccactacaaggagatgctcaataattgttgaaatctgataaaaytagattgaaatcacattggattagatttaaaaaggtatctttaaatggaaaagaaagacagacttagaagatgggaaaaataacagcagtcagtttttggtacacctcctcagtatcacatacctgcctgttttactcgctaagctgcatgttctctgcaggtggagactctgatattcagatgtgctctgaacagggggcacatttcaatcgatgaagaagtaaacaatgattttctttaatttattcctttatttttaagcattaaaatattcggctgctaaataactttgctattactactgacatttttctactatttatccactacaaaatctcagaagtaacataaatgg

SEQ ID NO: 577268 - DNA, 571 bp, Homo sapiens
actattaaatattttatagctggattagaattacataaaatgtaatcaaaaaataattctatcaatgcatatttaaaaaatccacttttgatgatacccaaaattagtttatacttatatatttcttcttacttcgttaaaattaacatcgattttctaataaacagaaaaccactacaaggagatgctcaataattgttgaaatctgataaaactagattgaaatcacattggattagatttaaaaaggyatctttaaatggaaaagaaagacagacttagaagatgggaaaaataacagcagtcagtttttggtacacctcctcagtatcacatacctgcctgttttactcgctaagctgcatgttctctgcaggtggagactctgatattcagatgtgctctgaacagggggcacatttcaatcgatgaagaagtaaacaatgattttctttaatttattcctttatttttaagcattaaaatattcggctgctaaataactttgctattactactgacatttttctactatttatccactacaaaatctcagaagtaacataaatgg

SEQ ID NO: 577269 - DNA, 497 bp, Homo sapiens
ccacttagacgaggtacctcgagtagtcagattcatagaaacagaaagtagaataaagttgctaggagctggagaataagcaaatgaagacttgtatgaacaacaactcctatgaaggtaagaagttttagctttacaaagtgaaaagctccagagatagggtgcacagcgaggtgagtataattaacaccactgaactctgcactaaaaatggttaagatggtaaatttaatgttacatgtgtactttatcacaaataaaaaataggaattatattgtgtgtgtgtgtgtatatatatatatgataatattatatatttagattgctacaattgctatatcaccattgacccagcaatttcacttaggagcaattttcytaagcacgtaattatacattgaaataagtttttaaaagatatatgtaggtgtaggtttttgtaatgtgattttttaaatcatgtatgttcaaactgcataatttaaatcatttactt

SEQ ID NO: 577270 - DNA, 551 bp, Homo sapiens
cccatggactcgggcagctccaccgctgtggctttttggggtacacaccactttctagctttcttcactggctgacattgagtgtctgtggcatgtcccaccatgcctggctaattttgtaatttttgtagtgatgggggactcactatttgcccaggctggtctcaaactcctgggatcaagcactagtcccatcttatcctaccaaagagctaggattaaaggcgtgagccaccacacccacaatctgtgccataattttatatgactggcagcacagcagtttctttacaccagcatcaccacaaacatatgaataatgcattgcactatgacatcaccaagaaataagaatttttcaggtkcattataatcatatgggaccaccttgcatacgcagtctgtcattgatcaaaatgttgttatacagggtgtgactgtgatgaaaaagtgctcaacatcactattcatcagggaaagcaaatcggaaccacactgagataacacttcacacctgtgagaatggcgattatcaaaaagacacaagataa

SEQ ID NO: 577271 - DNA, 551 bp, Homo sapiens
cccatggactcgggcagctccaccgctgtggctttttggggtacacaccactttctagctttcttcactggctgacattgagtgtctgtggcatgtcccaccatgcctggctaattttgtaatttttgtagtgatgggggactcactatttgcccaggctggtctcaaactcctgggatcaagcactagtcccatcttatcctaccaaagagctaggattaaaggcgtgagccaccacacccacaatctgtgccataattttatatgactggcagcacagcagtttctttacaccagcatcaccacaaacatatgaataatgcattgcactatgacatcaccaagaaataagaatttttcaggtgcattataatcatatgggaccaccttgcatacgcagtctgtcattgatcaaaatgttgttatacagggtgtgactgtgatgaaaaagtgctcaacatcactattcatcagggaaagcaaatcggaaccacamtgagataacacttcacacctgtgagaatggcgattatcaaaaagacacaagataa

SEQ ID NO: 577272 - DNA, 322 bp, Homo sapiens
agataaatgtaaaattctgtgttttaattgttggcatgtaaactaaacataaatgttctgaacagaaaaagcactatataaatatgcagacatttcaaagacttaggatattctgaatgctgctaagttttgccaattttttaaagaaagattgtgcctactgagacaaaatgaaatggagagcatatcagtttgcatgagaactakattaattaaaacagccagcttggataataatgtggatattttctgtaacaacatataggggtggaacatttattttaacaacaacctgaaccattagtgtaatttcatatttcaa

SEQ ID NO: 577273 - DNA, 322 bp, Homo sapiens
agataaatgtaaaattctgtgttttaattgttggcatgtaaactaaacataaatgttctgaacagaaaaagcactatataaatatgcagacatttcaaagacttaggatattctgaatgctgctaagttttgccaattttttaaagaaagattgtgcctactgagacaaaatgaaatggagagcatatcagtttgcatgagaactatattaattaaaacagccagcttggataataatgtkgatattttctgtaacaacatataggggtggaacatttattttaacaacaacctgaaccattagtgtaatttcatatttcaa

SEQ ID NO: 577274 - DNA, 322 bp, Homo sapiens
agataaatgtaaaattctgtgttttaattgttggcatgtaaactaaacataaatgttctgaacagaaaaagcactatataaatatgcagacatttcaaagacttaggatattctgaatgctgctaagttttgccaattttttaaagaaagattgtgcctactgagacaaaatgaaatggagagcatatcagtttgcatgagaactatattaattaaaacagccagcttggataataatgtggatattttctgtaacaacatatwggggtggaacatttattttaacaacaacctgaaccattagtgtaatttcatatttcaa

SEQ ID NO: 577275 - DNA, 322 bp, Homo sapiens
agataaatgtaaaattctgtgttttaattgttggcatgtaaactaaacataaatgttctgaacagaaaaagcactatataaatatgcagacatttcaaagacttaggatattctgaatgctgctaagttttgccaattttttaaagaaagattgtgcctactgagacaaaatgaaatggagagcatatcagtttgcatgagaactatattaattaaaacagccagcttggataataatgtggatattttctgtaacaacatataggggtggaacatttatttyaacaacaacctgaaccattagtgtaatttcatatttcaa

SEQ ID NO: 577276 - DNA, 583 bp, Homo sapiens
ttatccagcatgtaatttattgagcatctattctgtgccagacacaattgtaggaggtagagatgaatttatgagcaaagamacatgattcattcctttgtgaattttataggatggtactttaattaaataatcaagcaaatagatgtataatccaaactgtgtctagtgcttaaaagggtggtatatggcatgtctcatgcttattatggggaggagatcggcttggtttgggaggttatgaatggctttcctgagggagtgaccagtgttctgagcggagatgtctaagtggatatgaagttggtggtagagagagcctggtaagcatgagggaaagatgccagtgtggatatattctggctccaggaaaggctgagaggtgcttgctggtgctcatacctatggaaagccttaaaagtacacaaataagagagctgccatgtggtgaagaggctttcttgcctgggatttttcttcaattttattgtttacttctttttaacttctgtactttacttacttttaatttttactgaaattttgcttaaaatctcacatatatatatatatatatatatat

SEQ ID NO: 577277 - DNA, 583 bp, Homo sapiens
ttatccagcatgtaatttattgagcatctattctgtgccagacacaattgtaggaggtagagatgaatttatgagcaaagacacatgattcattcctttgtgaattttataggatggtactttaattaaataatcaagcaaatagatgtataatccaaactgtgtctagtgcttaaaagggtggtatatggcatgtctcatgcttattatggggaggagatcggcttggtttgggaggttatgaatggctttcctgagggagtgaccagtgttctgagcggagatgtctaagtggatatgaagttggtggtagagagagcctggtaagcatgagggaaagatgccagtgtggatatattctggctccaggaaaggctgagaggtgcttgctggtgctcatacctatggaaagccttaaaagtacacaaataagasagctgccatgtggtgaagaggctttcttgcctgggatttttcttcaattttattgtttacttctttttaacttctgtactttacttacttttaatttttactgaaattttgcttaaaatctcacatatatatatatatatatatatat

SEQ ID NO: 577278 - DNA, 546 bp, Homo sapiens
ctatcaaaatcttggaactacagcttggaaatacttttgtggaaagtgtccattatgtaacataattgccaaagccattcctcactrtctcacccatcaggctaatcagatgtaactccctggtggaaaaaagtcagcattttgcaattcaaataaacaataaacgcagcaggcttcttatccctgacatccgttgcccttctgagttctctgaggcagcatgagagatggacaagagagaggggtgaaagccttgctgtgagtttgtgcctggttgaaataaggccttgctcccaacagacctcatcacaggaacaagtctttcccaaattatcccttgaattggcaactaggagtttatatcccagggcccaagcactttcaaatacttgaaatggggccggcacgatggctcacacctgtaatcacagcactctgggaggccgaggtgggtggatcacctgaggtcagaagttcaagaccatcctggccaacatggtaaaaccctgtctctactaaaaataaaaaaaaaaattagctgggtgt

SEQ ID NO: 577279 - DNA, 441 bp, Homo sapiens
atatatttattattacatatatatttattatatatggttacatatatatgtaaaatataacatttgcttttagactataaaataaatatattttagtgatggtaatccgttataatttactcagctatagataattcactagcttccctcattctttctttcagcacacctgaaatctttcagcacacctgaaatctttctcaggagcctattctcaggctcaaagcagccctctcyagctgtccctactattgcaattttgtatgtaaatgcctttcatcccgtcccagagaaaaggatatctattgctctccactcattcccctctctgagctgtccctgacgtccattatgcaagctgagatattcaggagcagaaaggtctcttgtaaaactaactgcttagcaccacacctgtcatagtaagtactttgacaatgg

SEQ ID NO: 577280 - DNA, 573 bp, Homo sapiens
tagtaacccaaacaacatgatcctggtgtaaacctagacctatagatcaatgaaacagaataaagaacccagaaataaagtcacgtaactatagtccattgatatttgacaaagctgatgaaaacatacactggaaaaaggataccctattcaataaatggtgctggccgaactggattgccatatgccgaataacataactggatccttatctctcattatgtacaaaaattaacttaagattaattaaagatttaaatgtaagacttgaagccataaaaatactaaaagaaaacttaaaagaaatcttggatatttgcctaggcaaagaattcaaaagcaaatgcaacaacaacaagaaaatagataaatgagacttaaactaaaataatcaacagggtcaacagacaacttgcagaatgggagaaactatttgcatactatgcaactgaatagagactaatatccagaatctaccaaaaggaaaaaaaccattataaaaagatatctgtacttgtatgtttattgcagcactattcacatgcytttggtattttaataccaaattcaaaa

SEQ ID NO: 577281 - DNA, 234 bp, Homo sapiens
gtttcatgggctgggcccagggtctccatgctgtgtgaagcctagggacttggtrccctctgttccatctggtccagcagatgtatggaaatgcctggatgcccagggaaaagcttgttgcagtgacagcgccctcagagagaacctctgctagggcattgtgggagggaaatgttgggttggaccccccacacagaacccatactgcggcaccacctagtagagctgtgagaa

SEQ ID NO: 577282 - DNA, 234 bp, Homo sapiens
gtttcatgggctgggcccagggtctccatgctgtgtgaagcctagggacttggtgccctctgttccatctggtccagcagatgtatggaaatgcctggatgcccagggaaaagcttgttgcagtgacagcgccctcagagagaacctctgctagggcattgtgggagggaaatgtkgggttggaccccccacacagaacccatactgcggcaccacctagtagagctgtgagaa

SEQ ID NO: 577283 - DNA, 510 bp, Homo sapiens
aaccctgaaaggtagatactattttcagagataattgattcttagcagggttaagtracttacatgaaattattcattagataagcagctgttatatgtgtttaatcctagatttgcctaaatttatattccctttccatgaaaatattctatgttctttccactaaaaataatgctactctgaaaacaatttttgttgtagaagactctgtggtctaatcaaagtttgtgatctccctgaagaaagaatatgttaacagattctttctagtataaagaatatgtttcctggataaaatatatgaatctcagaaaatgttcagagagacaaaattaatttggtcatgcctttattcaactatcttcagggtatggaaataatatgtctagtgtacaggagtttttctttccctaggaaagagttattgttggttttgttttactttgtgtgtctgattttgtggtatggaagtattttgtcaagtcttaacagttcctggacaaaatgtc

SEQ ID NO: 577284 - DNA, 631 bp, Homo sapiens
ccccccctctctttctttctcttgctcctgccatgtaaaatgtgcctgcttcctcttcacctttcaccatgatggaaagtttcctgaggcctccccagaagccgctatgcttcctgtacagtctgcagaactgtgagacaattaaacctcttttctttataaattacccagtctcaggtatttctttatagcaatgtgagaatggactaccacacaaactaaattcagaaacatatggaaaagattataaatcgtgaacaagtgatatttatctcaggtgtgaaacgtttttttaatatccaaaaatcaattagtgtaatataccatttcagtagaataaaggacaaaaaccacgtttatctcaattgatgcagaaaaagcatctgacaaaattcaacatccctttataatgaaaacactcaataatytaggataaaaagaaacttcctcaccttgagagagtccctttccaactcctggggtcacccagggccagaagtacctttgggataaggtgtcctgattcagaccaggacccttgttactggtcccctttttccctttcagggtattgtccaactctcccaccaccacaaccaccactgccactgtgatgcatgaggtccactat

SEQ ID NO: 577285 - DNA, 499 bp, Homo sapiens
ttctggtcatttaaaaacccaagtaagagtgaagagtagtgatggaacagaaaaaaagtatttatgtaaaatattgatagtagggaaggtcaccaattgaatcaagtttcaattattgtataatttagatcaaaacagcccctacataggcagctgttctattacaaattgcatataagttayaaatcagcacctggttgtattgacaagatatgctccttgtccaaactttagtcagtctcctctgaaccctatacccaactaagtttcaacctgtggaattttctgtctctgcattgtgctattttagcagaagtcctaagtcagtttagcaagcatcccccatccttaatatctgatcaccctcagtatctttcttctttttttttttttcttttgagacagagtctcactctgttgctcaggctggagcacagtgctgtgatctgagctcactgcaacctctgactcctggattcaagcgattctcctgcctcag

SEQ ID NO: 577286 - DNA, 578 bp, Homo sapiens
ttttttttttcttttgagacagagtctcactctgttgctcaggctggagcacagtgctgtgatctgagctcactgcaacctctgactcctggattcaagcgattctcctgcctcagcctcctgagtagctgggagtagaggcacgcrctaccacacctggctagtttttgtatttttagtacagatggggtttcaccatcttagtcaggcttgtcttgaactcctgacctcaggtgatccacccgcctctgcctcccaaagtaatggattacagacctgaaccaccacccctggcctgatcacccttggtatctgatcaagttcctcatccttcacacaccttccagatctgatcacccttgcctccctctggtgagaatcctgttaggtttgtttaatcagaatccccaacttctgatgtttcctctttgtaatttttcatccattgacccccaacctgatccttaactataaatcccctcttgcccatgctgttttcagaattgagcccagttcgacactgaagtctcaacagttcccaaatgaactcctttactatccagctctggttttccttt

SEQ ID NO: 577287 - DNA, 524 bp, Homo sapiens
atcatcagacaaggcttagcatcrgcttccagcacaatggcctggcctctgcctgaactctgtgggcaggcacagctctctgttaccctggaaatcagttggacagtgggttgagagactatacctacccccactgcctgtagccaggaggggctcatggtgctcaagcagtgggggatcccctactctcagaacactgagaggggtgagacagctgggttcatggactggctcaggaacagggtgtgcctccttgtgcagggccagccagggaagggtatggtctattttccagccgcagcctctgcctgagggcaccctgcagcccaggacacctaataaatgaaatgcaggtgcagtgccagtaataagagagggctcccccaaggcccaggaatgtatctggtgagggggtcatctctccctaccaccacagagcactactgaggactgcaccaaaatacaaaagagctgtggactgagtaagagcctatctgccagctaccactcttaagcatcaccta

SEQ ID NO: 577288 - DNA, 474 bp, Homo sapiens
gcagctgaacattatagaagcaacaacaattcttatgataytggggtataggaaacaggctcaagaaagcacagtatttcctgtttctcttctgattcaataaataatattttctgttaaggtttttgataagtgttgttttaattaatcaaaaggagacaagataaatttgaacttaaaagcataagaaaatcagttgtctttttagaaaaggtgagtcagtatttcctatggtcttaaatcatccttcaaataatgatctatgaaacaaatgagatcctacttatctagccttttccttgataaattaaaaactgtaccaaaatcttactatattgcaaagacactagttcactcaattgagaatcctcagtatacaaacatataaatcaagggaacttaaccaatcattgtgttcaaaatgggaagattattccaaattttttctacatattttagaataatttcacagtt

SEQ ID NO: 577289 - DNA, 474 bp, Homo sapiens
gcagctgaacattatagaagcaacaacaattcttatgatactggggtataggaaacaggctcaagaaagcacagtatttcctgtttctcttctgattcaataaataatattttctgttaaggtttttgataagtgttgttttaattaatcaaaaggagacaagataaatttgaacttaaaagcataagaaaatcagttgtctttttagaaaaggtgagtcagtatttcctatggtcttaaatcatccttcaaataatgrtctatgaaacaaatgagatcctacttatctagccttttccttgataaattaaaaactgtaccaaaatcttactatattgcaaagacactagttcactcaattgagaatcctcagtatacaaacatataaatcaagggaacttaaccaatcattgtgttcaaaatgggaagattattccaaattttttctacatattttagaataatttcacagtt

SEQ ID NO: 577290 - DNA, 474 bp, Homo sapiens
gcagctgaacattatagaagcaacaacaattcttatgatactggggtataggaaacaggctcaagaaagcacagtatttcctgtttctcttctgattcaataaataatattttctgttaaggtttttgataagtgttgttttaattaatcaaaaggagacaagataaatttgaacttaaaagcataagaaaatcagttgtctttttagaaaaggtgagtcagtatttcctatggtcttaaatcatccttcaaataatgatcyatgaaacaaatgagatcctacttatctagccttttccttgataaattaaaaactgtaccaaaatcttactatattgcaaagacactagttcactcaattgagaatcctcagtatacaaacatataaatcaagggaacttaaccaatcattgtgttcaaaatgggaagattattccaaattttttctacatattttagaataatttcacagtt

SEQ ID NO: 577291 - DNA, 474 bp, Homo sapiens
gcagctgaacattatagaagcaacaacaattcttatgatactggggtataggaaacaggctcaagaaagcacagtatttcctgtttctcttctgattcaataaataatattttctgttaaggtttttgataagtgttgttttaattaatcaaaaggagacaagataaatttgaacttaaaagcataagaaaatcagttgtctttttagaaaaggtgagtcagtatttcctatggtcttaaatcatccttcaaataatgatctatgaaacaaatgagatcctacttatctagccttttccttgatarattaaaaactgtaccaaaatcttactatattgcaaagacactagttcactcaattgagaatcctcagtatacaaacatataaatcaagggaacttaaccaatcattgtgttcaaaatgggaagattattccaaattttttctacatattttagaataatttcacagtt

SEQ ID NO: 577292 - DNA, 600 bp, Homo sapiens
gttttgttgcacaattttttggttgtttatttggttggctttttggaaggcaaatttggaaaggggacctacacagaagtgctgacccacccacattcccttattatcattacagacaagaagaaactagcagagctaagaatggagtgaagaaaggcagtgtgataagcaccagcaaagagttgagggctgtttctctctaaattattatttgattattttaaaagtatggaagttctctagtcactgaagaaaggaggggaaagtgcacttatttttatatagagttacttaactacctcctaaacacatacgtggcaattgtttttgcttgtgcaaagtattttaattagcaagaattcatatattgagattataattagagagctcaatttatatatttgctatcctgctcaagcctgacatggaaaaaaaaaaaacaagttcactccaaaatatatagcttcaaaataataaatamtggaaaatttgttgtgataattattttgtacttttgtacaaaaaaactaaagaacaaattacctaaagaacaatttgctaaacatgaaaaattgctcccttagagtatatacaggtaag

SEQ ID NO: 577293 - DNA, 542 bp, Homo sapiens
tgcaacatggtactagaagtcctagctagaacaatcacacaagagaaagatataaagggcataaaagtcacaatgaaagaagtcaaattatccttgttttctgatgatataatcttatatttggaaaaaccgaaaactacacaagggaactattagaactggtaatcaaattcagtaaagttgcaggatacaaaataaacatacagaaatcattagcatttctacatatcaacagcgaactatgtgaaaaagaaatttaaaaagtaatcccattaagaatagccaagcataaatacctaggaataagtcaaagaagtgagaaatttctaatatttaaaactgtaaaacattgatgaaagaaattgaagaggacacaaaacatgaaaaaaatgcaccatgtgcatggactgaaakaatcaatattgttaaaatgtccacactacccaaggcactctacagattgggtacagtctctatcagaatactaatgacattcttcacataagaaaaaatcctaaactttatatggaaccacaaaagac

SEQ ID NO: 577294 - DNA, 576 bp, Homo sapiens
atcacttgaacctgggaggtggagggtgcagagagctgagatcacaccactgcacccagcctgggtgacagtgtgagactttgtctcaaaataaaaataaaatataaaaatttgaaaaagaaaaagaaattacaacgtgcatttttaacttatcaaagttcaaagttaatcaccacacttcctgcttccctaatgacacaggaaacttagaacactacttcattcatcactatcacccctcgcccgtatatttatatgctatattcaaaaattttttaatcccccaagactacagtttyatacaattgatatttatttagatttgccttcatatttaccattttctctgtccttcattttttgtcttgcatcacagatcttgtatgtgagatcacttttcttttgcctgatatatatacttttgtgtttcctttagggagggcctgacagtaattgtctcagtctgtttctgaaaacaccttcattcactctcctttttttttttttttttttttttaaaaaacaagatttcactatgctgcccaggctggtctcaaagggatccttttgcctcag

SEQ ID NO: 577295 - DNA, 576 bp, Homo sapiens
atcacttgaacctgggaggtggagggtgcagagagctgagatcacaccactgcacccagcctgggtgacagtgtgagactttgtctcaaaataaaaataaaatataaaaatttgaaaaagaaaaagaaattacaacgtgcatttttaacttatcaaagttcaaagttaatcaccacacttcctgcttccctaatgacacaggaaacttagaacactacttcattcatcactatcacccctcgcccgtatatttatatgctatattcaaaaattttttaatcccccaagactacagttttatacaattgatrtttatttagatttgccttcatatttaccattttctctgtccttcattttttgtcttgcatcacagatcttgtatgtgagatcacttttcttttgcctgatatatatacttttgtgtttcctttagggagggcctgacagtaattgtctcagtctgtttctgaaaacaccttcattcactctcctttttttttttttttttttttttaaaaaacaagatttcactatgctgcccaggctggtctcaaagggatccttttgcctcag

SEQ ID NO: 577296 - DNA, 472 bp, Homo sapiens
ccagctttgtccttgttcttgaaagatgtttttgctgggtagattccaaattgacacttactcctccctcagcacattaaaaatattccattgtcttctggtttcactgctgctattgkcaccctctcccttttctgtaggtaatttatgttctctctgacaactttttaagaacttctttttgcctttagtgttctctaatttcacaagaatatgtccaggtagggatattatatttattcttcttgagattatttggcttcttaaatctgtgggttgatatttttcagaggtcttcaaaaatgctgaatcataatctcttcaaatgtgattattctatcctccatgactcttaacctgttatattttctacttcttgtcttctgggtaattgccttagatttgccacttctctcttcaaatgtgtctaatctatcattgtatccatagaggttgttgttgttgttgttgt

SEQ ID NO: 577297 - DNA, 555 bp, Homo sapiens
cacccggccaatttttttgtatttttagtagagacagggtttcaccatgttggccaggctggtctcaaactcctgacttcaagtgatccacctgccccggtctctcaaagtgatgggattacaggcacaagccttaatccgcgcccggccttgtatgtatctttctgaattttacttttactttttgtttctgagacaggggcttgctctgtcccccaggtaggagtacagtagcatgatcatgactcattgcagcctcaactttttcaggctcagatgatcctcccacctcagccttytgggtagctgggacaacaggcgcctaccaccacatcacaggagcctgccaccacatttggctaatttttgtattttttgtagacatggggttttcaccatgttgcccaggctggtttcaaagtccaggactcaagtgatccgcctgcctcagcctaccaaagttacaagcgtgagcccatgcccagcctagtttttttttttttttcttttttttgagacggaatcttgctcgttgcccaggctggagtgcagtgg

SEQ ID NO: 577298 - DNA, 414 bp, Homo sapiens
ttttcatttactaaaatgtataggcaataagcactatgggctatcaaagatgacaaaggtgggaggtgggatgtagtgattgagaaaaaaggtgacaattgagttgaacctgaaaggaaggagaagaatggcaggaagagttaaaccatttcttctcgtgcccagaggaaaatcatgcacaatgaaccagaaagaataataaaaagcttgccagatgcagtggcccatgcctctaatccctgcactttgggaagccaaggcaggcagatcgcttgargacaggagttcaagaccagcctgggcaacatagtgagaccccatctctacagaaaaatttaaaatttttttcaaggtatggtggcacacacctgtagtcccagctactggtgccactacactccagcctgggcaatg

SEQ ID NO: 577299 - DNA, 545 bp, Homo sapiens
gactcagtaatgtcccttcacagattctccaaaaagagtgtttccaacctgctgaatcacaagaaaggtttacctctgtaagctgaatccacayatcacaaagaaatttcacacatagcttctttctactttttatcatcgtatattcagtttctcactgtaggcttcagtgggctgagaaatacttcttcacagattctaaaaaaaaaagaatatttccaacctgctgaaacaaaaatggttcacatttgtgagctgaatgcaacattacaagggagtttcacagatctcttccttctagtgtttattgcagaatattctttttgtcactattgggttctatttgctttgaaatgtcccttttcagattctacaaaaacagtgattccaaccttctaaatcaatagaaatgtttaactcggtgagccaaatccacacatcacaaattagatgcacagatggctgctttctatttgttattgcggaatattcattttttcactactggcctcagtaggctctgaaatgtcccttcatagattcta

SEQ ID NO: 577300 - DNA, 558 bp, Homo sapiens
gttgttctgcagttatattaatttgaggttgggcctgsgttttgcaagcagcctgaatggaagcctcatctacccaacatgttttaaattgtaagaactaagcaggattcagacaagctcgagtaagagcatcccagtaagtagggatcatccgactggaaacagcaacattctttaacagtctcattacaaaagcagaacctggcccatattgattaatagcttgtttaaattccttgagtaatttaaaaggaaaaggctcaaatgtagctctaatatttccatgctgatcttggggttgtatcctaacagggtactgccaagcctctatatcaccctctcatctagcttgctgaatttctgcttaaatagaagtgagagcagtcgcccaaggcagtgctcaaacagtcactggggcaactacttttctcccagtgtcctccagaaaagaaagatatggagggccagaccactctttttcttcaaaataataagggggtgcagaagggtaaggactaacctctaccttccttgctgctttagctttagctggcaaac

SEQ ID NO: 577301 - DNA, 558 bp, Homo sapiens
gttgttctgcagttatattaatttgaggttgggcctgcgttttgcaagcagcctgaatggaagcctcatctacccaacatgttttaaattgtaagaactaagcaggaktcagacaagctcgagtaagagcatcccagtaagtagggatcatccgactggaaacagcaacattctttaacagtctcattacaaaagcagaacctggcccatattgattaatagcttgtttaaattccttgagtaatttaaaaggaaaaggctcaaatgtagctctaatatttccatgctgatcttggggttgtatcctaacagggtactgccaagcctctatatcaccctctcatctagcttgctgaatttctgcttaaatagaagtgagagcagtcgcccaaggcagtgctcaaacagtcactggggcaactacttttctcccagtgtcctccagaaaagaaagatatggagggccagaccactctttttcttcaaaataataagggggtgcagaagggtaaggactaacctctaccttccttgctgctttagctttagctggcaaac

SEQ ID NO: 577302 - DNA, 558 bp, Homo sapiens
gttgttctgcagttatattaatttgaggttgggcctgcgttttgcaagcagcctgaatggaagcctcatctacccaacatgttttaaattgtaagaactaagcaggattcagacaagctcgagtaagagcatcccagtaagtagggatcatccgactggaaacagcaacattctttaacagtctcattacaaaagcagaacctggcccatattgattaatagcttgtttaaattccttgagtaatttaaaaggaaaaggctcaaatgtagctctaatatttccatgctgatcttggggttgtatcctaacagggtactgccaagcctctatatcaccctctcatctagcttgctgaatttctgcytaaatagaagtgagagcagtcgcccaaggcagtgctcaaacagtcactggggcaactacttttctcccagtgtcctccagaaaagaaagatatggagggccagaccactctttttcttcaaaataataagggggtgcagaagggtaaggactaacctctaccttccttgctgctttagctttagctggcaaac

SEQ ID NO: 577303 - DNA, 596 bp, Homo sapiens
ttgtgtttccattttaatttgtctcaagatatttttaaatttcccttttaatttcttcactgactcgttggttatcaaagatcttccttcattttaccctctccagagaaacaaaccttttcaaaaacaaatcttgttcaaagtggagaccaattacttaactttgtgtcaagagaaaggtgatctgtatatctgtgaacttaagacaatttttcacaatctttcttactttgatattcttttctcctgcttgtaaagtatctaatggcaccgatttytgagctttctgagtattctattatctaagtcaagttggttgctgttttccatacttccagcagaagaatctgctaagtcatttaccacttgttcatgtgacttccaactttgagaatttttttgtgcccttattttcactactttgggtgtataccttaaaacttaaactaaagagcttctgcacagcaaaagaaactatcatcagaatgaacaggcaacctacagaatgggaaacaattttacaatctatccatctgacaaagtgctaatattcagaatctacaaataacttaaactgacttacaagaaaaaaaaaa

SEQ ID NO: 577304 - DNA, 596 bp, Homo sapiens
ttgtgtttccattttaatttgtctcaagatatttttaaatttcccttttaatttcttcactgactcgttggttatcaaagatcttccttcattttaccctctccagagaaacaaaccttttcaaaaacaaatcttgttcaaagtggagaccaattacttaactttgtgtcaagagaaaggtgatctgtatatctgtgaacttaagacaatttttcacaatctttcttactttgatattcttttctcctgcttgtaaagtatctaatggcaccgatttttgagctttctgagtattctattatctaagtcaagttggttgctgttttccatacttccagcagaagaatctgctaagtcatttaccacttgttcatrtgacttccaactttgagaatttttttgtgcccttattttcactactttgggtgtataccttaaaacttaaactaaagagcttctgcacagcaaaagaaactatcatcagaatgaacaggcaacctacagaatgggaaacaattttacaatctatccatctgacaaagtgctaatattcagaatctacaaataacttaaactgacttacaagaaaaaaaaaa

SEQ ID NO: 577305 - DNA, 596 bp, Homo sapiens
ttgtgtttccattttaatttgtctcaagatatttttaaatttcccttttaatttcttcactgactcgttggttatcaaagatcttccttcattttaccctctccagagaaacaaaccttttcaaaaacaaatcttgttcaaagtggagaccaattacttaactttgtgtcaagagaaaggtgatctgtatatctgtgaacttaagacaatttttcacaatctttcttactttgatattcttttctcctgcttgtaaagtatctaatggcaccgatttttgagctttctgagtattctattatctaagtcaagttggttgctgttttccatacttccagcagaagaatctgctaagtcatttaccacttgttcatgtgacttccaactttgagaatttttttgtgcccttattttcactactttgggtgtataccttaaaacttaaactaaagagcttctgcacagcaaaagaaactatcatcagaatgaacaggcaacctacagaatgggaaamaattttacaatctatccatctgacaaagtgctaatattcagaatctacaaataacttaaactgacttacaagaaaaaaaaaa

SEQ ID NO: 577306 - DNA, 371 bp, Homo sapiens
tgggaaatcaggggtctcacagccttcagagttgasagcactgaacagagatttacccacgtatttattaacagcaagccagtcattagcattgtttctatagatattaaattaactaaaagtatcccttatgggaaacgaagggatgggccaaattaaaggaataggttgggctaggtaactgcagcaggagcatgtccttaaggcacagatcgctcatgctattgtttgtggcttaagaatacctttaagtggttttccgctctgggcgggccaggtgttccttgccctcattcctgtaaacccacaaccttccagcgtgggcgttagggccattatgaacatgttacagtgctgcagagattttgttt

SEQ ID NO: 577307 - DNA, 429 bp, Homo sapiens
cttggccaacatggtaaaaccctgtctctactaaaaaatacaaaaattagcctaatgtggtggcatgcacctataattcctgctgctagggaggctgaggcaggagaatytcttgaacctgggaagtggaggttgcagtgagccaagattgcaccactgcactccagcctgggaaacagagtgagactctgtctcaaaaaaaaaaaaaaaaaaaaaaaaaaaaaaaagttactcagtttatggcactatgttatggcaaccttaacaaactaatccattactcttgtaataaccaggtagtctgacttcagggttcatactcctaaccactgggttacactggcttgcacacaacaatggctaacgttattggccacttgccaatagctgctcaataccaaggggggtgcctaaaatgaaaccttctgt

SEQ ID NO: 577308 - DNA, 517 bp, Homo sapiens
gcttcaaatgaaccccctgccttggtctccaaaagtaaacagcacttactattatttttaactttttattttgtgataattatagattcaaaggaagttgcaaagaaatgtacaaggagttctggtgcctcttcatccagtatcttctaacgttaacaacctgcaagaccacagcataatatcaaaatcaggaaattggcattggtacattcygaagagtttattcaaatttcaaaagttttgcatgcatttatgtgtgtgtgtgtgtatatgtgtgtgtgtgtagctctgtgtaatttgatcatgtgtatagctttgtgtagttactgtcacaaacaggatctataatcaccacaaggctttctcatgcttccttttcatggtcatgtttactccctttccaaataaccccattcctgaccccccagcaaacatgaattgattcttcatctctataattatatgatttcactattgtataaatgggacgatgcagtatgtattcttttgagattgg

SEQ ID NO: 577309 - DNA, 517 bp, Homo sapiens
gcttcaaatgaaccccctgccttggtctccaaaagtaaacagcacttactattatttttaactttttattttgtgataattatagattcaaaggaagttgcaaagaaatgtacaaggagttctggtgcctcttcatccagtatcttctaacgttaacaacctgcaagaccacagcataatatcaaaatcaggaaattggcattggtacattccgaagagtttattcaaatttcaaaagttttgcatgcatttatgtgtstgtgtgtgtatatgtgtgtgtgtgtagctctgtgtaatttgatcatgtgtatagctttgtgtagttactgtcacaaacaggatctataatcaccacaaggctttctcatgcttccttttcatggtcatgtttactccctttccaaataaccccattcctgaccccccagcaaacatgaattgattcttcatctctataattatatgatttcactattgtataaatgggacgatgcagtatgtattcttttgagattgg

SEQ ID NO: 577310 - DNA, 517 bp, Homo sapiens
gcttcaaatgaaccccctgccttggtctccaaaagtaaacagcacttactattatttttaactttttattttgtgataattatagattcaaaggaagttgcaaagaaatgtacaaggagttctggtgcctcttcatccagtatcttctaacgttaacaacctgcaagaccacagcataatatcaaaatcaggaaattggcattggtacattccgaagagtttattcaaatttcaaaagttttgcatgcatttatgtgtgtgtgtgtgtatatgtgtgtgtgtgtagctctgtgtaatttgatcatgtgtatagctttgtgtarttactgtcacaaacaggatctataatcaccacaaggctttctcatgcttccttttcatggtcatgtttactccctttccaaataaccccattcctgaccccccagcaaacatgaattgattcttcatctctataattatatgatttcactattgtataaatgggacgatgcagtatgtattcttttgagattgg

SEQ ID NO: 577311 - DNA, 580 bp, Homo sapiens
cagatggcatgtgcctgtaatcccagctacatgagaggctgaggtaggaggatcacctgagcctggggtggtcaaggctgcagtgagccatgattgcrccactgcactccagcctaggcaatggagtgagaccctgtctcaaaaaaaattaagactttataaagagaaacaaaacaaaagggataaaatggaaaatagaatcaaatcattacctgttgtgtatagataatagatgggagtcaaagggcaccacttaaaactgacagatggtaaaacaagtaaaaataaagggtactgaacataaaaaaatgtattaatacaaaggtaactacttagaataaaaatttaaattttcctaaatgccaaaataaaaatttaaaagtcaaagagggtataccaaatagagaaggggaaaagctagtaaatttaggatagtgcacatggtaatctcactgtaaaatagtagggtgggccgggtgcggtggctcatgcctggaatcccagcactttgggagcctgaggcgggtggatcacctgaggtcaggtgttcaagaccagcctggccaacagggtgaaaccc

SEQ ID NO: 577312 - DNA, 559 bp, Homo sapiens
caatcataatttttgtcattctgcaattgtaactaaacaaagagtgtgaaagagtgagtccacatactaaacactgaagtgcacactttgaaggaacatcatatttatcagtattaaagttcttaacaacaaatgagcatgctttgtgctggttaatstatttgatcaagtttggattgatcacaatgcttctggcttttgataatgtatacctaaattatttctgtgtttcataacactgatagtagagaaaccagtcttacagatatatgttgacaggaggattagaagtgattttaaaaggaattttagcaagcttagcatatttatgttggaattttattcaaaatgaagaaagcaatattttatttttgatgttcattttcaatccatcagtaaccactccaacaatttttcctataaagtcataatgaaatttaaattatctctcaatgaaaggaatggatttcagataaataaatttcctatgtacgaatttttttttttttttttttgagacagaggcttgcagtgtcacctgggctggagtgcagtggag

SEQ ID NO: 577313 - DNA, 582 bp, Homo sapiens
ttggatatgcgtatgcagaagaatgaaactacacccctatctctcgccatatacaaaaatcaaatcaaaatagattaaagacataaatctaaaacctccgacaatgaatctaccacaaaaaaaaatggggaaaatctacaggacattgatctcagcaaaatttcttgagcaatacctcacaagcacaggcaaccaaagcaaaaatggacaaatgagatcacatcaagttaaaaagcttctgcacagcaaaggatctaatcaacaaagtgaagagaaaacccaaagaatggkagaagatatttgcaaactacccatctgacacaggattaataaccagaatatggccaggcacagtgactcacacctgtaatcccagcacgttgggaggccgaggcaggcggatcacctgagatcaggagttcaagatcagcctggtgaaaccctgtctctactaaaaatacaaaaaagttagtcaggcgtggtggtgggcacctgtaatcccagctacttgggaagctgaggcagaagaatctcttgaacccaagaggcggaggttgcagtgagccaagatcgcaccactgc

SEQ ID NO: 577314 - DNA, 582 bp, Homo sapiens
ttggatatgcgtatgcagaagaatgaaactacacccctatctctcgccatatacaaaaatcaaatcaaaatagattaaagacataaatctaaaacctccgacaatgaatctaccacaaaaaaaaatggggaaaatctacaggacattgatctcagcaaaatttcttgagcaatacctcacaagcacaggcaaccaaagcaaaaatggacaaatgagatcacatcaagttaaaaagcttctgcacagcaaaggatctaatcaacaaagtgaagagaaaacccaaagaatgggagaagatatttgcaaactacccatctgacacaggattaataaccagaatatggccaggcacagtgactcacacctgtaatcccagcacgttgggaggccgaggcaggcggatcacctgagatcaggagttcaagatcagcctggtgaaaccctgtctctactaaaaatacaaaaaagttagtcaggcgtggtggtgggcacctgtaatcccagctacttgggargctgaggcagaagaatctcttgaacccaagaggcggaggttgcagtgagccaagatcgcaccactgc

SEQ ID NO: 577315 - DNA, 464 bp, Homo sapiens
aggcgacctcagggaactcacctaccactaattttcctctgatttgtcattgtmaattattcatagtgagacatgcctttttatatttatacatgtgctttttcaaagactaaaggaaataatgtactttgattagtaaaggaaaacataaaagtaagttattattactattcatagtttattaaattggtaattaattctataactagacttactaaagcatatgacttaagttgggaagtttacacatactttgaattaagattacaatctttattcagctccacttaaagtgaattatttgaaatcccgggaacttgtattttattcacagattgaaaacaatggaattcattaacttatcaaatattgtgtgatccttagataacactgaatatgaaaacataaattaatagaatagcttctattttatcaaaacatatacacatatacatatattaact

SEQ ID NO: 577316 - DNA, 390 bp, Homo sapiens
aaatagattttaatactttgaacacatttcttcctcccagagcaggaatttttgtccttcacatcttttctaatgatatccaaatcaatttttaatcctaaacattctcctattttttgtactttcatcttttcttaaaagagttttttttaaagtgagctaaagtatcactcccattaaatcactccagtgttaccttgccattgtcttttcctcttaatctagtgtatgatgaatcctatgacaattttaatacaaaagtacgttaaaccacgcttctattaggaaayagtttcttttgcttctgtttttcaatgaagaagcaaactggaattttatacaaaaagttttttactaatagcacacattctaattcaatagcaaataatt

SEQ ID NO: 577317 - DNA, 511 bp, Homo sapiens
acacagacttcctagcctatgstattatctgttgtattatttagcttggctactatgacatgaactaggtgacttataagcaaagagttttatttctcactcttctggagactggaagtctgagatcaggggaccagcatagtcaggctctggcgagagcctttcctgggtttcagaacacttcctcactgtatcttcacatggcagaaagcaaagtagaggaagcaagctctcttgtgacttttataagaacgctaatcccactcatgacgactcctccctatgacctcatctaattataattattcccaaagtctctacctcctaacaccatcacattgaacagtaggatttaatcctattgaacagtagtggggaaaaaggggttcagtctataacacttgtatttaaatgtaaatttgtttttctcatttttgaggtactttcagatatccatcaatatccatgctgacttctccccctcatatcaccttttatgatattgcatagt

SEQ ID NO: 577318 - DNA, 567 bp, Homo sapiens
attatttaaatttaaaattattataatttaaaatgccaatgaatatcttatttatgtttactttaaaaattttgttttgatatacagattggattagtctcttctcatgcagctaataaagacatacccaagacgggataatttataaagaaaaagaggtttaatggactcacagttccacatggctggggatgcctcacaatcatgacagaaggcaatggaggagaaaaagcccatcttacatggcgacaggcaagagagaagtgcaggagaactgccctttatgaaactatcagatctcatgagacttattcactatcacgagaacagcaagggaaaaacacgccccatgattcagttaccttccactgygtccctctcatgacatgtggggattatgggaactataatttaagatgagatttgggtggagacacagcaaaaccatatctcaggtaatttcagtttaccatccttcaggaaaggagacaagaaatacagctgtactctgtgtaaagtgcgccaggggctcaaacaagaatacccatatctgcaaaaggaaagaaa

SEQ ID NO: 577319 - DNA, 567 bp, Homo sapiens
attatttaaatttaaaattattataatttaaaatgccaatgaatatcttatttatgtttactttaaaaattttgttttgatatacagattggattagtctcttctcatgcagctaataaagacatacccaagacgggataatttataaagaaaaagaggtttaatggactcacagttccacatggctggggatgcctcacaatcatgacagaaggcaatggaggagaaaaagcccatcttacatggcgacaggcaagagagaagtgcaggagaactgccctttatgaaactatcagatctcatgagacttattcactatcacgagaacagcaagggaaaaacacgccccatgattcagttaccttccactgtgtccctctcatgacatgtggggattatgggaactataatttaagatgagatttgggtggagacacagcaaaaycatatctcaggtaatttcagtttaccatccttcaggaaaggagacaagaaatacagctgtactctgtgtaaagtgcgccaggggctcaaacaagaatacccatatctgcaaaaggaaagaaa

SEQ ID NO: 577320 - DNA, 616 bp, Homo sapiens
attatattaactctttttgaatctgataatattaccaccttacgactcaaattacagaacatcaagccacactagattatgatatttgcttatcagacactcaaaaaatgaatgaattatttgcagtggagaaaatggaatggattcagaaggaaagcagaaggaaaagcagatacaatggttcagagaaatacgagttttgcaaatatcctgtaatccaatatgtgatcttttctctctcctgtatttttarcctttttatgcataggcttcatcttattatctaacatatttggttagaacaattcccttgttgaaagaaaactaaaacctatcatcgtttgtacttcttcatgctaccagtgtctatttgctttgaatacaaaataatttaaaatatgattgacatctacttttcctctttagatcccaataattttgttttcaatacaaaatttttttttttttttttttattatactctaagttttagggtacatgtgcatattgtgcaggttagttacatatgtatacatgtgccatgctggtgcgctgcacccacaaatgagtcatctagcattaggtatatctcccaatgctatccctcccccctccc

SEQ ID NO: 577321 - DNA, 523 bp, Homo sapiens
tgttactagaatagtaatggacaaccaagaaataatccctagtaaaatttttgcctttatatttaaaatataaagaatctttagcaataattgaaatcaaaagctaggaaaaattactatttagaaaaatacatatttttatgtatgtatgagtttaaccatttttatgtatgtatgagttttacatatragtttaacctcataaaaaataccaggtggattcagttacacggttagagaaaaatgcgtatgtgagtatatagctatagtctctggggaatcttaaaaatagtaacaaaaatgatcccatgtaaaaataagttatatattttatagtacaaattttactgaaaaaatagtatattgaaagttaaagtaagaagtaaaaaccaaacaaacaaaaagatgtaggtagtacattttctatgactgatggctcatttgttaactgacaggatatgtttgtgtttatttacaaattagtgataagatattttcaatgtattgctgagcttttgatgat

SEQ ID NO: 577322 - DNA, 523 bp, Homo sapiens
tgttactagaatagtaatggacaaccaagaaataatccctagtaaaatttttgcctttatatttaaaatataaagaatctttagcaataattgaaatcaaaagctaggaaaaattactatttagaaaaatacatatttttatgtatgtatgagtttaaccatttttatgtatgtatgagttttacatatgagtttaacctcataaaaaataccaggtggattcagttacacggttagagaaaaatgcgtatgtgagtatayagctatagtctctggggaatcttaaaaatagtaacaaaaatgatcccatgtaaaaataagttatatattttatagtacaaattttactgaaaaaatagtatattgaaagttaaagtaagaagtaaaaaccaaacaaacaaaaagatgtaggtagtacattttctatgactgatggctcatttgttaactgacaggatatgtttgtgtttatttacaaattagtgataagatattttcaatgtattgctgagcttttgatgat

SEQ ID NO: 577323 - DNA, 587 bp, Homo sapiens
ataaaaataaagtattctaaaatttatgtggaaccaaaagagaacccaaatagccaaagcaatcataagcaaagagaacaaatctagaggcatagcattacctgacttcaaactatagtataatgcactataattcagttgcactgaagcctcagattcagtgcaactcctrttaacttgcctatgtcattttttcacagaatcaaaaagaaattattctaaaatttatgtagaatcaaaacagaatccaaatagccaaagcaatccaaagcaaagggaacaaatgtagaggcatagcattacctgacttcaaactataatataaggctattctaacacaaataacctggtactggtcaaacacacacacacatagatcaatggaacagaacagaggacccagaaataaaggtgcacactgataaccaatggatcttcaacaaactcaacaaaaataagcaatggggaaagactcagtaagtagtgctgggaaaactggctggccatatgcaaaagaatttaactagacccctgcctttcaccatgtgcaaaaattaactcaagaaggtttaaagacttaaatataa

SEQ ID NO: 577324 - DNA, 587 bp, Homo sapiens
ataaaaataaagtattctaaaatttatgtggaaccaaaagagaacccaaatagccaaagcaatcataagcaaagagaacaaatctagaggcatagcattacctgacttcaaactatagtataatgcactataattcagttgcactgaagcctcagattcagtgcaactcctgttaacttgcctatgtcattttttcacagaatcaaaaagaaattattctaaaatttatgtagaatcaaaacagaatccaaatagccaaagcaatccaaagcaaagggaacaaatgtagaggcatagcattacctgacttcaaactataatataaggctattctaacacaaataacctggtactggtcaaacacacacacacatagatcaatrgaacagaacagaggacccagaaataaaggtgcacactgataaccaatggatcttcaacaaactcaacaaaaataagcaatggggaaagactcagtaagtagtgctgggaaaactggctggccatatgcaaaagaatttaactagacccctgcctttcaccatgtgcaaaaattaactcaagaaggtttaaagacttaaatataa

SEQ ID NO: 577325 - DNA, 587 bp, Homo sapiens
ataaaaataaagtattctaaaatttatgtggaaccaaaagagaacccaaatagccaaagcaatcataagcaaagagaacaaatctagaggcatagcattacctgacttcaaactatagtataatgcactataattcagttgcactgaagcctcagattcagtgcaactcctgttaacttgcctatgtcattttttcacagaatcaaaaagaaattattctaaaatttatgtagaatcaaaacagaatccaaatagccaaagcaatccaaagcaaagggaacaaatgtagaggcatagcattacctgacttcaaactataatataaggctattctaacacaaataacctggtactggtcaaacacacacacacatagatcaatggaacagaacagagracccagaaataaaggtgcacactgataaccaatggatcttcaacaaactcaacaaaaataagcaatggggaaagactcagtaagtagtgctgggaaaactggctggccatatgcaaaagaatttaactagacccctgcctttcaccatgtgcaaaaattaactcaagaaggtttaaagacttaaatataa

SEQ ID NO: 577326 - DNA, 581 bp, Homo sapiens
ctttctccccagtgcatgttggaaaccaggccaccaagtagccactggaacagtgtgccataaacccattccaggaagtgacagacagctgcattttaaagccccttctgtacattgctcctgggggataaggctcctggaaatgctatgcacctgtataaaatcacctttttcctgtggtctaaagagacttgcatatgtctaattccctctacttcaagaggtaggaggttgaggatgtagtcttaggtggaagctgtaatagtgggatgctcatcatgtggacaractctaggaggaatcagtagacacaaaattatagctgactagattgggagaggcagttgtctcatctaacatacagaaactaacacagaaagtcaaagaaaatgatgaaacagagatatatattccaattaaaaacaaaataaatttccgaaactgtacccaagtgatgtggagatatgcaatttacctgacagggaatttagaataaaggtcataaagatgctctctgatcaggtgaccaatgtaggaacaaaactgtgaatttcaacaaagagattttttaaaagttttta

SEQ ID NO: 577327 - DNA, 581 bp, Homo sapiens
ctttctccccagtgcatgttggaaaccaggccaccaagtagccactggaacagtgtgccataaacccattccaggaagtgacagacagctgcattttaaagccccttctgtacattgctcctgggggataaggctcctggaaatgctatgcacctgtataaaatcacctttttcctgtggtctaaagagacttgcatatgtctaattccctctacttcaagaggtaggaggttgaggatgtagtcttaggtggaagctgtaatagtgggatgctcatcatgtggacaaactctaggaggaatcagtagacacaaaattatagctgactagattgggagaggcagttgtctcatctaacatacagaaactaacacagaaagtcaaagaaaatgatgaaacagagatatatattccaattaaaaacaaaataaatttccgaaactgtacccaagtgatgtggagatatgcamtttacctgacagggaatttagaataaaggtcataaagatgctctctgatcaggtgaccaatgtaggaacaaaactgtgaatttcaacaaagagattttttaaaagttttta

SEQ ID NO: 577328 - DNA, 526 bp, Homo sapiens
gagcttgtcttggtaaagcgccttccaacccaaggagtcagtgagccataagttatgtgtgrctatgagacatgccaaatggggctagactggattgagctatgctgcaggtgtaaaacaaacactaggttttgatgatttaatatggaaaaaagaatgtaaaatattttggacatataatgtaaaaattttaaaatctcactacaattaatttcacctgtttcatctatttattcattatgttgagaatatttaagatctattatcctcaggaaatttgaagtacataatacattattattaaatacaatcaccatgttgtacattaggtctccagaacttatgcatcttatgactgtacatttgtaccttttgatcaacatctacttatttccctccaacccccacctcaacccctgatgaccaccattctaccctctgcttctttgtgtttgagttttttagattccacatataagttgcacaggctataactgctccatggttcggggataagaatgccagg

SEQ ID NO: 577329 - DNA, 381 bp, Homo sapiens
gccaacttatgcgtatctcaagttgtayaagtttgctgcacagataattttattctaatctttaaaagactactgttttttgttaaatgcttgaaaatacaagctaactatgagaattcaaatgctggcacatgctctggagttccagcagaatagtgctctgtattaactctgcaagaaaaagtgcctattctgaacttattaaaaagtatgttcctatcaaaagtgtgaactatattgtcaacatttcagaaagtttaataatatttctgactatatgcaaatttgtgtttatgggatactcttttgaaggtaaccttcctgtatgatgtgactcaactcttctaaaatgattgacatatggtaaattgaactttaaat

SEQ ID NO: 577330 - DNA, 330 bp, Homo sapiens
tattttattttcaggcatgattacaaagacttcatattcttttcttttcttgatttaccaaggtcacagagtggacctgtwtgatgctaatgatccagagcatgtttttgttcaacaggtggacaccaaggcctagctgatagtaccaggagagctcctagatgccagggactattttgcactttctcataaataaatagaaggacacagtccggtctaatttacctggggttccaagagtcctagtctagtggacctttgtcaatgatagacactactggcaactttgacatgtacttcccatcaatgacattttaacttacattttac

SEQ ID NO: 577331 - DNA, 593 bp, Homo sapiens
tatattagtccattctcacactgttataaagaactgcctagactgggtaattagtaaaggaaagaggtttaattgactcacagttttacagggcttgggaggtctcaggaacttacaatcctggccgaagaggaaggaaacatgtccttcacatggcagcagaaaggagaagtgcagagggagaagggaacagctccttataaaaccatcagatcttgtcagaactcagtatcatgagaacagcatagagtccctcccccaacatatgggaattacaatttggattacaattcaagatgagatttgggtggggacacagagccagacaatatggcaaagcttcatttttgtttttttacaggctagagttaagtcaagcaatttcctcattaacaattattttgggcatgccctgggatcccaccacacagctgagtgcatayccactgatcagcatactctccatctgacttctcacatgggctttcagaatattaacagaattggctggatagcgaggctggcctcttaatatctgtgtatgtagtaacaagtacagtatctgctactatattagcaaataaatcaccatt

SEQ ID NO: 577332 - DNA, 593 bp, Homo sapiens
tatattagtccattctcacactgttataaagaactgcctagactgggtaattagtaaaggaaagaggtttaattgactcacagttttacagggcttgggaggtctcaggaacttacaatcctggccgaagaggaaggaaacatgtccttcacatggcagcagaaaggagaagtgcagagggagaagggaacagctccttataaaaccatcagatcttgtcagaactcagtatcatgagaacagcatagagtccctcccccaacatatgggaattacaatttggattacaattcaagatgagatttgggtggggacacagagccagacaatatggcaaagcttcatttttgtttttttacaggctagagttaagtcaagcaatttcctcattaacaattattttgggcatgccctgggatcccaccacacagctgagtgcatatccactgatcagcatactctccatctgacttctcrcatgggctttcagaatattaacagaattggctggatagcgaggctggcctcttaatatctgtgtatgtagtaacaagtacagtatctgctactatattagcaaataaatcaccatt

SEQ ID NO: 577333 - DNA, 578 bp, Homo sapiens
tacaggcgcacaccaccacacccagctaatttttaaattttcttggaagagacggggtcttgctatgttgcctaggctaaagacctttttaaaaattataattgattcctttgctcaactctgtgcaaataatttcaaaacatggataaaggagataattttctagaaattattgtatgtcaacctacttccagaagagagagaaatattacactaattatcacacaaataaagaagattgttagagttatcccccaaactggacacacatgcacagacagacagacagacasacacacacacacgcacgcacacacacagcctagatggtttcatagcacaacttgccaaacctttcaaataacaaaaaattccaatgccatttaaactccttcaaagcataagggaagaaaagactaggacagtttccaagttctttttacaaagcaatagtaacattgataccaaaacttgacagattgtaccaaaaagaaaattatggagcaaactcatcttggaatagcaatgctaaaattctaaattaaatattgacaaatagaatccaacagcaattaaag

SEQ ID NO: 577334 - DNA, 220 bp, Homo sapiens
acataccttcacataagaactgtgaagcaggtttcctaaaaacagccttgtgatgtgtgcaytcatctcgcagaggtaagcatttcttttctctgatcagtctggaaactctgttcttgtacaatctgaaaaggagtatttttgatcactttgaggcttatgttgacaaaggaaatatcttcacatacaaagtataaggaaagattctgagatacctctt

SEQ ID NO: 577335 - DNA, 220 bp, Homo sapiens
acataccttcacataagaactgtgaagcaggtttcctaaaaacagccttgtgatgtgtgcactcatctcrcagaggtaagcatttcttttctctgatcagtctggaaactctgttcttgtacaatctgaaaaggagtatttttgatcactttgaggcttatgttgacaaaggaaatatcttcacatacaaagtataaggaaagattctgagatacctctt

SEQ ID NO: 577336 - DNA, 220 bp, Homo sapiens
acataccttcacataagaactgtgaagcaggtttcctaaaaacagccttgtgatgtgtgcactcatctcgcagaggtaagcatttcttttctctgatcagtctggaaactctgttcttgtacaatctgaaaaggagtatttttgatcactttgaggcttatgttgacaaaggaaatatcttcacatacaaaktataaggaaagattctgagatacctctt

SEQ ID NO: 577337 - DNA, 611 bp, Homo sapiens
tcgtaagttttctgctttataatttcatatcttgtgaaggtttcaaaagtgattctacagaaattcatactcaataattttatcagaatactaagcatctgccccatataataaaaccaaatgttattttacttcaaaattttaagcttttggtatgtattgaggctaatactgtaaacactctgtgccataattcctaaactgtaatatggtttaatgtatctactttctacatttaaaacatgtactttgccattgaggaactcaaaatatagctgagcatgtattaaatacccatttgtttcctgatttttaaatagttatcattttataattttgccttgtttagtttgaagcttactaggattttgtcattgatatgtatgtgtgtgtatatatgtatatatatatatatacacacacacacaattatatacataacaacatatgtaattgatatatatgtatatgttttatatatgtctatatacacacttatatgaatatatgcatgtgtacataacattaatttttgaccaataaaaattgcataattatgtattgtgtacattataaaaatttgayatatattgtaaaatgtttaatacaat

SEQ ID NO: 577338 - DNA, 444 bp, Homo sapiens
ttgttaccatgtaggcaagcttcctttcatgctgagtcaagtgtttaaaaaatatggctcaatattacaaacacacaggactgcgtagaggataatggtattaaactttcttgtacctcccagttaaamttcaaatgtggtaacatttggatgcatttgctccagagtttaagggaagaaaacattacggattcagccataatattcaagctgaagctcaagttatatgccccttttccagtccagttaccaccaccctcccactattctgaagtcaatgtgtgtcttcccatccatgtttaatacctagtgtgcatgtccatgaagaatggatagtatttttttggtctgtttttgcaattttatacaaataactgtccatacatactctcctgaaagttgcttttcccttcaacaatatcttccagatgaatccagaattct

SEQ ID NO: 577339 - DNA, 444 bp, Homo sapiens
ttgttaccatgtaggcaagcttcctttcatgctgagtcaagtgtttaaaaaatatggctcaatattacaaacacacaggactgcgtagaggataatggtattaaactttcttgtacctcccagttaaaattcaaatgtggtaacatttggatgcatttgctccagagtttaagggaagaaaacattacggattcagccataatattcaagctgaagctcaagttatatgccccttttccagtccagttaccaccaccctcccactattctgaagtcaatgtgtgtcttcccatccatgtttaatacctagtgtgcatgtccatgaagaatggatagtrtttttttggtctgtttttgcaattttatacaaataactgtccatacatactctcctgaaagttgcttttcccttcaacaatatcttccagatgaatccagaattct

SEQ ID NO: 577340 - DNA, 536 bp, Homo sapiens
gttgttgttttgtttttgagatggagtctcgctctgtcacccaggttggagtgctgtggcacgatcttggttcgctgyaaactccgcctcctgggttcaagcaattctctgcttcagcaggctggttttgaactcctgacctcgtgatccacccacctcggcctcccaaagtgctgggattacaggtgtgagccaccgtgcccagacacctcttttcatttttataaactggttttagtaggtaaagatcttcatctgttgggtctcgaggctgctgcgatctttactgggtttgcagtaaaaaggcttgtagctgcgtcagaaggtggctgccgaatctgaagtgggttttacctttaatgggcttgttaccaggagaacgtgtgattgtgagttctgtcatgttttcgggtaggctggattgtcttcagggttttattttgtggagcaggcactagggcaggttctgctatatgctgggcctaatagcagatgtgtgggtgagtgtggctccccctgagtacctagcaggtttt

SEQ ID NO: 577341 - DNA, 536 bp, Homo sapiens
gttgttgttttgtttttgagatggagtctcgctctgtcacccaggttggagtgctgtggcacgatcttggttcgctgtaaactccgcctcctgggttcaagcaattctctgcttcagcaggctggttttgaactcctgacctcgtgatccacccacctcggcctcccaaagtgctgggattacaggtgtgagccaccgtgcccagacacctcttttcatttttataaactggttttagtaggtaaagatcttcatctgttgggtctcgaggctgctgcgatctttactgggtttgcagtaaaaaggcttgtagctgcgtcagaaggtggctgccgaatctgaagtgggttttacctttaatgggcttgttaccaggagaacgtgtgattgtgagttctgtcatgttttcgggtaggctggattgtcttcagggytttattttgtggagcaggcactagggcaggttctgctatatgctgggcctaatagcagatgtgtgggtgagtgtggctccccctgagtacctagcaggtttt

SEQ ID NO: 577342 - DNA, 602 bp, Homo sapiens
gagttctgtcatgttttcgggtaggctggattgtcttcagggttttattttgtggagcaggcactagggcaggttctgctatatgctgggcctaatagcagatgtgtgggtgagtgtggctcccmctgagtacctagcaggttttccccaggttatctacaaacagtgacttttgaactgttttgtgtcagtcacgagtatgatgtccccagctttttttttattcctcatgattggcttggccattcagcctacattgtaggcttgcattttctattactataaaaagtgggacagggattttgatagggatttgagttaacttacagattgctttggataatatgaccccttattaaccaaagggcctgccttctcaaaatgactcttttcgatcttgggttttagcaaggtttcataatgccctgtatcccaaagctcactatattgcccaggctgttcttgaacgcctggcctgaagcagtcctcccacctcaggctcctgaatggaggagattactgtcatgagccactgtgcctggatctctcataaagttactttggttgatggatggctgactagtttttattgctgcaggaga

SEQ ID NO: 577343 - DNA, 602 bp, Homo sapiens
gagttctgtcatgttttcgggtaggctggattgtcttcagggttttattttgtggagcaggcactagggcaggttctgctatatgctgggcctaatagcagatgtgtgggtgagtgtggctccccctgagtacctagcaggttttccccaggttatctacaaacagtgacttttgaactgttttgtgtcagtcacgagtatgatgtccccagctttttttttattcctcatgattggcttggccattcagcctacattgtaggmttgcattttctattactataaaaagtgggacagggattttgatagggatttgagttaacttacagattgctttggataatatgaccccttattaaccaaagggcctgccttctcaaaatgactcttttcgatcttgggttttagcaaggtttcataatgccctgtatcccaaagctcactatattgcccaggctgttcttgaacgcctggcctgaagcagtcctcccacctcaggctcctgaatggaggagattactgtcatgagccactgtgcctggatctctcataaagttactttggttgatggatggctgactagtttttattgctgcaggaga

SEQ ID NO: 577344 - DNA, 403 bp, Homo sapiens
atgtcactgtctccatacatttcttccttagtttgttctcttgtatgtttgtgtgttattttaggttcaaatattaagaccaataggctrggatttatacattgtgtaaaaagtaaattagatagctagtaggtaccctatatatattataattttcacctataagattaagtttagtgcaggcaaaaagggctcattaaaattttcatccactttttcaacttctatccaaactataatataatttatgccccaactgttattttatcaattactcttaaccatatttcataaaatttatatttttttctttatttagaaatgtaaggctattatttgcttttaaaggctgtgatacagctttttttattttgtgaaataatagcaccaacattataaatat

SEQ ID NO: 577345 - DNA, 403 bp, Homo sapiens
atgtcactgtctccatacatttcttccttagtttgttctcttgtatgtttgtgtgttattttaggttcaaatattaagaccaataggctaggatttatacattgtgtaaaaagtaaattagatagctagtaggtaccctatatatattataattttcacctataagattaagtttagtgcaggcaaaaagggctcattaaaattttcatccactttttcaacttctatccaaactataatataatttatgccccaactgttattttatcaattactcttaaccatatttcataaaatttatatttttttctttatttagaaatgtaaggctattatttgcttttaaaggctgtratacagctttttttattttgtgaaataatagcaccaacattataaatat

SEQ ID NO: 577346 - DNA, 470 bp, Homo sapiens
caaaagtagcagggctgtaaaatttcataaaatttgtgggatttttaaaagctaaattattcaatatttgggattgttattacactcatatattgcccggaatatatatacagaaacccagcaacagtgattgcaacaaaagtaaggtaaataggtctacaaagcatttgatttccttattagataagtgaagttttcatagaggaagtgcaaattcagatcaggttacataagcttaacaattattcaaaccttatataaaattaaatctaaccctcaccactacaaatctgtaaggaatcactgtcaggaatctacaggacttggctcatatttacattcgacrcacacttagaaatttcataaatgatgagattcaggccaaggggattcctcaaagggctccacccaaaaggaaaagaaagagagttaaacagagaattaccacttacgtatttgtgggtaatcag

SEQ ID NO: 577347 - DNA, 633 bp, Homo sapiens
ttctagtgtaaaaggggagagaggaatggaatagaatgtaggaggaaaayagaaaagatctggaatacaaaaggcaatcacaaatcttctaacaaactgagaacattcgtcagaaagttgagcattcggccttggggtaaatagagagctcttgttttttaatatattgccttgtatagatattgtgtgtgtactcataggaccaagaaatctgggaagtctgaagaccaagaaatctgggaactttgagtacaatgcatgaccgatgaggactaaaaatcatttctactgttcacatgtcacccttattacctcatttcacactctgtgtttctgagatattcttcaagtcttaaaggagctgatgagcttacagtcatttgacagcagcaggcacccaattgactcccaacctgcttgcacaaaaagataacacttcaggattctaaagtggattcgttttcccaggtgaggctttactcaagatgtcgagtaaaaagatctctcaggtcctttcccgttggcccaggagctagtgccttctgaggcattttataaataagtaagttaccctattctcaaaagactctagatggaaacactttaataaggcagacctaatttttcaatctc

SEQ ID NO: 577348 - DNA, 551 bp, Homo sapiens
aataaatgttaaatctttgggataaggaaaattgagtccctataaaatgctctgcaaaatgtattatagggaatgcaaaatgtagatggaataaggaacatcacattatggtcacttattatatttaccaagttggaatcagaaacaaaactcagatagctaaaaatattagtattcaaagatttagagatttgtctgatagtagaatgtgaaaattgaatgtcttaattatttatttcagaaaggtttctagagatgtttgtgaggaactacttaatgtgtgcacttagattttaaaaacagaaggttgtgagaccaattgtgaataataaaccccagaatatagtcactcagaaaaaaaagtccattgcaccartatttattatagaataattaaaatcagaggcttataaaacagggaaaccaaaagtccagtgaatatatcaaacaacttgaaatcatttcctcaaatatattttatgaccaaaaaaatcatgcttatataagccaactaagcaatatggaaattcaagaaaacatgaaatataatt

SEQ ID NO: 577349 - DNA, 652 bp, Homo sapiens
tgccttttgtggttatttttcattgtctctgtggtatgtcttttacattctttctgaaaatgaaccctgcattccttccctgggccccactgcccaccagccactagaatgggaaggtaacaggtaagatccagtattgggagtccattggcatggtgaataccccagggctgggcactggacccacgccaagccaatcgaatccttcagagagactttctgttgragctgtcggggaagtggctaaaaggatatgattccggaactaccatgagccacacctctgcctggaaaccagtggcctccttattgccaaaaaaccattatttttatttagcaatccaaataatattcacttaggcatcttaaactttacatgtataagatggacctctttatcccttcaatgtttttttccctcagtctttcacatccacatgaatggtatcacctcctacctgactcaagcaaagaatctcagagttacctttggttccccatttccttcatctcccatagttaatctatcaagaaattctatcagttctacttcatatctggccctttccttatgtcttctgtcaccaaccaaggcccagacatagcctctctctgctaaaccactggcagtagcgttttccagtctcatttc

SEQ ID NO: 577350 - DNA, 652 bp, Homo sapiens
tgccttttgtggttatttttcattgtctctgtggtatgtcttttacattctttctgaaaatgaaccctgcattccttccctgggccccactgcccaccagccactagaatgggaaggtaacaggtaagatccagtattgggagtccattggcatggtgaataccccagggctgggcactggacccacgccaagccaatcgaatccttcagagagactttctgttgaagctgtcggggaagtggctaaaaggatatgattccggaactaccatgagccacacctctgcctggaaaccagtggcctccttattgccaaaaaaccattatttttatttagcaatccaaataatattcacttaggcatcttaaactttacatgtataagatggacctctttatcccttcaatgtttttttccctcagtctttcacatccacatgaatggtatcacctcctacctgactcwagcaaagaatctcagagttacctttggttccccatttccttcatctcccatagttaatctatcaagaaattctatcagttctacttcatatctggccctttccttatgtcttctgtcaccaaccaaggcccagacatagcctctctctgctaaaccactggcagtagcgttttccagtctcatttc

SEQ ID NO: 577351 - DNA, 498 bp, Homo sapiens
tcaggttaagttgctcttattttacatttatttgaaatctcttttttattctctttataagaatctttaagttctgtttctttttttatatggaaaaaaattccttttacaaagaagtacttctctttcttttattactttccggggtactctttgatctctaagcattttggctttttttttttttttaattttttaaagkggtctcaaattagcacttatttaagaaacaaactctattaaatcctgagtatgtgttaagcacaaaacataaaaagatgattgagactgatccctccttcactaaaaaactcatgacctagcagcaatgaaatgcaaagcaatcattcctttcatgaaagaaaataaagtgcagaaatttaaaaacataaaaacaaaaaaacagatttggaatctcacaagccacaagacttgtttaaactctgggcttggcagggcacggtggctcacgcctgtaatctcagcgctttgggaggc

SEQ ID NO: 577352 - DNA, 498 bp, Homo sapiens
tcaggttaagttgctcttattttacatttatttgaaatctcttttttattctctttataagaatctttaagttctgtttctttttttatatggaaaaaaattccttttacaaagaagtacttctctttcttttattactttccggggtactctttgatctctaagcattttggctttttttttttttttaattttttaaagtggkctcaaattagcacttatttaagaaacaaactctattaaatcctgagtatgtgttaagcacaaaacataaaaagatgattgagactgatccctccttcactaaaaaactcatgacctagcagcaatgaaatgcaaagcaatcattcctttcatgaaagaaaataaagtgcagaaatttaaaaacataaaaacaaaaaaacagatttggaatctcacaagccacaagacttgtttaaactctgggcttggcagggcacggtggctcacgcctgtaatctcagcgctttgggaggc

SEQ ID NO: 577353 - DNA, 593 bp, Homo sapiens
tggacatatcttccagacagaaaatcaacaaagaaacagtggccttattatgcactatataccaaattaccccaataaatatttacaaaacatttgatccaatggctgcagaatatacattattttttctcaggacatgaatcattctcaaagatagaacatatattaggtcataaaacacatcttaaattattcaaaaattgaaataatataaagcatcttctctaaccayaatggaataaactagaaattaataacaacaaaaactttggaaactatacagatatatagaaattaaacaaatgctcctgaaagtctagtgagtcaatgaaaaaattaagaaggaaattgaaaaatttcttgaagcaaatgataatgggaacacaacatagccaaacctatgggatatagcaaaagcagtactgagagggaagtttatagcagtaagtgcctgcacaaaaaaaggagaaaaaaaaaaaaacttcaaatgaacaatctaatgatgcattataaagaactagaaaaacaagaacaaccaaaaaaatttgtagaagaaaaaataataaagataaaagcaaaaataaatgaaattg

SEQ ID NO: 577354 - DNA, 582 bp, Homo sapiens
ccttctaaaatagcaccaaggaacctgtaaacatagataagttttatgtatatatgtataagcaatctctactccagttcttcttttccacagctctcaagggcatctgtgacaataataaaacatctaaataaaggacatctaaaacaaagaatatgatcctgttactaccttactagattttaatggttgtctaatgtcttcaacaaaaaatgtcaatttcttagcatgacataaaaggactttaaaatttgggtgcttcatttctttctatctcttctaccatgcagtctttatagtttctaaatttccaggttttcagggtttcagaastgcttgctttcatgtaagctgttttctgccttcacctagataaatgcttctctattctttgatgctgtgtttaaatattgcttctttttgtctgttttagatttcacgagatgtttcttcaacacacacacacaaaaaacaaaagagaaagtgggagagggaaaaggagacaatcatagtggcaaagtaaaaaaaaagctagatgagtaggttgcgaaaattttctcccattttgtaggttgcctgttc

SEQ ID NO: 577355 - DNA, 582 bp, Homo sapiens
ccttctaaaatagcaccaaggaacctgtaaacatagataagttttatgtatatatgtataagcaatctctactccagttcttcttttccacagctctcaagggcatctgtgacaataataaaacatctaaataaaggacatctaaaacaaagaatatgatcctgttactaccttactagattttaatggttgtctaatgtcttcaacaaaaaatgtcaatttcttagcatgacataaaaggactttaaaatttgggtgcttcatttctttctatctcttctaccatgcagtctttatagtttctaaatttccaggttttcagggtttcagaagtgcttgctttcatgtaagctgttttctgccttcacctagataaatgcttctctattctttgatgctgtgtttaaatattgcttctttttgtctgttttagatttcacgagatgtttcttcracacacacacacaaaaaacaaaagagaaagtgggagagggaaaaggagacaatcatagtggcaaagtaaaaaaaaagctagatgagtaggttgcgaaaattttctcccattttgtaggttgcctgttc

SEQ ID NO: 577356 - DNA, 541 bp, Homo sapiens
agaatattatgtgtctgaggtatcacctactataacacaaaaaaaatttgaaaaaaatataatgcctgtactaaagagataaaagaagatagtgcattcatgaaacaaagaagaaacaaacgcaaacataaaaagtcacaactgatgtagatgtaatagatttctgtattttaaaagtactgtttaataaatgaaaacagattccaaacattccaaaatctctgggatgcaactagagcagtgttaagaggaatgtttacrgtgatatgtacctacatcaaaaaattagaaagatctcaatttattttttattttattttattttttattatactttaagttctagggtacatgtgcacaacttgcaggtttgttacatatgtatacatgtgccatgttggtgtgctgcacccattaacttgtcatttacactaggtatatctcctgatactatccctcccccctcccccaaccccatgacaggccccggtgtgtgatgttatctaacattatacctagaggaaatattaaaacaagaaaa

SEQ ID NO: 577357 - DNA, 595 bp, Homo sapiens
accctgtgttcaaaaaaaaaaaaaaawccatttataatttaacatgggagcctcatgggaaagagttcctgtcttgttgagtggtccagggttttgggtgggctggaactttgcacttgatgtgttgtaattcatcttctagaggctatgttgtgaaggtccttggggtgatacagccttggaaaaatgttgtttccctgtggattacctaaactagatccaagaacatgaaagaccatccctcagggagctggcatttgtctaaaaaccagcattccctgtgccatttgattgtggttcttgctccactgcaaatgggtgacttgcaatgtctcactaatgccactcttgctctttcctccaggcatatctcacagatttcctctgccagtttgctcagcagccctgctacataatgttttcaggccaccttaatgacaatgagaggcgagttctacagaccatcggcatctaaaaaggggagcctttctacatttgctccttctgggccagccgcaaaccattttgcagccctcactggccttgagatgcactttcttctcaacctaaagtggcatcttgacccttggccctt

SEQ ID NO: 577358 - DNA, 385 bp, Homo sapiens
acatcattcaggtaagagagataattagaaattgaggaaagaaagaaatcgctttagagtaataaggaattggccaggcaccttggctcacgcctgtaatcccagcactttgggaggccaaggcaggtggaccacgaggtcaggagtttgagactagcctggccaacatggtgaaaccccatctctactaaaaatacaaaaattagctggtgacagtggcaggcgcctgtaatcccagctacttgggaggttgaggcaggagaatcgcttgaacaagagcgaaactccatctcaaaaaaaaaaaaaaaaaaatagccargcatggtgcacacctgtaatcccagctacttgggaggctgaggcagaattgcttgaccccaggagg

SEQ ID NO: 577359 - DNA, 380 bp, Homo sapiens
tagcagatatagggtatcaccatacagagctcagattttgactcaacggctccaatatttggaatctgtattcacctctggaactgatcaacatccctagaagtaaaaaagctcttttagtcattcaagagtcgcagtccaacaaatgactgtgggcctttttaggggatggctgggtactgctgcttacgggtgcccagatttggacgtgtagccaagcatttacgggatgcrctaaaagggaaagatttagagctccttgaatgtaatgagaactgcaagcaaatcttcaatactctcaaagagaaattgggctctgctgcagctgtgggagtccccaagttggatgaatcattttatctttatgtggccaaaaagca

SEQ ID NO: 577360 - DNA, 467 bp, Homo sapiens
tttcctttcttttccttttcctccttttatttactcactcatgtattcatactaacaaccattcaatcagtatttgccagacactgtgcaaggcactacttcaagaaatagcagcactgtagacagatatagtgttttaagtacacatgccatgaatggaatctaccttattttcattttgtaggctaaaatattatctatattccacaattaccacctaattgtttcggtaatcaattatcagatatcaattcatctgatgaaacttttctaagtttgcatattgtaaagtgagagaagatgttatcatgtgatgtgagagcacacatatttttctgataaaatacaatttgcataataatgcacacacacctctattaatttatgttttgccaraaataaattacatattacttctaatgtagcttctttacattttaagatcataggagcatttcattgaattc

SEQ ID NO: 577361 - DNA, 640 bp, Homo sapiens
gaggagaaaaatgttaatatgtccaaaatattctagaaagtatcttcatatagctaagtaaaatgtaatatcatgcatccttccagtaagcaatgaaggagctaggaaatcactgcatttattcagatgtgatagacatcagatgtcctattatgtcttacggaacttgctaaattgtttttgaagtagactcactgtgctttcatacaatttyttttggaatttgatgaatagcaataatattaatactgaaggctaataaagttacagtgaacatgtattttcaagcctctataggtgacttttttttttttttttttcagacagagtctagctctgtcgccaggctggagtgcagtagtgcagtctcggctcacagcaacctctgcctgccgggttcaagagattctcctgcctcagcctcccgagtagatggaactgcaggcacatatcactatgcccagctaattttctttttttttttttgtatttttagtagagatggtgtttcaccatgttagccaggatggtctcgatctcctgacctcgtgatctgcccgcctcggcctcccaaagtgtgtttcttactttttaactctacaggatgcatgaagatgacatgagtttacatgtggatgtg

SEQ ID NO: 577362 - DNA, 557 bp, Homo sapiens
ttttcctttttattaagttcagtgaccctgttttatgctatggctttcctcaaatgccaaatgattgttggccgtctttatttgcaattckctgttactctactgtgacattcactgagggttgttaatatggggcaggaagcaactgtcttcatggaagtacccctagggagcaaggctgaaaactaaaaaggtcaaggataaatgaagaggactcggtattagtctcaggagtgaacggcttagaaatttcagttcttcctgccacatgcctaaattgctaagtgttccagggcagggttaaggatagattaaaaaatcagtgggctcagtttcctggctaatacagtttttaggaagagccaagagctgagacgagcaaagaaggcacagcctgaaatcaaaaattcctcattaatatagcaaagctttcactatctatgagagcaaatatagaatgctgcaataataattgatgatctgggcctgatatacccaggatgggaaaaccaccattttgtactggctgatctctgctttttggaaaagaaaaaata

SEQ ID NO: 577363 - DNA, 633 bp, Homo sapiens
aagtctagttaacagagttgaaaatgattatggttttcctctgaattttgcagaaagtggttgtgtctgtctagtgacacatgtgatgttattagatgtgattgaaatttatccaaagtggactatgagaaagaagcacagaaagctatggatggcagaatgaaagtaatctccaatgtgctggacccttttgattgagggctaattgggttttgtggttattgtttctttgcttttaatcttcgggtagtcttggccccattttccatctttttttttttttttcagtgcttccttctactcactcaaaagtgaaccctttggaaacttctagttaaaaaggccattggaatactcacaaaagactgtccccacatatgctttccatgaaaaaaaattatgaatatgggatgtggagggggagctacatcaatggataaatctcagaaggaggcaccatcctcacatataggtgacaggccaaatacagtaaaggtagaaatacactacaaaaacttgtatataaaattaaactatatggagagttgagcaaaatcaggctccaaacaccttataggagtgataaaaaccctactaarattgctcacatggagaggatgagggcaaaggtag

SEQ ID NO: 577364 - DNA, 510 bp, Homo sapiens
tataataaaactcctcaggatattttcagtgtctttaatcaatatacatagctttcttattgcctttcagtatattttgatactatatatttttatttgaaaacattaatttcatttgttttatgaacactatttttaaagtgtgtaagcggctcatttattttacttttttctaggtgtttctgatttttctttgctttcaattataattaatttaatttcatttataattaattctatttgtgtttttatttcacttcattttgtattactgcatttttttgtggaggagacaaaaatttaggttttcagatggttagattttggcatttatttagcrgtttagttattgagcatttacttagtaatggacttttaacatttcattcatttctaattttatttttattcatccatagattattctttatgatgtaattgtttataatttttaactattttggaaaaaatttcatatatgttttcccattttggtgtatttagaaattt

SEQ ID NO: 577365 - DNA, 510 bp, Homo sapiens
tataataaaactcctcaggatattttcagtgtctttaatcaatatacatagctttcttattgcctttcagtatattttgatactatatatttttatttgaaaacattaatttcatttgttttatgaacactatttttaaagtgtgtaagcggctcatttattttacttttttctaggtgtttctgatttttctttgctttcaattataattaatttaatttcatttataattaattctatttgtgtttttatttcacttcattttgtattactgcatttttttgtggaggagacaaaaatttaggttttcagatggttagattttggcatttatttagcagtttagttattgagcatttacttagtaatggacttttaacatttcrttcatttctaattttatttttattcatccatagattattctttatgatgtaattgtttataatttttaactattttggaaaaaatttcatatatgttttcccattttggtgtatttagaaattt

SEQ ID NO: 577366 - DNA, 509 bp, Homo sapiens
cttcatgataaaaaaaaaaacaaaacttaaaacaactggctatagaagaaacacacttcaacataataaaagccataaacatcagacccacaagtagtatgatactgaatgaggagaaactaaaagtctttcctttaatatctggaacaagacaaggattcccactttcaccattgttattcaacatagtgctggatatcctacctggagcaatcagactaaagraagaaataaaaagaatccaaattggaaaggaagaagtcaaattatccttttttttgcagtccatgttaccttacaattcaaaaattacctaaagacatcaccagaaaactactagagctaataaacaaactcagtaaatttgaaggacacaaaatcaaaataaagaaaacagtggcatttctatgtggcaacattgaacaatcttaacaagaaaaaatatgtaatcccacttataatagccatgaatagaattaaatacctaggaattaatttacttaaagaag

SEQ ID NO: 577367 - DNA, 509 bp, Homo sapiens
cttcatgataaaaaaaaaaacaaaacttaaaacaactggctatagaagaaacacacttcaacataataaaagccataaacatcagacccacaagtagtatgatactgaatgaggagaaactaaaagtctttcctttaatatctggaacaagacaaggattcccactttcaccattgttattcaacatagtgctggatatcctacctggagcaatcagactaaagaaagaaataaaaagaatccaaattggaaaggaagaagtcaaattatccttttttttgcagtccatgttaccttacaattyaaaaattacctaaagacatcaccagaaaactactagagctaataaacaaactcagtaaatttgaaggacacaaaatcaaaataaagaaaacagtggcatttctatgtggcaacattgaacaatcttaacaagaaaaaatatgtaatcccacttataatagccatgaatagaattaaatacctaggaattaatttacttaaagaag

SEQ ID NO: 577368 - DNA, 509 bp, Homo sapiens
cttcatgataaaaaaaaaaacaaaacttaaaacaactggctatagaagaaacacacttcaacataataaaagccataaacatcagacccacaagtagtatgatactgaatgaggagaaactaaaagtctttcctttaatatctggaacaagacaaggattcccactttcaccattgttattcaacatagtgctggatatcctacctggagcaatcagactaaagaaagaaataaaaagaatccaaattggaaaggaagaagtcaaattatccttttttttgcagtccatgttaccttacaattcaaaaattacctaaagacatcaccagaaaactactagagctaataaacaaactcagtaaatttgaaggacacaaaatcaaaataaagaaaacagtggcatttctatgtggcaacattgaayaatcttaacaagaaaaaatatgtaatcccacttataatagccatgaatagaattaaatacctaggaattaatttacttaaagaag

SEQ ID NO: 577369 - DNA, 529 bp, Homo sapiens
gaattgaaatgtaactagatgttcagggaagcactcactgagaaagtgatgtgaatgaagaaagcatgaaggagatgagggtgcaagactcacaggtgtctggataaattgtttccagctagagtttgccagtagaaatctctggaagtcatagtgtctcaactactctaagaacagtaagaagtactttggatgatagtgaatgagagagggagcagtaggaggttttaactgacaatcataattgtacacagatagacagggcatatcttcattcttaatttgatcttttgtttaaaacaatttcagtagaacactctctgtatatatgaaactggaatacagggctatagcagaaatctctaatctccctgaatccattaaacctttgactcatagtagttaaataagtyggtgtgcactgtcacccaaaatataattatatttatattatttatattatctctctatatatatttaattattatataatttataattataaagtcccctttacagatatgtgagt

SEQ ID NO: 577370 - DNA, 443 bp, Homo sapiens
tagaggctgcattagaacgaatgaagaaaagaattaaagstatagaacactaaatgatgtcaatgaaaacataggagtcttccttaggatccaagggaaagggacaaagagacaataagagataagaaaaggatatatatggggggataaaaatatataccccaagtaaaaatcagtgtttctagaaaatagaaaaagagaataaatgaggagctaagaaaaaatgaagagatatttgtcaaagtgtacaaaatttcagttaggcaggatgaataagttgtggagatctaagtacagaatggtaactatagttctaaaagtaaaattggagaaagaatctaatattcaatataagaaaactctctccacctaaggaaatactgattcaggatatcaaagcagattactgaataaagacaaaataaataaaaagagaatatcac

SEQ ID NO: 577371 - DNA, 443 bp, Homo sapiens
tagaggctgcattagaacgaatgaagaaaagaattaaagctatagaacactaaatgatgtcaatgaaaacrtaggagtcttccttaggatccaagggaaagggacaaagagacaataagagataagaaaaggatatatatggggggataaaaatatataccccaagtaaaaatcagtgtttctagaaaatagaaaaagagaataaatgaggagctaagaaaaaatgaagagatatttgtcaaagtgtacaaaatttcagttaggcaggatgaataagttgtggagatctaagtacagaatggtaactatagttctaaaagtaaaattggagaaagaatctaatattcaatataagaaaactctctccacctaaggaaatactgattcaggatatcaaagcagattactgaataaagacaaaataaataaaaagagaatatcac

SEQ ID NO: 577372 - DNA, 443 bp, Homo sapiens
tagaggctgcattagaacgaatgaagaaaagaattaaagctatagaacactaaatgatgtcaatgaaaacataggagtcttccttaggatccaagggaaagggacaaagagacaataagagataagaaaaggatatatatgggggrataaaaatatataccccaagtaaaaatcagtgtttctagaaaatagaaaaagagaataaatgaggagctaagaaaaaatgaagagatatttgtcaaagtgtacaaaatttcagttaggcaggatgaataagttgtggagatctaagtacagaatggtaactatagttctaaaagtaaaattggagaaagaatctaatattcaatataagaaaactctctccacctaaggaaatactgattcaggatatcaaagcagattactgaataaagacaaaataaataaaaagagaatatcac

SEQ ID NO: 577373 - DNA, 443 bp, Homo sapiens
tagaggctgcattagaacgaatgaagaaaagaattaaagctatagaacactaaatgatgtcaatgaaaacataggagtcttccttaggatccaagggaaagggacaaagagacaataagagataagaaaaggatatatatggggggataaaaatatataccccaagtaaaaatcagtgtttctagaaaatagaaaaagagaataaatgaggagctaagaaaaaatgaagagatatttgtcaaagtgtacaaaatttcagttaggcaggatgaataagttgtggagatctaagtasagaatggtaactatagttctaaaagtaaaattggagaaagaatctaatattcaatataagaaaactctctccacctaaggaaatactgattcaggatatcaaagcagattactgaataaagacaaaataaataaaaagagaatatcac

SEQ ID NO: 577374 - DNA, 498 bp, Homo sapiens
ttctgcagtaggtggcagaagtatgacagttgcaaagtytgaaaggctaaggttagaataacaggctttattaattgagaatctgcatctttttctattttttttccacccaaatcccaaaccctaccactaaaaacaaaaacaaactttatttaaacaactaactttaactatacaacttgacactaaattttaaaagaatccacagcaataaaaaaattcgtaagaaataggtatctaggttcagtttggacaatttttcgaactataaaccctaattatctatatagcttaagctaactgtggcattaattcccaaatttccttgtaaaatattgtgctagcgctgaggggaaaaaaaaaaaaaaaaaaaaaagacagtgaagaatacaagtggcatggctgcctacatcaaacggttacaaaagaaaaaggactctggggccaggcatggtggctcacgcctgtaatcccagcactttgaggggccgaggcagg

SEQ ID NO: 577375 - DNA, 492 bp, Homo sapiens
taacccaggagtcactttcctcatctcacacgctagacaaagaggaggttgtgacctctggcctcccacctcccagctacctaatgacccatcacctggtgagctaggctggcctcatccactgcccataagaacaagcctactggtcaaggaatatgcttctggccattaacacaggttgtaaaagtgccaatgcagccaacccttagggagcctatgaacactccctctctgagtttgagttccagccggcatcagaggctcactgcaagggtcaatgcaatcytaactggtaaaccagattctaatactatgagggtgtggaattctagctacagaaagtcacctgcatgcaatcacaaacgaccaaacctgacaacagggtcaacaacagggcaatgtattaaaaatggaggatgtccatcagttgggcgatcccagaagtcaatctagaaagttccacacaagccctttttaaattttcctccccaa

SEQ ID NO: 577376 - DNA, 492 bp, Homo sapiens
taacccaggagtcactttcctcatctcacacgctagacaaagaggaggttgtgacctctggcctcccacctcccagctacctaatgacccatcacctggtgagctaggctggcctcatccactgcccataagaacaagcctactggtcaaggaatatgcttctggccattaacacaggttgtaaaagtgccaatgcagccaacccttagggagcctatgaacactccctctctgagtttgagttccagccggcatcagaggctcactgcaagggtcaatgcaatcctaactggtaaaccagattctaatactatgagggtgtggaattctagctacagaaagtcacctgcatgcaatcacaaacgaccaaacytgacaacagggtcaacaacagggcaatgtattaaaaatggaggatgtccatcagttgggcgatcccagaagtcaatctagaaagttccacacaagccctttttaaattttcctccccaa

SEQ ID NO: 577377 - DNA, 582 bp, Homo sapiens
cctctggggacagtccatagccaatgactagcttgygtgaggtataaaaggctggatccttgaacctctagggggacaactctgtggtgcaattgactcatgctgagaccacatccttgcttagctccttctcctcccctgccctgcttcccttattcccttctcctgagaatcatctttaataaattaatttatcataaatccccaatttcaagctctgtttgtatgtatcctggcctcagatagaacaaagaatgatttcaataggagagtatgtgaagacttgaccaagaacagaggcatgtgttggcttccaggcctgtcctagtcctgtcccaacagtcattctgttcacaagtgatgctctcaaaaagtggacatgtggatgaaactaagatcaggcactttcaatcatgaaatgcccttatctatacaacacactgaggtgggagcatcctcaccaccactctaggacccatgcaacttgggcagagactaggaaatgcaggatcagcaggattgctatctccgtagattccctgggtccagtaagcagtgattataagcctcaagatttgtaaa

SEQ ID NO: 577378 - DNA, 579 bp, Homo sapiens
gttctcatccttcatgccttggtttagatcacttcttaggttccgtacatgctcagattctgtgcttctatagttttacaacaacagaatcctctagacaacttgtagtgaccaggcttagccacmcactcagatgtgtaagaaatcactatttctttgttttcatgaagctcagtttaaatcagtttccaaggcttattcccaccacggtgggcagaaatttcatcttagtcaccattgagcacctatctctctgagtcattttagaatctaggactttccatccttcagcccctatcctccatcatggccaacttcctctttgtcacagctgacagtggcacctccccactctaagaagctctcagctttggtgggtgcagaaaccttgctgaggcagacagctctgtgtcttgagtccagtcactgtttgatgtcttggtgctctgagaggtactgccagctacgcaatgtgaaggtcctgccatctctcaccttccacctctgatctctcttggagtccacagagctccttccatcccaggcgtctgcaaactttttctgtaaaggaccaggtag

SEQ ID NO: 577379 - DNA, 196 bp, Homo sapiens
tggctacttgggcctatgccccaatctcatgaggattaggaatgcasggtgagtatatatttgcctctaacacccagggtatttttgcagtgggaaaatttgagaagcactgggaaaattactggcctaaaaagtagacagcagggacctagtttttagttctgatatatactacctatgtgagcttgagcaaaca

SEQ ID NO: 577380 - DNA, 589 bp, Homo sapiens
ttgtctcagagaaataaaaaccaaagttcacacaaaaaccttacattaacatttgtagcaatttactcataataacctaaaactggtaacaacttagaggtccttcaatgggttagtcaaatagtggtgcatacatactatggaattctactcagcaacaacaaataacaaatatacaacaacctaggtgaatctccagagaattatgtgaatgaaaaaattccaaccccaaaaggttacatattgcatgattccatctatataacattcttgaaatgacacagtcatagaaatggtgaataaattagtggttgccagagtttaaggagaagtgggggtggaaaagtagggccaacatgaggcatactctttttttttttttttttgagatagagtttcactcttgtcgcccaggctggagtgcaatggcacaatctcggctcactgcaacctccgcctgctgggttgaagcgattctcctgccwcagcctcccaaagtagctgggattataggtgcctgccaccatgcccaggtaattttttaattttttttaatttttagtagagatggggttttaccatgttggtc

SEQ ID NO: 577381 - DNA, 589 bp, Homo sapiens
ttgtctcagagaaataaaaaccaaagttcacacaaaaaccttacattaacatttgtagcaatttactcataataacctaaaactggtaacaacttagaggtccttcaatgggttagtcaaatagtggtgcatacatactatggaattctactcagcaacaacaaataacaaatatacaacaacctaggtgaatctccagagaattatgtgaatgaaaaaattccaaccccaaaaggttacatattgcatgattccatctatataacattcttgaaatgacacagtcatagaaatggtgaataaattagtggttgccagagtttaaggagaagtgggggtggaaaagtagggccaacatgaggcatactctttttttttttttttttgagatagagtttcactcttgtcgcccaggctggagtgcaatggcacaatctcggctcactgcaacctccgcctgctgggttgaagcgattctcctgccacagcctcccaaagtagctgggattayaggtgcctgccaccatgcccaggtaattttttaattttttttaatttttagtagagatggggttttaccatgttggtc

SEQ ID NO: 577382 - DNA, 666 bp, Homo sapiens
aaacactttcagaaaacagaagagaagaaggaaaacatttaaacttattttatgaggtcaggatgaccctaatataaaaccagacaaagacattacaaaccaatatccttcctgatcacagatgtaaaaatccttgaataaatttaggaaattgaatccaggaatatttaataataataayatattaggacctgatgaggtttaccccagaaatgcaaggttagtttaacattcaaaactccagttaatacaatgcagcacattaccagaagagagaaaaaatgtatgttcatcttaagagatacagaaaaaacgtttgacaacacttaacatccatttataataaaaactctcagaaactggcaatagaaggaaactttctcataatgataaaggacatttatgaaaaacttacagttaacttgatagttaatactaaaatattgagtgttttacccctaatatcaggaatcacacagaaatctgttcttactactactattaaacattgtactgtagatcctagccagtgtcatatgacaatcaaagtcatacaagttatggagattggaaagaaataattaaaattgtttttatttacaggcatcataattattgacatggaaaatcctaaaaaagtcaacaacaacaaagaaattatctagg

SEQ ID NO: 577383 - DNA, 666 bp, Homo sapiens
aaacactttcagaaaacagaagagaagaaggaaaacatttaaacttattttatgaggtcaggatgaccctaatataaaaccagacaaagacattacaaaccaatatccttcctgatcacagatgtaaaaatccttgaataaatttaggaaattgaatccaggaatatttaataataataacatattaggacctgatgaggtttaccccrgaaatgcaaggttagtttaacattcaaaactccagttaatacaatgcagcacattaccagaagagagaaaaaatgtatgttcatcttaagagatacagaaaaaacgtttgacaacacttaacatccatttataataaaaactctcagaaactggcaatagaaggaaactttctcataatgataaaggacatttatgaaaaacttacagttaacttgatagttaatactaaaatattgagtgttttacccctaatatcaggaatcacacagaaatctgttcttactactactattaaacattgtactgtagatcctagccagtgtcatatgacaatcaaagtcatacaagttatggagattggaaagaaataattaaaattgtttttatttacaggcatcataattattgacatggaaaatcctaaaaaagtcaacaacaacaaagaaattatctagg

SEQ ID NO: 577384 - DNA, 455 bp, Homo sapiens
gttttataaaggggagtttccctgmacaagttctctcttgcctgccaccatgtaagacatgcctttcgccttctgccatgactgtgaggcatccctagccatgtggaactgtgagccctttaaacctctttttctttataaattacccggtctcgggtatgtctttatcagcagtgtgaaaacagactaacacagtcttcatctaactccttccttggcttgggccgggcaatcctccactttgtgtgtgctggagacagacctgcactgtgagaacgggcagctctgtccactcacgtctgtctcgcagtggaagtgccaggagcacgtggtgtgggtaaaggatgctctgtctgtttgccacacaaattgattctgaaaatcgccactgcaacctccaagtaggggcttgttcttcttcctccattcctgtctggtcagagctgaaatttcct

SEQ ID NO: 577385 - DNA, 428 bp, Homo sapiens
tgcacaagttctctcttgcctgccaccatgtaagacatgcctttcgccttctgccatgactgtgaggcatccctagccatgtggaactgtgagccctttaaacctctttttctttataaattacccggtctcgggtatgtctttatcagcagtgtgaaaacagactaacacagtcttcatctaactccttccttggcttgggccgggcaatcctccactttgtgtgtgctggagacagacctgcactgtgagaacgggcagctctgtccactcacgtctgtctcgcagtggaagtgccaggagcacgtggtgtgggtaaaggatgctctgtctgtttgccacacaaattgattctgaaaatygccactgcaacctccaagtaggggcttgttcttcttcctccattcctgtctggtcagagctgaaat

SEQ ID NO: 577386 - DNA, 401 bp, Homo sapiens
ggcaagtggaacctaaaaatttagacagaaaaagaattttgggaaaattttgtcaagatagtggacttaaatggccagaagcattatctctggcccttataaaaatctctaacacttcaaataggagacakggattagccccttttaaaatagtgttcagtcactccatacctactgacacctctaaaccttctcttcttgggctgaatgaacaccatggggatttttattaaaaattttactttacgttctgggatacatgtgcagaacatgcaggcttgttacataggtatacatgtgccatggtggttttctgcgcctatcaacccatcatctaggttttaaaccctgcatgcattaggtatttgtcctaatgctctccctccccttgtcccccaccc

SEQ ID NO: 577387 - DNA, 401 bp, Homo sapiens
ggcaagtggaacctaaaaatttagacagaaaaagaattttgggaaaattttgtcaagatagtggacttaaatggccagaagcattatctctggcccttataaaaatctctaacacttcaaataggagacatggattagccccttttaaaatagtgttcagtcactccatacctactgacacctctaaaccttctcttcttgggctgaatgaacaccatggggatttttattaaaaattttactttacgttctgggatacatgtgcagaacatgcaggcttgttacataggtatacatgtgccatggtggtttkctgcgcctatcaacccatcatctaggttttaaaccctgcatgcattaggtatttgtcctaatgctctccctccccttgtcccccaccc

SEQ ID NO: 577388 - DNA, 553 bp, Homo sapiens
gttttcatacttaatatccaacaggttgtcartttacgtactactggtgccttatctgtttttactgtcccatacactgcccatctggaataagcttagtgtttaaaaaaaaaaaaagatctttgcatacacacagtaaatcctagattcagttttgtgataaacactggaatcctgaatgggacttttggtaggagataactgctgtttttaaaggtcataaaggtggtttaatccattggaaattaaaaaaaaaaaacttaaaagaggatcaacattgacctatttaactggcccatcagtaagtagcaaaacaatactgtagttgttgaaatgaagatagttataagcctcaaaccgagcacagtcagaggtgggaggccaaaaaaacaaaaattgctcatgaaacagtagtacctatcagagcccatcaaaaagctaattaaattaatagaagctatgatgaattaacagcccaaggtgctgtcagaaaggaagcctgcggttattttttttaaaagaatttgtcagtgatcattccagcacaacccag

SEQ ID NO: 577389 - DNA, 569 bp, Homo sapiens
tggtttaaatatcttcataaaacagcaacccccttttaattggtaaactcttattcttagaaagtacttcctcacattaggccaaaaaaatctttataggactctgacgccagaacgtttggatttggagcctggctcaattgtttacttgctaygtggcttggacacgttgtttaacctctgtgccttggtttcctcatctgtaaaacagaggataataatagtaaccacttcatggtattgttgtgaggattacatgtcataacatttgtaaagaacagtgcctgataagagtaagttaatgtgagccctcttcctccccgtcctcactcagatcccagttccatccttctgagctgcccagaataagtcaaatcttccttttcatgccaactttttgaaaaccgagatgccatattcatatccctctttcccccaggctcgatatgccctgcttccccctgacccatctggagacctcttccctgtgaggccaagcccttcttggaaagatccaaacctgtcttcaactttcctgcctctttagtttactaaaagtgaaatacaaa

SEQ ID NO: 577390 - DNA, 569 bp, Homo sapiens
tggtttaaatatcttcataaaacagcaacccccttttaattggtaaactcttattcttagaaagtacttcctcacattaggccaaaaaaatctttataggactctgacgccagaacgtttggatttggagcctggctcaattgtttacttgctacgtggcttggacacgttgtttaacctctgtgccttggtttcctcatctgtaaaacagaggataataatagtaaccacttcatggtattgttgtgaggattacatgtcataacatttgtaaagaacagtgcctgataagagtaagttaatgtgagccctcttcctccccgtcctcactcagatcccagttccatccttytgagctgcccagaataagtcaaatcttccttttcatgccaactttttgaaaaccgagatgccatattcatatccctctttcccccaggctcgatatgccctgcttccccctgacccatctggagacctcttccctgtgaggccaagcccttcttggaaagatccaaacctgtcttcaactttcctgcctctttagtttactaaaagtgaaatacaaa

SEQ ID NO: 577391 - DNA, 516 bp, Homo sapiens
gtttttgttgcatttgcttttgagttcttggtcatgaaatccttgcttaagccagtgtctagaagggtttttccaatgttatcttctagaatttttatagtttcaggtctttgatttaagtccttaatccaccttgagttgatatttgtatggggtgagagatgaggatccagtttcattctcctacatgtggctagccaattatcccagcaccatttggtgaaaacggtgtcctttccttaactttatgctttaagatcagttggatgtaagtatttgggtttatttctgggttctctattctgttccactggtctatgtgcctatttttataccaccaccacgctgttttggtgactaggtgactatggccttatagtatagtttgaaatcaggtagtgtgatgcctccagatttgttctttttgctttgaccatgagggctcttttttggctccatatgaattttaaawttttttttctaattctgaaaagaatgatggtggtattttatggg

SEQ ID NO: 577392 - DNA, 634 bp, Homo sapiens
atgcagtatgaagtttgaaaaagaagaaataaaactatcttcagatggcatgatgtgtatgttaaaaattctaaggaatctgaaaagaagtctctagtagaataaatacatttggaaaatcatgggatataaagtcaatatacaaaaatcaatcttatttctatataccagcagcaaaaagttcaacaataaaattaaaaagtatcattacaatagcatcaaaaacatcaaatacttagaaataaatttaataaaatgcaaaatgcttgcgctgagaagcattgtggagagaaattaaagaagatataaacaaatgaagagatatatcatgttcatggattggaagaatcagtattgctaagatgcccattctctccaaattgatctgtagattcagtgcaatcccaatcagaatcctagaagattttttaaatgtaaattgacattttgattctraaatatatgtggacatgcaaaggactttaatagtcaaaacaattttgaaaaaggacaaatttggagaattttcattatctattaaagaaatactttaggccaggcatggtggctcatgcctgtaatcccagcactttgggaggccgaggtgggaagatcacgaggtcaagagattgag

SEQ ID NO: 577393 - DNA, 576 bp, Homo sapiens
atgcgaaagtttcacaaagcactgaaagctggcattaccattttatttaatcctcacaaaaatcccctgaggtaagtactggtacgcccacttaccagtgaatgagaaaacgaatgaatgagtgaatgaaaaaacgagtatcagagagaggaaagagaggaagttcttgcccaaagtcacccagctactgagcacagacctgagactgaaacyttatccagaactgctgcatcgtgactcatctttgttgaaggaaaatgctgtgcgattcgaattgagctactgattggcatgctcataagaggtttcctggtgaactgcactctttatttctcaggactcacatcctcttcactacacctcttccagttgaggatagaaagttttggaattatgaatctgaatgagcacaaaaccagaagagtaagaataacaattataaagtcctctgatggggttcacatgatgggttttgatcattgcacacttcttcagttttaagaaatgagtgatttcttcttctttctcctccctgtctctctcacacacacataaaacgtctggtataagaagaga

SEQ ID NO: 577394 - DNA, 576 bp, Homo sapiens
atgcgaaagtttcacaaagcactgaaagctggcattaccattttatttaatcctcacaaaaatcccctgaggtaagtactggtacgcccacttaccagtgaatgagaaaacgaatgaatgagtgaatgaaaaaacgagtatcagagagaggaaagagaggaagttcttgcccaaagtcacccagctactgagcacagacctgagactgaaaccttatccagaactgctgcatcgtgactcatctttgttgaaggaaaatgctgtgcgattcgaattgagctactgattggcatgctcataagaggtttcctggtgaactgcactctttatttctcaggactcacatcctcttcactacacctcttccagttgaggatagaaagttttggaattatgaatctgaatgagcacaaaaccagaagagtaagaataacaattataaagtcctctgatggggttcacatgatgggttttgatcattgcacacttcttcagttttaagaaatgagtkatttcttcttctttctcctccctgtctctctcacacacacataaaacgtctggtataagaagaga

SEQ ID NO: 577395 - DNA, 543 bp, Homo sapiens
tatttttttgttagtccaccctcaattaaaacatttagggactcattatccatatagcatactgtgcaggatgtatctatgtcctcccccttcctttctttcttaacttttaccaatttttcttcccattaacagttcactctgtctgcacatgaaggaagaaccataaatgctgttaagtgttcaggtaaaagggtcaacggtattctgataatttaaaaggagtgtctcaaacaaggtaggtaggggattgtaattttgcgcatgttcataattgagggttagctgtatagtcaccagctaaatgaagacgttagaacagactctctgagctacaccatctaatttaattctagggatgctccaagaaaggtcgctgtgtaaagagataaaccaaggtctccacattctccttttttcttcactctcctctaayaaaagagtagctattccttataaatttttttaaagcaaattggaatgttctgcctctactaataagcacccagaatgataaaatacagacattactcacataatatg

SEQ ID NO: 577396 - DNA, 626 bp, Homo sapiens
  misc_feature 6, 7, 8: n = A,T,C or G
tgcctnnnctctggatcctccctgaggggactgctgaggcttctaccattaacagttaagttacagttacagttaacagtaaacagttaacagttaagtgatgtttacagttaacttttttatataagtagaagtacattctaaaataatgatgaaaagtatagcctaataaatacataaaccagtaacataattgtttactatcattatcaactattacatataataaataatgatatgtgctagatttttttatgatggcagtacagtaggtttgtttacaccagcatcatcacaaacgcatgagtaacatgttgtgctacaayataacgatggctatgacatctctaggtgataggaatttttcagctccattataatcccacaagaccatcattgcatatttgactcattgttgattgaaacatcattatgcacaactgtactctcaaatacatgtaatgttctcatatatactctcacacacatatactttctctctcaaacaaaaaatagtgtgtctcttgccgaagtaaccacctacaggggaaaaagaactattttctgcatatgagtataaatctcaatataaatccccacttatttataaaatgtgagtaacaggc

SEQ ID NO: 577397 - DNA, 537 bp, Homo sapiens
ctgatgaatgggaaatcattaaaggatttcaagtaggagaggatcagtttccattttgaagaggtccctctggctgcaacatggagagtgaattggaggaggacaggaacaatggtgggggctgcttaggagctactagtagcacctccagggcagagatggcattggtttgggccagggcaagggtaacagggatgaagacaggtggaaggatagaaaagatattttgtaggkaaagcaaagacccttatacatagttataagaagcagctgtagccaggcacagtggctcacacatgtaattccagcactttaggagatcgaggcaggaggatcacctgagctcaggagtttaacaccagcctgggcaacgtagtgagccctcatctctactgaaaataaaaacaattagctgggcatggtggcacatacccatagtcccagctactcaggaggctgaggccagaggattgcttgagcatgggaggtcaaggctgcaatgagctatgatcacaccactgcactccagtctgggtg

SEQ ID NO: 577398 - DNA, 599 bp, Homo sapiens
aataaggccatttctgctttgtgaaattgccsttgaagtctcctcttacatctcttttttagaataaacacactccgttctttcagctgatttttatgaattcagtattctttattggttccctcttatggatataattcattccatcaatttctctctccaatgtagcctcaaaaagttaccatggatttctggttgtagcacaaaatccagtggaaccacccctactataaacaccatggcttagggcttctcccttcctctctcctgaaaaagcggaattttaatatgagtcacaaacatatatggtgctagtttagatgttccccaaatcttatgttgatatttgatcccagtgttggaaaataggaggtgtttgggtcatgggggcagatcccttatgaagagactaatgccttcccttgggcagggaaggaggttggaggagtatggcggataagtaagttctccattagttcccgggagtgctagttgttaaaaagagcttggcagctgggaatggaggctcaagcctgtaatcccagcactttgggaggccaaggcaagaagaatgcttgaagccagtatttgagaccagc

SEQ ID NO: 577399 - DNA, 599 bp, Homo sapiens
aataaggccatttctgctttgtgaaattgccgttgaagtctcctcttacatctcttttttagaataaacacactccgttctttcagctgatttttatgaattcagtattctttattggttccctcttatggatataattcattccatcaatttctctctccaatgtagcctcaaaaagttaccatggatttctggttgtagcacaaaatccagtggaaccacccctactataaacaccatggcttagggcttctcccttcctctctcctgaaaaagcggaattttaatatgagtcacaaacatatatggtgctagtttagatgttccccaaatcttatgttgatatttgatcccagtgttggaaaataggaggtgtttgggtcatgggggcagatcccttatgaagagactaatgccttcccttgggcagggaaggaggktggaggagtatggcggataagtaagttctccattagttcccgggagtgctagttgttaaaaagagcttggcagctgggaatggaggctcaagcctgtaatcccagcactttgggaggccaaggcaagaagaatgcttgaagccagtatttgagaccagc

SEQ ID NO: 577400 - DNA, 599 bp, Homo sapiens
aataaggccatttctgctttgtgaaattgccgttgaagtctcctcttacatctcttttttagaataaacacactccgttctttcagctgatttttatgaattcagtattctttattggttccctcttatggatataattcattccatcaatttctctctccaatgtagcctcaaaaagttaccatggatttctggttgtagcacaaaatccagtggaaccacccctactataaacaccatggcttagggcttctcccttcctctctcctgaaaaagcggaattttaatatgagtcacaaacatatatggtgctagtttagatgttccccaaatcttatgttgatatttgatcccagtgttggaaaataggaggtgtttgggtcatgggggcagatcccttatgaagagactaatgccttcccttgggcagggaaggaggttggaggagtatggcggataagtaagytctccattagttcccgggagtgctagttgttaaaaagagcttggcagctgggaatggaggctcaagcctgtaatcccagcactttgggaggccaaggcaagaagaatgcttgaagccagtatttgagaccagc

SEQ ID NO: 577401 - DNA, 581 bp, Homo sapiens
aacttgcttaagacaaccagcttttgggtgaagagtgagggaggacattgggctcaacatcaatagtcaattaaaaaataaggcacatgattttgagtgattttccttggttcctgatgaatttacaggatgtttttgacactgtttagttgttttttttaggaattaatgctgagtttgagatgactaaataattagcttccataaaacgttcatgtggaacaattatgtgcagagatgttttcaaagtacagaaaatactaatttcctgaagtgaaatctaagaaatgttacaactgatgctaacatacatgtggagaagaaaaaggcttttggaaaatgttcaaagcttgtgaacatgcagtgtttaaagcctgtgattgttcattgtactatccttcagcaggtactttgcagaaaatagttgaatctttcatatgcattgaaccagtggtgtcaatggagaacttcattcactcttgtgacttaactatggccagttttgtgattttgttaatcagatctagaagctgaatatccttacttgttgtacagtgcarcagtttcatagcttagcagtt

SEQ ID NO: 577402 - DNA, 522 bp, Homo sapiens
cctgggaggtggaggttgcagtgagccgagattgtgccactgcactccagcctggtgatagagtgagactccatctcaaaaattaaattaaattaaattaaaaaacaataaaaaaattaacaataaaaagtagaatttttaaggctaggcrtggtggctcacacctgtaatcccagcactttgggaggccgaggtgggtggatcacaaggtcaggagatcgagaccatcctggctaacatggtgaaaccccgtctctactaaaaaacaaaacaaaacaaaaaaaagtgaaatttttattccacagaaattttagctaatatattttttgagctcaaattatagttccagcagtgtttcttggacatcaatgcaaatgcaaagcaaatttccatatttcaaaattcattgcattgtaattaaagagctttcccccaaccttcaattggaagtgatttgtctttagtgtaatacatgttgtaaggcaaatatcaagtgatgaatcttgtagagttctagaaaga

SEQ ID NO: 577403 - DNA, 522 bp, Homo sapiens
cctgggaggtggaggttgcagtgagccgagattgtgccactgcactccagcctggtgatagagtgagactccatctcaaaaattaaattaaattaaattaaaaaacaataaaaaaattaacaataaaaagtagaatttttaaggctaggcgtggtrgctcacacctgtaatcccagcactttgggaggccgaggtgggtggatcacaaggtcaggagatcgagaccatcctggctaacatggtgaaaccccgtctctactaaaaaacaaaacaaaacaaaaaaaagtgaaatttttattccacagaaattttagctaatatattttttgagctcaaattatagttccagcagtgtttcttggacatcaatgcaaatgcaaagcaaatttccatatttcaaaattcattgcattgtaattaaagagctttcccccaaccttcaattggaagtgatttgtctttagtgtaatacatgttgtaaggcaaatatcaagtgatgaatcttgtagagttctagaaaga

SEQ ID NO: 577404 - DNA, 538 bp, Homo sapiens
taaaatgtcaacaaacagcatcacatgctacagagaaatctcttatgaaaagaccaatgaatagaggcagcaaacttcattgtcttattttaagaaattgccacagtcaccccagctttcatcaatcaccacccagatcagtcagcagctatcaacatcgaggcaactctctccataaggaaaaattacaattcattgaaagttcagatgatcattaacaataaagcattttttagttaaaatatgtatattgtttttctagacataatgctaatgcacacttaatagattacartattatgaaaacaacttttatattcactgagaaaccaaaaaaaaaaatagtgtgactagctttatttcaatatttgctttattgtgggtggtatggaaccaaatccacaatatctccaaggtatgcccgtaatagtatattgtattcagaatttttgattaatgaatagattgcagctgctcttgccatgggatagggaaatgggtaattatgggagatgatgtatatgtgaatttgttttac

SEQ ID NO: 577405 - DNA, 638 bp, Homo sapiens
tagcacacagaattgatgctttatccgtttgaccatatgtgactgggcacatgtgttggtgtgcatttttacacaaagctttgtataggccaagacctgggctacaagtaagacatttgggttctatctctggctattccacttactagatgaatatattactcaggataggctagattgtgctgcaataaaacaataagtgttaaaaataaaataaaataaaataaaataaacaatctccaggtcttagtggcttaaaagagtaaaaagtgtattatttgctcacagtacttgcccattatgagtcagctaggaggctttgctctatcttgtcctcactcagggactgagccagagggatgttccatctccctgcttccatgttttccctgatagaaaaatgggtacaaaaacttacmcatgacttttaatgcttttaaatgaaagtaacccatactacttttgctaaatttgcactggacaaaaccagtcacatgaccacacctatactcctgaaagcaggaaaataatactaacatgaaacttcaagggagaacagaaaatgcttggtacaatgcacacagtgactctaaatgtgttatttcccttctttgcacattcattttcttcatctctag

SEQ ID NO: 577406 - DNA, 568 bp, Homo sapiens
ttagggaaaaactgagaaaatctgaagaacaagcatgaactttagttaataataatgtatcaatattattttattaattgagacaaacataccatactaatgcataataataataggggcaactggctgtagaaggtacaagggacttctgtactacttcataatatttctgtaaattttacccagcataaaataaaaattttattaaaagaaagaaaggtgccataaagtaaatgttcaacacaatgaatgaaaaatacagtaaagcacatctttacacaacttataacactgagaaatttcatcatactcttcaacaacgatactgaatatgttatgaaaatggaacaatatttttttactttcattatgctcttttctatttagaaagtgtaaaaatagcagggtgaargagggatagtgccctgattcatgtagatctcataacttacaggggaattgataatctaatccatctttatctgatatctaaacaaatgtttccaaaagcatgttctgcaaagcaaatcacttgtcaggagatattttctaaagaaaagactccatg

SEQ ID NO: 577407 - DNA, 516 bp, Homo sapiens
tggacattagccttggccccagagtctgtctgtactctaatgcaagttcttgttaataggcacttgtgattttttggtttttcccatatcctatgtagaaataattcttctttcatacaaatacctattaaaaagcaggatacacagagtgtcacctagtcaccaagaaatgtatttgtgaggcccttgaactataataataaataacatttatcagattatttgccaggcactgcttcttgtaggcatttttcttgtactatgttattttactctcattacaacccaacaagattaacaytacttgtaactccactgcacagatacagaaacaggcccagagttattataatagttaagtaataaagccatgattaaaaccaggaaatgtgttactagaaccagtcttcttaaccactcacctatacttatcctctccagactctgggctgtgtttcaactcactttagcaggctgctaacatcaaatgtttaaatatattgagctacctctgaa

SEQ ID NO: 577408 - DNA, 516 bp, Homo sapiens
tggacattagccttggccccagagtctgtctgtactctaatgcaagttcttgttaataggcacttgtgattttttggtttttcccatatcctatgtagaaataattcttctttcatacaaatacctattaaaaagcaggatacacagagtgtcacctagtcaccaagaaatgtatttgtgaggcccttgaactataataataaataacatttatcagattatttgccaggcactgcttcttgtaggcatttttcttgtactatgttattttactctcattacaacccaacaagattaacactacttgtaactccactgcacagatacagaaacaggcccagagttattataatagttaagtaataaagccatgattaaaaccaggaaatgtgttactagaaccrgtcttcttaaccactcacctatacttatcctctccagactctgggctgtgtttcaactcactttagcaggctgctaacatcaaatgtttaaatatattgagctacctctgaa

SEQ ID NO: 577409 - DNA, 576 bp, Homo sapiens
cccaagttctaatggtcaagacaatgagaaaaagcccttaaggcatttcagagacatttggggcagcccctcccatcataggctcagaggtctaggaggacagaatggttttctgggctgagtccagggccccgctaccctgcacagccttgggacactgcttcctgcatcccagccacttcagctccagcgttggctaagaggggcccaggtacagctcagaatgctgcttcagagggtgcaagctcttagccttggcagcttccccgtggtgttargcatgtgggtgggcagaatgcaagagttgaggcttgggagcctctgcttagatttcagaggatgtatggaaaagtctgggtgtccaggcaaaaactatttgcaggggcggagccctcatggagaacgtgtacttagggcagtgcagagggggaatgtggggttggagccccacagagtccccactggtgaactgcctagtggagctgtgagaagagggccaccatcctctagaccccaaaatggtaaatctaccagaagtttgtacccttagcctggaaaagccacaggtactcaatg

SEQ ID NO: 577410 - DNA, 551 bp, Homo sapiens
gtcattattattttcatgttaattattgttttctgtcattattttgttgcagctggtaagagactcttcactttatgtcaaccaaatagattttgcatcccaaaggccctgcgtgatcttcatgttcatacccttgagaatgatagaagcttctactctatgtggtgtgctctgtgtggccagcagagggagcaaggagttctttataaaagtaacctttctttctgcctcaaattggcagattggagataaagtgctgatctttgggacaagtcagcattacacagactagcttcatgtagaacaagtatttttcatttctaactgtggaatgaaaaagaaaatggtgtttcttctcttctcctaattttatgggccaatgactcctctccatacaaattatagaaaaatgcaattcaccatgaaccactcattgcttccctagcaaattcatccgttgatagcatacagataayttattcatacattcacacggtccatcattcattcacagagatagatacttaacagagacataaggtcctatgtgg

SEQ ID NO: 577411 - DNA, 576 bp, Homo sapiens
ctgctggcaaggcagtaggctggaaatcagaatcactaataatttargaactgcctttatattcttacacctaacttagacatctaaaagagttttgttctttgaatattctaaaagtgaattgccaaatttataggttccatactatttattcaatttatatgggcatcttattgtcctgacattccatttttaaaagcagattttcccctttgccttggacaatacgtcaaagttttaattaccatatatcataaactcctcttaaagcaatataaaatatatatgtcctataatttcaacaagcttctacaaccatgtttattcacaattataaaggccagaagcatctttactatatacaacttccattaaataacagttattaagtgctgccctgctccgtgcagtatatgtaaactgctagatacgtcttccataatattaaagatgtccctaactagcttgtctagagatttacattacttaagaagtcccattgctggaaaaagttccatgtacataaagataagttaaacttcctaaacatgctttcccagtgactaaagatatttg

SEQ ID NO: 577412 - DNA, 396 bp, Homo sapiens
atctcacagttctggaggctgaaaaatccaagatcaaggaatatttgatttctggtgagagcctatttgttggttcatggatggtgccttccagctatgtctataaatgatagatagaaggaacaaataagctcccttggacctgtaagagtgttaatctgattcatgaggggtcctccctcatgatctcctatgatcatgatgggacctcccaaaggtcccaactctacataccatcaccttggaggttggamtttcaacagggaacacaacaaacattcaaatcacagtgccatttttctgtttctgtgctgtgatgagtacaggtataaattgcaaattattctagaaaattagatcattgatgttttatcaagtgtaacagagaaaagatag

SEQ ID NO: 577413 - DNA, 527 bp, Homo sapiens
atttcctctcctttttgagaatcactggacttatgtcatatctaagggataaatttatactaatgtatagagaaaagcaaagttcaaatatcgaacattgattatgttgttgtcatgaaagaaatgtattctttttagtaaacaaaaatgctaaatctgcttgtattttacaaatatattttgaaaaataatcatttaatgatgtaaaaagttcttgcttgcgtcattacacrcaaaggcagaatcttattttttaattttcttcaaaaagctctctgtcttgataagacatctgcctatgatggatagcctaaagggccaggcgcagtgactcatgcctctaatcagcactttgggaggccgagacgggcagatcacttcaggctaggagttcaagaccagcctggccaacatagtgaaaccccaactctactaaaaatataaaaattagctgggcatggtggcgagcacctgtagtccccactacttgggaggccaagacagaatcacttgagcctgggagccag

SEQ ID NO: 577414 - DNA, 421 bp, Homo sapiens
tcagcacttgctgcttcaccttgcacttttatgttatgaagacaacttctttccttacctcatgaactgacctctgctagtttccagcttttcttccgcaactttctyacctctttcaacgttcacagaattggacagttagggccttgctctagattaggctttggcttacggcgatgttgtggctggtatgatcttctaacaagaccactcaaactttctccatatcaataggctgttttatcatttgtgttcactggagtagcattcttaatttcccttaagaatttttcctttgcattagcaacttggctaattgtttggtgcaaaaggactagcttttggcctatctgggcttttgacatgacttgttcactaagcttaatcatttttagcttctgatttaagaggagagatttac

SEQ ID NO: 577415 - DNA, 437 bp, Homo sapiens
tgaagccagccaggagagcgaggcgtgtggaagccaaagtttagcaggaaaaactgagtgttggctgctgctaaggataaggaggaaacagattaaacactgccctttgcatttaacaacagggtcattggcagttttgttgaacacttttgatggaaccgtaggcgcagaaaacaaatttcagggtgagtgtcttgtaaagctgtagagggaacaactagacatgtcttttaagaagcttggctgtgaagaggagaaggagaaggctacaggcagctaaagaggaaagatcggcatttagaccaactcatggggtgttttctttcttcctctctctcttttacttttggacatatattgtttatgtttytggtttttattaagctgcagagttacaaacatatttaaatgttgacaagaaacagctaatagagagg

SEQ ID NO: 577416 - DNA, 493 bp, Homo sapiens
ctttaggtagattcccaatatcaaaacatgtgtaaacaaataattataagaaaaatagtaattgttttcctaaagatatgggcttagagctttgaaagtgcatgttgtgggctgggcagcttattctgcttgaaggttagtgggaggtaacatgtaaactgggatacgaagaacgcatgcataggagcttcaaaaatggaaaagagagtaaaagcaattaatcaacgagaaatacaattttccraaaaaaaaaagaaatgtttttggaggaaaatagtttcgtatgatgatcggaccagcaaagggaatgacaggaggtgaggctaacagtcgggatgagaacaaattgtgcaggctttgcctgttgtcttaagaactatgaatttctaccccagaaagctcaaaaaacccttcatgggcattggcattctggaagttggtgaatatgtacctttaggaaaatggattttatctccaaatagtggggaaaaaa

SEQ ID NO: 577417 - DNA, 514 bp, Homo sapiens
catgttgttgcaaacgacagaacctcattctttcttatggctgaatagtattccattgtgtatatgtaccacatttgtattattcattgagctgttgatggatacttagattgctttcaaatcttggctattgtgaatagtgttgccaaaaacatgggaatgcagatgtctcctcaatatattgatttcctttattttargtatatacctagcagtaggatcgctggatcatatggtagctctatttttagctttttgaggagcccccattctgttctccatagtggctgtagtaattcacactcccaccaacggtgtatgagagttctcttttctccacatcctcaccagcatttgtcattgcctgtcttttgaataaaagccatttttactggggtgagataactcattgtagttttgatttgcatttctctgatgataaataatgttaagcacattttcatatgcctgtttgccatttgtatgtcttcttctgagaaatgtctattcatat

SEQ ID NO: 577418 - DNA, 514 bp, Homo sapiens
catgttgttgcaaacgacagaacctcattctttcttatggctgaatagtattccattgtgtatatgtaccacatttgtattattcattgagctgttgatggatacttagattgctttcaaatcttggctattgtgaatagtgttgccaaaaacatgggaatgcagatgtctcctcaatatattgatttcctttattttaggtatatacctagcagtargatcgctggatcatatggtagctctatttttagctttttgaggagcccccattctgttctccatagtggctgtagtaattcacactcccaccaacggtgtatgagagttctcttttctccacatcctcaccagcatttgtcattgcctgtcttttgaataaaagccatttttactggggtgagataactcattgtagttttgatttgcatttctctgatgataaataatgttaagcacattttcatatgcctgtttgccatttgtatgtcttcttctgagaaatgtctattcatat

SEQ ID NO: 577419 - DNA, 614 bp, Homo sapiens
tttagattgtatccgactccagtcaatgtattccaattcatttttatggcaggttgttaacggaaggctgggcttgcattacatgcatttggggtgagtctggagaagggaagaactgaccgccagaaaccattgaggaaagcaggctgtattctgcatttcttcggacttgtctttgtggagtttgataggaaccacggatgtctttcctgaggctttcaacttccttgtgtctgagacactccacagttacccaaaagcagagggatctgaaggttaatccaaagaagacaagctcctcygttgtcactttgtgtgaatttgggcaattcactccataactcttcatctttgaaggcacagatgacaccatatttctttatttttttggttaacacttgctcaagcccccacttgccagtctttattctctaatccaaatcttaccaaacccaagctttagaagtggatgttgatgtccatttaatgtcctcacactgtgcccaccccatggagagtagtgcctgaaagcacagactctgatcggagttcctcggattgagtgccgactccactacctactacctatctgatcttagacaggtctcgaactt

SEQ ID NO: 577420 - DNA, 553 bp, Homo sapiens
cataaattttttttttttttttgagacagagccttgctctgtcacccaggctggagtgcagtggcacaatcttagctcactgcaacttctgcctcccatgttcaagtgattctcctgcctcagcctccaaagtagctgagattacaggcacccatcacctggccaactaatttttaatgtttttagtagaggcagggttttgccatgttggccacgctggtctcgaactcctgacctcaggtgatstatccacctcagcctcccaaagtgctgggattacaggtgtgagccaccatgcctggccagattcatacattaatttagaggaatttgtatctctgctctgggcctctcctcctgggcaaggggacaaggctgggagtggagccagggctaggcaaggatgtggaggggctgtttcaagaacaggaggcacatccatgtgtgggtccccatacaagggacatctaccaccactacccgcaaggaaagcttcagacatcaagacaaagaggttatagaaacaaatctgaatccaaatataaggatgggc

SEQ ID NO: 577421 - DNA, 521 bp, Homo sapiens
gaaggttagacttggagggctggtggactctattgctttgggctgcccaaggtcagctctgggattcaactcttaccttccttataagctagtaagttagtctgttactgcttcatggaatctggcagaagacacaagacttttgggtcagagacaagggattgtattactcatggcaygtacttatactaaaaaattatttgggccgggcgcagtggctcacacctctaatcccagcactttgggagcccgaggtgggcagatcacgaggtcaagagatcgagaccatcctggccaacatggtgaaaccccgtctctactaaaaatacaaaaattagccaggcgtggtggcatgcgcctgtagtcccagctactcgggagtctggggcagcagaattgcttgaacccgggaggtggaggttgcagtgagctgagattgtgccaccgcactccagcctggcaacagagtgagacttcatctcaaaaaaaaattatttgttggttattggaaattaacactt

SEQ ID NO: 577422 - DNA, 521 bp, Homo sapiens
gaaggttagacttggagggctggtggactctattgctttgggctgcccaaggtcagctctgggattcaactcttaccttccttataagctagtaagttagtctgttactgcttcatggaatctggcagaagacacaagacttttgggtcagagacaagggattgtattactcatggcatgtacttatactaaaaaattatttgggccgggcgcagtggctcacacctctaatcccagcactttgggagcccgaggtgggcagatcacgaggtcaagaratcgagaccatcctggccaacatggtgaaaccccgtctctactaaaaatacaaaaattagccaggcgtggtggcatgcgcctgtagtcccagctactcgggagtctggggcagcagaattgcttgaacccgggaggtggaggttgcagtgagctgagattgtgccaccgcactccagcctggcaacagagtgagacttcatctcaaaaaaaaattatttgttggttattggaaattaacactt

SEQ ID NO: 577423 - DNA, 610 bp, Homo sapiens
ggggatagggaagagagtgaaaggcaggccaggagcggaaggcaagagcagatcatatggccctatggcccatgctatggacgttgggcttcatctaagagtactggaaagtgtttgaggcctttaagtggaaatgtcaccraattagagttgtattccataaaggtcatcctagggaaaagggaaggtgacccaggcatgcaggagatcaacaagaaggcacttacaggtgacaggtgttgtggctgagtagggcctgacaatggagatggagagacgtggaaagactggggcaatactaggagttctgatctactgaagacgtcaagaagacatcaggactgattgtcactttttcttaacagtgagtgaataccaaatataatttataaagatgggaaatgccagaatcaagcagactagcatgtgtcattttgaacacattaaccctgaggtttctgtgagacatttacatgaagaggcatgtatgaatcatgagctgaaataagcaaggactgaagccactcgcttgatggctgaatgctagctgcagatactcagcttgaatgtattcatgtttttttagagtagggtttctgagagcccccaa

SEQ ID NO: 577424 - DNA, 610 bp, Homo sapiens
ggggatagggaagagagtgaaaggcaggccaggagcggaaggcaagagcagatcatatggccctatggcccatgctatggacgttgggcttcatctaagagtactggaaagtgtttgaggcctttaagtggaaatgtcaccgaattagagttgtattccataaaggtcatcctagggaaaagggaaggtgacccaggcatgcaggagatcaacaagaaggcacttacaggtgacaggtgttgtggctgagtagggcctgacaatggagatggagagacgtggaaagactggggcaatactaggagttctgatctactgaagacgtcaagaagacatcaggactgattgtcactttttcttaacagtgagtgaataccaaatataattkataaagatgggaaatgccagaatcaagcagactagcatgtgtcattttgaacacattaaccctgaggtttctgtgagacatttacatgaagaggcatgtatgaatcatgagctgaaataagcaaggactgaagccactcgcttgatggctgaatgctagctgcagatactcagcttgaatgtattcatgtttttttagagtagggtttctgagagcccccaa

SEQ ID NO: 577425 - DNA, 610 bp, Homo sapiens
ggggatagggaagagagtgaaaggcaggccaggagcggaaggcaagagcagatcatatggccctatggcccatgctatggacgttgggcttcatctaagagtactggaaagtgtttgaggcctttaagtggaaatgtcaccgaattagagttgtattccataaaggtcatcctagggaaaagggaaggtgacccaggcatgcaggagatcaacaagaaggcacttacaggtgacaggtgttgtggctgagtagggcctgacaatggagatggagagacgtggaaagactggggcaatactaggagttctgatctactgaagacgtcaagaagacatcaggactgattgtcactttttcttaacagtgagtgaataccaaatataatttataaagatgggaaatgccagaatcaagcagactagcatgtgtcattttgaacacattaaccctgaggtttctgtgagacatttayatgaagaggcatgtatgaatcatgagctgaaataagcaaggactgaagccactcgcttgatggctgaatgctagctgcagatactcagcttgaatgtattcatgtttttttagagtagggtttctgagagcccccaa

SEQ ID NO: 577426 - DNA, 610 bp, Homo sapiens
ggggatagggaagagagtgaaaggcaggccaggagcggaaggcaagagcagatcatatggccctatggcccatgctatggacgttgggcttcatctaagagtactggaaagtgtttgaggcctttaagtggaaatgtcaccgaattagagttgtattccataaaggtcatcctagggaaaagggaaggtgacccaggcatgcaggagatcaacaagaaggcacttacaggtgacaggtgttgtggctgagtagggcctgacaatggagatggagagacgtggaaagactggggcaatactaggagttctgatctactgaagacgtcaagaagacatcaggactgattgtcactttttcttaacagtgagtgaataccaaatataatttataaagatgggaaatgccagaatcaagcagactagcatgtgtcattttgaacacattaaccctgaggtttctgtgagacatttacatgaagaggcatgtatgaatcatgagctgaaataagcaargactgaagccactcgcttgatggctgaatgctagctgcagatactcagcttgaatgtattcatgtttttttagagtagggtttctgagagcccccaa

SEQ ID NO: 577427 - DNA, 597 bp, Homo sapiens
taaaacaacaggaatgtattatcttacagttctggaggtcagaagtctgaaatatgtctcactaggctaaaaccaaagtgctgacctggctgtgttccttctggagcttctaggggagaatttgtttccttatttttttccagctttcagaggctgtctacatttcttgacttacagtccctttctccatcttcaaagccagcaatggtgggctgaatcctcctcagattgcgtcactctgaccttctgttctagagttaaatcttccctctgcctctttaagaaacccttgtgatggcatcaggcccacagataatccagggtaacctcctatttaagattggctgattaacaacctaaattccatctgcaaccctcaccatgtaacataacaaattcacagctaccagggagcattcctctattttcttagtcctctatgtttttacttatttattagwtctttattagcaaattttagtgaatttttaaaaatatttatatttgtactttaaatatgccatggtaaattggattattgtctaaaattcctcactccagagcaatatattatttctaccccattgatgttgggcc

SEQ ID NO: 577428 - DNA, 610 bp, Homo sapiens
gctaataagtagaggagaagattctcaaattttttaataaccaaagaaatacaaattaaaatgacaatatagcactttattcccattagattggcaaaacttagaaagaagaataacaccaggtcttggtgagatatgaaaaaaacaggagcatttttgcacactggtgatgagttatacaatgacatcattctggaaagtcctctgacagtgctatctaaattagacaggcaggtatctacagaaatttcacccttggatatgtttctggagtccttattaaacaagaccataattggatatacgttaataagtttttgcagggtttatggtactgagaagtaccacaacacatcctaggtagtagataagtaaaatgcatcctaggtagtaggtaagtaaaacgtggtggctctacwccagggaattttatcaggagttagaaagaacaaactagatctatacaaaacaacataaacagatcccaagcactcagaagtgagtgacaagtgagaaagcaaatgggatctccaaaagaataccatttttataacttacaaccataggcccaaagcattacatattctgcaaagatattttgtaacgtgtt

SEQ ID NO: 577429 - DNA, 386 bp, Homo sapiens
cctaggtagtaggtaagtaaaacgtggtggctctacaccagggaattttatcaggagttagaaagaacaaactagatctatacaaaacaacataaacagatcccaagcactcagaagtgagtgacaagtgagaaagcaaatgggatctccaaaagaataccatttttataacttacaaccataggcccaaagcattacatattctgcaaagatattttgtaacgtgttagagctgttgcctacagaggacaggaaaacagaaatggagggygggaataaagtgaatgatttctttcaaacatcttgtctccattcagactttctcaatccccctaaggattcagatgtattgaccctagatttctgagtctagagcctttctttct

SEQ ID NO: 577430 - DNA, 516 bp, Homo sapiens
aattcttttgattttgctcttattttttacatatggtatgcaaatgccacttaaattttaatggtttcattgcttcattagtcagtaaagtgctatgaataatacactatagttttagcattttatcatcaatgatgactacaaagtgaactcaacacatgaaaattatacatccaaataaaatgagtatgaacttttttggtctctatttcttcagaatcaacttccattgtcatttggtttactacaactacaacatttgcaatgtgtgttgattcttgaaaaagaaatcttgtaaaacttgtttcccaatttgccaattagggttaaaaataaattttataaagtttatattcttactttagctatgaggttaaatatatatactttttttgtttgtttgtttgagatggaatctcactccgtcrcccaggctggagtgcagtggcgtgatctcggttcactgcagcctctacctcctgggttcaagcgattctcctgccttatcctcctgag

SEQ ID NO: 577431 - DNA, 582 bp, Homo sapiens
caaaaattagccaggcatggtagcgtgcatctgtaatcccagctactcaggaggctgaggcaggagaattgcttgagcccaggaggcggaggttgcagtgagccgagatttcgagattgccactgcactccagcctgggtgacacggcaagaccctgtctccaaaaaaaaaaaaaaaamaaaaaaaacgaaaaacaaaaacaaaaaaggtcttaaataatgcccacttaactaactttttagttatttccttcatctgcaattgtattttctctttttgggctcaaaccttttctataaaattgtatttaattccacagtccttttctttattatttgttatcagcatgattttatttgtgactaattagaccaatcctcacggcaagaagaattaaataaaataacatttctattttagaagacccaaagaagtacaagagttagttacaattttaatggacttacagatttccaataataaagacaattaggtaataatatgatttaaactcaaggggatggtctaggacacccaccctttttgaaaattatagaagctcattatggtcactattaaaag

SEQ ID NO: 577432 - DNA, 582 bp, Homo sapiens
caaaaattagccaggcatggtagcgtgcatctgtaatcccagctactcaggaggctgaggcaggagaattgcttgagcccaggaggcggaggttgcagtgagccgagatttcgagattgccactgcactccagcctgggtgacacggcaagaccctgtctccaaaaaaaaaaaaaaaacaaaaaaaacgaaaaacaaaaacaaaaaaggtcttaaataatgcccacttaactaactttttagttatttccttcatctgcaattgtattttctctttttgggctcaaaccttttctataaaattgtatttaattccacagtccttttctttattatttgttatcagcatgattttatttgtgactaattagaccaatcctcacggcaagaagaattaaataaaatracatttctattttagaagacccaaagaagtacaagagttagttacaattttaatggacttacagatttccaataataaagacaattaggtaataatatgatttaaactcaaggggatggtctaggacacccaccctttttgaaaattatagaagctcattatggtcactattaaaag

SEQ ID NO: 577433 - DNA, 546 bp, Homo sapiens
gttcttacttaggtgagagtgtgatcaaaacttagggccttagcaccacccacaattttgggtttctggtctcagcatattattcataggttatggtgccctcatgttcacatactcctttcagctcttgtcattccagttaaagagagaccatttgacattcttgagatggctgcatgcaaacatttaaaacttttgagggaatacagcacaccagggagactactattatgactatcaggaggataatacaacatgtttggagtatgctccttacccagggtccactaaaccagaccacctaaaattaaatacatcaaagaatgagctagasaaagaattgactcacttaactaagcagtctcttcattaatcccctacaactgaatctctataatctacatttgatgtatgtctccatagaccacaaatgccagcagctgcacaaatacttttccatttagccactaaataatctggagctattctgttatttagcataactttcacaagagaatttaaagtctattgtgtaaccacagcctt

SEQ ID NO: 577434 - DNA, 510 bp, Homo sapiens
aatgttctctttaacccatgatatggattaagagaagtgaacygatgttctgtttctgactgattacaaagcaacacatgtaccattagtttttcatctacattgggccttaatttttcatctatcaaggtatgaggttatccatgtataaggctggctgcaaaatccttcacaaataaaagtataacccatgagtgcacacaacagacccctctttcacttctgttgtccacagaagcataaccaaggagaaaaaaatatccaaagataagagtctcatgatagtagagaagtcatgatctgtgatcttggaaaaagctcttcacatcaagtatgccgtcttcttctggggagaaactttcctggttagctttacctaaagagttccagtggatgtacagttccaagagtgtggaaggacccttctcagttgtgagattatgaacacaaggttcaaggtcccgaagttttgctgcagtgtggatggcaagggcaggctttctctgatgt

SEQ ID NO: 577435 - DNA, 510 bp, Homo sapiens
aatgttctctttaacccatgatatggattaagagaagtgaaccgatgttctgtttctgactgattacaaagcaacacatgtaccattagtttttcatctacattgggccttaatttttcatctatcaaggtatgaggttatccatgtataaggctggctgcaaaatccttcacaaataaaagtataacccatgagtgcacacaacagacccctctttcacttctgttgtccacagaagcataaccaaggagaaaaaaatatccaaagataagagtctcatgatagtagagaagtcatgatctgtgatcttggaaaaagctcttcacatcaagtatgccgtcttcttctggggagaaactttcctggttagctttacctaaagagttccagtggrtgtacagttccaagagtgtggaaggacccttctcagttgtgagattatgaacacaaggttcaaggtcccgaagttttgctgcagtgtggatggcaagggcaggctttctctgatgt

SEQ ID NO: 577436 - DNA, 551 bp, Homo sapiens
ctaaagttaccagaaacctgtattcaagagtacttttcagagtcctttccattctttcatgaacctcctaaaatatgccatattctaggattttgcatgcttgtgaagttttcagaaactatcagcattaagcaattaactgtggaaatgactttaagtagtcatagttaaagacacaattgacaagcatatttggttatttccatggtctacaataatttaacataataaccctacttatgattgatagcatatattcaagcatattagaattttagaaatcccatacaattttggaatgtatattaataacattcactaaaatgtaacctgaagaaggttaagcattgttttttattttgacaatgcttcccatgtaacttaacatgttaaatagtcttgtttacctctctttttggtgcttcaggggccctctgtrgtatcccaaagttagaggtcagaaaagatgattttgaagctgaaatttgattttgggaagcctgtcaaatatgttaaaggtttaaaacacttgatattatgagatagaattc

SEQ ID NO: 577437 - DNA, 551 bp, Homo sapiens
ctaaagttaccagaaacctgtattcaagagtacttttcagagtcctttccattctttcatgaacctcctaaaatatgccatattctaggattttgcatgcttgtgaagttttcagaaactatcagcattaagcaattaactgtggaaatgactttaagtagtcatagttaaagacacaattgacaagcatatttggttatttccatggtctacaataatttaacataataaccctacttatgattgatagcatatattcaagcatattagaattttagaaatcccatacaattttggaatgtatattaataacattcactaaaatgtaacctgaagaaggttaagcattgttttttattttgacaatgcttcccatgtaacttaacatgttaaatagtcttgtttacctctctttttggtgcttcaggggccctctgtagtatcccaaagttagaggtcagaaaagatgattttgaagctkaaatttgattttgggaagcctgtcaaatatgttaaaggtttaaaacacttgatattatgagatagaattc

SEQ ID NO: 577438 - DNA, 551 bp, Homo sapiens
ctaaagttaccagaaacctgtattcaagagtacttttcagagtcctttccattctttcatgaacctcctaaaatatgccatattctaggattttgcatgcttgtgaagttttcagaaactatcagcattaagcaattaactgtggaaatgactttaagtagtcatagttaaagacacaattgacaagcatatttggttatttccatggtctacaataatttaacataataaccctacttatgattgatagcatatattcaagcatattagaattttagaaatcccatacaattttggaatgtatattaataacattcactaaaatgtaacctgaagaaggttaagcattgttttttattttgacaatgcttcccatgtaacttaacatgttaaatagtcttgtttacctctctttttggtgcttcaggggccctctgtagtatcccaaagttagaggtcagaaaagatgattttgaagctgraatttgattttgggaagcctgtcaaatatgttaaaggtttaaaacacttgatattatgagatagaattc

SEQ ID NO: 577439 - DNA, 590 bp, Homo sapiens
aatgtctttacttatttcccaaagcttactaaagtcacatgaactaaaaggcattacagttttaatttttcttccaaaatttttctatttaagagctcttctttttaagccaattaatcagacctcttttatatacaaacgtcacacacagaacacataaatacatagaaacacagaagatccagtagttgtaagatgtttcatttgccagtttttaaatttcttaactggattactggattcagggtggagtccttggaggaacaggactaagaaaacatgcartttctaggtcctaataagtaagcacagctggaaggcaaaacagatatccaaaaaaacaggatcccaattttatgttggatcctggatcctcaaaagagaaatgctatggaacaagacagtgcaatgatttgaccgtgcatttcaatgcaaagccacccaaagctaatcagcccattctgtgattagcccaccccaatgggagtcttatctcttggtgggggatggggacatttccatactttccagatggccaagagcatgcttctctgatccaatgtgcaaagagctgagtatctccccaactg

SEQ ID NO: 577440 - DNA, 550 bp, Homo sapiens
tgtctgtgacttcccacaaactcgagctaaccagagctgatctcaccctctccttttggaagctccaacaaaagcactatagccttctaggtagattctaactccctgtcttatttacagtttaattttgtactggtaattgtctcatgtgggctcatcttattctcatacccaagctataaaatattcaatgcatgcattttggtttactcttctgtaagaagatggtcacagatgaaagcacactacaaaattttataagacttttctgagaagaaactgaaaaactstgcccagaacttggggtagctactcacagattacttgttggggtagagagagttacttaagagcgaatagcataaactctggaaatatactgccagatattatgaggttatcctaataacttcatatatccaatatccaatggtcccatgatgatgggggtgtctgctgaagggaatgagcccttgtcattgggaagaggtcagtttgagagtagggaacagagactctggaaggagcttatctggtagtggtaggagga

SEQ ID NO: 577441 - DNA, 493 bp, Homo sapiens
ccaacctgctgggttgagtaggccatccaggcttagagttgtctctagccaagaacggtagaagtcaagatttatttatgctggggctgctgmataaggcagttactcatgaggacatttttaaaccggtacaagtaaacccaagcaacctttaaggggagaagtcacaaacaaacacattaagtctggagttggacatgtgtcttggaagaagagacatgggtgagggaagatgatgcttgcagatttccagtgtgcacctccctctttagctgtggctggtaaacttacctgagtcattgattttctcccctctagatgccgccctgaatttcacttttgtctgctttcataattgagtgaccagaataacagtctgtcaaccattccacaaaatatttgcctcaagtcaaaaatatcctagaaaagagttgttggtgaatataaggccaatttcatgctctcttaaaataatgacacttccaagggtaga

SEQ ID NO: 577442 - DNA, 568 bp, Homo sapiens
tctgctagtccccttcaacagtctggctgataatggttaggccccattcatcaactcaaatattaagatatggctgttcacttacctaagtctataatatgctccayatggatctctggcttcagacatcccctctctttcttcttcatccttctactccagatgaactacaccttctcttcttattaatatttaggacaggagctgtcttatgtaggataggccttacttatttcctttacacaaggcaagcagaagcctcacatatgactgaagtcacatgtatttctgattaaagaaaatgaggtaaagggaaaaggaagcaaaggaactcacaggaacactggagttccataacacagcatattcagtatgtttatgaaaagtttatggactccattaactctagcatatgtatacaaagatttcatttgatgaacttcattgatccatgaagtcatatcagcaagaaaactgtccttcaagatcaattccttctttgctggaccttccactaattctcctggttccaagctaccaagttgcaaatgagttgcaatgacaagtg

SEQ ID NO: 577443 - DNA, 568 bp, Homo sapiens
tctgctagtccccttcaacagtctggctgataatggttaggccccattcatcaactcaaatattaagatatggctgttcacttacctaagtctataatatgctccacatggatctctggcttcagacatcccctctctttcttcttcatccttctactccaratgaactacaccttctcttcttattaatatttaggacaggagctgtcttatgtaggataggccttacttatttcctttacacaaggcaagcagaagcctcacatatgactgaagtcacatgtatttctgattaaagaaaatgaggtaaagggaaaaggaagcaaaggaactcacaggaacactggagttccataacacagcatattcagtatgtttatgaaaagtttatggactccattaactctagcatatgtatacaaagatttcatttgatgaacttcattgatccatgaagtcatatcagcaagaaaactgtccttcaagatcaattccttctttgctggaccttccactaattctcctggttccaagctaccaagttgcaaatgagttgcaatgacaagtg

SEQ ID NO: 577444 - DNA, 568 bp, Homo sapiens
tctgctagtccccttcaacagtctggctgataatggttaggccccattcatcaactcaaatattaagatatggctgttcacttacctaagtctataatatgctccacatggatctctggcttcagacatcccctctctttcttcttcatccttctactccagatgaactacaccttctcttcttattaatatttaggacaggagctgtcttatgtaggataggccttacttatttcctttacacaaggcaagcagaagcctcacatatgactgaagtcacatgtatttctgattaaagaaaatgaggtaaagggaaaaggaagcaaaggaactcacaggaacactggagttccataacacmgcatattcagtatgtttatgaaaagtttatggactccattaactctagcatatgtatacaaagatttcatttgatgaacttcattgatccatgaagtcatatcagcaagaaaactgtccttcaagatcaattccttctttgctggaccttccactaattctcctggttccaagctaccaagttgcaaatgagttgcaatgacaagtg

SEQ ID NO: 577445 - DNA, 642 bp, Homo sapiens
actgaacagattggtggtaagaaatacattcagcggcggctggcacagcggctcacacctataatccctgcactttgggaggccaaggtgggtgggtcacgaggtcaagagatcgagaccatcctggccaacatggtgaaaccccgtstttactaaaaatacaaaaattagctgggtgtgttggtgtgcgcctgtagtcccagctactggggaggctgaggcaggagactcacttgaacctgggaggtggaggttgcaatgagccgagattgcgccactgcactccagcctggtgacagaacgagactcggtctaaaaaaagaaaagaaaagaaatacattcagcagcaagttgcaaagtccttgctttccaactgtggatattccagagagatcaatgattacctggtgactagagcataggctgtggccttagacacacatgggtttacctgcttgctccaccactcaccttgaccttgagaaagctacttaaccttgctaagcatcagtttccttggttacataattggataataatagtattgatttcattgttataaagattacaggagataacccttgcacctagcacagaagaggtgcccaataaataagtgttcaaaatcacagttatgttgga

SEQ ID NO: 577446 - DNA, 561 bp, Homo sapiens
aaaaaaaatcaataaaataaaatcctgaacccaagaatgatcaaattttactttaaaatttaactcaaaagggatagttgttctggccttcagacatgctttgtaagaaaaaaaaaggatggttgtttatgccgtgatgggctaattgaataggtaaacatgtgaggaatccttattttatttcttacgctaaaatgagaatccctgtaaattggaatgtagtcttatcttatcgaaagktttcactgttcagctctgcttacccatcagaatcacatgggaaatggcaaatcacagaggcccaagctcaaccctattcctaccgaatagaatctctggaggtgaagctctgttttaaaattttcccaactggttctgatgcgtaccagagttaagaatcaaccagcacactgaactcgcaattttagcaaaaacccaaggaacccaggggcctatgcagaaagcaggaaatgccctctagtggccaaaagacgccatcatccattctccatgctcttgggccctgggaccatggcagagttagagaggtggcaacaaaag

SEQ ID NO: 577447 - DNA, 590 bp, Homo sapiens
gtgtgtgtgtgtgtgtgttcaaataaaaatagctctcccccccctcactataatctatgcacattgtatgaaaaccagaaaacagggccaggcacggtggctcatgcctgtaatcccagcactttgggaggccaaggcrggcagattgcttgagctcaggagttcaagatcagcccaggcaacatagcgaaaccccatcgctacgaaaaatacaaaaatttagccgggcatggtggtgcttgcctatagttccagctactagggaggccaaagtgggaggattgcttgagccctgcaggcagaggttgcagtgagccaagattgcaccactgcactgcagcctaggcaacagagcgaaactctacctcaaaaataaataaataaaaacaaaaacaaaaccagaaaacacagaaatgtgtaaagaaggtgttcttgttttgtgggtgagtctaaaaggacggttctggagaactgccctgtttcgtggggttgagggacagggagggcacacttggaagaggacgacattcagggtatgtaaagctgtagacctggtccacgaaggactccctgccgctcagggtgtgtgc

SEQ ID NO: 577448 - DNA, 552 bp, Homo sapiens
actgctaagcccagcccatctctaccccaggaatggtactgggacaagagtgagatggtcagtttgtcactcaccaacatgaaaaaggcaaggccaaacatggtcttgtccaaaagtgtatcagtgtcaccgttttatttttttaatggggctcaagctatgacattaagtaaaaaaggaaccagatgtgaaaccatgtaaacaatacaatctcaaccatgtaataattatgtgaatgtatagaaataagactaaaaagaaatactcaaactctctgcaytgattatttatagaatgtagattaggatgattttttaaatcccttatccatatttttccaagttttatcaaggaaaagttgttccttttaaaataaaagagaaaacagtaaaaacttattgctgtttgtttttttttaatagaaggaacatgacctgtttcctgtaattcacatctctatttatctccccagtaagttataactttcatttgtgggaaactttattccaggatcactaaaaaaattttttttttactaaactgattattttg

SEQ ID NO: 577449 - DNA, 494 bp, Homo sapiens
tgacataaaccttgctttctgaaaaagaaaaccaaggactggattcagattagcaaatggaacacaattggttcatctgaacttcgagctaaattatttctgtagatctcagttggctgcccagagtccagctgatctgctttctcagccacaactctatagttcacatgaagaagcaaggaaaacattctcagatcttgtatccctttaataaaatttcargttatttctccaagaaggatttcacagaggtaaaattggcattatctcaaatttcccatgagtaagccagctataatgaaaggttgctaagaaatactttgtttccatcaaagaaccacttggggaagtggagccatgggtgtttcccactgccccaggctctaaagtccttctaaacaggttcattttagctcctcaggtattagctagaatcatactggaaaatctctgcaagatgaaatagtaatatgttcctaaattataggattatt

SEQ ID NO: 577450 - DNA, 555 bp, Homo sapiens
gaattgacatttcctatctttagagtccaggaaaattgtattgcatttactttctaaatatttgcttttctgatcccaagattgttcttcatgtacctgtataggccacactttcggcaatccgaggactcacacaatgatattaaaataaagttgtttgtttgttttgggtgaaccatgattttaatatagcaaactcaaaggagccagaagacatgagggttgactcaccagtcacaatggtgttgtcacattrtttatccgtatgataagccagacagctattgcaggaagctgtcagttcaccaagtccaagtttgagaaggttatttttcacttgatatttaaagaaagcagaaataagatgctgggccaaaaactgtgtcagaagatgggctggaataatttctttcaagaagctcagtggcaatactatcttatagttgtttattgatttaccattacagagcaccttcatctgagttatatcatttaatcttcatgaaaaccctaggaggtagccttgaaaaaaaaaaaaaaacagagaaagaaaca

SEQ ID NO: 577451 - DNA, 608 bp, Homo sapiens
agcccctggccacagccagcgagaaaagggacttcagtcatatgaacacaaggaaatgagttctacctgtgatctttggaagcagatctttcccagttgagccccccagatgcaaatgtagcctggctgacaccttgcttgcagtcttgggagaccctaagcagagggcccagttaagccatgtccggcttcttgacccacaggaactgtggagtagtaaaagggtgttgttttaagctgctaaatttgtgataactttttatgcggtgatagaaaactaactcacatgccttttattacatctcgcttaaatcttaatcttgcctctatttctcaattgtggatgtatttacctattcaaaatgtaaggtaggccgggtgtggtggctcaygcctgtaatctcagcactttgggaggccaaggtgagcagatcacttgaggtcaggagtttgagaccagcttggccaacatggcaaaaccctgtctctactaaaaatacaaaaattagccaggcgtggtggcgcgtgcctatgatccctgctactccagaggctgaggcaggaaaatcgcttgaatcctggaggtggagcttgcagtgagctgagat

SEQ ID NO: 577452 - DNA, 530 bp, Homo sapiens
ggagttttagacaagtcctggggaaaaaattcatcctagcttccctgggctgatatatgtccttttgacaatgtttacaagaaggcctttttatgactcctgtcgctgtagcaacagatagcaagcatagacaaatgggtttaaacacaggggactcacctctcaggctgcccaaggtcacgaaggcaatgacaattgagcagtgaagactcgcgctgaaggctgagaaggcccagttcttctgaattttccccaaatctgcctagaaaccttgatagtgaacctttctgacgggaggaatcatttaagaatctaatgaaaaatgtgggttctccagaaaaagtccttcctcaataaactgcctacatttccaggagttcmacagctcgtcctaatgtccatccccaggtgaaaacccctgcttttggatgaggatcttcctctcagagaatctgccaagaaggatggccaggaagatagacgcttctgatagtttcaaaggcctctaatcaaagaatataaacttatga

SEQ ID NO: 577453 - DNA, 623 bp, Homo sapiens
accttttgcagttcacccacatcaagtagatattctgtcactaaattcatgtgcagtgcctgctaaagagggctcaccatttttggagttttagacaagtcctggggaaaaaattcatcctagcttccctgggctgatatatgtccttttgacaatgtttacaagaaggcctttttatgactcctgtcgctgtagcaacagatagcaagcatagacaaatgggtttaaacacaggggactcacctctcaggctgcccaaggtcacgaaggcaatgacaattgagcagtgaagactcgcgctgaaggctgagaaggcccagttcttctgaattttccccaaatctgcctagaaaccttgatagtgaacctttctgacgggaggaatcatttaagaatctaatgaaaaatgtgggttctccagaaaaagtccttcctcaataaactgcctacatttccaggagttccacagctcgtcctaatgtccatccccaggtgaaaacccctgcttttggatgaggatcttcctctcagagaatctgccaagaaggatggccaggaagatagacscttctgatagtttcaaaggcctctaatcaaagaatataaacttatgagcatggtgt

SEQ ID NO: 577454 - DNA, 623 bp, Homo sapiens
accttttgcagttcacccacatcaagtagatattctgtcactaaattcatgtgcagtgcctgctaaagagggctcaccatttttggagttttagacaagtcctggggaaaaaattcatcctagcttccctgggctgatatatgtccttttgacaatgtttacaagaaggcctttttatgactcctgtcgctgtagcaacagatagcaagcatagacaaatgggtttaaacacaggggactcacctctcaggctgcccaaggtcacgaaggcaatgacaattgagcagtgaagactcgcgctgaaggctgagaaggcccagttcttctgaattttccccaaatctgcctagaaaccttgatagtgaacctttctgacgggaggaatcatttaagaatctaatgaaaaatgtgggttctccagaaaaagtccttcctcaataaactgcctacatttccaggagttccacagctcgtcctaatgtccatccccaggtgaaaacccctgcttttggatgaggatcttcctctcagagaatctgccaagaaggatggccaggaagatagacgcttctgatagtttcaaaggcctctaatcaaagaawataaacttatgagcatggtgt

SEQ ID NO: 577455 - DNA, 560 bp, Homo sapiens
gaagctcatttaatcaatcttggtggtgtatttttgttaaaatgaaaagcattctatatttctagcaaaacctgccttcatttaaataaatgaaggtgtctgtgtgaacagttctcaacatcttccatattctgttgagtcaaattgtaaaatggagtcaggttagaagaggagagggaataaaagaggtgcgtagagtggggtggtctgttctagctctcctacaaaaaaaaaaagtgatgccacaggaaagggtattgggaaatacaactgatgggagaggctaattcttgcagttcgatgagaaaataggaaggcgcagagaaaggatgcaaaggaaatgaaagagaaggcagggaaggatgcaaggagtggcaaaaacaaagccatccaaaatagaagaaaacctttcagtcctctcaaagagatttcacacgagcttctgcttgactccacaatgtgctgttcccatttcagaaattaaattgatcccctactctctggtgacatccactcttgggaatggggcacagcacmttgtcaactcatataaggaagat

SEQ ID NO: 577456 - DNA, 311 bp, Homo sapiens
tatgatggataaattggaaagagagcgttcttaggagaaaggacctgatgttttagctgtctgcaatcttaattacaagctctgagaatataggaataaaaatcaagtgctttttctcttctctccctcaccaacaatcaacacagaagacttctgtgacctctggtcactgaccagtatgtagggatttctccccaccaacaaccaatcagttctgcagtgaatgccagctatgtgtcttataattcrgctctaacactgtctacctggagataccatcagaactcagagttgagcgctcagtcccacaa

SEQ ID NO: 577457 - DNA, 556 bp, Homo sapiens
tttactatccagatgtgattgttaaagcttaaggcccttggagaatttggcatgaagaaaaataggtccagagggaacctaagagttgaccacaaaagtaaaagagaagaagactttacttcattcatttactctttcattcaacaaacatttatagagtgctaccttgtgccaggcacactgttcagcattttgggatacagcaattaacaaaataaccatatccctgaccatgtgaatcttatacttaaggctgggagggatwcaaataacaaaataatatacaaaacatatagtatactagaggtaataaatagtaaggagaaaaaaattaagcaaagaagagggctagcgtatgttgttagtgggagtggagtgcaatttcagaaagaatggtcaggataggtgacatctgagaaataactggaggagatgagggccgtggatggagggtgttcttcacagagtacgagtggtggttgagtgctggaagacagaagttgaggaatagtaagagggccagtgtgcgggagagtaggagatgaggtcaggcagg

SEQ ID NO: 577458 - DNA, 386 bp, Homo sapiens
atatggactcaaccacaaaatctcagcagtagcaacagcaccaccagcaacagtaatacaacagcccacaacacatacattttcttcagcctggtagaaacgtggagctatcaaattaactggaaaaaatcccaactgaaaatcgattgcactgtttaaagaagggcagaaatcaaagctttccatcatcgtgtttactgaagaacatgccaagagaagtagttgcttctgaatcattttcctaagacacttttagactgcagtaaagctgcttctggggragggagtacagaaatggctgccaaagagacagcgagattcacaataaccaagatacagaaacagcctaagtgtccattgatgaatgaattattaaagaaaatgtg

SEQ ID NO: 577459 - DNA, 487 bp, Homo sapiens
agatcatcaggcattagattctcataaggagggtgcaacctagatccctcgcatgtgcagttcacagtagggtttgcactcctatgagaatctaatgccactgctgatctgacaggaggtggagctcaggccacaatgtgagctatgaggaggggctgtaaatacagatgaagctttgttcgycccaccactcacctcctgctgtgaggcccagttcctaacaggccatggacttgtaccagtctgtggcccaggggttgggaacccgtgatctaaatgacaagggcgggatagacatgcatgaaaaatagacattcaaaggactctatcttttaatttttttcaccaaagggctgcagtaaaatctggtctgagtgttgtgaagtctctgatcaggctgcctctctgcttgctggagtcaaatccagtctcatttgtctgctaaggagccagtggctgttttgcctcctcatgagtggtcagttag

SEQ ID NO: 577460 - DNA, 487 bp, Homo sapiens
agatcatcaggcattagattctcataaggagggtgcaacctagatccctcgcatgtgcagttcacagtagggtttgcactcctatgagaatctaatgccactgctgatctgacaggaggtggagctcaggccacaatgtgagctatgaggaggggctgtaaatacagatgaagctttgttcgtcccaccactcacctcctgctgtgaggcccagttcctaacaggccatggacttgtaccagtctgtggcccaggggttgggaacccgtgatctaaatgacaagggcgggatagacatgcatgaaaaatagacattcaaaggactctaycttttaatttttttcaccaaagggctgcagtaaaatctggtctgagtgttgtgaagtctctgatcaggctgcctctctgcttgctggagtcaaatccagtctcatttgtctgctaaggagccagtggctgttttgcctcctcatgagtggtcagttag

SEQ ID NO: 577461 - DNA, 386 bp, Homo sapiens
tttttgatccaaatgactaaggcactctcttatacagcctgtaattccttccttccttccttccttccttccttccttccttccttccttccttccttccttccttccctccctccctccctccctccctccctccctccctccctcaarttattgttgaattaaaccacaggaatcttagctacataccttggaagtcagtatgtgaagtcttgtgttgttctgcccactaaactttcatcccaaggcactttgccaacaggccaaaggggatactaaagggctcatgtagttgacctcatttaccaggacaggaacatgtattggttgccatgagcccaagggtagagcttcctcttctgacctctttatccctataataatga

SEQ ID NO: 577462 - DNA, 331 bp, Homo sapiens
ggagttgccacggaccagtgtggctgtggaaagccggagcaggcgtgggtactattgtcctgcatgcggcagagaaacccttggtgatgccgagcagcagacgtttggggcatctttttgaagagcagaagcgagttcagagcggaagaggtttttcagtgaatmaagctatttttaagggagtgtgattgctgccccttgctagtccgatctgggactgggcgtcttcggctataagcagattctgccactcctcagacaccagcaagtctctgcaaatcgcgcctccccatgtcagtgcagtcagcctcagaatcatacaccctctgtg

SEQ ID NO: 577463 - DNA, 331 bp, Homo sapiens
ggagttgccacggaccagtgtggctgtggaaagccggagcaggcgtgggtactattgtcctgcatgcggcagagaaacccttggtgatgccgagcagcagacgtttggggcatctttttgaagagcagaagcgagttcagagcggaagaggtttttcagtgaataaagctatttttaagggagtgtgattgctgccmcttgctagtccgatctgggactgggcgtcttcggctataagcagattctgccactcctcagacaccagcaagtctctgcaaatcgcgcctccccatgtcagtgcagtcagcctcagaatcatacaccctctgtg

SEQ ID NO: 577464 - DNA, 331 bp, Homo sapiens
ggagttgccacggaccagtgtggctgtggaaagccggagcaggcgtgggtactattgtcctgcatgcggcagagaaacccttggtgatgccgagcagcagacgtttggggcatctttttgaagagcagaagcgagttcagagcggaagaggtttttcagtgaataaagctatttttaagggagtgtgattgctgccccttgctagtccgatctgsgactgggcgtcttcggctataagcagattctgccactcctcagacaccagcaagtctctgcaaatcgcgcctccccatgtcagtgcagtcagcctcagaatcatacaccctctgtg

SEQ ID NO: 577465 - DNA, 654 bp, Homo sapiens
gcacagagactagaaaacctagatgaaatggataatttcccaaaaacacacaatgtcccaagactgaaccaggaagaaactggaatcctgaatagactaataacaaattatgagattgaatcagtaataaaaaaagattatgagactgaatcagtaaataaaaaaatctaccaaccagaaaaagccctggaccaaatggattcatggcctaattctaccaaacatacaaagaagtggtatcaatcttaatkaaactattccaaaaaaaaaaaaaaatcaaggaggagggactcctttctcactcattctatgaaactagtatcattctaatacaaaaatccagcaaggacaaaacaaaaagaaaactacaagccaatatccctgatggacctagatgcaaaagtcctcaacaaaatactagcaatctaaatccagcatcacatcaaaaaaagtaacttaccactaccaggtggtaagtttattcctgtaatgtaaggataattcaatgtatacaaatcaataaatgtgcttcaacacataaacaaaattaaaaacaaaacctatataatcatctcaacagacacaaaaaggatttgataaaatctgacatctcttcaagaatggaaccctcaacactagatatagaaggaatat

SEQ ID NO: 577466 - DNA, 488 bp, Homo sapiens
tgataacagcttcaccatgatcagtgtgagatacacttaaaattttgagctccactaagaagtctttgaaacatgattataagacagctacgtcaagctctaastggacagagtaactaccaatatgaattgattttcaagagcatctgttaaggtactttctctaaaacatctcattccagtttctttccccccctccctccctcccttccttccttctccctccctccctccttccctccttcccttcttccctccctcccttccttttcttgataaagtattacccccacatttccactaaaatttcaaatgggagtcaacattctgtgcataaaaatggaagtagcctaaaaatctatgtgttcattggccagtgttcagggagcacttactatgtattcaatttgaactgggcactattttagctactaattacatggagctattcaaatggaataaaactaaaattcctcagttgacctagc

SEQ ID NO: 577467 - DNA, 672 bp, Homo sapiens
attcaacaacagaaaaaaaagacaatttattataataaagtaagttttatttctgggatgcaagactgaattgatacatatcagtcaataaatgtgattcaacactttgaaagcaaaattatatgatcatctaaatagatgcataaaaagcttttgataaaatctaacatccaatcttgttaaaaaccctcagcagactaggcactgaaaaaatatacctcaaaataataagagccatccatgccatacatacccacagccaacaccatagtaaatggaaaaagctagaagcattcttgttgagatctggagaaatgaaaggatgtccactctttccactcctgtataacacagtgctgaaagtcctagccagagcaatccataaagagaaaaaaaataaaagrcatcctaataggaagagaagaagccaaactatctttctttacttacagtgtggttgtattcatagaaaatcctaaagattctgccaaaaagttcctaaaattgataaatgactttattaaagtttcaggaacaaagtaaatgtacaaaaatcattaacatttctatgcaccagcaatatccaggctgagagtgaaatcaagaacacaatcccacttaaaatagacacagagaaaatgaagtgccagaaatacagctaaccaaggacat

SEQ ID NO: 577468 - DNA, 584 bp, Homo sapiens
gtttgtttcatttttaaaattaatattattttaaatttacaagttatamtttcatacattcagaggatacagtagccatcacttatcttttttttggtgagacatttgaaatttacttagttatttttaaatgtacattatcattgactatagtcattccgctgtgcagtagatctcaaaacgaatgcctcctgcctaactgaaaatttgaaccctttgaccagtaacttccccccacctccccacaccctgcacccctaccactttttgccttcaacctctagtaaccaccattcttctctctacttttatttatgagttcaatatgtttagattccacctaaaaatgagatgatgcagtatttctctttctgtgcctgaatgccaataatgtttgaggacctactaggaagtcaatttaactattttatttctatcccctcataaattaaataaatgaaaaacaaaacaattaagattacctatggcaggtgagtttcatagccttagagcaggggtcaacaaacattttctgtaaaggaccacaaggtaaatatattaggatttaaaggtcataataattg

SEQ ID NO: 577469 - DNA, 569 bp, Homo sapiens
caaaacagcaaacggatatggatatataattaattgaagaaacaacatcagtacagatgtcaatacagatgatttatttctagatataaagacaaaacattaaatatctcttgggcattgcttgtttcagacagctcttgcagcagaaataatttcttgggtttcatgagtgtacacaatattttacaaatgctgtacaccatggcatttactagttaaatctgttgatttaccaaattagctggmaaagccacacctttttggtttattacacaaaatctcttgaagtttgtgtaacgtgtgatcaatatgttgacttatttgagattggagctttttcaatttctccaaatgtttcaccaacattgccatcaccccaaaaagttttctcatgcccctttgcaattaatccctttccctcatctcaggctcctcgcaatctgttttctttcactctagatttcactcaaaattccatataaatggacttacagagtatgcagtcttctatgtctgtttctttcacttggtatatataataatttttagattcatctatgtttttatgt

SEQ ID NO: 577470 - DNA, 569 bp, Homo sapiens
caaaacagcaaacggatatggatatataattaattgaagaaacaacatcagtacagatgtcaatacagatgatttatttctagatataaagacaaaacattaaatatctcttgggcattgcttgtttcagacagctcttgcagcagaaataatttcttgggtttcatgagtgtacacaatattttacaaatgctgtacaccatggcatttactagttaaatctgttgatttaccaaattagctggcaaagccayacctttttggtttattacacaaaatctcttgaagtttgtgtaacgtgtgatcaatatgttgacttatttgagattggagctttttcaatttctccaaatgtttcaccaacattgccatcaccccaaaaagttttctcatgcccctttgcaattaatccctttccctcatctcaggctcctcgcaatctgttttctttcactctagatttcactcaaaattccatataaatggacttacagagtatgcagtcttctatgtctgtttctttcacttggtatatataataatttttagattcatctatgtttttatgt

SEQ ID NO: 577471 - DNA, 568 bp, Homo sapiens
ttttttcttctcttttaaccattcaacaaacactatgatgtggaaattttgtgcttcagatcagcagaacacgtagggtaagagaacaaattttggtataacacatcaagaacacyggaaattatcagacatgttctttgctgagactagataaaataatgctttatccctgtttgacagacctctatccatacctctgaaaatctctgtaataattcagatctggtaagcgacaaacaagtactatttcctggacacagtaaaatgcataaacttgtagtaacatacccagtcacagcaacaagggtgatttgcatatggtgggttccactgtataagtcaatggagaacctcaaatttctccatgaaagcaacaatgtaaaaagttttgtaattattttgatatcataaatggaccatcactaagattccatcaagaaaaagatcttgtaagagcacatggcagctgagcaggtatagagcttgatatggtttggatctgtgtctccaccaaatctcatgttgaattataatctccattgttggaggtggggcctggtgggaggtg

SEQ ID NO: 577472 - DNA, 568 bp, Homo sapiens
ttttttcttctcttttaaccattcaacaaacactatgatgtggaaattttgtgcttcagatcagcagaacacgtagggtaagagaacaaattttggtataacacatcaagaacactggaaattatcagacatgttctttgctgagactagataaaataatgctttatccctgtttgacagacctctatccatacctctgaaaatctctgtaataattcagatctggtaagcgacaaacaagtactatttcctggacacagtaaaatgcataaacttrtagtaacatacccagtcacagcaacaagggtgatttgcatatggtgggttccactgtataagtcaatggagaacctcaaatttctccatgaaagcaacaatgtaaaaagttttgtaattattttgatatcataaatggaccatcactaagattccatcaagaaaaagatcttgtaagagcacatggcagctgagcaggtatagagcttgatatggtttggatctgtgtctccaccaaatctcatgttgaattataatctccattgttggaggtggggcctggtgggaggtg

SEQ ID NO: 577473 - DNA, 616 bp, Homo sapiens
aacctgaacttccaaaatctaacaagaagatccccaaccccacctacacccagaaagaaggaacccttttgtctaccttaataataggttttgatttatttatctttgctttctttttttttttttttttttttccagaaaacagtcacacagggctccgggggtatttttaaagtggtgaccttcctgccccctccaccaaagggaaaaaggtttgctggctggctggcttgtgcacttccctcttatgaccaaacccctagttcccttgtctctcacatctttatgtctttcgagtgcctctgtgactcatgtctccttagcttgaggtctatgcagtcggtcagttggagaatgagagtttgtaacctgcagtgtgcagaatccaagggccaacaggcaactagggcacgcttctctttagccgatgatgttttgtcagggctcttgttccagtctggttgtgaataggcttcatttcctggttccatcacatcttcctctcttcagagcaactcraatactctctaactctgtctgtgtctctttgcctcagtcttcattgtgtttctgttctctatctctctctctctctctctctctctcttcctccctc

SEQ ID NO: 577474 - DNA, 484 bp, Homo sapiens
cttctcttctttgtctgacctcaattttctcacctgcaaatagaggaaactgaacttgctgacctctgaagatacttccagctctggtcttcaggtatctaakatgaactggcacaaaaagtgtggagggtagcattgtttgcaatgacgacagttttttaaaaggataaagaaaaaaatcctgaccaccacccagatgttcatcaataatggacggaagtaaatgatagtacatttatgcactgtaataatttgtaatatttttaaaataaaccatttaaatctatagttaatgatatagagcaatgcctgatatgtagtgttaattttttttctttttttttttgaggcggagtctcactctttcgcccaggccagactgcagtggcactatctcggctcactgcaagctccgcctcctgggttcacgccattctcctgcctcagcctcccgagtagctgggactacaggcacccgccacca

SEQ ID NO: 577475 - DNA, 585 bp, Homo sapiens
acccctgcttccatagcacagacagtcactaataacacttgcttcaattgggacaaatagttttcccccagaacctaattcaaggctatctttttcaggctctttagaaggctgctagagttggtcccttgagtaagctgagtattgtggtgcccttcagttcctatgccatagaagcttgaacctcattcattaatccactagccctaaggcttaaaaccagtctggcctggcttggagcctttagatcactctctatcttctggccaataagaatgaatttctaggccaggcatggggctcacgcctgtaatcccagcactttgggggactgagggtggcggatcaattaaggtcaggagttgaggtcaggaccagctgggccaarcccatatctacaaaaaatacaaaaattagccaggcatggtagcacacacctgtaatcccagctactgagggaggctgaggcacaggaatcgcttgaacccaggaggcagaggtcgcagtgagctgggatcgcaccactgcactccagcctgggcgacagagtgagactccgtttcaaaaaaaaaaaaagagtgagtt

SEQ ID NO: 577476 - DNA, 567 bp, Homo sapiens
gctcttgggaagtccctctggggtgaggttgatgccctgtttgtgccctgaggggtgcttaatgcttcccaaaagagtccccttggtctgaattgcttcaatcactcccaatggcctcgtcccacaacacagccaatagcagggctgaagagtaaaagcttcataaagaaaaatgacggaggcttattgccacctaccggattaggaaagaaaaggctatagtaaaagatttcatggagtccagctctatgagaagcaccagagatggggggagatcatagaattgcgcaggaccctgcaggtcgtacattcaaccttatggagttcagccctggagcataaaccatccaggcctgatgccattccttccttcagtcgctttgccacttcctgggagaagaataacagttataattcattgrgagcttcatgtgtgtatctaggggcattatttgtattgcctcatttaaacctggcaaccattctcaaatgaaaaactattattatcacccctttttcagaggaagaaactgaggcttaggaattaaaggaatttgtttaagctca

SEQ ID NO: 577477 - DNA, 397 bp, Homo sapiens
tattattggttctttccatttagataatagtgagatggctagataatagggtattgtctgtttgctaaaactaaacaaatctttttcaattatgatgaggcatatttcatggtgcaggaataggctggaagtttgcagctcaatttgcttctgaattggaagcacaggtayggcaggccatgataaacaaaggggctaaactgcgtgtggctaaagccttgttgaaggaatgtggacctagtaaaatctcacttgcctcaggttaaagagtgtgaaatgggcgttccttttcttttttcttttcttttttttttttttttttgagacagagtctcactctgtcacccaggctggagtgcagtgacgtgatcttggctcactgcaagctccgcctccc

SEQ ID NO: 577478 - DNA, 538 bp, Homo sapiens
tataaaataaatatatagcttagtaaaacttttatatttccttacaaattgcctccacatatttattttcactaattctcatcacatttaaaaaagaattgtattaattgcttaatctgattatggtctaacagttgttcaaaaccaattcattttattttgtgtttgtatttatgcgaacaaaagtcttaggatagtgggtttaagatacacattcagcaaataggatcttacttccaatttgargagtaaagtttccttacttccttttttttctttcttttttcttttttttgacttcttagaatcttctagttttgattgctcctgaacaccactataaatcatcattaatgtcatcttccctaacaagtgtttgttctgattttgccacaaaagactttgcaaaaaacacaaatggttttagttgttcaaagtatgtgtcctctttaaccatgagctctaactactttcttgaattaataatattgttattactgacagaatatttcttaaaatgatatcttaaatatttctt

SEQ ID NO: 577479 - DNA, 538 bp, Homo sapiens
tataaaataaatatatagcttagtaaaacttttatatttccttacaaattgcctccacatatttattttcactaattctcatcacatttaaaaaagaattgtattaattgcttaatctgattatggtctaacagttgttcaaaaccaattcattttattttgtgtttgtatttatgcgaacaaaagtcttaggatagtgggtttaagatacacattcagcaaataggatcttacttccaatttgaagagtaaagtttccttacttccttttttttctttcttttttcttttttttgacttcttagaatcttctagttttgattgctcctgaacaccactataaatcatcattaatgycatcttccctaacaagtgtttgttctgattttgccacaaaagactttgcaaaaaacacaaatggttttagttgttcaaagtatgtgtcctctttaaccatgagctctaactactttcttgaattaataatattgttattactgacagaatatttcttaaaatgatatcttaaatatttctt

SEQ ID NO: 577480 - DNA, 538 bp, Homo sapiens
tataaaataaatatatagcttagtaaaacttttatatttccttacaaattgcctccacatatttattttcactaattctcatcacatttaaaaaagaattgtattaattgcttaatctgattatggtctaacagttgttcaaaaccaattcattttattttgtgtttgtatttatgcgaacaaaagtcttaggatagtgggtttaagatacacattcagcaaataggatcttacttccaatttgaagagtaaagtttccttacttccttttttttctttcttttttcttttttttgacttcttagaatcttctagttttgattgctcctgaacaccactataaatcatcattaatgtcatcttccctaacaagtgtttgttctgattttrccacaaaagactttgcaaaaaacacaaatggttttagttgttcaaagtatgtgtcctctttaaccatgagctctaactactttcttgaattaataatattgttattactgacagaatatttcttaaaatgatatcttaaatatttctt

SEQ ID NO: 577481 - DNA, 579 bp, Homo sapiens
cccaccatcagtttattcagtgatccctgaacctcccatggcttggtctcctcrtagaaaccaggggaatgggctagttcctttatcttctcctcctctgaccccacatggcactgatccacttgcatgggactgagaactgggccactgatcctcagcactttattggactgcctaatggacagactgtacctcaccatttcagcttaaggctctgggcattactctccctagtttcaattatttagccagattgattggttggttggttggtttgtttatttatttatttatgtctgttcacctcaatattgttggtcatttcagttgctatctgttaggttggtgcaaatgatatcatggtttttctcattaaaagcttttgccattaaaagtttttaatggcaaaaactgcgataacttttgcaccgacctgataagatagaaatatgggaattatacatttgacctcataacgtgatgtttctcagaagtcttcttaataatccttcttaattattaataattctattagtaatccttaataatcctgttattcctgaggttttgttttcacta

SEQ ID NO: 577482 - DNA, 609 bp, Homo sapiens
tttaaatataagttccagttacaggtcatttctttgtccacacatctaagcataggtttttagaagcagccaggcttcatcttgaatgctytgctgcttagaaatttcttctgctaaatatcataagtcatctctctcaagttcaaagttccacagatcactagagcagggacacaatgccatcaggttctttgctaatgcataacaaaagtgacttttgcttcacttcccaataagttcctcatctctatctaaggctgcatcagcctggccatctatgcatctcactatcagcattttgatcaaaactattcaataagtctgtagacagttccaaactttctctcttcttcctgccttcttctcagtcttcaaaactattccaaccactgcctgttacacatttccaaagctgtttccacattttcagatgtctttatagcaatgccttactcctaggtccctattttctgtattagtccattgtcgcactgctataaagaaacagggagactggttaatttataaagaaatgaggtttacttggctcacggttttacagactgtacaggaagtgtgacttgggaggcctcaggaaaattacaatca

SEQ ID NO: 577483 - DNA, 498 bp, Homo sapiens
aaatggaaacctaaaaataaaatattatttaaccttagggtgtcagagaaatttttttttattttatgttactgtaaattcatattataacaacaataataataattttgttaggaatttcctgtattaatctaaacaacaattagttgagtactaatatattaaacytctaaaaattcgaaaatatttgggtccactgtattccatcattggctgaatactcaactacaaagatataagagtaagcccaacagtcatgtataagaataaagggaaatatagtcaaataactcagccaatatgtggcactgaccgcatactacatgagaaataggtttcatagatttagccaaggctagttattaaacaaagagaaaacaacaattttcaggaagaaaaaaattatcagaatccagagtttctacaacaaaatattagaaatgtccagtgttcaactaaaatttttgaaatgtacaaagaaaaaataaagtgctaccc

SEQ ID NO: 577484 - DNA, 498 bp, Homo sapiens
aaatggaaacctaaaaataaaatattatttaaccttagggtgtcagagaaatttttttttattttatgttactgtaaattcatattataacaacaataataataattttgttaggaatttcctgtattaatctaaacaacaattagttgagtactaatatattaaacctctaaaaattcgaaaatatttgggtccactgtattccatcattggctgaatactcaactacaaagatataagagtaagcccaacagtcatgtataagaataaagggaaatatagtcaaataactcagccaatatgtggcactgaccgcatactacatgagaaataggtttcatagatttagccaaggctagttattaaacaaagagaaaacaacaattttcaggragaaaaaaattatcagaatccagagtttctacaacaaaatattagaaatgtccagtgttcaactaaaatttttgaaatgtacaaagaaaaaataaagtgctaccc

SEQ ID NO: 577485 - DNA, 498 bp, Homo sapiens
aaatggaaacctaaaaataaaatattatttaaccttagggtgtcagagaaatttttttttattttatgttactgtaaattcatattataacaacaataataataattttgttaggaatttcctgtattaatctaaacaacaattagttgagtactaatatattaaacctctaaaaattcgaaaatatttgggtccactgtattccatcattggctgaatactcaactacaaagatataagagtaagcccaacagtcatgtataagaataaagggaaatatagtcaaataactcagccaatatgtggcactgaccgcatactacatgagaaataggtttcatagatttagccaaggctagttattaaacaaagagaaaacaacaattttcaggaagaaaaaaattatcrgaatccagagtttctacaacaaaatattagaaatgtccagtgttcaactaaaatttttgaaatgtacaaagaaaaaataaagtgctaccc

SEQ ID NO: 577486 - DNA, 576 bp, Homo sapiens
ttttgtggtgctaaacaatctctagcatggccgttttggcaagtcacaaaagctcatgcagatattttattgtgctgctgctactctggaatgtgtgcagaatcaccatgggcattatcatcatcaccaccatcaccaacatgattaacagaaagaaaaataaaaccaagaaaactgtaatatgaaaggagaatctgaagacataaactttatacaatagttatggagtcaaactggcataattgcagtgttttattagttgatactaagccattttactttgagaaacacacatgctaaatgacatagaggaaaaataacataaagtgattcatgtagcaaatttaaattttgcatctgttttycagttaagattaagaatatggaattcaattaaatgcagttatatatgcttttactttcatgtatatgcaagagttatgagcttgtctgttgttaaactgtcataattgcaaatagaaatagaaactacaaattctgaaatatttcaagtactatgaaaggtttggttttaaaatgtctagcatcataattattgagggttaggtacatcat

SEQ ID NO: 577487 - DNA, 572 bp, Homo sapiens
caatgcataaagttctgctcttgtgcagttcactgtttagtgaggaacagtgctaaataaaaaagcaaaaagataaccaaaggcatgcattgtaaatcagatgatagttaccagagtggatactggagcaaggcccaggamcacagtcagagcaaaatccctgaggtgggagatgataatgtcataggagaacacaaacaaataaacacacaaacaaaatctcccactgtgaagaatatttggaaactgctagattaaacactaagtttgttcctttgttgtaggatctcttgcaacttttgagattctaatatatattttaacgcttcatcagaagagaggcatagagtaatgtactcacttctcataatgatcagtttttcttgatcatcttacaaggcacattttcttcttaggaggagaatcttcctagtggctctcagctagtaattggtctctcgccaaagaaagggaggcgaatgagtttctcatgtagaggaggcaaagagtggattataaaatgcaggtgaaattacatggaactgagtttaagtcacagattgtacaatagg

SEQ ID NO: 577488 - DNA, 483 bp, Homo sapiens
gggattacaggcgcatgccaccatgcccagctaatttttgtatttttagtagagatggggttttgccatgttggccaggctggtcttaaactcctgacctcatacaatccatctgccttggcctcccaaagtgctgggattacaggtgtgagccaccatacccagccaagttttctctaatagtaacaagctcctcactgccttcagatacaagtggaaagtttattgcttacaacttttcwtatttctgcatcaatccgtgttcagttgcataacagagaatctggtcaagtttaagcataaagggatttaaagcaaggaattgaatgtgtacaaaactactgaaaggactagaggagcaaagctgtaggtccaactccttggaacaccttccaccacttacaactactcacaacttccaccactcacaactctttctaccatgattagaaaagctcccactggactagcacggtggcttat

SEQ ID NO: 577489 - DNA, 560 bp, Homo sapiens
gggagccaggtttaacaaatgtctagaagtaatagagttccacaaaatactcaataacaatctttattgtagaacaaagtttatgaaatctcatttcataatacttatttaatttctttttcctgaaaacaacacatttgtaaaacaataggagttttattggtttatttatttatgttggtagaaaaacatctggtaaatgctttattaaatagaaaaaactattgtaacaaaacatcagccatcttgcatctttaggtatctggaaataaaaaatrtagcagtcatgaactatagaaaatggaaaaacctatttatggcggtggttgcattaatggagcctggttttaaaatatttattgttaagagagactgagttcttcaacacggcacagataagaacatagttttcgcattcgtggtgccaaattcttcttagtgcactatacaatctacacttttaaaataaaaataataatttttatagtaattttaaactgctagaaacctttaaccattaaagatgtgtgtgtgtgtgtgtgtgtgtatgtgtgtatgtg

SEQ ID NO: 577490 - DNA, 546 bp, Homo sapiens
tttgttaaaccaaaacttacatacagtagtgtttaaaacttttgagaggagttacaaataagcaaggaggaaggagaggctagaaggaacctgaggaactgaaatgaagtcagaattatcactataaactcatgtttaccttaatctgttaaaagacagatgaaattaaaacaaattgtagacatatattgcttggtttacatacctacatttctagctctgttgctgtgtgggcctagaagaaatgacactctggtaacaatgagaattcctaaagccaagataattgtttctattaccattcttcaattaaagcaaggagagatggctgacgctagcactgtggtagagaaaataccaaatgttcctggggcatcttgtagtgcatgaaaataaagaaataaaaaaaaaaaaacacaggtgatagtatcgtgtcaaaaagcttttctacaggagtcaagtagaaagagctactaattgccaaaactaagaatttgatcaataaaataggtaytgatagcattaaattataacctaaagaataaa

SEQ ID NO: 577491 - DNA, 392 bp, Homo sapiens
tcttttatttctattaaaacatctcttttggccgagtgcagtggctcttgcctgtaatcacagcactttgggaggctgaggtgggctgatctcttgaggccaggagttcaagaccagcctgggcagcaaagtgagcccctgtctctacaaaaagtaggaaaattagcgaggcatggtggtrtgcacctgtaatcccagccacttgagatgctgtggcaggggaatagattgagcccaagatgaggaggttgcagtgaacagagatctcgctgttacactccagcctgggcgacagagtgagaccctgtcaaaaaaaaaaaaaaaaaaaaaaagaagaagaagaaagaaagaaagaaaatgaaggaaggaaggagacctcttccttcaaaacc

SEQ ID NO: 577492 - DNA, 379 bp, Homo sapiens
atttttgtatttttagtagagatgaggtttcaccatgttggccaggctggtctcgaactcctcactcaggtgatccacccaccttggcctcccaaagtgctgggattacaggcatgagccaccacgcccagcccaactcctgagatcttatagggaagctgctgattatcatcttcaggtgttttctgtctactaggagaacgcctttccctggagccggctgtgaccacttactattgtagagagacagtttaacaacgatctgaccatcacctcacagttgcctgacactcctggtggtgtggtggccctcttctkccctgctcatgtctggctacctacctactataacacacataatggtactgtaattcaaaat

SEQ ID NO: 577493 - DNA, 554 bp, Homo sapiens
atatataccatggaatactattcagccataaaaaggaatgaattaatggcatttgcaacaatctggatagarttggagaccattattctacgtgaattaactcaggaaggaaaaaccaaacattgtatgttctcactcataagtggaagctaagctatgagaatgcaaaggcataagaataatacagtggactttggggacccacaggaaagggtgggaggttggtgagggataaaagaccacacattagttacagtgtatgctgctagggtgatgggtgcaccaaaatctcagaaatcaccactaaagaacgcattcatgtaaccaaacaccacctgtttcccaaaaaccaattgaaattaaaaataataaaataaaataaaataaaataaaataaaataaaataaaataaaataaaataaaataaaaacaaagggcacgtagctgaggactgatccctccaactgcccttccttggagctgtcttcctctggtgccatgttttctgtcagttcccagcacacttgcaggcagtcttctgtgcaaactttcac

SEQ ID NO: 577494 - DNA, 617 bp, Homo sapiens
cacatgtaccccataaataagtacaactatcatctacccataataatcaaaaataaattttttaaaaaaatcctgctctgggctaggtgtggtggctaaggyctgtgatcccagcactcttgggaggccgaggcaggcagatcacctgaggttgggagttcaaggccagcctgaccaacatggagaaacccatctctacttaaaaaatacaaaattagccaggtgtggtggcgcatgcctgtaatcccagctactcaggatgctgaggcaggagaatcgcttgaaccggggaggcggaggctgcagtgagctgagatcgtgccgttgcactccagcctgagcaacaagagcgaaactccatctaaaaaaagaaaaaaatcctgctctggttttgctaaactgataaaaataaataaattttttacatgacatttttcttgataaaataaacataaagcatatacatatatacccacacaacgtgaaatatctatccaaatctgcatctggatatcaatatatggtgaagtgaagtcaacctgtgctaactcaccaccaactgaagaactagaatgttaccatttacttacactttccctatttatttcaggtctcaa

SEQ ID NO: 577495 - DNA, 541 bp, Homo sapiens
ccaggcgcagtggctcacgcctataattccagcagtttgggaggccgaggcaagtggatcacaaggtcaggagttcaagaacagcctgaccaacatggtgaaaccccgtctctactaaaaatacaaaaattagccggacatggtggtgcatgcctgtaatcccagctacttggaaggctgaggcaggagaatcgcttgaacccagaaggcagagattgcagtgagccgagatcgcaccagtgcactccagcctaggtaatagagtgagacttcgtctcaaaaarcaaacgaacaaacaaacaaacaaaaaaccttaggcaacatgagattacaggtggcagttatccctggggatgcaaattgtgttaatttttcttccttcagttttttctcttttctgcaatttggggcagcaagggattttcactttgtaaatgtggagaatccatcatttacaaagaaaacatccatcagtctttctctccttccaattcgtctagttggtttggttctgattgcagaaaaccccccacagcctcag

SEQ ID NO: 577496 - DNA, 503 bp, Homo sapiens
ggagcctctcacccatatgggtctggaacctcttgctggcatcctgagctcagttccaggcagatcacacacatacaggtaatgaatctcacatcccaaggtgtttgttaaatattcaaccrcgccagggaaggtggcagttcgcgagatgctggtggcaaattaatgagcagtctttagggaaaggggggccgtgaggctcaggtggcctctcactctcccgcttcctgctctgggccttgccagagccccagaaagcctcagcctcagcctgttccttgaagaatacacagcctgaggagacagaactggacacggaacccctgaccccattgtccgggcaaggtggctaacacctgtaatcccagcactttgggaggctgaggcaggtggatcaacagaggtcaggagttcgagaccagcctggccaacatggagaaaccctgtctctactaaaaatataaaaattagccaggcatgatggtgtgcacctgtaaatccca

SEQ ID NO: 577497 - DNA, 560 bp, Homo sapiens
gaacctagaagtagatccacatacccacagaaacaagataaatggcaaatgaggctcttcagattagtgaagtacatactggactattctgtagtgctaaggaaagtgttatccacgtgaataaaattaaattcctcacataaataataataggtggactaaagactcaatttgaaatgtaaaagttaagtaaattatttataaatatatttaaaactttaaagaaaatataaaagaatctttatgatcttggagacgatattggatattttctcagacaagttaaaaatcacactaatcataaagaaaaatttgataaatttgtctgttaaaatgtacagcttcttcctttcgctgcctgactgctgccatcatgggttgcatgcatgctcccaggaagggcctgtcctggttggctctaccctaacagtgcagcatcaccacttggctgaagttgacatctgatgaaatgaaggagatttacaaactggccaasaaggcctgactccttcacaaaccggtgtgatacagagagacacatggtgttgcacaagtacgtt

SEQ ID NO: 577498 - DNA, 456 bp, Homo sapiens
tttggtggataggagtggttttcacaawacttgctttttattatatagaacagcattctttccaagcctctgagactacatggcccttctgtacccattaccccctccaatggcacccttttcagtttgccttctctgatcatgggaattggcagagtgggaagatgaaaagtgacaggcttggtgaggccaggaaggcataagtgaggcagagagaatgaaggagaatgtgtgagcgcatatgtatccttcaggattctcagttattctttaccatctgtccatagtgtgaattctttaataactacttcagaatgtgtaacatttacttggaaattcacagatgtattaaattacaaatatactttaaatcaaatataatcaaatttactttcatattcaatgtattatatatatgtatatatgtaaataaatacatgtatgtatacacacata

SEQ ID NO: 577499 - DNA, 612 bp, Homo sapiens
aagctttcacttttccaggtgaaaattcattttctgaataactggcataaagtggtcccaacagactgaggtactcccttcggactcctctaagaggctggagggctgctttgcaccagcaaatggtcaattatattgcctgcctggccatcaccaaggtcacccctggggytgagccagatcattgagtaagatctccctttcttttcaaagaatcgctcctgtgctcttctcacccagactccctaagaacagaagacgaattttcccagctgtgccgtgacctctgctccttgaactatccatgccccagatgtttactttttttggctccagggcctgcattgattcctaagagtgagattaaaaagacgtcgaaagcctaggccagacagttccctaccccagatatggaaattctgggagacaaacatttcttatgctgcagcgatgtgaaggaatgcagaggattcctactacatggagacaaaggaagagctttggtatccttgagagctacagaaaaatgtaaagcgatgcaaaaagttctaaatgactgagtattgttttaatgtttttgctagatgattttggtctcaatagagttttaaa

SEQ ID NO: 577500 - DNA, 542 bp, Homo sapiens
tctcaaaaaaaggaaagaacaaaaaccattgttttctgaaagatcgtgcatattaatgcaggggactaaacatgtttgaatgargaagaggcactagaccctttatttccaacagctcaccagctggggttctcacagtttcagttcagctctcctggggtgagactgggtgagggttagcaaatttttttctaaaagggccagatattaaacattttcaaattgcagatcatgtggctctgttgcaacactgaattctatcactggatctcaaaagtgaccatagataatgagtaaactaatggatgtggctgtgttccaataaaactttatttatcaaaatttatctgtgctctggatctggggcataaagacccaaatctgacccctcagatctctaaacccatgccaaccatactggaggaactgagtcaggttgtctaatgtattcacttgtttattcattcatctattctttccttcaacaatgatactgatagcattctgtgttctagccagcatgatatgccatggggacagag

SEQ ID NO: 577501 - DNA, 542 bp, Homo sapiens
tctcaaaaaaaggaaagaacaaaaaccattgttttctgaaagatcgtgcatattaatgcaggggactaaacatgtttgaatgaggaagaggcactagaccctttatttccaacagctcaccagctggggttctcacagtttcagttcagctctcctggggtgagactgggtgagggttagcaaatttttttctaaaagggccagatattaaacattttcaaattgcagatcatgtggctctgttgcaacactgaattctatcactggatctcaaaagtgrccatagataatgagtaaactaatggatgtggctgtgttccaataaaactttatttatcaaaatttatctgtgctctggatctggggcataaagacccaaatctgacccctcagatctctaaacccatgccaaccatactggaggaactgagtcaggttgtctaatgtattcacttgtttattcattcatctattctttccttcaacaatgatactgatagcattctgtgttctagccagcatgatatgccatggggacagag

SEQ ID NO: 577502 - DNA, 565 bp, Homo sapiens
ctaaataacaactttaaaattgacatcacctgatatccaattctgtgagtagaaaataatcataagcaataggataggcaaatcctttgcctgaaaacaggtgcatgttttaacttccccggagaccaaggatctggctggtttgtctcccccaacttctcccttaccccatgatcttcaggagatcacctcatgatcttcggtagcttattctagtattttggccaactaattgtcagaaagttcctccttaagtttaatctgtgtttcttctattttaatttaaacattatttggatttattttagctggtaaataaatatctgtctgagatttcttagcccgacataacaaagtacaatagacttggtggcttaaacaacagaaatttaccttctcacagttctggaagccggactttcaagatcagagcaccagtagggttggtttctggtgagtgctgacacagccttttctctgtgcaagcaggcggagagcaggagatcaagctttctggtgtctctcttcacatgggcccrctaattctgccagagcagagctgtac

SEQ ID NO: 577503 - DNA, 590 bp, Homo sapiens
agtggcttaaaacaataaccatttattctgcaggttgatagtttgggctgggctctgcagggcagttattctggcatcctctgaatttggctctcttggctgctttgcttgtcatatctgatgcatcactgggaagaatgggaggtctrgggcttctctccacagggtcttcatcctccaacaggttagcctggcaccaaaatgtgagtgtggaaatgtgcaaagcctctgtaggcccaacctcaaaactcacaaaatatcattccagccacattttatcagacaaagcagttcacaatccagcccagattcaagagtgagagaatagacttcatcatgagaggtgcccatttttgccttctaccacaggaacattctccagcatggcttttggatcccaacaactaaaatactctgaaaccatgaaacatagtgtctgtacagtcacactatgaaaaagcttatggcaatgttaaataagaaaaaaaacaggtcaagtgatagatgtattaattagcttgttttcatcattgtacaatgtatatatgtatcaaaacacaacattataccccataaatatacacaattac

SEQ ID NO: 577504 - DNA, 561 bp, Homo sapiens
cacttagccttggatcccaagcccactgtccccaggctagaaagggagggggcttctgagtctggatcccaggtatctgcaagtggctgaggcaggattcacctccactgccagggcacaggaaaaggagagcccatatgaaagacaggcccttcctcttctgggtcctttgggcttcttgggcctaaatgttcactgacggacgaatggataaagaaaatgtggtatgtgtatgcaatggaatattactcagccttaaaaaaaagaaggaaatgctgacacatgctacagcataggtgaactctgagaacattatgctcagtgaaataatccaaccacagggggacgaatactgcaagagcccactgatataacacatctaatatagccaagcacatagaagcagagagtagaatggtgggtgccaggggctggcaggaggggaaaatggggagttgcttatcaataaggatgaagtttcagctaagcaaggtgactatgtcctagaggtctgctgtacatcatcattmctatagttaacaatactgtgccctgaaaaat

SEQ ID NO: 577505 - DNA, 541 bp, Homo sapiens
gttgaggaatttggagggaataggtgataaggcaaactttttaattattccctccattttattaatattctaaagatccagttcacaatatttgatttgaaaagacctattccgaaactcttggtcgaaagtagcaacatgattcaagggtgatgttaagaaacataggaccttggagagattttctggtctaagattttgaatttttctattgcattatttttatgtcagttaagatctttccaaagtaagaaatgtccagattataactggacatcctaattcttctttttttctattctaatttacttttctctmtggtatagaaaatgtaacagaccttttaatgatcaccattctaactggcgtgagatggtatctcattgtggttttgatttgcatttctctaatgaccagtgatgatgagcttctcttcatatgtttgttggccacataaatgtcttcttttgaaaattatgagtccatatcctttgcccactttttgatgggtttgttttttttcttgtaaatttgttttaag

SEQ ID NO: 577506 - DNA, 541 bp, Homo sapiens
gttgaggaatttggagggaataggtgataaggcaaactttttaattattccctccattttattaatattctaaagatccagttcacaatatttgatttgaaaagacctattccgaaactcttggtcgaaagtagcaacatgattcaagggtgatgttaagaaacataggaccttggagagattttctggtctaagattttgaatttttctattgcattatttttatgtcagttaagatctttccaaagtaagaaatgtccagattataactggacatcctaattcttctttttttctattctaatttacttttctctctggtatagaaaatgtaacagaccttttaatgatcrccattctaactggcgtgagatggtatctcattgtggttttgatttgcatttctctaatgaccagtgatgatgagcttctcttcatatgtttgttggccacataaatgtcttcttttgaaaattatgagtccatatcctttgcccactttttgatgggtttgttttttttcttgtaaatttgttttaag

SEQ ID NO: 577507 - DNA, 555 bp, Homo sapiens
acacatgcacacgtatgtttattacgacactattcacataccaagacttggaacaacccaaatgcccatcatttttcaaaatttgatcgttattcatggcttacttcctctgtgagggttagctgtattcttccacatgcacagacaccatctttcatcttttattatctgaaacatttgtgacaggcaagggtcaaaaagaagaagccaagacataggacatagtgtcagacaaaactacaaataatatattgttggtcttgtttttcttgagtgtagcakttttactttgcgcttaaatctttttaagatttaagcaaacttaaatcttaaaaaactgctcttgtaacatttacaataaaattcagctgggcagaatttgagttcagtgcctatagaatccctaattcatgctaaatgatgtttcactaagtgatagccatgaaaatcagtgcaactgaattaaaaagtgtggagagggcttgtgacagcaatgattcaggctcactgattaatcaagcacccatttatcaatatcctggtttctatcctgct

SEQ ID NO: 577508 - DNA, 431 bp, Homo sapiens
ggatattaaatgtgttactcaggggagatgttcgttttaaaygctgtagagatttctttgttggtggatgctaaaaataaagtcttaaagagcaagataataatttttaaatacaggagtttgcagagaatgcgatacttacagtattcaaatataattctaaatgtaaatttttcaatggatgtaaaaaactatctaaatctcccaacaaatttgtaatgcactgtggaataccatggcacactggttgggaagctctgcatttttttattcagttctaaaaaaaagaaaaaaagaaacaaagaaggaaagagaagaataacaggtctattaatatgttttaatgttatagccaaatggtggtatgtgcctgtagccctagatgaggccgaggcaggaggatcacgttagtccaggggttccaggcttcg

SEQ ID NO: 577509 - DNA, 399 bp, Homo sapiens
taaaacagcatttaactagcatttgtgtgctgtttatttgtagaatattaatcttcataaactattctgctgtataaatggccattagattattcctcactgccccaatataaatgaaatgcacattcaaatatgagtatattacaatggtttacyaaggacccatgtaaaaatgtgtggcataatgtagcaataataagatagattacaaagcaagatgatagtaattgaatcctgaaagagaaaaatctgttaaaaaaaaaggggggggctttcttgagatgactatgaccttcagatgacagaaagtgccagcctggtgatcttgcaaagacaggagtaaatatgatgaccttatcctttaatcttctgcctgtaggtccaactctatgagaattc

SEQ ID NO: 577510 - DNA, 358 bp, Homo sapiens
tatattttcttacttctaataatcatccatgaaaatgtttcatatttatgaccatgtcaatattctgtgtgttttcaagatggtattcagtttcggcctaattataacatattttaacaacaggaacaggcgggtttccatatttgaacacactctagtattttggaaataaaccatcctcatttcacttcaattaatttatcacacaaatttcctgtccctataattattttaaagctttgtattcttctcccttattttcatactctgaatctaaatctcaagtttaatctcttttttaatgtctttctctctctctctctctcwcacacacacacacacacacacattcagagca

SEQ ID NO: 577511 - DNA, 607 bp, Homo sapiens
aaaggatatatatgaggagcccatacagagatctcaagtattatattggcaaatattaatatcaaataaaaatttattgaaatatatagcatggttatggttatattaattataaaatatgatggttaaacagctttcaagtcaggatatttcatcacagtcagaaaaaaaacttgaattcatgtttagaatttgagaattcaattacatttctaccaaaccatatgggatagatgacctacatcccttgrgtattttcctggttcttctcatgcatacttacctgaaaataacttaaaattgtaaaagattattaaacactggaaatgttatgcactgtctaggttctgcaggcataatggttgataagtcaaatatgctgtcagcctcattgaatctatagtcttgtataaaagtggtgctatgaaattgtatatcatattcttaagctagataagagtatgagggaaaaaaggcaatgagatgggcacaattagataaataaagaaagtgttctctgaaaaaggggcctctaatgctcaggcttgaagtcagtgaataaactgactaaatgaaaacatagggtgacgaacacctccaataaaac

SEQ ID NO: 577512 - DNA, 649 bp, Homo sapiens
tttgcatcgatgttcatcaaggatattgacctgaatttttcgttatatctctaccaagttttggtatcaggatgatactggcctcatagaatgagttaaggaggagtcgagtccatccttctcaatttttggaatagttttagtaggaatagtaccagatggacaggatctcggctcactgcaaactccacctccaagattcaagcagctctcctgcctcagcctctagaatagctgggattacaggttcccgataccatgcccagctaatttttgtatttttagtagggaaggagtttcaccatgttggccaggctggtctcaaactcctgacctcaagygatcctcccacctcagcctctcgaagtcctaggattacaggtgtgagccactgcacccggccagtaccagatcttctctgtatatttgatagaatttggccttgaagccaaaatctggccaaggccttttgtttgtttgtttgtttgtatgctatttattactcattaaattttgaagcttattattggtctgttcagggtttcaatttcttcttggttcagtcttgggagagtgtatgtgtctaggagtttgtctgtgtcttctaggttttctagtttgcacatatagaagtgatagaagtgttctc

SEQ ID NO: 577513 - DNA, 649 bp, Homo sapiens
tttgcatcgatgttcatcaaggatattgacctgaatttttcgttatatctctaccaagttttggtatcaggatgatactggcctcatagaatgagttaaggaggagtcgagtccatccttctcaatttttggaatagttttagtaggaatagtaccagatggacaggatctcggctcactgcaaactccacctccaagattcaagcagctctcctgcctcagcctctagaatagctgggattacaggttcccgataccatgcccagctaatttttgtatttttagtagggaaggagtttcaccatgttggccaggctggtctcaaactcctgacctcaagcgatcctcccacctcagcctctcraagtcctaggattacaggtgtgagccactgcacccggccagtaccagatcttctctgtatatttgatagaatttggccttgaagccaaaatctggccaaggccttttgtttgtttgtttgtttgtatgctatttattactcattaaattttgaagcttattattggtctgttcagggtttcaatttcttcttggttcagtcttgggagagtgtatgtgtctaggagtttgtctgtgtcttctaggttttctagtttgcacatatagaagtgatagaagtgttctc

SEQ ID NO: 577514 - DNA, 398 bp, Homo sapiens
ataaaaagagaattgaaataattattaaataaaatatataattgtatagtttccttgaatataagttatattttttaaaaatccaggattgaagcttctagtattcttcttaactgctaaactgaaattactttctctgtgtttgtatatactattaaaaatatgttgtaaaagagaaagagagagaaaggtaatagcgggatatgaactggggtttgagccaccatcctaacacttactagtttaattgtcttttgcaagttacttctttaagtygtgtgtaattcaactgaaagtggagattttaagagtgtttatctcatacatttcaggaaagattaggtgaaataatccatgtaaagcccttaatgtagtgtctgtcacatagtaaattttca

SEQ ID NO: 577515 - DNA, 626 bp, Homo sapiens
gaaaaatgaagaaaatattagaagaaaaattacaacaaaatcaaatgttaaatattaaagtagtaataaatatttttgaataagtaaagctgtaaacaaattgaaatcaaaactagatcaaaatagctaaatgcaaaaaccacaaaccacacttcataactgttacaaaaattaattcaaaaggtgtaataaacataaaggtaaaacctgaaactacaaaataygacaaagaacatataggaattaatacttgtcaccttggattaagcagagatttttttagccagatttataaaggcaaaaactagatcaattgtacttcatcaaaacgaagaacttcttctaaaaagaaattgttaagaagatactgcacccatcaaccccagaatacacattattttcatctgtacacagaacttactccaagattgtccacatgctcagccatagagcaaatctcaataaattcaaaaaaatcaaaatcatatcaaccatactctcggaccacaatggaataaaaatagaaatcaataccaaaaagatctctcaaaaccacacaattacatggaaattaacttgctcctgaatgacttttggttaacaatgaaataaaggcagaaataaac

SEQ ID NO: 577516 - DNA, 626 bp, Homo sapiens
gaaaaatgaagaaaatattagaagaaaaattacaacaaaatcaaatgttaaatattaaagtagtaataaatatttttgaataagtaaagctgtaaacaaattgaaatcaaaactagatcaaaatagctaaatgcaaaaaccacaaaccacacttcataactgttacaaaaattaattcaaaaggtgtaataaacataaaggtaaaacctgaaactacaaaatacgrcaaagaacatataggaattaatacttgtcaccttggattaagcagagatttttttagccagatttataaaggcaaaaactagatcaattgtacttcatcaaaacgaagaacttcttctaaaaagaaattgttaagaagatactgcacccatcaaccccagaatacacattattttcatctgtacacagaacttactccaagattgtccacatgctcagccatagagcaaatctcaataaattcaaaaaaatcaaaatcatatcaaccatactctcggaccacaatggaataaaaatagaaatcaataccaaaaagatctctcaaaaccacacaattacatggaaattaacttgctcctgaatgacttttggttaacaatgaaataaaggcagaaataaac

SEQ ID NO: 577517 - DNA, 626 bp, Homo sapiens
gaaaaatgaagaaaatattagaagaaaaattacaacaaaatcaaatgttaaatattaaagtagtaataaatatttttgaataagtaaagctgtaaacaaattgaaatcaaaactagatcaaaatagctaaatgcaaaaaccacaaaccacacttcataactgttacaaaaattaattcaaaaggtgtaataaacataaaggtaaaacctgaaactacaaaatacgacaaagaacatataggaattaatacttgtcaccttggattaagcagagatttttttagccagatttataaaggcaaaaactagatcaattgtacttcatcaaaacgaagaacttcttctaaaaagaaattgttaagaagatactgcacccatcaaccccagaatacacattattttcatctgtacacagaacttactccaagattgtccacatgctcagccatagagcaaatctcaataaattcaaaaaaatcaaaatcatatcaaccatactctcggaccacaayggaataaaaatagaaatcaataccaaaaagatctctcaaaaccacacaattacatggaaattaacttgctcctgaatgacttttggttaacaatgaaataaaggcagaaataaac

SEQ ID NO: 577518 - DNA, 542 bp, Homo sapiens
tgtatatgtgcacatatatacacatatataccacattttacacacacatatatatgtatatacacacacacacacgccacattttctttatcctgtcattttttgatgggcactgaggttgattccatgactttgctattgtgaatagtgttgtaatagacacatgggtgcaggttccgttttgatataatgatttcttttcccttagataggtacccagtagtgggattgctgggctgaaaggtagccctattttcagttctttgagaaatctccacactgttttcacgaaggttgtgttaatttgaattyatactaacagtgtatacacattcctctttcttcacattctgctctccacttgagttttaaaggagacatagtgggttctggctaatgcagcgaggtgactgaatgtatccagtgagtgaggggcaaaaatggcaagaggagaaaagactctggatgtgtttactcatcagtcatcttgagaaccatccctatgttaggctttggactaggtgctggggatacaataataa

SEQ ID NO: 577519 - DNA, 458 bp, Homo sapiens
tagaaacattgaatgtaaatggactaaactctaattaaaaaaaaaaaaaacagaatggctgaatggataaaaaaacaagacttggtgatctgttgcctacaagaaacacacttcacctataaagaaacatagactgaaaataaaggtgttgagaatggtggctcacacccattatcccaacactctgggaggccgaggtaggtggattacctgaggtcaggagttcgagaccagcctgaccaacatggkgaaacccatctctactaaaaatataaaattagctgggcatggtggcacacttctgtaatcccagctacttggaaggctgaggcaggagaattgctcaaacctgggaggcagaggttgctgtgagctgagattgcaccattgcactccatcctgagcaacagagtgagactctgtctcaaaagaagaaaaaaaatgtaaagaaaataaaa

SEQ ID NO: 577520 - DNA, 458 bp, Homo sapiens
tagaaacattgaatgtaaatggactaaactctaattaaaaaaaaaaaaaacagaatggctgaatggataaaaaaacaagacttggtgatctgttgcctacaagaaacacacttcacctataaagaaacatagactgaaaataaaggtgttgagaatggtggctcacacccattatcccaacactctgggaggccgaggtaggtggattacctgaggtcaggagttcgagaccagcctgaccaacatggtgaaacccatctctactaaaaatataaaattagctgggcatggkggcacacttctgtaatcccagctacttggaaggctgaggcaggagaattgctcaaacctgggaggcagaggttgctgtgagctgagattgcaccattgcactccatcctgagcaacagagtgagactctgtctcaaaagaagaaaaaaaatgtaaagaaaataaaa

SEQ ID NO: 577521 - DNA, 224 bp, Homo sapiens
catgtacatatacacacatagatacatatatgtgtatatatatcattgctcctggaatgtggttatacatatatgcacatatatacatatatrtatgtatgtggttttttatatatacatatatatacacacacatcacattacatacacacatatgtatcacattacaagctcaaatatatatatatatatatatatatatatatacacgtgtgtttgtgtgt

SEQ ID NO: 577522 - DNA, 599 bp, Homo sapiens
ccttgctcttgaagatgggtttgcttatggttctcacatatgctatactgtctcacaggttgggacattcatttatgtgcactgtccccaattccctccctattctctgtggatgcctgtaaactggtagttctcaaacttggctgctcactgttgtcacttaggggaacttctgaaaattcctgatacccaagacacacccacatcagttacaccagaatctttgggtttgggacctaggctcctttttttttttttccaaagctctttggtaattctagcacacaggtaagtttgaaacccagggctcaacataagtacttgtaacagtttagcgtgtatacaaattaccttgagagtctgcatttcttttttaaattatttatttatttatttattttttaracaggattttgttctgtcacccagactggagtgccgtggcacgatcactgctgactgcagccttgacctcctggacttaagcaatcctcccaccacagcctcctaagtagccgaaactatagatgcacaccattacatccagctaattttttacatttttgtagagacggggtttcaccatgttttgccatgtt

SEQ ID NO: 577523 - DNA, 541 bp, Homo sapiens
ggcatttaggttggttccatgtctttgctattgtgagcagtgctgaaatgaacatatgtgtgcgtgtgtctttatggtagaacaatttatatacctttggatatatacccaataatgggattgctgcatcgaattgtaattctgttttaagttatttgagaagttgccaaactactttccatagtggttggactaatttgcatccccaccagaagtgtataagtgttcccttttccccacagcctgccaacatctgttatttttagactttttaatattaatcactttgcttaggtaaaaatctgccaaaacaaatatgtgctgtacatatgaaaaaccaaaaatttctaatgaaaaatatcaaagaagtctcaatagatggagggatattctatgctcatggattggaaaacacrgtattgttaagatatcaattgttcccaacttgatttatagacaacacaagcccaatcaaaacagtacaaactatttcataaataccaacaaactgattccaaagtttatatgcaagcaaaacacc

SEQ ID NO: 577524 - DNA, 512 bp, Homo sapiens
ttttggggaaacccaaacgaagacccagttaaagaaaatgaactcatgataatgaccagcctaaacttcccagtggcaacaactgcatcgcctctgattctcagagctaatgtttggtcatgaaaggctgagatttcaatgcaggctaggccttatcacattttaatgcatacttggaaactgcgttaaaataaaaatttctaatttctaatgagctttcaggcgatgccaatgttgctggcccatggaccacactatgaacagcaaaaaactagagggctccaaatcctaattttgtttctgtttgttttttgttttttggagatggagtcttgctctgtcacccaggctagtgcagtggtacaatctcggctcactgcaamctttacctcctgggttcaagcgattctcctgtttcagcctcccgagtacctgagattacaggtgcccatcaccatgcccagctaatttttgtattttcaataaagaaagagtttcgccatgttggccag

SEQ ID NO: 577525 - DNA, 524 bp, Homo sapiens
agcgaagcttcacctgtattcacagcygcttcctatcgcttgcacgaccacctgagctccgcctcctgtcaggtcagtggtgacattagattctcatagaagcgtgaatcctcttgtgaactggtcatgcaagggatctaggttgcatgctccttatgagaatcttatgcctgatgatcttctgaggtggagctgagacagtaatgctagtgtgggcagtggctgaaaatacagattaacagtagcaagaggtttgattgcacaaagaccctaacaaatcaattgcttgcagactcatatcaaaaccctatcagagagtggcaagcgacaattaagctgcatctggtggaaggctttctggtggcgagttgatgtacttcaatcgtacagttgcatccgatggcaggctttaagtcagaatctgacatttattttaatccacacatggcctaccattattttatttaccacttctgtccacgcctctttcctgcactgtacaattgtctcagtaacagtttcgg

SEQ ID NO: 577526 - DNA, 553 bp, Homo sapiens
ttatatatattagtccgctaagattaccataacaaaatattacagactggatgacctattcaacagaaatctattttctcacagttctggaggccaaaagttcaagatmgaggtgttgacaagtttggtttctactgagacctggtgcattggcttgcagatggctgccttcttgctgtgttctcacatgacattttctctgtgtacatccacatccctgatgtctcttcctcttcttataagtacatcagttctattgggttagggcccacccttatgacatcatttaatgtgggttacctctttaaatgccctatctctaaataaagttacgtagggggttaggacttcaacataagatccttggggcggacaaatttcatctataatggtatatttgcatgattcatcacaagaaccgtaacttacttcgagttaccttattaccaaaaagcactcaaatccgtatattttcagttaaaaattgctggtatttttttctgctaaaacacaacttaaaatctaaaccataccacagaaagttcatttattt

SEQ ID NO: 577527 - DNA, 553 bp, Homo sapiens
ttatatatattagtccgctaagattaccataacaaaatattacagactggatgacctattcaacagaaatctattttctcacagttctggaggccaaaagttcaagatagaggtgttgacaagtttggtttctactgagacctggtgcattggcttgcagatggctgccttcttgctgtgttctcacatgacattttctctgtgtrcatccacatccctgatgtctcttcctcttcttataagtacatcagttctattgggttagggcccacccttatgacatcatttaatgtgggttacctctttaaatgccctatctctaaataaagttacgtagggggttaggacttcaacataagatccttggggcggacaaatttcatctataatggtatatttgcatgattcatcacaagaaccgtaacttacttcgagttaccttattaccaaaaagcactcaaatccgtatattttcagttaaaaattgctggtatttttttctgctaaaacacaacttaaaatctaaaccataccacagaaagttcatttattt

SEQ ID NO: 577528 - DNA, 553 bp, Homo sapiens
ttatatatattagtccgctaagattaccataacaaaatattacagactggatgacctattcaacagaaatctattttctcacagttctggaggccaaaagttcaagatagaggtgttgacaagtttggtttctactgagacctggtgcattggcttgcagatggctgccttcttgctgtgttctcacatgacattttctctgtgtacatccacatccctgatgtctcttcctcttcttataagtacatcagttctattgggttagggcccacccttatgacatcatttaatgtgggttacctctttaaaygccctatctctaaataaagttacgtagggggttaggacttcaacataagatccttggggcggacaaatttcatctataatggtatatttgcatgattcatcacaagaaccgtaacttacttcgagttaccttattaccaaaaagcactcaaatccgtatattttcagttaaaaattgctggtatttttttctgctaaaacacaacttaaaatctaaaccataccacagaaagttcatttattt

SEQ ID NO: 577529 - DNA, 553 bp, Homo sapiens
ttatatatattagtccgctaagattaccataacaaaatattacagactggatgacctattcaacagaaatctattttctcacagttctggaggccaaaagttcaagatagaggtgttgacaagtttggtttctactgagacctggtgcattggcttgcagatggctgccttcttgctgtgttctcacatgacattttctctgtgtacatccacatccctgatgtctcttcctcttcttataagtacatcagttctattgggttagggcccacccttatgacatcatttaatgtgggttacctctttaaatgccctatctctaaataaagttacgtagggggttaggacttcaacataagatccttggggcggacaaatttcatctataatggtatatttrcatgattcatcacaagaaccgtaacttacttcgagttaccttattaccaaaaagcactcaaatccgtatattttcagttaaaaattgctggtatttttttctgctaaaacacaacttaaaatctaaaccataccacagaaagttcatttattt

SEQ ID NO: 577530 - DNA, 263 bp, Homo sapiens
agtggtaactgaatgtaaaaggctaggaccttacagtgtgctgctgtagactttataacactggaaaattaggcatcactaaattcatttgaaattcttatcttaaaattttatttcttcaataagaaattaaccttagcttactgtaattttttactttgtaaacctttaacttttttaactttcttgactttttgtaacaacacaatttaaaacrcacattgtacagttgtacaaacattttcttccatttattctcattc

SEQ ID NO: 577531 - DNA, 552 bp, Homo sapiens
ggtggacttgtgatgattattactgagtgtcaacttgattgggttgaaggatgcaaagtattgatcctgggtgtgtctgtgagggtgtcgtcaaagggattaacatttgagtcagtgggctggggaaggcagatccacccttaatcaggtgggcaccatctaatcagctgccagcaaatataaagcaggcagaaaaatgggaaaaggcaagaaggacctagcctcccagcctacatctttctcccgtgctggatacttcctgccctcaaacatcagattcctatttcttccgttttgagactcagactggttctccttgctcctcaagcctgcagacagcctaatgtggcagcttgtgactgtgtaagttaatacttaataaactttcctttctatgtgtatatatatcctgttagttctgtccctctagggaaccctgacgaatacaggtcccaattrtgtcatcccaccagggaagtaaagcatcttggtttttttttgttttttttttgtttgtttgttttgttttgttttgtttttgtaataagcaat

SEQ ID NO: 577532 - DNA, 552 bp, Homo sapiens
ggtggacttgtgatgattattactgagtgtcaacttgattgggttgaaggatgcaaagtattgatcctgggtgtgtctgtgagggtgtcgtcaaagggattaacatttgagtcagtgggctggggaaggcagatccacccttaatcaggtgggcaccatctaatcagctgccagcaaatataaagcaggcagaaaaatgggaaaaggcaagaaggacctagcctcccagcctacatctttctcccgtgctggatacttcctgccctcaaacatcagattcctatttcttccgttttgagactcagactggttctccttgctcctcaagcctgcagacagcctaatgtggcagcttgtgactgtgtaagttaatacttaataaactttcctttctatgtgtatatatatcctgttagttctgtccctctagggaaccctgacgaatacaggtcccaattatgtcatcccaccagggaagtaaagcatcttgktttttttttgttttttttttgtttgtttgttttgttttgttttgtttttgtaataagcaat

SEQ ID NO: 577533 - DNA, 540 bp, Homo sapiens
ccttcccaggtgagaagagccagcccacttttcctaaggggagagactgactgctctactgtagagctgtctaggatggggttgcagccaaggctgtgaccaggctgaaggagcttctcctgtagttttggtcaattcaactcaatcagagaagcacatgaactctatcagtagttgacccaggtgacaccatacatttcagaaccatcttggaaatagaatagagcccacaagtggtatttcgttccatcaaggacatctggagaatcactccccatgggtgggagaaacttctgtagagaacaggagtttggattttttaaaacactgatttattttctaaattgttattctattctacytaattcaatgtaactatcctttaaattgttctggcttttcagattgcaatcattatgtagttttattttgtttaatttttctttttaatttatttttcattttcattttttattatgcattttgtctttatttatattattttatttatattgttgtatatgaaaaaatgtcatatgt

SEQ ID NO: 577534 - DNA, 603 bp, Homo sapiens
tgaagatgtacgatatttccatcagccaaaaacttttctaatgtccctttgtagtcaatccacttccctccctacccccagctcctggcaatctttgatctgctttttgtctctgtaattttgcctagatcaatactttattgctttttgcaactgaattgtattccattttaaggctgtaacacaaatttttttaatccagtcactagtttacagacatttgggttgcttcttgtttaggacaatyatgaataaagctgctgtaagtattcaggtacaagatttttgtggacgtatgtctaaatttattttggataaatacctaggagtaggattgctgaactgtacaataagtgtgtatttaactttataagaaactaccaaactgttttcccaagttgctgaaccagcaaaatggctcttccaccagcaatgtatgaaagttccagtgtttcacatccttgccaacacttagtactttcagattgtaaaaaaatgtcattattcttgtatttatggtatatatggggtattcacttgtaattttaattatatttccctaattactaatgatgtagagcatctcatttatgtacttattag

SEQ ID NO: 577535 - DNA, 450 bp, Homo sapiens
tcttttcttctttattagtcttgccagcggtctgttttgttcatcttttcaaaaaaccagctcctggattcattgattttttgaaggtatttttcttttggataccactgcgaccatattagagatgctggagcctggmattcaaaagactgaaacaaacccctggaccactcaacctctgtctcttcctaggtaactttgtctgtgtctggctcagccttgcttagattgcctttggaaagaatgctgtcctccatgagccctgctgggtcagccattttaccagcatctagatctccttctgagtgtgatgttagtgaggaagagtgaggctggaggtatcagagactgtctccacacagtagtggtgactttgacattgatcatggacatttttctagaaaaataactgctaatggaaagatgggagtatgtagagaaaaaaaataa

SEQ ID NO: 577536 - DNA, 450 bp, Homo sapiens
tcttttcttctttattagtcttgccagcggtctgttttgttcatcttttcaaaaaaccagctcctggattcattgattttttgaaggtatttttcttttggataccactgcgaccatattagagatgctggagcctggaattmaaaagactgaaacaaacccctggaccactcaacctctgtctcttcctaggtaactttgtctgtgtctggctcagccttgcttagattgcctttggaaagaatgctgtcctccatgagccctgctgggtcagccattttaccagcatctagatctccttctgagtgtgatgttagtgaggaagagtgaggctggaggtatcagagactgtctccacacagtagtggtgactttgacattgatcatggacatttttctagaaaaataactgctaatggaaagatgggagtatgtagagaaaaaaaataa

SEQ ID NO: 577537 - DNA, 641 bp, Homo sapiens
ctgctaaagtccatgaatcttaaagccatccccgtggctacagcttagagcctgcacaagcatatagatataaagagcagctgtgatgctggcatttggtggagtgcttattaaaggaacccaatatgtgcagaataccgttcctgaaggctgcacttaaggaataaacttggagccattggggatataatgcctatgatttctcaccagttcatttaattaaacccactatgacacctcagactggtgctccaggcccagaattgtgtggtcctaatagggaacgtgtgggtgattcagacctagggtgatgaaaggacyaggacacaggctgctgcttcattcacccccggggaaggctttctgtgatcctcagtgaagaaggaatagaagttatcctcagaactaaattacttgttacttgctatcagacttaatcattctcaaccaactcttgagcaaactacacatagttcctatttcatagtatggggttaataaattttaattctttttttttgcttttgtacattttcaagggaaagagccctttcaggatgatatctgaagtgggtggaaccaattgacgattttcataaaaattctcatccctagagtggacgccactaggtgagcagaaa

SEQ ID NO: 577538 - DNA, 641 bp, Homo sapiens
ctgctaaagtccatgaatcttaaagccatccccgtggctacagcttagagcctgcacaagcatatagatataaagagcagctgtgatgctggcatttggtggagtgcttattaaaggaacccaatatgtgcagaataccgttcctgaaggctgcacttaaggaataaacttggagccattggggatataatgcctatgatttctcaccagttcatttaattaaacccactatgacacctcagactggtgctccaggcccagaattgtgtggtcctaatagggaacgtgtgggtgattcagacctagggtgatgaaaggactaggacacaggctgctgcttcattcaccccyggggaaggctttctgtgatcctcagtgaagaaggaatagaagttatcctcagaactaaattacttgttacttgctatcagacttaatcattctcaaccaactcttgagcaaactacacatagttcctatttcatagtatggggttaataaattttaattctttttttttgcttttgtacattttcaagggaaagagccctttcaggatgatatctgaagtgggtggaaccaattgacgattttcataaaaattctcatccctagagtggacgccactaggtgagcagaaa

SEQ ID NO: 577539 - DNA, 641 bp, Homo sapiens
ctgctaaagtccatgaatcttaaagccatccccgtggctacagcttagagcctgcacaagcatatagatataaagagcagctgtgatgctggcatttggtggagtgcttattaaaggaacccaatatgtgcagaataccgttcctgaaggctgcacttaaggaataaacttggagccattggggatataatgcctatgatttctcaccagttcatttaattaaacccactatgacacctcagactggtgctccaggcccagaattgtgtggtcctaatagggaacgtgtgggtgattcagacctagggtgatgaaaggactaggacacaggctgctgcttcattcacccccggggaaggctttctgtgatcctcagtgaagaaggaatagaagttatcctcagaactaaattacttgttacttgctatcagacttaatcattctcaaccaactcttgagcaaactacacatagttcctatttcatagtatggggttaataawttttaattctttttttttgcttttgtacattttcaagggaaagagccctttcaggatgatatctgaagtgggtggaaccaattgacgattttcataaaaattctcatccctagagtggacgccactaggtgagcagaaa

SEQ ID NO: 577540 - DNA, 641 bp, Homo sapiens
ctgctaaagtccatgaatcttaaagccatccccgtggctacagcttagagcctgcacaagcatatagatataaagagcagctgtgatgctggcatttggtggagtgcttattaaaggaacccaatatgtgcagaataccgttcctgaaggctgcacttaaggaataaacttggagccattggggatataatgcctatgatttctcaccagttcatttaattaaacccactatgacacctcagactggtgctccaggcccagaattgtgtggtcctaatagggaacgtgtgggtgattcagacctagggtgatgaaaggactaggacacaggctgctgcttcattcacccccggggaaggctttctgtgatcctcagtgaagaaggaatagaagttatcctcagaactaaattacttgttacttgctatcagacttaatcattctcaaccaactcttgagcaaactacacatagttcctatttcatagtatggggttaataaattttaattctttttttttgctttygtacattttcaagggaaagagccctttcaggatgatatctgaagtgggtggaaccaattgacgattttcataaaaattctcatccctagagtggacgccactaggtgagcagaaa

SEQ ID NO: 577541 - DNA, 577 bp, Homo sapiens
acttaatatgtttttcctcagtttcattgattatacagttctcgttcacctaggaagtttcacagtttatcaaaggctcttggcaattcccttataaataaactgcaattccaacaaaaaatattgatggaacaatttctgtccaaatcctctgatgagactctgatataaactctgtgttttattctagactgctttttattgcctaatgaatagattttgctttgtgaagacacagactgtcatgctttcatttgatttcaataattatgggaaggtttcagttctgggccagggagttttactatcctctgacttaatcatgcttcagaaaaggagctctgtgkatttattttgtaaagcatttttaaagctttcaggctatagtcaatgaatggctaaaatccagaatactgtaaactcatcttttttcccattccactgaccaaaggggtgtttgaagattaccatctgattaactgtccccacactaagaatgggctttagtgacaggcagagtctgtgggacagcatcatgcctctgacagccacttttagggaaggatgttaaagaacc

SEQ ID NO: 577542 - DNA, 495 bp, Homo sapiens
accatctgattaactgtccccacactaagaatgggctttagtgacaggcagagtctgtgggacagcatcatgcctctgacagccacttttagggaaggatgttaaagaacccctgctttgtgtctttcttagtcatcatatgccacatttccaggcaaaggagatgagtatcctctcttctagggatctgtgaggggaccccagggcctccctttgtccttcagtgcttgcttctctgggtctcttcagactcattcctgggctggctcaggccagagcttgaaccctgctgagaaaaggyattttcagtgagcttgtttagaataggccaatcactctgtttattttgcctgaagggacttggggaagggaacagggacatcctaatactttttaaagataagtacttggttttttgttttcccaggagatctggctaaagaaagcagattcatcttaaagcaggagcaatttagataaggaatgagaaagaac

SEQ ID NO: 577543 - DNA, 495 bp, Homo sapiens
accatctgattaactgtccccacactaagaatgggctttagtgacaggcagagtctgtgggacagcatcatgcctctgacagccacttttagggaaggatgttaaagaacccctgctttgtgtctttcttagtcatcatatgccacatttccaggcaaaggagatgagtatcctctcttctagggatctgtgaggggaccccagggcctccctttgtccttcagtgcttgcttctctgggtctcttcagactcattcctgggctggctcaggccagagcttgaaccctgctgagaaaaggcattttcagtgagcttgtttagaataggccaatsactctgtttattttgcctgaagggacttggggaagggaacagggacatcctaatactttttaaagataagtacttggttttttgttttcccaggagatctggctaaagaaagcagattcatcttaaagcaggagcaatttagataaggaatgagaaagaac

SEQ ID NO: 577544 - DNA, 482 bp, Homo sapiens
gttctcaaatatcaaagttagtgttattattttcatttcgcatatatgttaagcaagttgaacacgatcagttgactattaagtagaagacatagtactcaaatgtgacctgctgggcttcaaaactcatcttttcactgtcagatgccctggtatctatcacagagcatgagttatcttcctactaaatgcagatggtttaagaagagaatgcaataatgactattataaggtcagcaagaagttctagttctacaactgagccctacaactttctctctaaatacttcaacaggagtcttgtttcttctaatgttcaactgccttctgacccaggctgaagtattcctttgtaattrgcagagtttcaattcatagtgattcagtagtacagagaaatgggtaggctttgatttttcaatccatttcagccaccaaatctcactctgctctcctttctttggcctctagtgaagttgttg

SEQ ID NO: 577545 - DNA, 384 bp, Homo sapiens
aatttaaatttaattttaattgtaaaatacatacaatatagagtttgatgaggatatagtacagttagagtttctgtctattgtatatggaagtgtaaattaggtcagccacttgggaaaactctggaggttgaactctccaggaagcaagttctgtgatgaagattgccatgtaggaagtttatygggaagtacttttgggaccaacacttgggaaaggaaaggaaaaagaaaagaagaaaggaggattgggtagagagaagagttgatatacaggcagtctcaggaaagacttcaggtgaccttacaaggaactctaaccctggaatgaccattcagaatttttctgatctggatcaaggggacttgttttatacttctgtg

SEQ ID NO: 577546 - DNA, 544 bp, Homo sapiens
cgaaagctctccttgtctttcctgctctcttctccacagaaatttcttgcacatctaattccatcttggcatttacttcttgacaagcctgaactaatgcatgtagcatttcttttggtcccatcacgctgagtgctgttgttgctacaaagcaaacagatyacacagagagattgactgtctctttcagggtgaggcaagaagaaaaagattaagtatatttctaatgtcctagagaaggcaagagtgagagtcttttttttttcattgaccaatcataaaataattgtttctcctataactgatttgttagacagggacataatactgtattaggagttgacaaactttgttagccatttggcatgctgaaaagacaggaaaaaaggggggcagcatcaatgttgatgttggaacctccttaaacctgaatgtagcactttgtcttcagctctgcaaagaagtcacagatatagacgagctgtgagcggtccataagggagaggtaaaggctagtattttactagcctcagcagtttccctg

SEQ ID NO: 577547 - DNA, 544 bp, Homo sapiens
cgaaagctctccttgtctttcctgctctcttctccacagaaatttcttgcacatctaattccatcttggcatttacttcttgacaagcctgaactaatgcatgtagcatttcttttggtcccatcacgctgagtgctgttgttgctacaaagcaaacagattacacagagagattgactgtctctttcagggtgaggcaagaagaaaaagattaagtatatttctaatgtcctagagaaggcaagagtgagagtcttttttttttcattgaccaatcataaaataattgtttctcctataactgatttgttagacagggacataatactgtattaggagttgacaaactttgttagccatttggcatgctgaaaagacaggaaaaaaggggggcagcatcaatgttgatgttggaacctccttaaaccwgaatgtagcactttgtcttcagctctgcaaagaagtcacagatatagacgagctgtgagcggtccataagggagaggtaaaggctagtattttactagcctcagcagtttccctg

SEQ ID NO: 577548 - DNA, 581 bp, Homo sapiens
accacagcctgcccaaagtccaggatcacttgcagttytctgcattgaattggatgtgactacctgtggtctggtactgtaaagttatctgctacacacattccaaatgtgtaatgatggagtaggaatagaaaaacacaataagactctcacttggaaaagaggagaatagagaatggaaaacacaatgcagtcactcgttcatcacaattcttcaatcccaccagaaaaatatggcattcttgagggacccttgtttttcatagacctaggggttacagagtcacatggttcagcaggccaggcatttgatttatttgacaatacaactctctcaaaaacatagtaggcttctgatctactttcttctggtcagttctatgcttaagttataacaatctaagattttattagttgtgtttttaagactgagcactcttttcttttcttactgctctctgtattctgccccccgccagacccaccttaatggcaactgtcctgagcctaggtgaaccaataagctgttggcaaagaaaacactcctaatctaatcttacacccttaatttaatctgtgct

SEQ ID NO: 577549 - DNA, 581 bp, Homo sapiens
accacagcctgcccaaagtccaggatcacttgcagttctctgcattgaattggatgtgactacctgtggtctggtactgtaaagttatctgctacacacattccaaatgtgtaatgatggagtaggaatagaaaaacacaataagactctcacttggaaaagaggagaatagagaatggaaaacacaatgcagtcactcgttcatcacaattcttcaatcccaccagaaaaatatggcattcttgagggacccttgtttttcatagacctaggggttacagagtcacatggttcagcaggycaggcatttgatttatttgacaatacaactctctcaaaaacatagtaggcttctgatctactttcttctggtcagttctatgcttaagttataacaatctaagattttattagttgtgtttttaagactgagcactcttttcttttcttactgctctctgtattctgccccccgccagacccaccttaatggcaactgtcctgagcctaggtgaaccaataagctgttggcaaagaaaacactcctaatctaatcttacacccttaatttaatctgtgct

SEQ ID NO: 577550 - DNA, 421 bp, Homo sapiens
agatctcactgttagggcagcgtttgggaagactaaaaagaggtgataaaatgaaccatgcaggtatcttggggaagagcattcttgttacaggaaacagcaaatgtaaggtacccagtgcaggagtgtccttggtgttcaagggacrgcaaagaaggctagtgtggctggggcagagtgagtgaaggaaagaatggtaggggatgaggttagagatagatgaagaaacgaggggcaaatcatgaaagaccttttagatgataataaggagtttggtttttactctgagagaaacggggagacactggagagtatagagcagtaaagtgacatgagtatgacatagaccttgaaaggattactccttttaatccttcatgtcaactttatggaggctaggaccagaagactagtggtggag

SEQ ID NO: 577551 - DNA, 421 bp, Homo sapiens
agatctcactgttagggcagcgtttgggaagactaaaaagaggtgataaaatgaaccatgcaggtatcttggggaagagcattcttgttacaggaaacagcaaatgtaaggtacccagtgcaggagtgtccttggtgttcaagggacggcaaagaaggctagtgtggctggggcagagtgagtgaaggaaagaatggtaggggatgaggttagagatagatgaagaaacgaggggcaaatcatgaaagaccttttagatgayaataaggagtttggtttttactctgagagaaacggggagacactggagagtatagagcagtaaagtgacatgagtatgacatagaccttgaaaggattactccttttaatccttcatgtcaactttatggaggctaggaccagaagactagtggtggag

SEQ ID NO: 577552 - DNA, 449 bp, Homo sapiens
tacaatatgacaccaaaagcacaagcaacaaaagaaaaaagtagataaattgaatattactaaaattaaaaacttttgtgtttcaaaggacatcatcaagaaagtgaaaaggcaatctgcacaatgggagaagtttttccaaatcacagatctgataagaaacttgtatataggatgcattttaaaaattcttataactcaatagcaaaaagataaataacccaatttaaaaatgggaaaaaaaatgaatagacatttttccaaagaagatataaaatagccattaagcacatgaaaagatgctcaacatcattaggtatcagggaaatagaaatcaaaaccataatgarataccacttaacacctactataatggctagaatcaaaaattctgataataacaaatattggtgaggatcagaaacctcattcatacgcagctggtggta

SEQ ID NO: 577553 - DNA, 261 bp, Homo sapiens
aacagatgttagtcagtagcagctctgactagaagttacatgaatgtattgaccaccccccaccttccgcccacmcacacagatacacacactaacactcacacacaacctggaatactattggcttcatttccaagatgattatagaaaattaagagaaagttttgtttgaaataataagagtaaggtaggagctgccatttactgaatactcactgtgttctagtacctgtgttaaacacacacataatgtgtgtattt

SEQ ID NO: 577554 - DNA, 533 bp, Homo sapiens
agacatgggtaaaacaagcaaagagcttctttttcccatatgccttggttctgtctctaaggcccattagtcccaccagccacctcacccacatggttatgctttcacccaagtgcctttggccatgctggctcatggctctaaccatcacctggtgaggaggatgaaccctaaatctcaggttataaggagggcagctggccttcaggtctttgtccacaaaacccagggctagatatacatggacaataccctctacagaggctgcatcccctgagttctaatcttcattagagagtcttagaattagaatcttagaattaccttcaccaacaagatctggagacaagtcatgtcaagcactgctctttctcaccctcccacacctccactctcagagcctggtcctctgagatgcctaacttcctttagagtattccacctgtcccaccacaccctgggcactasagggctagcaaccaggcatgatgaggagacagttaacaggaacatttccctgagttcattactct

SEQ ID NO: 577555 - DNA, 501 bp, Homo sapiens
acctgtaaagatgtttaaggtcttataagtgaattcagcaagatcatatgatacaaagtcaatattttaaaaattaagtgtgtttatatttactagcaacagacatttgaaaatagaaatctaaaaaataaaaccatttatatataagacataaaatactagagatagtattggctaaataagtatgctgaaaactacaaaacataggtgagagatmacaaaaagagctaaatcaatgaagaattatacccttttcatggattagaaaactcaacattgttaagatatcagttctctccaagctagtctatagattcaatacttaatcaaatctggcctggcatttttatgaaaatttttcatctaattctaaaatttatgtagaaaagcaaagacaacagaatagccaaaagcaaattttttaaaagaccagatttggaggactcacaccacctaattctgtttattataagctacgtaattgaacgtggggtatgtgaa

SEQ ID NO: 577556 - DNA, 499 bp, Homo sapiens
tcaaaggccaataattcatcaatcatgcctatgtaatggaaactccatcaaaaccttaaagtacgaggtcagagacctcccaggttgctgaacacattagaggttctgggagggtggtgtgccrtatgcatttctcccatctggttgttcctgagttgaattatttataataaagtggtaatagtaagtaaactgttttcctgagttctatgagtcattctagcaaattattcaacccaaggatggagtcatgggaatctctgatgtattgctggttggtcaggggtacaggaggcctgggacttgtgaatggcgtgtataatggggagcagttttgtagaactggcccccttaatatatggggtgtggtgttaactttgagcagttagtgtcaggattgaattgaatcattgaacatccagctggtatcctggagagttggaaaattgttgtaggtgtaagaaccgtaagaaccgcacatgcttggcttcagaagtgt

SEQ ID NO: 577557 - DNA, 619 bp, Homo sapiens
atcgtttctaattagtttcagttaagtggactcttttttcggtcatgtcgacttttttgaagacggactccaactttgagtctatctggtgaattttttatttcatgatattgtatttcttattctaaaattccatttggttctcttgttatgatttctgtttctcttctgagaactttccattcaattcaagagtgctccctttctcctcatgaagaatggtcataatagatgtttcaaggtctttatcrgtaattccaatatctgggtcatctcgaagttgtcactggttgattgactcgagaattagatttttctggttcttggcaggttgactattttcgatgatatccaagacagtttatattgtgttgtgagactctgggccctgttatactttgttgtgaatctctgggccctgagattctcctctggataatgtagacggttgtgttttggcaggaaattacaccagtcaggcttagactgtgagttctgtctcaccttctgttggtgggtggtaccaatgtccatacagttttgaaagctgtgcttttgggggaagccattgaggcttagttctcagagcctttgctatacttcttggggtgtgttctac

SEQ ID NO: 577558 - DNA, 580 bp, Homo sapiens
ggccaggagtgccctggggatgctttggaatccagcaacttaaatatctgcacagaacatcttgtgagcagccctttggctgtgaaaatgcaaatgactcagactggctgccaagagtcacctgtgaagctcaactggcayaggactcagggctgagctccattcttaactctccatcccatacagccaaacaagcagaacacaggttgcgcccaagggttctgaacccaggatgtataaagaagatggtctgtttctgtttctctctctctctctctctctctctctctctgtctctctctcttccctcctctcttccctccttttgaagttccaaggtcaaaactgaaaattaaccctgccctctccagctctcaactttacataatgagattataccattaatttttattcctcataaacaggaagagaaaagaaaacaaaatttaagagtccatccaaaagtcatctccctctagctcttgaaagttctccctgcctacacagagtcattcaacttcactcacactcaccccacacctctgacccttttctagtaattgcctcttgccagccccag

SEQ ID NO: 577559 - DNA, 580 bp, Homo sapiens
ggccaggagtgccctggggatgctttggaatccagcaacttaaatatctgcacagaacatcttgtgagcagccctttggctgtgaaaatgcaaatgactcagactggctgccaagagtcacctgtgaagctcaactggcacaggactcagggctgagctccattcttaactctccatcccatacagccaaacaagcagaacacaggttgygcccaagggttctgaacccaggatgtataaagaagatggtctgtttctgtttctctctctctctctctctctctctctctctgtctctctctcttccctcctctcttccctccttttgaagttccaaggtcaaaactgaaaattaaccctgccctctccagctctcaactttacataatgagattataccattaatttttattcctcataaacaggaagagaaaagaaaacaaaatttaagagtccatccaaaagtcatctccctctagctcttgaaagttctccctgcctacacagagtcattcaacttcactcacactcaccccacacctctgacccttttctagtaattgcctcttgccagccccag

SEQ ID NO: 577560 - DNA, 599 bp, Homo sapiens
agccaaacaagcagaacacaggttgcgcccaagggttctgaacccaggatgtataaagaagatggtctgtttctgtttctctctctctctctctctctctctctctctgtctctctctcttccctcctctcttccctccttttgaagttccaaggtcaaaactgaaaattaaccctgccctctccagctctcaactttacataatgagattataccattaatttttattcctcataaacaggaagagaaaagaaaacaaaatttaagagtccatccaaaagtcatctccctctagctcttgaaagttctccctgcctacacagagtcatkcaacttcactcacactcaccccacacctctgacccttttctagtaattgcctcttgccagccccaggctccagggaagcagacagctggggaagcagaacaggggtgatgccagataatccaccacggggaaagacatgttatggtcatcaagagcctctaggctctgagaaagtccaggagttcttcccatctggtaaaataattataaaaactgatctcattctccaaacagcctaagcactgagcagggacctgtactccatttta

SEQ ID NO: 577561 - DNA, 599 bp, Homo sapiens
agccaaacaagcagaacacaggttgcgcccaagggttctgaacccaggatgtataaagaagatggtctgtttctgtttctctctctctctctctctctctctctctctgtctctctctcttccctcctctcttccctccttttgaagttccaaggtcaaaactgaaaattaaccctgccctctccagctctcaactttacataatgagattataccattaatttttattcctcataaacaggaagagaaaagaaaacaaaatttaagagtccatccaaaagtcatctccctctagctcttgaaagttctccctgcctacacagagtcattcaacttcactcacactcaccccacacctctgacccttttctagtaattgcctcttgccagccccaggctccagggaagcagacagctggggaagcagaacaggggtgatgccagataatccaccacggggaaagacatgttatggtcatcaagagcctctaggctctgagaaagtccaggagttcttcccatctggtaaaataattataaaaactgatytcattctccaaacagcctaagcactgagcagggacctgtactccatttta

SEQ ID NO: 577562 - DNA, 475 bp, Homo sapiens
atgtaacaataattcttcagaaagagatgtttagtatttgagtcactgccctgtgaaaagcaacaatagaagagtgaacatgagccatgatcatgtgccaagcgctttacatgaattcattcatttactcctcacaacaaaactatggagtggattcgattattatccccatctcacagtgtaggacactgaggcaagggaagttaagtgacttaccaaggtcatagggttactaagaggcaaatctgggattcaaatccagagagcatggctacagagtgcattgtcttaagtctccacctctgtgctttcaagcctccccagtgatttacccaagaaatgggccaacgcctacaaaggcaataagaaaataatgmagatcaatagcacattgttcataagagaaaagaaatgtgtgtcctctgcaatacacactttcacatacacacacacacacacacagacacttattcac

SEQ ID NO: 577563 - DNA, 475 bp, Homo sapiens
atgtaacaataattcttcagaaagagatgtttagtatttgagtcactgccctgtgaaaagcaacaatagaagagtgaacatgagccatgatcatgtgccaagcgctttacatgaattcattcatttactcctcacaacaaaactatggagtggattcgattattatccccatctcacagtgtaggacactgaggcaagggaagttaagtgacttaccaaggtcatagggttactaagaggcaaatctgggattcaaatccagagagcatggctacagagtgcattgtcttaagtctccacctctgtgctttcaagcctccccagtgatttacccaagaaatgggccaacgcctacaaaggcaataagaaaataatgcagaycaatagcacattgttcataagagaaaagaaatgtgtgtcctctgcaatacacactttcacatacacacacacacacacacagacacttattcac

SEQ ID NO: 577564 - DNA, 583 bp, Homo sapiens
gggttgtttgcttttcatggttattaaagagttgtttatgtattctggacacacatcctctgccagatatatttattgcaaatatttgtttacaatctgtgacttgccttttcattttcttaatagtacatttgaagagcagaaggaagagttataatgtatcaatttttttcctatastaagtgttttctggctttgtctaagaaattattgcttaacatacagatatggaattctttgtttttttctggaagttttatgttttcttttttgcatttagatttatgaactatcttaaacttttgtaatagtttgcaataggaatttagattctgttttttcatatagatatcatgttgtttctgcacaattagttagaattccacattgaattttcttgaagctttgtcaaaaaaatcaactggccatatatgtgcagatctatccatgaactctactgggtttcattgagcaatttgttgaatcccttatgccaataccacactgaattgattgctataattttatagtaagtctcaaaatcatgaaatgtaagtcttccaaatatgttctttgtctttca

SEQ ID NO: 577565 - DNA, 506 bp, Homo sapiens
ggattttgttataagcatcaaggtgactcttacaggacactacaacgtgggactttgtttcttccatatttggaagataaatttatgtgtagacatttttgtaagatacggttaataactaaaatttattgaaatggtcttctaatgacttgtattcagttgcttaaaaagagcattgctgctacaagctatttctatttttagaaagggtttttatggaccaatgccccagttgtcagtcagaactgtttgygtgttcattgtttaaaatgtcatctgtaaaatgggcattatttatgttttctttttttttgcattcctggtaattatatgtgtgtataaagaaaatctgtacattgagttataacactagtatatttaaacttacaggcttatttgtcatataaaccaccattttaatgtactgtaattaacatggttataatatgtactatccttccctcctcccatctcacaacttggtgtgtgtgtaataaatcaatttc

SEQ ID NO: 577566 - DNA, 530 bp, Homo sapiens
cggttaataactaaaatttattgaaatggtcttctaatgacttgtattcagttgcttaaaaagagcattgctgctacaagctatttctatttttagaaagggtttttatggaccaatgccccagttgtcagtcagaactgtttgtgtgttcattgtttaaaatgtcatctgtaaaatgggcattatttatgttttctttttttttgcattcctggtaattatatgtgtgtataaagaaaatctgtacattgagttataacactagtatatttaaacttacaggcttatttgtcatataaaccaccattttaatgtactgtaattaacatggttataatatgtactatccttccctcctcccatctcacaacttkgtgtgtgtgtaataaatcaatttcggtttgcaataaaaccttgaaaagtatttaccaaaaaaaaagaatacatttttcttttcaagaagtttcatttaaatgctcttgaggtattaccaccttctcttttccccgaatccaggtcacccaggctgc

SEQ ID NO: 577567 - DNA, 583 bp, Homo sapiens
agtccaacagaaagatttaatggttttaagttgtataaaatgaataacagcttcaaagtatgctttttgctttagctttagcttttgttttagctttagcttttgctttagcaaaagttgatagattaaaagaaacagacaaatgtataatcataactgaagattttaacatacctcatagaacgaaaagaaaaaattattaaggaaatagaagcttgaacaatatgattagacaacttaattgaacaytgcatcaaacaacttcagaatacattcttctcaagttcatatggaatatttattaaataccatgtgttgggctattaaacaaagagacattactatagacactacagatatgaaagaaaataagattatattatgaacaattttatgctaatacattttacaatgtagaagactggcttttaaatattgagtatcctttcagaaggattactctggctgcagtgtggagaacagattagatgggggcaagaccaaggcaatgagaatgttaggagtctactgcaacaatctaggcaaagataatggcgacctatacaaggaggtggtggtaggg

SEQ ID NO: 577568 - DNA, 576 bp, Homo sapiens
caaggtttgatgaaaacagcttctccaagccactgtaatcacctttgttgaaagcagggaatatgaaaagtctggcagcctggattcatctggttgcttttgtttctcctctgaactatacagaatattgcagtgggaacatttttgaaaagaagaaatcaaggctcagagaaatagttatttgcaatgtcatccagctacttgcacrtagacccagaaccagaatccaggactttcccgcactcttttatctaataccagcacatctgcatgacagcattgagagccaggggtctatctagttctcacttgttttatattttggaaaaataaaactttagcttttgttccaaatgactatttatttccagttcaaatcctcctctctattcaaatcctgtgttggctctccaccattgtctctggctgaaaggaggccagaacctgagctatgcaaagtaggagaagtaggtgctatttgagatgatttcaaggactctgggaagggccttattctttccacctccttttagaaatccaaactttctaaaacaaaaattttcattacataagaag

SEQ ID NO: 577569 - DNA, 576 bp, Homo sapiens
caaggtttgatgaaaacagcttctccaagccactgtaatcacctttgttgaaagcagggaatatgaaaagtctggcagcctggattcatctggttgcttttgtttctcctctgaactatacagaatattgcagtgggaacatttttgaaaagaagaaatcaaggctcagagaaatagttatttgcaatgtcatccagctacttgcacgtagacccagaaccagaatccaggactttcccrcactcttttatctaataccagcacatctgcatgacagcattgagagccaggggtctatctagttctcacttgttttatattttggaaaaataaaactttagcttttgttccaaatgactatttatttccagttcaaatcctcctctctattcaaatcctgtgttggctctccaccattgtctctggctgaaaggaggccagaacctgagctatgcaaagtaggagaagtaggtgctatttgagatgatttcaaggactctgggaagggccttattctttccacctccttttagaaatccaaactttctaaaacaaaaattttcattacataagaag

SEQ ID NO: 577570 - DNA, 615 bp, Homo sapiens
ccggtgtctctaattcaatatcttatttcccttaagatctggagagaaagctctgatataacctctggagcataagaggatgcagagaaatttgcagcagcttcctcctctgccatctcttctcyctcaatggccctccaaggagccatgaaagagaagagcgtgaagcagtctggtgagctgagagctgaatgcagagttcaccctggagtcaggccaggcaagctaaatggctgaagccctacctgggcagcttaggcttgtggtgagagggtggcagggtgagggacaagtgaggctgcttcaccccagaagaaagtcctgcaggcaggtcaacatggtggcacctgcagaagcgggcttctgtgccaccgtcctccattcttggcctctacttggcattctgaatctccccttcccctgccacagtccagcaaaatagctctcagtaaatcaataatttccaacctactaaaaatgaaagccaatctattctttctccaagggttatttgcattgtaagcctgagccccagttactaaataaaagccatttcaccttctaaaggaacaacacacatcagctcagagataggagagaaattgcaggagcaag

SEQ ID NO: 577571 - DNA, 573 bp, Homo sapiens
ttttctgtttactctgctgattatttcttttacagtgcagaagatttttagcttaattaggtcccatcatttatctttgcttctgttgcatttgcctttgggttcttggtcatgaactcttttgtcctgcttctttactgcatcytgttttattagcagggtctttgtgacctgtatcttgtgttgacctcctatctcatcctgtgactaagaatgcctaacctcctgggaaccaggaggtctcagcctcattttaccaagcccctgttcaagatggagttgctctggtttgaatacctctgacagtttaaaatgacattgatcatttgttttgctcattaatctgcaatttgaacagggttcagtgcagccagctcacttctctccagccggcatcagctggggtagcttgcctggaactggaggttccacttatagatggctcattcatacggctggcaagttagtgttgtctgtcagtttctcttcaaatgggcctctccacagtgtggcttgggcttcctcacagcatggaggcagggtttcaagtgtgagcatcccaagatatgcagg

SEQ ID NO: 577572 - DNA, 573 bp, Homo sapiens
ttttctgtttactctgctgattatttcttttacagtgcagaagatttttagcttaattaggtcccatcatttatctttgcttctgttgcatttgcctttgggttcttggtcatgaactcttttgtcctgcttctttactgcatcttgttttattagcagggtctttgtgacctgtatcttgtgttgacctcctatctcatcctgtgactaagaatgcctaacctcctgggaaccaggaggtctcagcctcattttaccragcccctgttcaagatggagttgctctggtttgaatacctctgacagtttaaaatgacattgatcatttgttttgctcattaatctgcaatttgaacagggttcagtgcagccagctcacttctctccagccggcatcagctggggtagcttgcctggaactggaggttccacttatagatggctcattcatacggctggcaagttagtgttgtctgtcagtttctcttcaaatgggcctctccacagtgtggcttgggcttcctcacagcatggaggcagggtttcaagtgtgagcatcccaagatatgcagg

SEQ ID NO: 577573 - DNA, 609 bp, Homo sapiens
gaccaacttgcaatatgcacattgtggaggagaggagagcaatgtaggactctgacaggaaggcaggccggaatgtgacccagagtgacggaagccagagctttcacagggagaacagagattagcctgacagggtcagaatcyccagctattttgacagtgcttgtcaatatttatttgttcaaagtgtcccctccacttgagagagttgatacagtttccgaaatctgacaactaagaagctggcagggtagtcccggaacagcagtgactattttcagcatggggttaggggaagcactccagctctgaggtcagagttgagtttctagcaaagctctgccactccttggtcctcagtgtcctcatctgtacaatggggagaataatagaattgcttcaaagcaaggattaaataagatagattctgtaccaagcttaccatgtcgtgaatagccagcctgtgttagccattatcattgccagcagtaaaggagagctattaaaatttgttgtctggggagacagcagtgccctggtgtcacagccacatggtttttaggcaaaacagaaatcagccaggaaaggggaattctgcatccccctcct

SEQ ID NO: 577574 - DNA, 624 bp, Homo sapiens
cagatgctattaatttgtgggtcttttcttttctttagagacagggtctcactctgttgcccaggctggagtgcagtggtgcagtcatggctcacactgcagcctcaaccttctggactcaaatgatcctctcacctcagcctcccagggtagctgggactacaggcatgtgccacaatgcctggctaattttttattttttgtagagacagggtctctctatgttacccacgctggtgtcaaactcctgggctcaagtgatcctcccacctcagccaccgaaagtgctgggattacagagtgagccactgtgcttgggctgtgctttttttytaaattgaagtataaaataaaaaaaatagtgcaatgtgtaaagtacaggaatcttgtgtgtctagcttaataaacttttacatacacatgcacacacacacacacacacacacacacacgttaatgtaaccaacatctagatcatgatacaaaacatttctaccatcccagaaagctcccaggcaatacccaccagccttctccaaaagtaaagactattcttacttctaataccctaagttagttttgcctgtccttggtaaataatataaataaaattggactgtatgt

SEQ ID NO: 577575 - DNA, 457 bp, Homo sapiens
atattctgggaccccaactcaggcacacagaatcagggtgcacgagtcagccagaattttatatgagcaagtgaggacgtgcagaaaaatgtgcagatgaatcatctactaaatggatcttgtggaagtgcagattcttcatttctaataagctctcaggtgatactaatgcyactggttcaaggcccacactgggaatggcaggggcgtagatgctgtaaatgctggctgtaggtcagccaccccactgtgaacactactattgtgtttggggcttgtggtcaaggaagcagcatgtcctcctgggagcctgctaggtaaacaggccatccattttggtctggcttgatgtttggttgtcacaggctgccagagatgagtaattccctcatctcctcaaagccctgagagaccagtcccaaaggatgctagctggaggaagacagatttcctctta

SEQ ID NO: 577576 - DNA, 527 bp, Homo sapiens
gttcctattcagctatgttgcctgggaatcatagtaaatcttaaaattaagtaatgttattcctccaaatggattttccaaatggataaggaaaatccatttggagggataacattacttaagatttactataatgctatagtaatcacgacactgtgacatcatcagagatacacacattgaccaatgtaacagaaaagatagcatgtaatatatctgtataarcatggccatttgattttgaaaaatatgagaggaattaatgaaaaaatatcttttcaacaaatttttagaacaatttatgatttatatgccactcaaatcagtctcagcctaagagttacaccatatataaaattcactcagagtggatcaagtatctaaatgtaaaatatatagctataaaacttttgaaagaagatgttagagaaaatctttgtggcctggtgttagataaagaattcctgttttaaaattattttaatttttaatttttgtgggtacacagtaggtgcatatatttatgg

SEQ ID NO: 577577 - DNA, 420 bp, Homo sapiens
gtgacctttcgtcagtgatctttgatatttctattgtaattattttgaggcatcacaaaccacacccatataacacagtgaacgcgttgataaaagttgtctgggttttgactgctccacygaccagctcatcccctgtctctttccctctcatcaagccctcctattccctaagacacaacaatattgaaatgaggccaataaatagccttacaatggcctctaaatattcaaataaaaggaagtcacatctttctcactttgaatcaaaagctgggaatgattaagtttggtgaggatgccttgttgaaaaccaagataggctgaaagctaggcctcttgcacagaacagttaaccaaaatgtaaatgcaaaggaaaagttcttgaaaacattaaaagtactactgcagtgaacacat

SEQ ID NO: 577578 - DNA, 420 bp, Homo sapiens
gtgacctttcgtcagtgatctttgatatttctattgtaattattttgaggcatcacaaaccacacccatataacacagtgaacgcgttgataaaagttgtctgggttttgactgctccaccgaccagctcatcccctgtctctttccctctcatcaagccctcctattccctaagacacaacaatattgaaatkaggccaataaatagccttacaatggcctctaaatattcaaataaaaggaagtcacatctttctcactttgaatcaaaagctgggaatgattaagtttggtgaggatgccttgttgaaaaccaagataggctgaaagctaggcctcttgcacagaacagttaaccaaaatgtaaatgcaaaggaaaagttcttgaaaacattaaaagtactactgcagtgaacacat

SEQ ID NO: 577579 - DNA, 420 bp, Homo sapiens
gtgacctttcgtcagtgatctttgatatttctattgtaattattttgaggcatcacaaaccacacccatataacacagtgaacgcgttgataaaagttgtctgggttttgactgctccaccgaccagctcatcccctgtctctttccctctcatcaagccctcctattccctaagacacaacaatattgaaatgaggccaataaatagccttacaatggcctctaaatattcaaataaaaggaagtcacatctttctcactttgaatcaaaagctrggaatgattaagtttggtgaggatgccttgttgaaaaccaagataggctgaaagctaggcctcttgcacagaacagttaaccaaaatgtaaatgcaaaggaaaagttcttgaaaacattaaaagtactactgcagtgaacacat

SEQ ID NO: 577580 - DNA, 577 bp, Homo sapiens
aagggatagggctagagttccatagcaccgttgggtggctatagttagtgataatttattgtatatttcaaaataactagaaaagaggatttgaatgttcccaatacaaagaaatgatatgtgtttkaggtgatggatattccagttactctgatttgatcattacacattgtacacatgtattgaaatatcacatatacctcagaaatatgtaaaattactatgtatcaattaaatatttataaatacagtggttgaatgcatttgaaaatcttaaaatgcaaagcaaagaatgatatattttatagttaagacgtaaaaataagctcagagaaaacacttatcaattccaaataataacattgacttgaacgtaatggagatatatataaaaaaatcatctcttggccccacatctttgtttatgaaattatatctatatataatatatattatataatgttatatatatataacatatgttttatatatattatatatatatgttttatatatatattttatatatatatacatatgtaaaagatcatctcttggtcccacatctttctccagc

SEQ ID NO: 577581 - DNA, 577 bp, Homo sapiens
aagggatagggctagagttccatagcaccgttgggtggctatagttagtgataatttattgtatatttcaaaataactagaaaagaggatttgaatgttcccaatacaaagaaatgatatgtgtttgaggtgatggatattccagttactctgatttgatyattacacattgtacacatgtattgaaatatcacatatacctcagaaatatgtaaaattactatgtatcaattaaatatttataaatacagtggttgaatgcatttgaaaatcttaaaatgcaaagcaaagaatgatatattttatagttaagacgtaaaaataagctcagagaaaacacttatcaattccaaataataacattgacttgaacgtaatggagatatatataaaaaaatcatctcttggccccacatctttgtttatgaaattatatctatatataatatatattatataatgttatatatatataacatatgttttatatatattatatatatatgttttatatatatattttatatatatatacatatgtaaaagatcatctcttggtcccacatctttctccagc

SEQ ID NO: 577582 - DNA, 577 bp, Homo sapiens
aagggatagggctagagttccatagcaccgttgggtggctatagttagtgataatttattgtatatttcaaaataactagaaaagaggatttgaatgttcccaatacaaagaaatgatatgtgtttgaggtgatggatattccagttactctgatttgatcattacacaytgtacacatgtattgaaatatcacatatacctcagaaatatgtaaaattactatgtatcaattaaatatttataaatacagtggttgaatgcatttgaaaatcttaaaatgcaaagcaaagaatgatatattttatagttaagacgtaaaaataagctcagagaaaacacttatcaattccaaataataacattgacttgaacgtaatggagatatatataaaaaaatcatctcttggccccacatctttgtttatgaaattatatctatatataatatatattatataatgttatatatatataacatatgttttatatatattatatatatatgttttatatatatattttatatatatatacatatgtaaaagatcatctcttggtcccacatctttctccagc

SEQ ID NO: 577583 - DNA, 590 bp, Homo sapiens
gctactatgcgcattagtgtcttagtttttaacacaaaagtttaaaaagtaaatagtgtatagaataaagacataaagaaagaaaacaggccgggtgcagtggctcacgactgtaatcccagcactttgggaggccgaggcaggcagatcacaaggtcaagagatcaagaccatcccggtgaacagggtgaaaccccgactctattaaaaatatwaaaaaaattagctggtcatggtggtgtgtgcctgtaatcccagctacttgggaggctgagacaggagaatcgcttgaacctgggaggcagaggttgcagtgagctgagatcatgccactgcactccagcctggcaacagaccaagactccgtctcaaaaaaaaaaaaaaaagaaagaaaacaatttgtacagctgtatgcgtgtcttaagctaagtgttagtacaagagtgaaaaagttttgaaagtgaataaagtaaaaaagtcagagtaagttaaggttaatttattattgaggaaacaaaaataatttttaaaaataaatttagggtagcttaagcatacagtgtttataaagcctgtagaagtgtaggatg

SEQ ID NO: 577584 - DNA, 516 bp, Homo sapiens
tgtcagtatgtactcaatgtttagctcccacttataagtaagaacatgcagtatttagttttctgttcctatattagtttkcttagaataatgacctccagcttcatccatagtgctgcaaaggacatgatatcattcttttttatagctatgtatatgtagtattccattatatatagataccacattttctttatccaatctaccattgatgggaatttcactcgatctcatgtctttgctattgtgaatagtgctgtgatggacatatgtatgcatttgtctttatggtagaacaatttatattcctttgagcatatactccataatggaatatctaggatgaatagtaattctggattgagtttttgagaaatcaccaaactgctttccacaatggctgaattaatttacattcataccgccagtgtgtaagtgttctcttttcttcacaaccttgctagcatctgttattttttacttttcagtaatagtcatactgactggtgtgagatt

SEQ ID NO: 577585 - DNA, 516 bp, Homo sapiens
tgtcagtatgtactcaatgtttagctcccacttataagtaagaacatgcagtatttagttttctgttcctatattagttttcttagaataatgrcctccagcttcatccatagtgctgcaaaggacatgatatcattcttttttatagctatgtatatgtagtattccattatatatagataccacattttctttatccaatctaccattgatgggaatttcactcgatctcatgtctttgctattgtgaatagtgctgtgatggacatatgtatgcatttgtctttatggtagaacaatttatattcctttgagcatatactccataatggaatatctaggatgaatagtaattctggattgagtttttgagaaatcaccaaactgctttccacaatggctgaattaatttacattcataccgccagtgtgtaagtgttctcttttcttcacaaccttgctagcatctgttattttttacttttcagtaatagtcatactgactggtgtgagatt

SEQ ID NO: 577586 - DNA, 516 bp, Homo sapiens
tgtcagtatgtactcaatgtttagctcccacttataagtaagaacatgcagtatttagttttctgttcctatattagttttcttagaataatgacctccagcttcatccatagtgctgcaaaggacatgatatcattcttttttatagctatgtatatgtagtattccattatatatagataccacattttctttatccaatctaccattgatgggaatttcactcgatctcatgtctttgctattgtgaatagtgctgtgatggacatatgtakgcatttgtctttatggtagaacaatttatattcctttgagcatatactccataatggaatatctaggatgaatagtaattctggattgagtttttgagaaatcaccaaactgctttccacaatggctgaattaatttacattcataccgccagtgtgtaagtgttctcttttcttcacaaccttgctagcatctgttattttttacttttcagtaatagtcatactgactggtgtgagatt

SEQ ID NO: 577587 - DNA, 569 bp, Homo sapiens
aatgaacacgcaacttagctctgagattcttaccaaccagggcaaagagggaaacacaaaggattcaacaattgagtagattgccatctagatgaaaatattccagtttgttttaattatcaatagcagcataacaagctacccaaaacttgtggtttaaactataatgatttatattttttcagggttctgtgggttggctgagtgattgttctgctgatcttgctcggggtcacacatgtgacttaggatcatatatgtagttgacggatcactggaggctgggatcagctggggatgtttatcacgatatcttatttcatctccatgtggtgaacttgaacttcctaacagcatggcagtctcaagttarcactgcaagagggagagttccaaaaggacattccttaatatacaagtgcttatcaagtctctgctcatttgatgtgtctcatgatgaaatcaaatcatatgtccaatttcagagtaatccaaagttggaacgccagatgtcatgggttatggggtccatagtccaccacagtttcttatgacaggccgagttagaa

SEQ ID NO: 577588 - DNA, 466 bp, Homo sapiens
tccataatttttttttagatgaagttttgctcttatcacccaggctggagtacaatggtgcgatttcagctcactgcaacctccacctcccatgttcaagtgattctcctgcctcagccccccaggtagctgggattacaggcatgtgccaccatacccagctaatttttgtatttttagtagagacggggtttcgccatgttgcccaggctggtctcgaactcccgaccacaggtgatccacccacctcggcctcccaaagttctgggattacaggcatgagccgctgtgcctggccgatttccataatttttacctaacgcccaagaggtagtaaatttattgtaattaatgaaccaatgttgatatattattaaytaatgtccatactttgtctagattttcttcatctttacctaatgttcaagatttcatccacgatgccacatttagttgtcaagtcttt

SEQ ID NO: 577589 - DNA, 620 bp, Homo sapiens
atcgactgctttaaatccttcacagtgttttattcacaactccaccaagttttttttkttgttgttctttctgttgttttagactagggtcttattctgtcacccaggatggagtgcagtgacgcaattatagttcactatagcctccagcttctgggctcaagtgatcctcccacctcagcttcctgagtagctggggatacaggtgtgcactaccatgcctggctaatttttttaaaaatttttttgtaaagacaagggtctctctatgttccccaggctggtcccaaactcctggcctcaagtttgcttcagcctcccaaagtactgggactgcaggcatgagccacctcacctggtctcaattccagatattaccagccattttccattttcatcaatataaaatctgaaaagttgcattttatttatttcattataatttacatttatttcttagtgagattaagcatgcttatgtgtccattggcttattcatgttttttaatccatttttaaaaatttaatttaatattcatttcttaaacttatttacttatttatttatttatttattgagaccaagacttgctctgttgcccaggctggagtgcaatggc

SEQ ID NO: 577590 - DNA, 440 bp, Homo sapiens
ggctaatttttttaaaaatttttttgtaaagacaagggtctctctatgttccccaggctggtcccaaactcctggcctcaagtttgcttcagcctcccaaagtactgggactgcaggcatgagccacctcacctggtctcaattcmagatattaccagccattttccattttcatcaatataaaatctgaaaagttgcattttatttatttcattataatttacatttatttcttagtgagattaagcatgcttatgtgtccattggcttattcatgttttttaatccatttttaaaaatttaatttaatattcatttcttaaacttatttacttatttatttatttatttattgagaccaagacttgctctgttgcccaggctggagtgcaatggcacagtctcagctcactgcaacctctgcctcccgggttcaagtg

SEQ ID NO: 577591 - DNA, 620 bp, Homo sapiens
atcgactgctttaaatccttcacagtgttttattcacaactccaccaagtttttttttttgttgttctttctgttgttttagactagggtcttattctgtcacccaggatggagtgcagtgacgcaattatagttcactatagcctccagcttctgggctcaagtgatcctcccacctcagcttcctgagtagctggggatacaggtgtgcactaccatgcctggctaatttttttaaaaatttttttgtaaagacaagggtctctctatgttccccaggctggtcccaaactcctggcctcaagtttgcttcagcctcccaaagtactgggactgcaggcatgagccacctcacctggtctcaattccrgatattaccagccattttccattttcatcaatataaaatctgaaaagttgcattttatttatttcattataatttacatttatttcttagtgagattaagcatgcttatgtgtccattggcttattcatgttttttaatccatttttaaaaatttaatttaatattcatttcttaaacttatttacttatttatttatttatttattgagaccaagacttgctctgttgcccaggctggagtgcaatggc

SEQ ID NO: 577592 - DNA, 620 bp, Homo sapiens
atcgactgctttaaatccttcacagtgttttattcacaactccaccaagtttttttttttgttgttctttctgttgttttagactagggtcttattctgtcacccaggatggagtgcagtgacgcaattatagttcactatagcctccagcttctgggctcaagtgatcctcccacctcagcttcctgagtagctggggatacaggtgtgcactaccatgcctggctaatttttttaaaaatttttttgtaaagacaagggtctctctatgttccccaggctggtcccaaactcctggcctcaagtttgcttcagcctcccaaagtactgggactgcaggcatgagccacctcacctggtctcaattccagatattaccagccattktccattttcatcaatataaaatctgaaaagttgcattttatttatttcattataatttacatttatttcttagtgagattaagcatgcttatgtgtccattggcttattcatgttttttaatccatttttaaaaatttaatttaatattcatttcttaaacttatttacttatttatttatttatttattgagaccaagacttgctctgttgcccaggctggagtgcaatggc

SEQ ID NO: 577593 - DNA, 616 bp, Homo sapiens
ggctataaattgaaaaccctagcatgaaattaacctgcagttcagttttgtttgatctgcatagttttttatccattaggaaaagtcacacaaatatccacattcttctgaaaaattgcaagatttagcaacacggatcccacatttccttggcatgtgctcaccagtttgacctagtccctcccactttctgctatcatgtgctcagctgctttccttagttacctgcctcgcctgatccctgtaacacttgagtttatgattctgagtgtagagagttctaacacctgctgggtctcttgggaggtttayaaaactcctttgggtctggttctgtgtcagtcagggtaggctagttttgtttgtagtttatattaaaaatacccttgatactgtctggctctgtgtccccacccaaatctcatcttgaattgtaatccccacatgttgagggagggaactgtaatccccacgtcgtgggagggggttgattggatcatgggggcactttcccccatgctgttctcatgataatgagttatcatgagatctgatagttttataaggcaattttccctgctcttgctggctcttctctctcctgccaccatgtgaa

SEQ ID NO: 577594 - DNA, 569 bp, Homo sapiens
tctgcacatcaccaagcagtttcacagcttctttctagttttcatctgtggatatttgttttttcttgtagacctcattgggatcccaaaagtttcttcacagatttgacaaaaagagagtttccaacctgctgaatcaaaggaaatgyttaaatctgtgagatgaatacacacatcaacaagcactttcacagaggcttctttccagtttctatctggggaaattcactctctccccatagacatcaatggcctcccaaacatccctttgcagatcttacaaaaagagtgtttccaacctgctgaatcaaaagaaacatttaactctgtgagatgagtccacacatcaccaaggagtttcacagatagcttctttctagcttttatctggggatattcactttttccacataggattcaacaggctcccaaacgtccctttgcaagttctataaaaagagtgtttccaacctgctgaatcaaaagaaaggcttaacccttgaggttaatccacacattacaaagcagtttcacagatagcttttttctagtttttattttgggatatt

SEQ ID NO: 577595 - DNA, 337 bp, Homo sapiens
gactagcctgggcaacatggtgaaaccctgtgtctacaaaaaaatacaaaaattagctgggcatggtggtgtgcacctgttgtcccagccacttgggaggcttargtgggaggatggcttgagtctgaaagggtggtttgagcctgggaggtggagcttgcagtgagcagagagtggcatcatgccactgcattgtagcctgggagatagagccagaccttgtctcaaaaaaaaaaaaaaaaaaaattacagtattttaaaacattttgtagttatactgtgttccacaattaattgtgttttctttgaaaaactggatgtggggtgggtctcttac

SEQ ID NO: 577596 - DNA, 563 bp, Homo sapiens
ttttgcttcctttctgaataataacacttcaaaaactatatttggactgattgtagacttacagattttaataaaatttaatgtgaaaacagatatatttaaaaaataaattttgaagtataatgtcataatttttcatgaacatataggtgggtttaacttgttatcttatcagtagtttttaggatttataaatttgaagtaatacttctttccaataatccacttaccgtaatgatcatttgcattttgtttagagtgttttttaagaaagattttttttttaagccttaattaatacaatgtaaaatataaccagcctggcttggtggttcatgcctgcaatctttgggaggctgaggtgggaggattgcttgagctgrggagtttgagaccagcctgggcaacatggtgaaacctcgtctctacaaaaaatacaaaaattagctgggcacagtggcacatgcctgaagtctcagctactcgggaggctgaagtgggaggatcacccaggaggcagacattgtagtgagctgtgatcatgccactgcactccagcctgg

SEQ ID NO: 577597 - DNA, 581 bp, Homo sapiens
acactggctgtctttggagagaagatttggcagattaggagacagaaataagaggaagagggactttttactgtgtaccttcatctacctttttaattttgagctgtatggatatgtcatttgttttaaaaatgacactgttcatatgcacctggctgaaagttagagagcagggaccctaggtgaggcctttaaggtggtaatacctattatatatggatatcagaaaatagtggatggaataaaacagcacctgggcaccccaggagcaaaactgtgtaactttgtatgcgagactgtgctatagtgtggatatttgtccctgcccaaatatcatgttgaattgtaatccccagtaatagagttggggcctggtaggaggtgtttggatcatggggggaagatctttcatggcttggggtgctgtctttgtgatagtgagttctcatgagatctggtcttttaaaagtgtgcagcacctcccccactcccactctgtcacctctctctcgctcgctcrctcgctcctgctttcaccatgtgatgtgcctgctcccctttgccttctgccatgattgtaa

SEQ ID NO: 577598 - DNA, 587 bp, Homo sapiens
gctgctggttgcccatttttatggttatttcttgatgatatgctaaacaaggggtggattattcatgcctcccctttttagaccatatagggtaacttcctgatgttgccatggcatttgtaaactgtcatggcgctggtgggagtgtagcagtgaggatgaccagaggtcactctcattgccatctttgttttggtgggttttaaccggcttctttactgcaacctgttttatcaacaaggtctttatgacctgtatcttatgccaacctcctatttcagtctgtgacttagaatgccttaacaatctgggaatgcagcccagtaggtttcagcctcattttacccattcattatggagttgctgtggttcacatgcctctgacaattccagcactttgggaggctgaggcaggtggatcacttgaggtcaggagttcgagactagcctgggcaacatgctgaaaccccatctctactaaaaatacaaaaattagccagtcatagtggtatgcacctgtagtcccagctacttgggaggctgaggcatggraattgtctgaacccaggaggcagaggttgcagtga

SEQ ID NO: 577599 - DNA, 413 bp, Homo sapiens
cttttttttctttttttctgagatcgctgctttgttatacaggtattacctttctaaaaaaaaaaaaaaaaaaaaaaatccaatacaagctgactcatgttacaggaagtctcttttcctactttctttttctttcgttcttytttcgttttcacctaaaggaataagctcattagggacattgtctacctttcactatattgcaaataataggagattttttacttcccaaaatgtttcccacagtgtaatattaataaccatttttctagcttcagatagatagcaatttgtttcactgtacatagcccagtttccaaaatcagtgccacctaatctagattttgttgttgttgcaacatccactttattactgatttctgtattttcaggataagtaagttatgctgcag

SEQ ID NO: 577600 - DNA, 387 bp, Homo sapiens
ttagttttaaaaaagaatgaaaccctgtcatatgcaacaacatgtatggctggccctggaggacattccactaagtgaaataagccagattcaggaagataaatactacatgatttcacttatatgtggaatcaaagaaagtcaaactcatagaaagagaaagtaaagtggtagttacctgagattaggtgtgggagaagtaggaaaatattggttagagggtacatattttcagttataagatgaataaattctggagacctaatatacatggtcactgtgatgtatatagttgaaatatacatggttgctgtaatgtatarttgaaatatacatggttgctgtaatgtatagttgaaatatacatggtccttataatgtgcagtt

SEQ ID NO: 577601 - DNA, 387 bp, Homo sapiens
ttagttttaaaaaagaatgaaaccctgtcatatgcaacaacatgtatggctggccctggaggacattccactaagtgaaataagccagattcaggaagataaatactacatgatttcacttatatgtggaatcaaagaaagtcaaactcatagaaagagaaagtaaagtggtagttacctgagattaggtgtgggagaagtaggaaaatattggttagagggtacatattttcagttataagatgaataaattctggagacctaatatacatggtcactgtgatgtatatagttgaaatatacatggttgctgtaatgtataattgaaatatacatggttgctgtaatgtatarttgaaatatacatggtccttataatgtgcagtt

SEQ ID NO: 577602 - DNA, 525 bp, Homo sapiens
gtaggtattatttcatagtcatgctggatagcactttcattgaatgataccatcatgttagccaaatagttccatagctgtagattttcacttgtttaataggtaatatggcagtgcaagagactgcattttacctccacctctggcttttcagttatataaaccagcttattgtgacctgtggcaggtgcagtcttagttacattccagtatttcccaagttgggaagcagagtcgggtgactttagacgyaggtgttattctgaaataatttggaaacattacgagcatgtgtataggggcatttgcagtgagtagcttgatatgaatatgtgaattatattatctcataaaactttgattgatggttaattctaggaatagtaagaaattctttgcaactttatgtaaacatcctagggcaaattcttcatggaatttcctctatcctaaattttaaagtaaattttgtttcattgaaaacatttgctcattgtggtttcccttggtcaataatacccacag

SEQ ID NO: 577603 - DNA, 448 bp, Homo sapiens
tcatttcatttcttctccaaaraacacttgtattagcattattaaaaaacaattataaaactggaggattatgtgaacattatgtgaacattaggtgattattaataatacatttactcataaaagagcttatctttggaataatcacacttgatagatactgtaagtgaatgcagtgaactggaggtatcaataatgccccatagccagaattttaaaagcatgaagcaggaattggacatgacttgtgttcattttatttgatatggtttgtataatttgggcatcactcttatttttaggcagtaataaaaccttaagataaaatgggttgacatctcggttcttagagatgtcctggtagcattaggacagagttatgatctaggtagttgtataaaattaaacctggtggcctatacagaagacagctgcaacaatggtttct

SEQ ID NO: 577604 - DNA, 554 bp, Homo sapiens
acttacaatcatggcagaaggcaaaggagaagcaagcaccatcttcacgtggcagagtgrtggggaggaggtgctatacactttcaaacaagcagcattagggggatggtgttaaacaattaggaactgccctcatgatccaatcacatcgcaccaggcccctcctccaacagtgggaattataatttgacatgagatttgggtggggacacagagccaaaccatatcaactataaacttcattaataatcaactaagtgcaaaataacctaacacagtattgctttaaaattactgtatctggctgggcacagtggctcatgcctgtaagtccaacattttgggaggctgaggtaggcagatcacttgaggtcaggagtttgagaccagcctggccaacatggtgaaaccccatctctattaaaaatacaaaaattagccaggcatggtggtgggtgcctgtaatcccagctactcgggaggctgaggcaggagaatcacttgaatctgggggatggagtttgcagtgagttgagattgcaccactgcactcc

SEQ ID NO: 577605 - DNA, 447 bp, Homo sapiens
actgaaaccagatgaaataatgttctgtcacgtgaaatatttaagtatatagtatatttatactctagaacatgcacatttatatatatatgtatatgtatatatatatagtaactactttttatactccatacataacttgatatagaaagctgtttatttattcactgtaagtttattttttctacacagtaaaaacttgtactatgttaataacttgtcctatgtcaatttgtatatcatgaaacacttctcatcatattgtatgtaagtaattgcatttctgctcttccaaagctcctgcgtctgtttttaaagagcatggaaaaatactgcctagaaaatgcaaaatgaaataagagagagtagtttttcagctagtttgaaggaggacrgttaacttgtatattccaccattcacatttgatgtacatgtgtagggaaagt

SEQ ID NO: 577606 - DNA, 472 bp, Homo sapiens
tcaaggtgcaagataatgccctttggacctgcccatggtgggtaagaaagtcttaaatgacaaattccctctaacattctagtgtccctaagcctttgagttcatttctactgtaaatcaatgcagatcttgcagttcaagatcttttggtctatgctaccttttggtctatgtttcagccaattaactaaataaactgttggagctgtttctagcttcttgaattgcaaccttaaacacagaatctctgcttagtaagcctatatcaataaattcagtctgatccaactttttgttcctttcactattaccccatacctctaatatcaattcccacacatgttccctggatttctatctacatatattagaaaactcaagtagttctttyggaatgtggtgcgcctcctcatgggttacatattgtacctcacttttaggggtcttatgggacctggtctagaaccaaaga

SEQ ID NO: 577607 - DNA, 525 bp, Homo sapiens
aaaattagaaaatgaactgggtgcggtaaaacattcgtatagtcccagctactctggaggctgaaataggaggatcgcttgagcccaggaagtggaagctgcagtgagctctgatctcaccactgcactccagcctgggtgacagagtgagaccctgtctcaagacacacacacacacacacacacacacacacacacacacccccctaatctcagtctgtccagccttgactaatcaaaagggccttctggttacagaagaggtatgctcttttgtaggayagggagagaccagcaagcttgtttacagacttttcctcatcctctgcttagttttccaagaaccctcacagtggaaatggagtctctgggaaaatgacctaaatctttgggttaccaggggagaaatatgcctcctttgtcaattaataaatggaacacgtgccttaaaatccagggagttctgctagaatgaatcactccctaagaccctgacctatgcatggaacatgaaaaactgaagtt

SEQ ID NO: 577608 - DNA, 525 bp, Homo sapiens
aaaattagaaaatgaactgggtgcggtaaaacattcgtatagtcccagctactctggaggctgaaataggaggatcgcttgagcccaggaagtggaagctgcagtgagctctgatctcaccactgcactccagcctgggtgacagagtgagaccctgtctcaagacacacacacacacacacacacacacacacacacacacccccctaatctcagtctgtccagccttgactaatcaaaagggccttctggttacagaagaggtatgctcttttgtaggatagggagagaccagcaagcttgttyacagacttttcctcatcctctgcttagttttccaagaaccctcacagtggaaatggagtctctgggaaaatgacctaaatctttgggttaccaggggagaaatatgcctcctttgtcaattaataaatggaacacgtgccttaaaatccagggagttctgctagaatgaatcactccctaagaccctgacctatgcatggaacatgaaaaactgaagtt

SEQ ID NO: 577609 - DNA, 410 bp, Homo sapiens
gaaaagaggccaacatagaatgtcattattctttcttggtggggaatggattccagagtcattctgtgacctttacatgacctccttattagcatctaaaagcttccagtrtaggatgcagccagctaggttctcttctaatgtaataaaatttgcttcagcaaatcttatgcagagccatctccagactccagaaataacaggctataaattactggatctcccatttgatataatgaagtataagcatggtcctgaatgactcctctacatactactctgggtggcttgaagtgaatttgatacaagaactggagcgagcgcaaagcagagctagatctaggattaatgtgcttgggcccagctcctcactactcacctatgagtccagttccagaacccaagtagag

SEQ ID NO: 577610 - DNA, 410 bp, Homo sapiens
gaaaagaggccaacatagaatgtcattattctttcttggtggggaatggattccagagtcattctgtgacctttacatgacctccttattagcatctaaaagcttccagtgtaggatgcagccagctaggttctcttctaatgtaataaaatttgcttcagcaaakcttatgcagagccatctccagactccagaaataacaggctataaattactggatctcccatttgatataatgaagtataagcatggtcctgaatgactcctctacatactactctgggtggcttgaagtgaatttgatacaagaactggagcgagcgcaaagcagagctagatctaggattaatgtgcttgggcccagctcctcactactcacctatgagtccagttccagaacccaagtagag

SEQ ID NO: 577611 - DNA, 410 bp, Homo sapiens
gaaaagaggccaacatagaatgtcattattctttcttggtggggaatggattccagagtcattctgtgacctttacatgacctccttattagcatctaaaagcttccagtgtaggatgcagccagctaggttctcttctaatgtaataaaatttgcttcagcaaatcttatgcagagccatctccagactccagaaataacaggctataaattactggatctcccatttgatataatgaagtataagcatggtcctgaatgactcctctacatactactctgggtggcttgaagtgaatttgatacaagaactggagygagcgcaaagcagagctagatctaggattaatgtgcttgggcccagctcctcactactcacctatgagtccagttccagaacccaagtagag

SEQ ID NO: 577612 - DNA, 410 bp, Homo sapiens
gaaaagaggccaacatagaatgtcattattctttcttggtggggaatggattccagagtcattctgtgacctttacatgacctccttattagcatctaaaagcttccagtgtaggatgcagccagctaggttctcttctaatgtaataaaatttgcttcagcaaatcttatgcagagccatctccagactccagaaataacaggctataaattactggatctcccatttgatataatgaagtataagcatggtcctgaatgactcctctacatactactctgggtggcttgaagtgaatttgatacaagaactggagcgagcgcaaagcagagctagatctaggattaatgtgcttgggcccagctcctcactactcacckatgagtccagttccagaacccaagtagag

SEQ ID NO: 577613 - DNA, 524 bp, Homo sapiens
gaggctaaggcaggagaatttcctgaacccaggaggcagaggttgcagtgaccagcaaggttgcaccattgcaccccagcctgggcgataagagcgaaaactccatctcaaaaaaaaaaaaaaaaaaaaaaaaaattcctttgggaaggccttctacataaaaatcttcaacatgagactggaaaaaagggtatgggatcatcaccggacctttggcttttacagctcgagctataaraacaaaaagaaaaagggatatcatttaaacacaatatgtaaaaaagaataattattgaatctgtactggtctttaacttttacactttgatctttaattctgttattgggattgagtccaaagaaaaatagtatgagtaaaataaaaagaacaccaaaaatgctaatattctgtttactaaagtctgtagtgaaatatcccattaaatccaagtgcagtgactcacacccataatcccagcactttgggaggctgaggcgggtgaatctcctgaagtcaggagttc

SEQ ID NO: 577614 - DNA, 524 bp, Homo sapiens
gaggctaaggcaggagaatttcctgaacccaggaggcagaggttgcagtgaccagcaaggttgcaccattgcaccccagcctgggcgataagagcgaaaactccatctcaaaaaaaaaaaaaaaaaaaaaaaaaattcctttgggaaggccttctacataaaaatcttcaacatgagactggaaaaaagggtatgggatcatcaccggacctttggcttttacagctcgagctataaaaacaaaaagaaaaagggatatcatttaaacacaatatgtaraaaagaataattattgaatctgtactggtctttaacttttacactttgatctttaattctgttattgggattgagtccaaagaaaaatagtatgagtaaaataaaaagaacaccaaaaatgctaatattctgtttactaaagtctgtagtgaaatatcccattaaatccaagtgcagtgactcacacccataatcccagcactttgggaggctgaggcgggtgaatctcctgaagtcaggagttc

SEQ ID NO: 577615 - DNA, 524 bp, Homo sapiens
gaggctaaggcaggagaatttcctgaacccaggaggcagaggttgcagtgaccagcaaggttgcaccattgcaccccagcctgggcgataagagcgaaaactccatctcaaaaaaaaaaaaaaaaaaaaaaaaaattcctttgggaaggccttctacataaaaatcttcaacatgagactggaaaaaagggtatgggatcatcaccggacctttggcttttacagctcgagctataaaaacaaaaagaaaaagggatatcatttaaacacaatatgtaaaaaagaataattattgaatctgtactggtctttaacttttacactttgatctttaattctgttattgkgattgagtccaaagaaaaatagtatgagtaaaataaaaagaacaccaaaaatgctaatattctgtttactaaagtctgtagtgaaatatcccattaaatccaagtgcagtgactcacacccataatcccagcactttgggaggctgaggcgggtgaatctcctgaagtcaggagttc

SEQ ID NO: 577616 - DNA, 331 bp, Homo sapiens
ctttttgtcttgtaaattagcttatcagcatacttggagcctcttgccttaataaggacttgatataaatrtgtatcaggagaaagcctatcttatgaaggaattattccctttttatttgaatccgtgtttgctttatcttgggctcctgaaaactgatactttgcatttaatagcagcatatgcccaggatgaatgataatacatcttctgatacagagcttgaggttacagaatatcttaaattgttccaggaactgttgttatcatttaagtccaataatcagtaaggtttcaccctaccagaatacacttttttttattaactgtc

SEQ ID NO: 577617 - DNA, 331 bp, Homo sapiens
ctttttgtcttgtaaattagcttatcagcatacttggagcctcttgccttaataaggacttgatataaatatgtatcaggagaaagcctatcttatgaaggaattattccctttttatttgaatccrtgtttgctttatcttgggctcctgaaaactgatactttgcatttaatagcagcatatgcccaggatgaatgataatacatcttctgatacagagcttgaggttacagaatatcttaaattgttccaggaactgttgttatcatttaagtccaataatcagtaaggtttcaccctaccagaatacacttttttttattaactgtc

SEQ ID NO: 577618 - DNA, 331 bp, Homo sapiens
ctttttgtcttgtaaattagcttatcagcatacttggagcctcttgccttaataaggacttgatataaatatgtatcaggagaaagcctatcttatgaaggaattattccctttttatttgaatccgtgtttgctttatcttgggctcctgaaaactgatactttgcatttaayagcagcatatgcccaggatgaatgataatacatcttctgatacagagcttgaggttacagaatatcttaaattgttccaggaactgttgttatcatttaagtccaataatcagtaaggtttcaccctaccagaatacacttttttttattaactgtc

SEQ ID NO: 577619 - DNA, 331 bp, Homo sapiens
ctttttgtcttgtaaattagcttatcagcatacttggagcctcttgccttaataaggacttgatataaatatgtatcaggagaaagcctatcttatgaaggaattattccctttttatttgaatccgtgtttgctttatcttgggctcctgaaaactgatactttgcatttaatagcagcatatgcccaggatgaatgataatacatcttctgatacagagcttgaggttacagaatatcttaaattgttccaggaactgttgttatcatttaagtccaataatcagtaagrtttcaccctaccagaatacacttttttttattaactgtc

SEQ ID NO: 577620 - DNA, 575 bp, Homo sapiens
gggattacaggtgtgagccattgcacccaactggtgtagccactttagaaaacagtctggcagtttctcaaaaggctaaatgtacagtcatcctataatgcaacaatttcactcmtaggcatatatcccagaaaaataaaaatatatgtccacacaaaaacttgtacaacaatcttcatagcagcattattcataatgaccaatacatggaatacatggaaacaacccaaatatccaccaactgatgaacaaataaacaaaatgcagtgtgtctctaccatggaatactgccatagaaggaatgaaatattgatacacactatgacataaaggaactttgaaaacactgtgctaagagggaaaaaagccacaaaagatcacatattgtacaattctatttgtccagattaggcaaatctatagtgacaaaaaaattaatcaatggttgcctaaggctgggggcgaaggtaggtggggagagtaggaggtagcggctaaggggtatggatttctctacaggataatgaaaggttctaaaagtgactgtggtgatcaatgcacagctctgtgaatat

SEQ ID NO: 577621 - DNA, 575 bp, Homo sapiens
gggattacaggtgtgagccattgcacccaactggtgtagccactttagaaaacagtctggcagtttctcaaaaggctaaatgtacagtcatcctataatgcaacaatttcactcataggcatatatcccagaaaaataaaaatatatgtccacacaaaaacttgtacaacaatcttcatagcagcattattcataatgaccaatacatggaatacatggaaacaacccaaatatccaccaactgatgaacarataaacaaaatgcagtgtgtctctaccatggaatactgccatagaaggaatgaaatattgatacacactatgacataaaggaactttgaaaacactgtgctaagagggaaaaaagccacaaaagatcacatattgtacaattctatttgtccagattaggcaaatctatagtgacaaaaaaattaatcaatggttgcctaaggctgggggcgaaggtaggtggggagagtaggaggtagcggctaaggggtatggatttctctacaggataatgaaaggttctaaaagtgactgtggtgatcaatgcacagctctgtgaatat

SEQ ID NO: 577622 - DNA, 621 bp, Homo sapiens
ttaattacttttgtaattggctaaaaacgttttacgtaaattctatttctcttttaaattaagtgaaatcataaaaaagtataatttttattttatgttactttgtgaacctgtctgtgacagaacatttattttcaaattttataatgctaaattgattttcaatcacgttttaagacatataatatactttaatcctactattgccatattgaaacctcccctattcatgttttgggcaagtggaacaaaagaaataaattaaakttaataatcttcattgtttttcacaaaccatgttttaattgttttacaaatgttgagtaatgtgattacttcaaagagaaactgaaactgtagatgtgtctctttcataggaaataagacaagtagttgtatacattttaaaaataagtattatatacattattaaaaaaatatacattctttttgtgaggaacataaaaaaatttacttcaaaaagaagcattaagaatacttaagaaaagtatcacccaacacaatcaatttggagaagtagagaaaaagcgaatttgtaaatttctgtatataattctgatttctccctgtatttacagaaagtccatgagaaaagttgtt

SEQ ID NO: 577623 - DNA, 616 bp, Homo sapiens
catttatcttcacaaattgaaactctatacccactaaactactctccattctcctctccctgagccctcaccaacctccattctactttctgtctcaatgaatttggctactctaaataccttgtataaataaaattaaagagtatttttgtgtgtgtgattggctatttcacttagcataatgtcctcaaggtttatccatgatgccgccatgtcagaattttcttcctttttaaggcctattaatgttccactatatagagataaacaacggatatatataygtatatatatgtgtatatatatgtgtatatatgtatatatatgtgtatatatatgtatatatatgtgtgtatatatatatatgtgctgtatacacacacacacacgcacatatatacactatattttaaaaattcaggccaggtgctgtggctcacgcctgtaatcccagcactttgggaggccaaggtgggtggatcacgaagtcaggagttcgagaccagcctgaccaaagtggtgaaaccctgtctctactaaaaatacaaaaattagcctggcatggtggtgcatgcctgtaatcccagctactctggaggatgaggcaggagaatct

SEQ ID NO: 577624 - DNA, 566 bp, Homo sapiens
atgtttgtagccaaggtcaaagaggtcaatacagacattataaataccaataaaagatkaggtgcctgagacactgtgaatgtaccacaattagaggctttaattcatttttagtaagcaattaggaatctcctaacttttctcaggtattattttattataggcatctcaagctgtcaacagcaacctgccatctttccccgtctaagaaaatcctagctatcattttcatccttttatttttttgccagaagattttgttttttatgttaactgtacaagtagaataacaaaaaaccttaggctaaaattaatattttaccatgcttatattcatatcacagaggccaaagccctgtgagacaatttccagtaagcagtaattctgatttcattgttcatagcaagtagggaaggcattattccatgaaatgtgattaaatttcatgttgggaagaaagtttgagtgtgaaactatctagacttttttgtgcttaagtagaggacagaaatttgaaaatgataacactgcgaagttattcatttcacacattacccttaaaata

SEQ ID NO: 577625 - DNA, 663 bp, Homo sapiens
aattctctcagcaagaaaagccttggaccccttggcttcactgctgaattttaccaaacatttaaggaagaactaataccaatattactcaaactactctaaaaaacagaggatgagggaatacttccaaactaattctacatggtctatattactctgataccaaaatgagacaaagacacattgagaaaagaaaactataggtcattatctctgataaatattgactcaaaaattctcaagaaaatgctggaaaattgaatgcaacaatacattaaaaagattatacatcatgaccatgtgrgatttaccccagggatgcaagtggttcaacatatgcaaatctgtcaatgtgacacattatatcaaaggaatgaagggaaaaaaccacatgatcatttcaattgaagctaaaaaaacattttataaaattcaacattttttcatgagaaaaattctcaaaaaattatgtatatgaggaacatatctcaacataataaaagccacatatgacagaccaatagctagtattacactgaatggggaaaaatggaaagtcttttttccaagatcaagaacacaataaggatttccactttcaatactgttattcaacatagcactgtaagtcctagctggagcaataagacaggaggaaaaaaa

SEQ ID NO: 577626 - DNA, 663 bp, Homo sapiens
aattctctcagcaagaaaagccttggaccccttggcttcactgctgaattttaccaaacatttaaggaagaactaataccaatattactcaaactactctaaaaaacagaggatgagggaatacttccaaactaattctacatggtctatattactctgataccaaaatgagacaaagacacattgagaaaagaaaactataggtcattatctctgataaatattgactcaaaaattctcaagaaaatgctggaaaattgaatgcaacaatacattaaaaagattatacatcatgaccatgtgggatttaycccagggatgcaagtggttcaacatatgcaaatctgtcaatgtgacacattatatcaaaggaatgaagggaaaaaaccacatgatcatttcaattgaagctaaaaaaacattttataaaattcaacattttttcatgagaaaaattctcaaaaaattatgtatatgaggaacatatctcaacataataaaagccacatatgacagaccaatagctagtattacactgaatggggaaaaatggaaagtcttttttccaagatcaagaacacaataaggatttccactttcaatactgttattcaacatagcactgtaagtcctagctggagcaataagacaggaggaaaaaaa

SEQ ID NO: 577627 - DNA, 483 bp, Homo sapiens
gccgaataggttgttaatagtttacaagtagtaatatttgcttttttaaaataatacttgttgctcacacagaacagaagtgtaggaaaaaagaaggtcttgtggaaaaagcaaaatgattcaatataataaaagcattggaggaaacgggtctcaaaaacacaagaccctattgagcttcaagtgtgcagcttatggaaaggagccctaactgctactaggatgctatccggagaccaatcaacttggagaaaatacaggacacgtttcctctgtgtatcaggtaggtcacaaaatactctgcttttagtttcataaagaatttccagtgaaacaacctgtattgtattattamattctctggtttctcttgtcccccaacataacacacacacacacacacacacacacacacacacacgcccttcagaacaaacaggaattgtgttacaagcctatctgggtttcaccccattaatatgc

SEQ ID NO: 577628 - DNA, 599 bp, Homo sapiens
tttgcaaatatttccccaattctgtggatttgacatgaaagtcttttaattttgaggaaatccaaactattttttcttttgctgcttctgtttttattgtcatatctaagaaggcatttcttaacccatagtaactccatgttttactctaagacttctgtaggtttagcttacaattaggatttgaattagctataggttatagaataataaccaatamgaatatagaataatataaatattggaataaagaataatgaataagaatatagaattattttgcatgtgaacatctacttgtctctgcatcattacttgaaaagactattttttcccctttgaattttcttggcatgactttcaaaaatcaattaacaataaaggtagaaggttatctttggaactcaatccaatttcatttttctatatgcctatcattatggcagaccaatctatctgtatcatagacgttttgtattaagtttagaaatcagaaaatacttcaactttgttctatttcaagattgttttgactattctgggtctctcgaattttcatatgtatttcaggatgaatttaccaatttcctttaaaaaga

SEQ ID NO: 577629 - DNA, 556 bp, Homo sapiens
ctggtcttgaactcctgacttcaggtgatccgcccacctcggcctcctgaagtgctgggattacaggcatgagccacccagcctgacctacttacaggaaaattttttagcattgactccatatatccaaaaagaacaaaaatctaaaatcaacaatctaatctttcacctcagaaagtcagataaaagaagaaaattaatttgaagtaagcgaattaaacaaataataacaattaggtgagaaatcaacaaaattataaacaaaatgaatagaaaaggaaaataatatgcaaagtgtctttggcaaaccagatttcaatggttttatgaaacaaagaacctagaaaagatgaaagagatttttcaaatccataggcacctaaggttgaaaaytgcagtaaatgtgaagatctaatgttgatataatatcacatgctttcagaggtaaactagaaaagaatttctatgagtacaaaaatgttcaaaatttagtatttaatggtttattaagacaacttatcaattttaaatatttgattgattctatgttaaagtc

SEQ ID NO: 577630 - DNA, 570 bp, Homo sapiens
ctggtttttaaaaaccattagaacttttggttttacaagttacaattaattagtattcctttaaaaagaaactattttcaaaagacaatgtattttacttgttatattaacttatagtgcatttaatttcaagcagagagataattaccaaagacagcaaataaaaarttttttaaatattcaattcattaaataattgctacagatcaatcttctaaaagccttaaactagacactgaggggaaaagaacattgaccaaagaattagcttcactcttcaggagctcatcttatgcaacagtatccaccactgttacacaatttactgatattcagttattctatcaacacggcagaataaattcaattattaaaatctacattcaagccaggggggggggctcacaactgtaattccagcaatttgagaggccgaggcaggcagatcacttgaggtcaggagtttgagaccagcctggccaacattgcaaaacccatctctactaaaaatacaaaaattagccgggtgtggtggcatgtgcctgtaatcccagccactcaagaggctga

SEQ ID NO: 577631 - DNA, 530 bp, Homo sapiens
gagccaattaaactcaaagtaagaagaagaaaataaataataaaacatggagaagaaaccaatgcaattgaaaataagaaatcaatagggaaaagtcaaggaaaccaaaggctgtttctttgaaaagataaattgaatcaataagcctctagctaggctaactaaaaagaagagaggatgtaaattactaatattagaaattaaaggtgggccattactatagatctcatggacatttaaaagataacgaatattatgaacaagtctatgtccamaactttgataacctagatgaaattaaccaattccttgaaagaaaataaaatctatctaataaaagcaaaaatagagaatttgaataggtctatatgtatttaataaattaaagcaattattaataatctttccaaaacagaaagcatcaggtccgtaagtgttcgctggtaattccaccaaacttttaaagaataaattataccaattctctacaattactttcaaaagatagaagctgaggaaaaactttctac

SEQ ID NO: 577632 - DNA, 380 bp, Homo sapiens
tattatattagaaattgaagaggacacaaaaatgtaaagatattccatgtttttagattgaaagaatcaaattgttaaaatatccatactcaaagcaatctacagatctaatgcaatccgtttcaaagtaccaataacattcttcacagaaatagaaaaaataatcttaaagtgtatatggaaccacaaaatacccagaatagccaaagcaaccctgagcaaaaagaacaaagttgatgggcactcaaagacatagagtggtataatgcacactggagacttaraaggagggagggtggcggggggaatgagagatagaaaactacatattgaatacgatgtacactactctggtgatgggagaactaaaatatcagact

SEQ ID NO: 577633 - DNA, 634 bp, Homo sapiens
cctggcagacttgttaaactgaaggttgctgagccccattctcaaaatttcagactcaataagaatgagtggagcctaaacatttccattctaacaaatgctcaggtggaaatcactttgaaaagcaaagctttagggctggcatataaggaggattgcttttagaatgtcagtgatggtgaagctgtggagaatgggctggggagaaagaatgaacatggagagtatagttaagccactgcaggagctcaggtaggtctgaaacagtggtggtggagatggagagagagtgctgcagttgaggcatgtctgaagtctatgaacataaagtagtaaggcatgagttgggggcataaagatagagaggctcccaagctcctgccagaggtactgagtgaagagtagactcattaaycaatgcagggacaacagagaatcaactcaggtgcccatcaacggtagactggttaaagaaaatatggtcacaaataccatggaatactaggtagccataaaaaagaacagaattatgtcctatgaagcaacatggatgtagctggaggccattatgctaagtgaactaacctagaaacagaaaaccaaatactacatgttcccacttgtaagtgggaac

SEQ ID NO: 577634 - DNA, 453 bp, Homo sapiens
cctgtatctgcctcttactccctgagtcgcttagagaaaataacttaatttctctgatttcagattctcctctaaaaaaatagaaataaaagtatctaaccttcagggatactcaaactaggcaagcagcaaattccctgtacctttctgctttgctatgtgaagtataacaaataattaaacagatctaatgtgtgygtttatatatctgatgttcatagtttataaagaaagtgacattatttaaaataaatgcttgtcactaaaccaacttcatacttcccgtgcctattcttgcttcttataaaaaattcacttgacactagctattttttaagtacatggattagagtatttgacaaaatgtaaggatatccacaatagaaatatttcccagtaatttactaattatatttaaaactgaattacatccatttagtgcttttcctgtca

SEQ ID NO: 577635 - DNA, 453 bp, Homo sapiens
cctgtatctgcctcttactccctgagtcgcttagagaaaataacttaatttctctgatttcagattctcctctaaaaaaatagaaataaaagtatctaaccttcagggatactcaaactaggcaagcagcaaattccctgtacctttctgctttgctatgtgaagtataacaaataattaaacagatctaatgtgtgcgtttatatatctgatgttcatagtttayaaagaaagtgacattatttaaaataaatgcttgtcactaaaccaacttcatacttcccgtgcctattcttgcttcttataaaaaattcacttgacactagctattttttaagtacatggattagagtatttgacaaaatgtaaggatatccacaatagaaatatttcccagtaatttactaattatatttaaaactgaattacatccatttagtgcttttcctgtca

SEQ ID NO: 577636 - DNA, 492 bp, Homo sapiens
tatataatatattcatatatataatggatatataatatattcatatatataatggacatataatatattcayacatatatatgtgtgtgtgtgtgtatatatatgtgtatatatatatatgtatatatatatgtgtatatatatatatatgtatatatatatgactttctttatccacttgttgactgatgggcatttgggctggtttcatatttttgcaattacaaattgtattgcgataaacgtgtatccaagtatctttttttgtataatgacttttttttcctctgggtcaatacccaggagtaggattgctggatcaaatcagaggtgtccttttagttcttaaaggaatctccacactattttccatagtggttgtactagtttacatttccaccaacagtgtaaaagtattccattttcactacatctatgccaatatctattattttttgatttcttgattatgaccattcttgcaggagtaaa

SEQ ID NO: 577637 - DNA, 492 bp, Homo sapiens
tatataatatattcatatatataatggatatataatatattcatatatataatggacatataatatattcacayatatatatgtgtgtgtgtgtgtatatatatgtgtatatatatatatgtatatatatatgtgtatatatatatatatgtatatatatatgactttctttatccacttgttgactgatgggcatttgggctggtttcatatttttgcaattacaaattgtattgcgataaacgtgtatccaagtatctttttttgtataatgacttttttttcctctgggtcaatacccaggagtaggattgctggatcaaatcagaggtgtccttttagttcttaaaggaatctccacactattttccatagtggttgtactagtttacatttccaccaacagtgtaaaagtattccattttcactacatctatgccaatatctattattttttgatttcttgattatgaccattcttgcaggagtaaa

SEQ ID NO: 577638 - DNA, 475 bp, Homo sapiens
attatttaacatcttataatacatatagtatgtctggttttatttatatttaaaggaagcataaacttggaaaacataaaacagaagtgataaaagtagccaaatrtcacagttactgtatcttgtgagagagcagggtttctgataaaataagcaataagcacaaatggaagcttttcttcttaatcattacatatcttcaggaaatcatgttcataaatgttatcaagaagaacatgttatggataatttatactctaaatagaagattcattgtaggcatttttaaaaatttactcatgacttcaaaggctaaatagtatttttgatttttatgaaaattttgtttttgaaatctaagtgctaatagtggaacatagccttgctaataaatatattttttaaaaatcaagacctggcacaacatctccattcctcctattagtttataatatcaaaaatgctctttaaatat

SEQ ID NO: 577639 - DNA, 572 bp, Homo sapiens
ttgctttgtcacccaggctggagttcggtggcacaatcttggctcactrcaacttctgcctcccaggttcaaagacgaagtgtttctcgtgcctcagcctccagagtagctgggattacaggcacccgccatcatgcccagctattttttttatttttatttttatttttcgtagagagaggatttcaccatgttggccagactggtctgaaactcccaacctcaagtgattcacccacctaggactcccgaggtgctgtgctgggatcacaggcatgagccactgtacctggccaaaatgtggaatatttcttaatagaaatattaagaaaataaacaatagtttcagcacgattagaatattcagaatataatataaacttaatagtttaattcagaatatattataaacttaatagtttcagaacttcagctttctgagtgataagggtcaccatgattcaacaccttgaatatctgtcttccaaaaaaatgttcaaatctaatataccttttcttcaaataaacaaaaatgccctctctcttttccaatgctaatgtttatcagttat

SEQ ID NO: 577640 - DNA, 475 bp, Homo sapiens
gccccacaacagggaaatggtgcatagcgaccagacacaagatgtatggtttacctctgagtaatagagaagtgtccacgtcatgtttatgtagagaacaagtatggcamggaggacagtccctcgtcttctaccaatgccgtacgttttccatctaaatacaaagaacatgtcctgaaggccacacacccacagataattatgataatacagaatatatggcggattgggatgggagagggtcagagaggactttactcttatctgtaatgttttaatattttataacaataatgtgttcatgtattctttgagtaattaaaagttaatggctcatgcctataatcccagcactttgggaggccaaggtgggcagatcacttgaggtcaggagtttgagatcagcctgatcaacacggtgaaaccccgtctctactaaaaatacaaaaattagccgggcatgcctgtaatccca

SEQ ID NO: 577641 - DNA, 614 bp, Homo sapiens
atagtacacagccataaaaaggaatgagatcatgtcatttgcagggacatggatgaagctggaagccatcatcctcagcaaactaacacaggaacagaacaccaaataccgcatgttctcactcataagsgggagttgaacaatgagaacacaaggacacagggaggggaacaacacacaacagggcctgttgggggtggagggtgtgtggggagggaacctagaggatgggtcaataggtgcagcaaaccaccatggcacacgtatacctatgtaacaaacctgcacgttctgcgcatgtatcccagaacttaaaataaaaaattaagtatcaatccaaaaaacacaaaaacaaaaaccaaaaaaaagtttcttcactctttccaaaaagaggtaaaagataaacccaagtgaatggagaatttggtatatgataaatatgctatccttaaatcactggggagaagatggagttttgatatgaactgttgggataagtggatagtcacatgaagaaaggtaaaatcagatccattccttagactttaaaccaggataaattccaaatggatcaactatttaactatgaaaactaaaattaaggactagaaaaa

SEQ ID NO: 577642 - DNA, 393 bp, Homo sapiens
aggggcttgatttccttgtaggttggtaagctatccatggtcagaaacagaacacggacccaatgccagtcagctgcatgtatgtttgggtgaatatagtaattagagaaaagtatgactaacatccaaatctaggaaggatgcctgagactagtaagaatcctgttatgttgctgtgaaatgattccaaacacttacatagtttgctatgtgaatgatttatgttctgctataagaagaagctggagtgttttctccctcmtcccctagagaatgtgacagtggtacccctccccttgcgaatgtcacatcacaccttatcagaactcatatgtgagttgctgacctcaactactggacttcaaaatacatataaaactaagagtttgacag

SEQ ID NO: 577643 - DNA, 612 bp, Homo sapiens
ttgttgaaaagtacatcttaagctgggcattccatcaataatagactattttctggagatgttaaaaatcactgttatgatagatctgtcatgataatatttagacrctgtgactcttcagaacaacagtgaagaaagaagatgtgatgtgatgattacagcagtaatgactctgagcatcagatttagtggtatttaagttatgctgttactttgcaagtgatacttaaatatggttaaaatacccttggcagtaaggatgttagattaaatgacttcccacctgttccagtctttctgatttttctttcacaaatgttacttttttttttttttttgagtcagggtcttgctctgttggccaggcttgactgctgtggcatgatcatgactccctgcagcctcaatctcctgggcccaagggaacctcctgcttcagcttcctgagtagctaagactataggtgtgtactaccacatctagctaatttttttatttttattttttattttgtagatgtgaggttttgctgtgttgtccaggctggtcttaagcttcctcctggcctcaagcagttatcctgccttgacatcccaaaatgctgagattaca

SEQ ID NO: 577644 - DNA, 612 bp, Homo sapiens
ttgttgaaaagtacatcttaagctgggcattccatcaataatagactattttctggagatgttaaaaatcactgttatgatagatctgtcatgataatatttagacactgtgactcttcagaacaacagtgaagaaagaagatgtgatgtgatgattacagcagtaatgactctgagcatcagatttagtggtatttaagttatgctgttactttgcaagtgatacttaaatatggttaaaatacccttggcagtaaggatgttagattaaatgacttcccacctgttccagtctttctgatttttctttcacaaatgttacttttttttttttttttgagtcagggtcttgctctgttggccaggcttgactgctgtggcatgatcatgactccctgcagcctcaatctcctgggcccaagggaacctcctgcttcagcttcctgagtagctaagactataggtgtgtactaccacatctagctaatttttttatttttatkttttattttgtagatgtgaggttttgctgtgttgtccaggctggtcttaagcttcctcctggcctcaagcagttatcctgccttgacatcccaaaatgctgagattaca

SEQ ID NO: 577645 - DNA, 595 bp, Homo sapiens
atctatctttctctctgtctttctcacacacacacacacacacacacatacacacacacaaataaagggaaatatattcatttataatctcaatgttgttattgttttataatkatatcttaatcttaagatgaattacttagactcacataaaattggcacatctagctgtagtaaggaaccactgttcatttagtatggagccagcacagacatgagagaaagtggtacagcaactatccaagggaattcaccaatttctgactcccagcagttgggacagagggtgacattgccagggcataatccacactctgcagaaggaatatacatatggaatagagtgagattagtgttactactcttccatttctaaaatctaattttaggtttttaggaataagcttggaaattcagtatcttcaatctgagaaaatccttggaaatatacattattcatcctacaagtttagatatactacagaggttatctgcatgcttttccttcaaataataatttaatgtatatataaatatatatcttattatttatatccaagatattatactattatccaataatgtgtgtatatat

SEQ ID NO: 577646 - DNA, 579 bp, Homo sapiens
aagatcatcaatttttagagggtaagtgtggaaataattttaaagacagaagttaccaactttgaatttcaagtgagttcttcatgttatgaagttgtgttttcattcacctataatgtagyattgtgaggacgaagtgaaaagataaaactccctagtcttgtgtatgttactgtccaggtgtgatggctcagtcttttaattccagcactttgggaggctgagacttgcagatcactttaggtcaggggtttgagacaaacctggccaacactatgaaaccctatttctacctgaaataaaaaaaattatctgggcttgacggcccatgcttgtagtatgttatagttaattgggaggctcaggcaggacaattttttgaccctgtgggcctaaggctgaagtgagctgatattgcaccttgcactgtagcctgagtgacagagcaagactccaaatcaaaatcaacaaatatataaataatacatagcttatccttcatttcaagcacttttttttttttttttttttttttttttttttttagacacagggtctcactctgttgtccagcctgga

SEQ ID NO: 577647 - DNA, 487 bp, Homo sapiens
atgttttgagattttctgtaatacccatgcaatatggaactggcttgacaatctgtgtgatagccagcctgtggccatgacttctcagggacacaaattgtttctgtttgcctccttgttctgctcagctccaagagaactttgaccaaagttccttgagcttggaaataggaatgggtttgcttctstttcacccttactgtgaagatacagtccggtggaatccagatccactgggagagagtcggctattaaactcttttcatgagtagtccctaggccttgactggagtctttcttgagatatgaggctaatagttccttcttggtccaccactttttgatataattaatgcttcttctattgggaatttttaattgtttgggaagtgacatggtttggtgtgtctccattcaaatctcaacttcaattgtatctcccagaattcccacatgttgcaggtaggacctagggggaggtaattga

SEQ ID NO: 577648 - DNA, 487 bp, Homo sapiens
atgttttgagattttctgtaatacccatgcaatatggaactggcttgacaatctgtgtgatagccagcctgtggccatgacttctcagggacacaaattgtttctgtttgcctccttgttctgctcagctccaagagaactttgaccaaagttccttgagcttggaaataggaatgggtttgcttctctttcacccttactgtgaagatacagtccggtggaatccagatccactgggagagagtcggctattaaactcttttcatgagtagtccctaggccttgactggagtctttcttgagatatgaggctaatagttccttcttggtccaccactttttgatataattaatgcttcttctattgggaatttttaattgtttgggaagtgacatggtttggtgtgtctccattcaaatctcarcttcaattgtatctcccagaattcccacatgttgcaggtaggacctagggggaggtaattga

SEQ ID NO: 577649 - DNA, 487 bp, Homo sapiens
atgttttgagattttctgtaatacccatgcaatatggaactggcttgacaatctgtgtgatagccagcctgtggccatgacttctcagggacacaaattgtttctgtttgcctccttgttctgctcagctccaagagaactttgaccaaagttccttgagcttggaaataggaatgggtttgcttctctttcacccttactgtgaagatacagtccggtggaatccagatccactgggagagagtcggctattaaactcttttcatgagtagtccctaggccttgactggagtctttcttgagatatgaggctaatagttccttcttggtccaccactttttgatataattaatgcttcttctattgggaatttttaattgtttgggaagtgacatggtttggtgtgtctccattcaaatctcaacttcaattgtatctcccagaattcccacatgttgcrggtaggacctagggggaggtaattga

SEQ ID NO: 577650 - DNA, 487 bp, Homo sapiens
atgttttgagattttctgtaatacccatgcaatatggaactggcttgacaatctgtgtgatagccagcctgtggccatgacttctcagggacacaaattgtttctgtttgcctccttgttctgctcagctccaagagaactttgaccaaagttccttgagcttggaaataggaatgggtttgcttctctttcacccttactgtgaagatacagtccggtggaatccagatccactgggagagagtcggctattaaactcttttcatgagtagtccctaggccttgactggagtctttcttgagatatgaggctaatagttccttcttggtccaccactttttgatataattaatgcttcttctattgggaatttttaattgtttgggaagtgacatggtttggtgtgtctccattcaaatctcaacttcaattgtatctcccagaattcccacatgttgcaggtrggacctagggggaggtaattga

SEQ ID NO: 577651 - DNA, 561 bp, Homo sapiens
ctctatgtgcctggattccttaatggctgcatggtaaagagccttccagccratctgaaaaccctttggactgtatatatagtataaatgaataataaatacatttatttgtattttagcccatgtacaattctgagtccatgtgttggcttatagtaatcacctggcttaaaatgctcttgcctttctttacactgtcataccactttgttgcctctaccataaagttggtaagtacgacataaaatcttctattgttatttgacttttatatttctctgctcctcagttaaagtatctttggactagagactatctctagtgccctgattgtattcctttggcactgaccattcatgcttgctccaacccaacatcatgttagtctactagagtggagacatcaggttaatctgatatggtgagtaggaagtgacaagcagtgtgaattcctaggtagagcaccagagtgtgggagataaaccttacaacattttaggaacctggtcattggtaagctagtctacggcaggtcaggacatcctcttcaagaataagaat

SEQ ID NO: 577652 - DNA, 442 bp, Homo sapiens
caattattattaaattttaagtgactccactcaatggtttattgccaaaaagatgttaaacctgatccaactttagtcggtcttcttcctygtgagatgcagcaaagggaaggacataaagaattctgcctgaaggtcaacatcagaaccctttacatacattatcttagcatgtgtgtaatgggtactattaatagccccattttatagatgagtaaactgagtttcaaagagttcaagaaatttgcccaattcataaagttagtaaactctggtcattctaataaaagtctgtcttactcaagctttcaaaaatcagacctcgcaacagttccagtgccaccaattattcattgtgtcccctccagcaaaccagatactgaacaaaaacttgttgaatggataaattccaagaagaaactatctggcttctcagactgag

SEQ ID NO: 577653 - DNA, 442 bp, Homo sapiens
caattattattaaattttaagtgactccactcaatggtttattgccaaaaagatgttaaacctgatccaactttagtcggtcttcttccttgtgagatgcagcaaagggaaggacataaagaattctgcctgaaggtcaacatcagaaccctttacatacattatcttagcatgtgtgtartgggtactattaatagccccattttatagatgagtaaactgagtttcaaagagttcaagaaatttgcccaattcataaagttagtaaactctggtcattctaataaaagtctgtcttactcaagctttcaaaaatcagacctcgcaacagttccagtgccaccaattattcattgtgtcccctccagcaaaccagatactgaacaaaaacttgttgaatggataaattccaagaagaaactatctggcttctcagactgag

SEQ ID NO: 577654 - DNA, 442 bp, Homo sapiens
caattattattaaattttaagtgactccactcaatggtttattgccaaaaagatgttaaacctgatccaactttagtcggtcttcttccttgtgagatgcagcaaagggaaggacataaagaattctgcctgaaggtcaacatcagaaccctttacatacattatcttagcatgtgtgtaatgggtactattaatagccccattttatagatgagtaaactgagtttcaaagagttcaagaaatttgcccaattcataaagttagtaaactctggtcattctaataaaagtctgtcttaytcaagctttcaaaaatcagacctcgcaacagttccagtgccaccaattattcattgtgtcccctccagcaaaccagatactgaacaaaaacttgttgaatggataaattccaagaagaaactatctggcttctcagactgag

SEQ ID NO: 577655 - DNA, 442 bp, Homo sapiens
caattattattaaattttaagtgactccactcaatggtttattgccaaaaagatgttaaacctgatccaactttagtcggtcttcttccttgtgagatgcagcaaagggaaggacataaagaattctgcctgaaggtcaacatcagaaccctttacatacattatcttagcatgtgtgtaatgggtactattaatagccccattttatagatgagtaaactgagtttcaaagagttcaagaaatttgcccaattcataaagttagtaaactctggtcattctaataaaagtctgtcttactcaagctttcaaaaatcagacctcgcaacagttccagtgccaccaattattcattktgtcccctccagcaaaccagatactgaacaaaaacttgttgaatggataaattccaagaagaaactatctggcttctcagactgag

SEQ ID NO: 577656 - DNA, 345 bp, Homo sapiens
ttaggtggggaaacagccaaaccacatcaaacactaaagtcacatcctcaaggaggaaaagcgtttttttaagtcaaatcgaaaataaagtcaaaaataattagaataaatagtctacccaaatgagaagaaaccagaaaaataattctgacaatatgacaaaatggggttctataacacccccaaaagatcaaactagttttccagcaatggatccaaacaaagatgaaatctctgaaataccagagaaagaattcaaaaggttgattattaagctactcaaggagacacaaaagaatgktgaaaaacaacataaattttaaatgtaattcaggaatgaatgaa

SEQ ID NO: 577657 - DNA, 562 bp, Homo sapiens
ataaaacaattactactagaccttagaaaagagatagacagcaacagaacaacagtgggggattttaatactccactgacatcaatagaaagatcactggggcagaaagtcaacaaagaaacaccagacctaaactacactctaaaaacaaatggacctaacagatatttacagaatattctacccaagaaattcagaatatacattmtcctaatcagcacatggaaccctcttcaagatagtccacacgacaggccataaaaccagtctcaataattgtttaaatatcaaaattatatcaagcatcttctcaggctacagtggattaaaactagaaatcaattccaaaaggaaacctcaaaactacacaaatatggggaaattaaacaatctgctcctgaatgatttctagattaacaataaaattaggatgcaaatttaatttttttccaaatgaatgataatagtgacacaagttatcaaaatatctgggatatagtaaaagaagtactaagatgaacatttatagtgttcaatgcctacatcaaaaattctgaaagat

SEQ ID NO: 577658 - DNA, 541 bp, Homo sapiens
caatgagaacacatggacacagggagggaaagatcacacactgggacctgttggggggtggggctaggggagggatagcattagtagaaaaacctaatgtaggtgacgggttgatgagtgcagcgaaccaccatggcatgtgtgtacctatgtaacaaacctgcatgttcttcacatgtatcccagaacttaaagtataagaaataaaagattttttttctcataagggaagataaattttatagctaaaataaaatgcaaaatgtgcagctcaggcaggtgaaatgtctggttggaccacagaacttactaattactcttatcttttaggcatctgagttttctactgcttcttgttgtagacactgctcctctcrccacttttattgcaggggaacagtgtttcactctggcccaaaaaaggataaatatcccttcctttgattctttttgcatgactaagaggagctagaattttcctattgctttactaaattgtaaaagagaataaatgaatactacataaagtatattcagttga

SEQ ID NO: 577659 - DNA, 416 bp, Homo sapiens
gccatgaaaaataaaagtcaatgctgaaggtatttwattatatataacctttagttaataagaaaccaatgtttgttttgctaaaacataaagtccaaatttcgtgattgttttgcttgtttgtttaatagcaaacattgaaagacaaaatacatttttaggatcaaaacatgtctacccgctctatatactaggtcatgcacaaattgtttttctaaaggtatcaattatcccttcttaaaaacttacgtgtgagagttaatcttaaaagtcaatgttaaaagcgttttttttttttaattctatattgctttttcctgtagggttactgataactaatatcaacggagaatatcgttatattaggctggtgcaaaagtaattgcagtaaaaaaaaaaaaaaaaaaaggtaaaaa

SEQ ID NO: 577660 - DNA, 416 bp, Homo sapiens
gccatgaaaaataaaagtcaatgctgaaggtattttattatatataacctttagttaataagaaaccaatgtttgttttrctaaaacataaagtccaaatttcgtgattgttttgcttgtttgtttaatagcaaacattgaaagacaaaatacatttttaggatcaaaacatgtctacccgctctatatactaggtcatgcacaaattgtttttctaaaggtatcaattatcccttcttaaaaacttacgtgtgagagttaatcttaaaagtcaatgttaaaagcgttttttttttttaattctatattgctttttcctgtagggttactgataactaatatcaacggagaatatcgttatattaggctggtgcaaaagtaattgcagtaaaaaaaaaaaaaaaaaaaggtaaaaa

SEQ ID NO: 577661 - DNA, 569 bp, Homo sapiens
tgtgtaaagcagagagagagagagagcactcctaaaatattattaaatattaaataaatattatttaatatttaaaaatattataaaaactagggtgaagtaggaggctggcattgacagacctgcctatctatagaagayaaaaaagcaaataaaatttaggataatgtaagaaggaacattctagggaatagtttgtgtatagtagatttgattatctttcttgcgttataagaagtttagacaggcttcaggcttagacacagataatgtatatttctgttcagtacatacacatttgctatgatctgaatgttgtgtccacggcaaatttatatgttgaaaacctactcccagaaattcactcagaagcaacacatggtaagatggtaaaagacttaactggctggctgtgctcactctcccaccttaacctcacttttctctgcctatgatgaacaacagatctcagggaaggtcaaattccatgctgtgatttgtaattcatctaataacaaaacaggagagtaaacaattacatttattttattaattttaaatttggatgc

SEQ ID NO: 577662 - DNA, 585 bp, Homo sapiens
agttttagtccaataccaacactcagcctccgccaacacattggctttgtacccaactggaacttaatttcacgttctaactaaatgaagagggtttgcttttggttcagtaatgatctgggttttggtttttgttgttttttcctgacaggtttaaggaagggtacctaggatcacacactacagagattcctagcccagcgtgcacagaactatgtgaccctgaattatatggaacgtccataattactacggggattgcagtctttgatgtcagaggcagaccatgcggtgtacaaggcttctacatcttcaaattggatactactatgtgcttcctgaatgtggctaaggatacccattcaggctaaaaggagcaatgagcctatctgcagggaatcactgaagcctgccccgcacctgtgccccacaggcaagccaactcaaccacttccttaggtacgatgagagggaacagaaaccttacaacagcggttctcatctatatgcactgtgtatatgagaaccattcaragagcttgttaaaaaaatactgattgccaaggcttgccttgagaaattctg

SEQ ID NO: 577663 - DNA, 493 bp, Homo sapiens
taaatgtcaaaaaagggaaggaaattattacattaaatctaaaaatgtcctccaagctgttgtgattactcagatgaaacagctctaaaatataacactttacttaaaagtagttaattttatttataaaattttaatctccaacgtacaggtataaaatgatggatcaagagctagatatggttaattgacactgccttttactttactcacactgtagagtatttaaaaacaaaatggacttagctactttcataaaaacctggctcttctatataaagatgtagtcttatagcttgccttgacacttcataaaacttgaccctgtcagcacacccacacttttcccagarcctagtagctcttgtgcttttggataagaaaccaagaggccaggttggtacattccccattagtccctgttgtcatggcagcacttaggtcaagttgcaggggctgtccacatcagccttccacttatatgtctcccata

SEQ ID NO: 577664 - DNA, 682 bp, Homo sapiens
attgattgttctattttgtgggatcatcttttgacaaatgatattcatgtaaactgttttaaaattcagtccatctagataaaaatagagaatttatatatggctattatctcacatttktcaaacattggccccaaagtttaataattctgcagcatttctgggtggccttgtatgttaagctctcattaagtaagctagaccccacatcttgctgattattgtggtaatcaaaaacaacaacaacaacaacaaacaaacaaacaaaaactgagggcaaggagatctcaaatagctcattaagaaatgtttgatacaataggcaaaattaataaataagaaacaatatatttctgggtgaattttaagggaaataaaaagcatctcatataaacctgggaagatgcaattagtttgcaaaatcaagacagcaacaaaagttaaatgatatctcacagactgataagagtaaggacaaagtgaatatttctgacactggagtaaggaaaggtttttatataacaaatacaaaagcactatatattttaaaaagagagataaaagtgtctacactaaacttaagaggacttctagtaaaaaaaaaatcattaaaaatgaaagcaaaccctgaacttgggaaagacatataaaacttatttttctaagaaagattaatatataa

SEQ ID NO: 577665 - DNA, 538 bp, Homo sapiens
agtctgttctcacgctgctaataaagacatatctgaggctgggagatttataaggaaaagaggtttaattgactcacctccacatgactggggaggcctcacaatcatagtggaagatgaaggggaagaaagacatgtcttacatggaggcaggcaagagaacttgtgcaggaaaactcctatttataaaaccatcagccctcatgagacttattcactaccatgagaacagtatggggaaaccgaccccatgattcagatatctcccctggcctcacccttgacatgtggggattattataayttatggtgagatttgggtggggacacagccaaaccatattaagcagcattgctgatctctacctactacataccaggaacagcagcccctcaagttatgaaaacccaaagcatccagacattgccaaatgacctctgagaggctaaattacccttaattcaaaccaagatatatctgatagatatatttaaattatattactttttattaaagacattgatttaagatccatca

SEQ ID NO: 577666 - DNA, 592 bp, Homo sapiens
attttatggattttatctcttggaaaattaaaactcaattgggagaaaaaggcacacygagttaactaatgtggtcccgcctctcagtgttgaacacataaatataaaggacagtacaatgttcttcttaaatccttatatacctacatcaattctgaaaatgaattctggccataaacaactcacgaaacaacagcatcaataaatatgaaagagaaatgccctcaacttgtaaaacattctgcccatgtagagggaagttgattccaaattttgagaattcttcaaagtcctttactcattttcaaaagaaaactcctattctgaaaatgaatgtgtaccatctgctaaatttttttttgtaattgatgagcatcatctatttgaaagtctttgcccacaagaagttcagctgtagaatttttagttttcaaagctgtagaatttttcagttttaccagctgaggggacccataaagtgctacatgttgagaattattattgtgggtggtattaaagtgtaactaagtaaataataatttcggcctaaccaacaatgatatacttaactcctattttgtagagacggcag

SEQ ID NO: 577667 - DNA, 555 bp, Homo sapiens
tgcacccagctaatttttttttgattgagcatgacatattttattttccaaagaactcctaacatatacccacacctacgtatccatgaaatgtcagtattcctccattgggacttctttgggtttttttccctccttattcatgtaaaagaattacagaattaccatgagacccagcaattctacttctaaggctacttactaccaagaagtggcagcaggaacttgaacagatactttattttttactttatattttatttatataaaatgtaacataaaattactcttttcaccatttttgagtgtacaattcagtagtatcaaataaagtaacartgttgtacagccatcacgattacccatcttcagaaaatgtttaccatcccaaacagaaattctactaataagcaacatctcactgccccagtctccagcacatgataatctctaatctgctttttaaaatctatgaatttgcctattttaggttcctcatataagtgaaagtatacaacatttgcccttttgcgtttggcttatttcacttagcat

SEQ ID NO: 577668 - DNA, 555 bp, Homo sapiens
tgcacccagctaatttttttttgattgagcatgacatattttattttccaaagaactcctaacatatacccacacctacgtatccatgaaatgtcagtattcctccattgggacttctttgggtttttttccctccttattcatgtaaaagaattacagaattaccatgagacccagcaattctacttctaaggctacttactaccaagaagtggcagcaggaacttgaacagatactttattttttactttatattttatttatataaaatgtaacataaaattactcttttcaccatttttgagtgtacaattcagtagtatcaaataaagtaacagtgttgtacagccatcacgattacccatcttcagaaaatgtttaccatcccaaacagaaattctactaataagcaacatctcactgccccagtctccagcacatgataatctctaatctgctttttaaaatctatgaatttgcctattttaggttcctcatataagtgaaartatacaacatttgcccttttgcgtttggcttatttcacttagcat

SEQ ID NO: 577669 - DNA, 171 bp, Homo sapiens
cagggtaagcattcaatgcctcatccttaagaacactcagagcttccttttaatactacttccccttaaggtccaactgcaattytaagctttgcagccggtatcatgacaaacgcattcataaaagcatccaccccctcttgtaattctgtgtgttgtacgcatatatat

SEQ ID NO: 577670 - DNA, 454 bp, Homo sapiens
cttacaataaatgaattaatagtaattacaaattacagtgagacacatagtagtttgccatccctatctgaaatatccatagagacagaaagcagtggttactaatggacagcgagatggaaaagtagggagtgattacgtaaagttcagagtgttctgggatgakgaaaatattttgaaactggaaggaggtggtgattccacagaattctgaacacagtaattgccactgaattgtatactttaaaatagtcagttgtatgttttgtgaattttaccttaattgaaaaaatattgtcaacgcaaaaatatatttttatagccatatttaaaatataaactcatgggtgaagattaggtgtaaattgccataggtttcagaaggttgatttcagaagtctgtgagatgcatgtctgagttcattttagaacatggaaaaatgtttgcttttaa

SEQ ID NO: 577671 - DNA, 553 bp, Homo sapiens
ctggttgcatctgcttcctcatcttatttggggcctagctccagcaagcaccacactttttttgtttgtttgtttgtttcttttggttttttgctggctctaatgcatcactggcagaggaaatttctataggagtgttgggaaagaagctggcaagaagatgaragctttattgaagagagatttacttcaagagcagaattattaaaaagagattaaatttttttatttctatagctttaggggtacaagtggtttttggtgacatggatgaattgtgtagtagtgaaacctgagcttttagtgtacctgtcccctatatagtgtatattgtacccaataggtgattttttttatctctcactcgcatctcactctccccaattctgagtttccaatgtccattatacactccgttttatacccatggcttagctcccacttatgagtaagaacatacaatatttggttttccattcctgagttacttcatgtagggtaatggcctccagttccatcgaagttgctgcaaaagagatgatttccttatatt

SEQ ID NO: 577672 - DNA, 551 bp, Homo sapiens
ggctggtgatagggagccattgaaggttttagagcagggagagacggcatcagggtggaggtttgagaagcagcatctgattgtgatgggggaaaggtgaggcctgaggcaggggcctagcgagggggctgaagcagctgtctttgcaaaggactttgaggccagagggactgcccagattggggtcacactccaggcaggccacactgttgtcaggagatgctggggctgcctgccaggcaaggcctggaaagccctaactgtgcaccactggcccctcagctgcagctcctggggaccattaacctggccacgcaaactcttgagggggcagctggactcagtgggccagagtttggcctcgccatggaaggtcaagagcgaggtgggagtcagggaccctctcacccagaaacacaaaccccattatyctcctctgctcctatttgcaccccctatcctttatgaacagagctctagaccaaaagctgggagacctgggatcaagtccagccccttcctgaccaactgggccccgggtgcatcaccca

SEQ ID NO: 577673 - DNA, 633 bp, Homo sapiens
agacattatttgaagattcatttctggagccagtacaaatcaggcataatcccattgccgcacacttactcaagtgccgcttccagggtcacaatttttcaaaaatgcatttatgcctaatgctcatggaaggtaattgaggaagcaaaaagraagagggaaaggtggacagggaaatgagaaatgacaaaaaggatgagggaaaaagaggaaaagacagagatgaaggtagaagaagatgagatgagataaaggcagagtgaaggcagatgataagaaagggtgatatggtttggctgtgtccccgcccaaatctcatcttgaatcaaagggacctggtgggaggtaattgaatcacgggggcagttaccctcatgctgttctcctgatagtgagtgagttctcatgagatgtgatggtttcataagggtttttttgcccttttgcttggcacttctccttgctattgccatgtgaagaaggacatgtttgcttccccttctgccatgattgtaagtttcctgaggcctcctcagccctgcaaaactgagtcaattaaacctctttcctttgtaaattacccagcctcaggtatttcttcatagcagcatgagaacagactaatacagaggg

SEQ ID NO: 577674 - DNA, 635 bp, Homo sapiens
ggggttttgggatatacagcagctcaacatacaggttaatacttggtaaattacatcctttccaaaaagcaagtcatgccagactgcacagagaaaaggaaagacaccatgaagagaggtcagtagtggtaagtccattaagtttgcaaaatactgtgcaaaactgagcaccaatggtccatgaccttagtagggtaaaaggatagtttcagaagtcacactgacagtgttgagtatacagatggtcaagcaaggtagagtcagaggaattattctttttagattgtctatacctgaatatgaggagcatcacatttaaaccctaagaccayttaaaccacatttagcaccaaagggcaagcaggattttgcactggcagttatttaactttcaatgcccttgtctctagtcaaattgcccttaacataatctgtcaatgaaatgattatttctcctgatagtggatggaccatttatatttagttatttaacatgacaatgcacaatactgaggcttacacagccaccttagaatgaagttagttgatttttttttttcaaaatatgactctccctgacatgttttgcctcaattggtaatgttatttggttatttacataattatggaaaagc

SEQ ID NO: 577675 - DNA, 602 bp, Homo sapiens
cacactgcaaaataattagaaaatctttctaaatgtgaagaaattggaatggcatgtatttcattctcctggaaaggcaggaccttccactttggaatcatgatgggtttcattaatgttctccacagtcctctcttttcctttcattaggaaatgaaacttgacctaaagctgacctcagtggcagcccattagatacatcctcgctattaaraatattgctttgtattgatggtccttgtttataggcatgcaaccaaattgaagctgcaagactatcttgatcctggccaatttaattttgcaaatagagttttgtgaaactctgtcttactcttttcctggcaacagcctgaatattttctgatagcccaaagccaatccaactgacttccctcactcagcttttctgcaaagcatggtataaaagctacaatggatatatgaattgttggaccaaggaaaactaattggaaatcacatctaaacgttttggtcagccatctttccatcctcctgagtttcatatatactgcaacagatgctttataaaaataacaacatactccacaagaaaagagatttttaatatcatttcatat

SEQ ID NO: 577676 - DNA, 502 bp, Homo sapiens
aacgaattctattttcacccatgttcctgggaaacatggtcaaaatgcaaaaactcatcttaaaggtcatagttaccaacttattttaccttcaggtagatcatgtggaggttcagtggtgatgcacccggggaccgggaaggcataggcactgctggctgtgaccaagggaagtggactcgtagggtagcactgcctcaggatctgaagcaccacagagatgacgggctccatgctcttgtcatccaggcagttctgagcaaagggaagattatatcagatgccaacatctgggcacagtcccctagctgtaacacagctaataacactctccaagctgtaacacagcacagtctcctagctgtgtttcagctaatgaattatacgcatggacagaccgtaaacagccttaatgtagaatgtcaaatttgaacattccaacatagaattttgtctaatgtagaawctgcacttttctgtctcttgctcatttcatacatca

SEQ ID NO: 577677 - DNA, 626 bp, Homo sapiens
tctgtttgcagatgatatatatgtagaaaaccctaaacattcagcaaaaaaccttttagtaccaatagataaattcagtaaagttgcataaaaatattagtcacacttctctacacaaaaaaacaaagtatctgaaaagaaaattaagaaagaaccccactcataatagcagcaaacagaataaaatgtttagcaataaatttaaccaaagacttaaaagacttgtatgcttattttataattacatataattacaaaatattggtgaaggaaattaaggaagatagagattaatagaaagacattttttgttcaaggattgtaagaattaatactgttaaaatgttcatactatcccagtgatctgattcaatgcaatccttgtcaaaaccccaatgacattttttacaaaaatagaaaaaaaaaattgtcctaaaactgatatggaacccaaaagactgtgaatagagaaatcaatttttaaccaacaaatgaaaagttggaggcmctacccttttaggtttcaaaatatatttcaaaactacagtaacaaaaaccccgatagtggaattccaaaaaaaaaaaaaaaaaaaaaaagaaacccaatactgataaatagaatacaa

SEQ ID NO: 577678 - DNA, 626 bp, Homo sapiens
tctgtttgcagatgatatatatgtagaaaaccctaaacattcagcaaaaaaccttttagtaccaatagataaattcagtaaagttgcataaaaatattagtcacacttctctacacaaaaaaacaaagtatctgaaaagaaaattaagaaagaaccccactcataatagcagcaaacagaataaaatgtttagcaataaatttaaccaaagacttaaaagacttgtatgcttattttataattacatataattacaaaatattggtgaaggaaattaaggaagatagagattaatagaaagacattttttgttcaaggattgtaagaattaatactgttaaaatgttcatactatcccagtgatctgattcaatgcaatccttgtcaaaaccccaatgacattttttacaaaaatagaaaaaaaaaattgtcctaaaactgatatggaacccaaaagactgtgaatagagaaatcaatttttaaccaacaaatgaaaagttggaggccctacmcttttaggtttcaaaatatatttcaaaactacagtaacaaaaaccccgatagtggaattccaaaaaaaaaaaaaaaaaaaaaaagaaacccaatactgataaatagaatacaa

SEQ ID NO: 577679 - DNA, 626 bp, Homo sapiens
tctgtttgcagatgatatatatgtagaaaaccctaaacattcagcaaaaaaccttttagtaccaatagataaattcagtaaagttgcataaaaatattagtcacacttctctacacaaaaaaacaaagtatctgaaaagaaaattaagaaagaaccccactcataatagcagcaaacagaataaaatgtttagcaataaatttaaccaaagacttaaaagacttgtatgcttattttataattacatataattacaaaatattggtgaaggaaattaaggaagatagagattaatagaaagacattttttgttcaaggattgtaagaattaatactgttaaaatgttcatactatcccagtgatctgattcaatgcaatccttgtcaaaaccccaatgacattttttacaaaaatagaaaaaaaaaattgtcctaaaactgatatggaacccaaaagactgtgaatagagaaatcaatttttaaccaacaaatgaaaagttggaggccctacccttttaggtttcaaaatatattwcaaaactacagtaacaaaaaccccgatagtggaattccaaaaaaaaaaaaaaaaaaaaaaagaaacccaatactgataaatagaatacaa

SEQ ID NO: 577680 - DNA, 626 bp, Homo sapiens
tctgtttgcagatgatatatatgtagaaaaccctaaacattcagcaaaaaaccttttagtaccaatagataaattcagtaaagttgcataaaaatattagtcacacttctctacacaaaaaaacaaagtatctgaaaagaaaattaagaaagaaccccactcataatagcagcaaacagaataaaatgtttagcaataaatttaaccaaagacttaaaagacttgtatgcttattttataattacatataattacaaaatattggtgaaggaaattaaggaagatagagattaatagaaagacattttttgttcaaggattgtaagaattaatactgttaaaatgttcatactatcccagtgatctgattcaatgcaatccttgtcaaaaccccaatgacattttttacaaaaatagaaaaaaaaaattgtcctaaaactgatatggaacccaaaagactgtgaatagagaaatcaatttttaaccaacaaatgaaaagttggaggccctacccttttaggtttcaaaatatatttcaaaactacagtaacaaaaaccmcgatagtggaattccaaaaaaaaaaaaaaaaaaaaaaagaaacccaatactgataaatagaatacaa

SEQ ID NO: 577681 - DNA, 565 bp, Homo sapiens
agtgaacagaggaacataattttcctrcaattaattatttaatcaatctattcatttgtttaaagcatattaattgagcacctcttctttttcaggcaccgttttagactctggggagcagcagggaacaaagaagacaataaacaaatcatgtcaaaagttctttacactgcctctactggtctgcttgagctttatattaaccatcttattttacctgcaggaaacatgcgtttaggagagagagagaacatttagacaagactttttttttttaatggaaagtaaagctataactattattcaaatgccttggctctgtgctctttttcaggagactctgctgctgctaagccatccccctggtgtttaacctcccacagtttgtggcaccaatagtgcatcagcgagcaacattaattatgcacctactatgttccaggcactgtgctaggcacaaagaatactgtcgtgaacacaacagaaatttattttcgtatgaacatagacattaaagaaagtttgaaagtaattacttaactaatagtaaatgttcaaagaagta

SEQ ID NO: 577682 - DNA, 640 bp, Homo sapiens
attataaataagcctcttatttatttcataagtgtcttctgtgtatgcacaagcctttgcattcattgagacaacctggaaatgtgatagatgtatcaatggtttctttttattcttctaaatatccacccccaaccacccgcaatgttacatggctgggctggggtgatgttccagggcatcaagcaatgtgtgaggcactgagacctaaaaagatattttcttttttaagaggagagctatgtgttcacaaaatcattagtgaaccctaaaagagccaagagcaacttcagacctgttaatactcacactgaaaataaatggcaggtcagacaatgtccatgccataaaactatgtagatatgattcttatgtcttctgtctttgtaacatagagataagaagagagastaggagcaaaaagtgctttcctgaataaacatgatttataaatatggttcgatagaaacacatgaaaagtaaattttgttgagactggtgaaattttagaaggggaaacaattttcttattaaaacctaattgttctctgattctttctctccttctcttcaccctgtttctctttttctttccataaacacacacatttatttctatatatatatatacacacacaaa

SEQ ID NO: 577683 - DNA, 582 bp, Homo sapiens
tccagcacctgttgtttcctgacattttaatgattgccattctaactggtgtgagatggtatctcattgtgtcccacagttctttgatayagttttcttttcttttcttttttttcagttttatttctctttgcttttcagtttttcaagtttctgtcaacatatcctcaagctcaaagattgtttcgtcagccatgtccagcctactagtaagcccctagaaggagtttcattttggttctttcttaagatttccatctctctgcttacattgattgtaagttcttgaatgttgtctactttattcattgaagcccttagcatattaatcatagttgttttaaattcccagtcttataattcaaacatttctgctgtatcccattcttgtgtttgctctgcctcttcatgttgtgttttttgccattttgtattccttgtaatattttcttgatagctggacattttggacttggtaaatggacagctgtaagtaggcttttattggtggtaagatgtgggtggaggactctatagtcctataagtaggtctcaatctttaatgaatacattggtctctag

SEQ ID NO: 577684 - DNA, 582 bp, Homo sapiens
tccagcacctgttgtttcctgacattttaatgattgccattctaactggtgtgagatggtatctcattgtgtcccacagttctttgatacagttttcttttcttttcttttttttcagttttatttctctttgcttttcagtttttcaagtttctgtcaacatatcctcaagctcaaagattgtttcgtcagccatgtccagcctactagtaagcccctagaaggagtttcattttggttctttcttaagatttccatctctctgcttacattgattgtaagttcttgaatgttgtctactttattcattgaagcccttagcatattaatcayagttgttttaaattcccagtcttataattcaaacatttctgctgtatcccattcttgtgtttgctctgcctcttcatgttgtgttttttgccattttgtattccttgtaatattttcttgatagctggacattttggacttggtaaatggacagctgtaagtaggcttttattggtggtaagatgtgggtggaggactctatagtcctataagtaggtctcaatctttaatgaatacattggtctctag

SEQ ID NO: 577685 - DNA, 592 bp, Homo sapiens
  misc_feature 1, 2, 3, 4, 5, 6, 7, 8, 9, 10, 11, 12, 13, 14, 15, 16, 17,18, 19, 20, 21, 22, 23, 24, 25: n = A,T,C or G
nnnnnnnnnnnnnnnnnnnnnnnnnctatcatggggattttcagtagagaagtagtaatatctgatctatagtttaaaagatcactgtggctgctgtgttgagatgggttctaggagatcatgagacaaagaagagygatgacttaggaggctattacaatcaagagatgatggtagcctgtaccagagtggtgcaatggaagccatgagaagtgggaggtttcagtatatattctgaatatggagtcaataggattttctgatagatgagatgtgagatgtgaaagaagagaggtgtcaaggataactccaagaagtttgggtgtgagcagttaagatgatgaatactacaagctgaataacctttgtgggaaatatcggaaattcactttagaacatgtgaagtccaacaattcagtcacacaaccaaatctggtagcagttataaattggaagtcccaagaatgacactacctttataactccctccaccacacacatcaattcatcccagattttgccagaaacttaagtcgcagcaaggtaccaaataagaaagaaaatttctataacaggctcatgaataaaataa

SEQ ID NO: 577686 - DNA, 490 bp, Homo sapiens
acaacagttgtattaaaggaatagaaaagcccaaacattgtatgcatgtttagtagtgcataagagctactttaaaacagatttggaaaaaaagggcaaattcaaaatatttgctgcatttctagcgcctattcactaggcagtctcwtgttgttttgagctcagaagcttggttctttccccacttcacctttctcttttccctgaaacatctttatctgcttcccactcttccatctgtcagaagttcctgtttgcctttgaaaggatttctcggcaagctgacctctgtggatttcatcagccctgcatgcttgcacatgctgtgactcattttcactaatctgtgcaatgagcagtgagcaggggccagcagaggccctgcagcctgcaaaggactaatcagctaccaactgtggcatatgaggatgtctgagtggagagctccaaacgcctacacgcctcatgcccagaagctcctccttctgtg

SEQ ID NO: 577687 - DNA, 610 bp, Homo sapiens
tgttttaagttgatttgaatatcagcatttggtctttgtcttccaggaccactggtatagcttgcctggtggtggacttggaggataccattgcatyagggcatttctccacatgatagctcctgcctgctggacaggtcctctcttgactatgtgtattctccagagaagcaggtgatgacacccaaatgttttcttttcctttcaaaataatgcgttatatttacaccactcaataattaacgaagggtctttccaacaatccatgaaatgattgaaaaagaaaaatgatgtacagtaaatgtcttaagcacagccttctggtttgaaaaccagggcttgctctgttccataggattagactatttcatttgatttctctattgacaaagccactgaagattttgcatgttaaatttcacaactttccaatgacattttaaaactctcagtccccaaaagcagaagtgtttttgaaatcccaagagtactctttgaagaaaatctcttccccctcactgtgcttgttagaacagtgtagtataatgtattttccaaagtacaactaattgaagcactttgtcttttttagttttctgcatttcaaaat

SEQ ID NO: 577688 - DNA, 610 bp, Homo sapiens
tgttttaagttgatttgaatatcagcatttggtctttgtcttccaggaccactggtatagcttgcctggtggtggacttggaggataccattgcatcagggcatttctccacatgatagctcctgcctgctggacaggtcstctcttgactatgtgtattctccagagaagcaggtgatgacacccaaatgttttcttttcctttcaaaataatgcgttatatttacaccactcaataattaacgaagggtctttccaacaatccatgaaatgattgaaaaagaaaaatgatgtacagtaaatgtcttaagcacagccttctggtttgaaaaccagggcttgctctgttccataggattagactatttcatttgatttctctattgacaaagccactgaagattttgcatgttaaatttcacaactttccaatgacattttaaaactctcagtccccaaaagcagaagtgtttttgaaatcccaagagtactctttgaagaaaatctcttccccctcactgtgcttgttagaacagtgtagtataatgtattttccaaagtacaactaattgaagcactttgtcttttttagttttctgcatttcaaaat

SEQ ID NO: 577689 - DNA, 512 bp, Homo sapiens
atttgctcaacctctctgaatctcagcgtycttatgaaaagatagcattaattataccttctccataagatttatataacatgccagtgcagataaagcacaaagctttacataaatgttcatcttcaaaaacagaagctatgaataacaatgacaacattgttaataatgcagtgttatgcatggaagtggacaacttctaacatatttatgagtaaagagttaagatagccttttcccttctgcatgagaatttgaccttcatttaaatttcacgctgggtttccctgttaaggttggctatgctgctaaccagtgttgtttatggtaacacaaatcccatgattaacactggaaggcctatacataagctgtatatatttgataggaagtcacacttggggtcttcctgagtgtgatgaatttgtaactgccatggcctttgtgaagaccctggaaattatgcctacgttgctgtcaccccaacagataatggctcttgtaggaatgag

SEQ ID NO: 577690 - DNA, 371 bp, Homo sapiens
gctatctgaatggccaatggcaactggggatatcccttgttttcattggaagcctttgttttcctggtgacaaccttccttaactggagtttctgcagagaattaagcctgaactctctagagcatctgtattacattcttgctgttgccataaaaaaktatcacaaagttagtggccaaaaccaacaagatttattatcttcgacttctggaagtcagaagtcagaattttagcccagaaatttcacagggctaactcaagatgtcagcagggctgtgttccctttggaggttctgggggatagagggaattcatttcctcactctgcagttcctagaggctgcttgcattccccagcttctggcaatct

SEQ ID NO: 577691 - DNA, 645 bp, Homo sapiens
gggtctgccgactagacgcagcgaaaccaaacactgacattgagattgcagcgagagaaagtgaggcgtttactgcagggcgccaggcagggagacttgtgccgctcattcctaagactscaactccccagctgcttgcagctaagggttttcaaggcagggaggcagaggtttcaagcaatgaaggatatgcactgacgtgaccgaagcaggccggacatctcaaagcggaggccacgggccatcggcagattcgattcttttctgatttgcagttggttaagaaggcaaagcgttgtctgaatatgtgggatccgcggaaaagaatgttacctctggctcatgggtgtgacttcctgcaggccactcaggaagaaatttagcacaaagaacagtggtcagagttcactcctcagctcccccttatctggcgtgtctgtgccagtagatccatttggtggggatttgggtttcttaaaaataactcaaatatatgttcagatgttctctttagctcctatagtgaaccagatatcccttgactttaccttcctggctattgctttaagccaattttattgttaaatattgttaaatgttaatgttaaatattgttaaataataagacaaataattttattgtta

SEQ ID NO: 577692 - DNA, 647 bp, Homo sapiens
ccatcaattttctaaaagactatcctttccctcttataccttaggtatacatctatagatcaatgtctagaaacaaatctttccatttatattaaatttatcacaaagatgccaaggcaatttaaggtggaaaggtcagtcttttagaaaactgatgctgagacaattgaatattcacatacaaaaatatgagtttatacccttacttcacatgaactcaaagtggatcatagacctaaatgtaagtattaaactatagaacttttagaaaaacacataggtggaaatctttgtaactctgggtgaggtcaagaattctaagatacgatgccaggtgcagtggctcaagcctctaatcccagcactttgggaggctgaggcgggtggatcacttgagctcargagttcgagaccagcctgagcaatatggcaagaccatgtcccttaaaaaaaataattctttttttgacaccaaaagcataaccaataaatggaaaaaaaattggatgttatcaaaacttaaaatgattatatgtcaaaggacactattaaaagacactatcaggaaaacaaaaggaaaagtcacagattaagatgaattatttgcaaattatatttcagataaaatatattttttctggaattta

SEQ ID NO: 577693 - DNA, 437 bp, Homo sapiens
ttttctgagaaagccctgttgttcggatacatgggtcyagattctcacactgtatgcctgtgcttttatttttatgttcaacctatggaaaaaaaaaatgaggcccttcagatcttagccaacttgctcataaccacagaagtttctttacaagaccaactcttcacaaacccttttcaacttgcttaaaccttcagttttgtcccattactcttttagtttaacacaatctttaaaaccctctgaactacacaaaattacattccctataacaaaagccatattcccataccttcttataatcttttaccaaaaatgtgttctatttccttacatacctcgtaagtaaaattgtttctccagttgtctcaattgcatgttacaacattaattcttagcaacttatttatggtgaaaatcctgataagtaagtgatt

SEQ ID NO: 577694 - DNA, 578 bp, Homo sapiens
tttgcttcatttaagaaactccagsttattttcttaccaaccggatatgtttggattttgttcggattcctctggtcaggattttcctgctgtcactgggattctgcttatatcatcttcctgaactactgttttataaaatattctgtcaaaataataatttcagtataaaaataagcttatgtaatttatacataaggaaagataacatttttatgctgctcgtgagaagataaacatatagcaaaatttaaataaaatgtaaacacatgcaactatgagtcaaaagtaacgctatttgaaagaatgttccatgaaatgcagttgttcttcagtctccatgggagattggttccaggagcccttgtggataccaaaatccatcaatgctcacgttcctcagtactttcaaatcattgtcatgtactctatgcataaagattattttcaaaatgctaacagcaattattctatatactcatcatattgaactactggggcatcgatgtatgaagcacatatctgtgccatatgtgtttacaaattttctagaagtggaatcaataagcattgaattc

SEQ ID NO: 577695 - DNA, 578 bp, Homo sapiens
tttgcttcatttaagaaactccaggttattttcttaccaaccggatatgtttggattttgttcggattcctctggtcaggattttcctgctgtcactgggattctgcttatatcatcttcctgaactactgttttataaaatattctgtcaaaataataatttcagkataaaaataagcttatgtaatttatacataaggaaagataacatttttatgctgctcgtgagaagataaacatatagcaaaatttaaataaaatgtaaacacatgcaactatgagtcaaaagtaacgctatttgaaagaatgttccatgaaatgcagttgttcttcagtctccatgggagattggttccaggagcccttgtggataccaaaatccatcaatgctcacgttcctcagtactttcaaatcattgtcatgtactctatgcataaagattattttcaaaatgctaacagcaattattctatatactcatcatattgaactactggggcatcgatgtatgaagcacatatctgtgccatatgtgtttacaaattttctagaagtggaatcaataagcattgaattc

SEQ ID NO: 577696 - DNA, 578 bp, Homo sapiens
tttgcttcatttaagaaactccaggttattttcttaccaaccggatatgtttggattttgttcggattcctctggtcaggattttcctgctgtcactgggattctgcttatatcatcttcctgaactactgttttataaaatattctgtcaaaataataatttcagtataaaaataagcttatgtaatttatacataaggaaagataacatttttatgctgctcgtgagaagataaacatatagcaaaatttaaataaaatgtaaacacatgcaactatgagtcaaaagtaacgctatttgaaagaatgttccatgaaatgcagttgttcttcagtctccaygggagattggttccaggagcccttgtggataccaaaatccatcaatgctcacgttcctcagtactttcaaatcattgtcatgtactctatgcataaagattattttcaaaatgctaacagcaattattctatatactcatcatattgaactactggggcatcgatgtatgaagcacatatctgtgccatatgtgtttacaaattttctagaagtggaatcaataagcattgaattc

SEQ ID NO: 577697 - DNA, 175 bp, Homo sapiens
aagaaggtgtgacaaacggtaacagttacggaatgtgagtgggcttccggatactcatcacgctattcttctcttttctgtgaaaatttagaaaataatgcatcccagatcccagctcctaaggcrtgtcactttttccctatacgcccttggatgactgcattatcagcttccg

SEQ ID NO: 577698 - DNA, 175 bp, Homo sapiens
aagaaggtgtgacaaacggtaacagttacggaatgtgagtgggcttccggatactcatcacgctattcttctcttttctgtgaaaatttagaaaataatgcatcccagatcccagctcctaaggcatgtcactttttccctakacgcccttggatgactgcattatcagcttccg

SEQ ID NO: 577699 - DNA, 455 bp, Homo sapiens
atttttgagttccctttcctcatccaggatctcagattttctgggagctttcctgagtgaaaatgtgcgatcgacctgttgttatagtttacagtgtgactaccacactattgatttttgtgccaaaggatgaaaactcctgtccaatttccatctgccctttgtatttatcatagaaatcccacaaaaatcagattaatccaaagtggaagtaccacataaaattatcccagctaataccttgctgaaaaatatattttaatcaaaaatgcatggtattcccagagcctggttttaccttcactgtaatgcatttatcacaaacctcaaagatggtggaccagaaagacgcrtggagagttgttgaatctcttcagtagctcatttacattacacctgaaatgtatgtttccatgggtgaagtttggaagagccatcagcactaatatatctgt

SEQ ID NO: 577700 - DNA, 466 bp, Homo sapiens
tcaaaactttcctgatcgaaactattgtcagctmttgtgatctcctggagtggcctacctcatctatactttcttcctccaatcagttctccatgcccagccagagtgagcttttcctgaatggtggcctaagcaagccaagctcatgcttgtcttagaacaaagacaaaatgggccgggcatggtggctcatgcctgtaatcccagcactttgggaggcaaagagggcagatcgcttgaggtcagaagtttgaaaccagcctggccaacgtggtagaaccccatctctactaagaccacaaaaattagctcggtgtggtggctcatacccgtattcccagcactttgggagactgaagcgggtggatcacttgaggtcaggaggtcaagaatagcctgtccaacatggtgaaaccccatgtttctaaaactattaaaaatacaaaactagccaggcatggtgaca

SEQ ID NO: 577701 - DNA, 337 bp, Homo sapiens
caacttgctcatgagatggttcctagaattaaatgagtttatatgtgaaaaacactcaacacaagtagtgaagtgagcaccaacaaatgattcctattattttgatactgtaattattagcacctattattatccaaatgtacaaatatgttagacagggaagaggagaagaaaatgaggagaaggaaaaatggaggaatctaagggsagaaggagaaagaccaaggaagaaacactaaccagggaaggaagcagagagagattcaaaaagagagaaagaaaggaacactttggagtggtgttctcattgatacctcactcttaccaaaattcctcc

SEQ ID NO: 577702 - DNA, 610 bp, Homo sapiens
ttgtagcaatagaactgggttgccctcaagttcttggagaatcatatttgggcagcaacaaaacaatagatactatttgctactagatggcaagcaatatgcaaagcattggctgatttcatccttggaatggccctataagataygctctattagggtctccatttcacagaaaaagaaacagactttaaaaagttaagtaattttatttatttttttttttattttactttaagttctaggatacatgtgcagaacgtgcaagtttgttacacaggtatacgtgtgccatggtggtttgctgcacctattgaaccatcctctaaattccctccccttgccctgcacccctcaacaggccctggtgtgtgttgttcccctccctgtgtccatgtgttctcattgttcagttcccacctatgagttagaacatgaggtgtttggttttctatttctacgttagtttgctgaggatgataactttcagcttcatccatgtccctgcaaaggacataatctcattcaatcttatggctgcatagtattccatggtatatatgtatgtaccacattttctttatccagtctatcattgatgggcatttaggtt

SEQ ID NO: 577703 - DNA, 610 bp, Homo sapiens
ttgtagcaatagaactgggttgccctcaagttcttggagaatcatatttgggcagcaacaaaacaatagatactatttgctactagatggcaagcaatatgcaaagcattggctgatttcatccttggaatggccctataagatacgctctattagggtctccatttcacagaaaaagaaacagactttaaaaagttaagtaattttatttatttttttttttattttactttaagttctaggatacatgtgcagaacgtgcaagtttgttacacaggtatacgtgtgccatggtggtttgctgcacctattgaaccatcctctaaattccctccccttgccctgcaccccycaacaggccctggtgtgtgttgttcccctccctgtgtccatgtgttctcattgttcagttcccacctatgagttagaacatgaggtgtttggttttctatttctacgttagtttgctgaggatgataactttcagcttcatccatgtccctgcaaaggacataatctcattcaatcttatggctgcatagtattccatggtatatatgtatgtaccacattttctttatccagtctatcattgatgggcatttaggtt

SEQ ID NO: 577704 - DNA, 646 bp, Homo sapiens
actctatcttatttttctgttaaggaaaataacatattctcattttggaaaattagaattagwctgtatagacaaactgtacaaatacataaagaagaaaacaaaaagtacccatgatttcatcgatccaagataatcacaattaacattttggtgtaacttctttcagtattttttctatttacctattgccattattattacatattatctcctgtaacattattgtaaacattttctcatgttaaaatttttcaaaacttgattgctgttttacttacatcccctgcaaaacataacaaagcaaatccccctgcttcatggatcccatggacatgtactggctccaggtcaccatttccagtcttctcaaattataacagctcaacccccactatgtaaaaatctattctcttttagaagatatctgtgcacatgctcaggagccagaaactgagaagtcaacaccattgctccttttgaggagatgcagcatggaaaaccttcacttactttctcccttatggggacagtcatgaaacgcctcaccaggtattgctgccaatcccaggggaccaagaattgaataaagatgtgagggcagcagcaagagaaaaaaaaaatatctaattggggaggtaaagag

SEQ ID NO: 577705 - DNA, 646 bp, Homo sapiens
actctatcttatttttctgttaaggaaaataacatattctcattttggaaaattagaattagactgtatagacaaactgtacaaatacataaagaagaaaacaaaaagtacccatgatttcatcgatccaagataatcacaattaacattttggtgtaacttctttcagtattttttctatttacctattgccattattattacatattatctcctgtaacattattgtaaacattttctcatgttaaaatttttcaaaacttgattgctgttttacttacatcccctgcaaaacataacaaagcaaatccccctgcttcatggatcccatggacatgtactggctccaggtcaccatttccagtcttctcaaattataacagctcaacccccactatgtaaaaatctattctcttytagaagatatctgtgcacatgctcaggagccagaaactgagaagtcaacaccattgctccttttgaggagatgcagcatggaaaaccttcacttactttctcccttatggggacagtcatgaaacgcctcaccaggtattgctgccaatcccaggggaccaagaattgaataaagatgtgagggcagcagcaagagaaaaaaaaaatatctaattggggaggtaaagag

SEQ ID NO: 577706 - DNA, 637 bp, Homo sapiens
tatactttttaaataatgtatacattttaggagtttttcatatccaagaacctttaatatatgttttgaataaaacgacttatttttctagaataaatttagttttaaaaaaggaattcttaaattaatacaaaacatagaatatcaagtatcattagccataaatagaaagtaattaaagtaaaccaatgcagtgaaagtgaaaaaatgttatttactttatttacttgagtaaagaactatcacagataattacattaatatcattttgtgttggctttasatctcaaaatatgacaagtatttacattggccctaattcttaattgcaagccaccaggtaatcttgattaagtttctcagtgagcaatctctataaactcttctgaaacttgcattgctgtctctaaacacttacccataatgtggtcatttctttttcagtaaagtgatagcacaggttctcttatggtattaaataaatcttccaaagaagaaattaaattttttccaagatggtagattagaggattttagcatgcctcaaccgtttggaaatagcaagcaatacataacgataaactctgtggggtttaattcgagaaggaaaaacaggaatccaccagaattgtgaata

SEQ ID NO: 577707 - DNA, 637 bp, Homo sapiens
tatactttttaaataatgtatacattttaggagtttttcatatccaagaacctttaatatatgttttgaataaaacgacttatttttctagaataaatttagttttaaaaaaggaattcttaaattaatacaaaacatagaatatcaagtatcattagccataaatagaaagtaattaaagtaaaccaatgcagtgaaagtgaaaaaatgttatttactttatttacttgagtaaagaactatcacagataattacattaatatcattttgtgttggctttagatctcaaaatatgacaagtatttrcattggccctaattcttaattgcaagccaccaggtaatcttgattaagtttctcagtgagcaatctctataaactcttctgaaacttgcattgctgtctctaaacacttacccataatgtggtcatttctttttcagtaaagtgatagcacaggttctcttatggtattaaataaatcttccaaagaagaaattaaattttttccaagatggtagattagaggattttagcatgcctcaaccgtttggaaatagcaagcaatacataacgataaactctgtggggtttaattcgagaaggaaaaacaggaatccaccagaattgtgaata

SEQ ID NO: 577708 - DNA, 507 bp, Homo sapiens
gcatcctggacacgatgcaagaakgacattgtgagaagagatccagatttagcaatgaggatgcaaacatgaaagcaattccttgatggaaagacgttttaaaattctgggatctgcaggccagagcctgccattagaattggcaaagaaagaagaaaatactgattttcattttggcttttgccacaagtactattgctttgtgatgctttcccaaagtctctaaatgagatacttggtgtgtttttcaaagttcctgcatgccgatgctagcatggaagacacaacacactctttttcctttctatccagtggaaacagctttagacactaagccgttatgaacgtatgttgaaaataaagtttattttccaacataggtggtgacctgatcattcctgttttgtaaaatcatagggacatataaagacaaagtatgaggtacaaaaaaaacaagtaaagagtgatattttttcttctcctttgtcctttttggaatttaagaat

SEQ ID NO: 577709 - DNA, 533 bp, Homo sapiens
atagatggaaagtttgtattaaacttgctcaagggattactgatgcatataacacacacacacacacacacacacacacaccccgtagcatacatattcaaacagctctcattatgtccagctgaagtgaagtgaataaaatatctgttcttctatagcagaatagaccaattccaactagactgaattgtcactactgttctagtccacataccaaaaacagcagarcatttaaaccaatattccagtctgcttagtcagatgcctaattacattctaggttaccctgctatctacaccgcattcacttgataaaatcaaaggtaatcagtgaagggaagaaaagaggaagcaaattacttactaactgtggagagaaacatgataacaaagccagcaaacatggggatatgatatccaatcctaaaagggaattgaaaaaaaaaaagatacaattccaacaggcactcacatacatggactacatttttaaatgtaagtgggagcagaaatgcagctatttgggtgtatgg

SEQ ID NO: 577710 - DNA, 533 bp, Homo sapiens
atagatggaaagtttgtattaaacttgctcaagggattactgatgcatataacacacacacacacacacacacacacacaccccgtagcatacatattcaaacagctctcattatgtccagctgaagtgaagtgaataaaatatctgttcttctatagcagaatagaccaattccaactagactgaattgtcactactgttctagtccacataccaaaaacagcagagcatttaaaccaatattccagtctgcttagtcagatgcctaattacattctaggttaccctgctatctacaccgcattcacttgataaaatcaaaggtaatcagtgaagggaagaaaagaggaagcaaattacttactaactgtggagagaaacatgataacaaagccagcaaacatggggatatgatatccaatcctaaaagggaattgaaaaaaaaaaagatacaattccaamaggcactcacatacatggactacatttttaaatgtaagtgggagcagaaatgcagctatttgggtgtatgg

SEQ ID NO: 577711 - DNA, 593 bp, Homo sapiens
gccaccatgcctggctaatttttgtatttttagtagagacagggtttcaccatgttgcccaggctggtcttgaactcctgacctcwggtgatctgcccaccttggcatccccaagtgctgggattacaggtgtgagccaccatgcctggccaagagagtaactttcacctcctttcctacaaaagaaaaaattaaaaaccgctcacatgctaggggcagagacaaactggctctaactcagcacattcctaagaaagctgcatttttggttaaattcatgctgctttttaaaccctttttgtttaggtgtacatagctgtcagatctctccaccagatcctcaaaaacagaaactctgccttgtattttttttttgtcttggtccaaaacgccgaacaggattggttgttgaggaagggggtggatgcacttcccccaggtgaccagttgtctcaaagtctacatgatgaatgtttgagtgaaaaccagatttgggttctggtagtatagacttggcttcggtatctgcatatgtggagacctcagtttaagtcacatgccttcccagagcctcagcttcccttctgtgaact

SEQ ID NO: 577712 - DNA, 570 bp, Homo sapiens
ttaagaacacagaatttgaaatagttgggaaaatttggaatatgtgttgatcacagaaaggcagtagaattgacagtaattatagcatatttgagattagtgattaggaatacatgcctaatgtattttgagactccccacagacaattytaggctgtttcatgcaagctgggaaaatggacagtgaggctcattttctaattaagttttgccagatccataagattaaaggacagttaaaaaaaaaaagtgttcagggcattggtattactgtaatgacccaattcactgtagactctattatgaatagagaaaaagtaaagaaaccaaataaaaataaaagaacctgctggagaagggaagttgaattatttaaaggaaaacaagcaacataactccatataattaaatagctaagtaaatactctgaaatgaatttgatgcgtaggtcatttggttgtgagttttgctatccatagtgattatcttcttaggaaatttatggaaaagaatcatatttaaagaaaaaaattataagattattttattttatcccttttctcttgaaaa

SEQ ID NO: 577713 - DNA, 607 bp, Homo sapiens
aggcactcaaatatcggttataattatcatcatatttttttacatcatattgctaagtaatgctccaatcattctcaatatttggccattagttgacttttggaagctttgtcttacttccttttttcactaattgaaagtgaaatgctacttgtcaatctgacctcaaagacaaatggaagtagtttcctcaccatatcccacacaatgacgttaaacaattcagttgtgttttcttcttgatgcctacawctttagggagaatggtatttccaagataaacagtttcttgtttttgatgaaaactcgtttcccaaatatacttgttgccacataggttagcctaaaaaaacagcaagtgggtataacaggcaaccggtttaccaagatcagcttaaataagacaatatttgtggtggttaatgggtccgattgcagggattaagtttatatcttcacttctaattacttgtgccaatatttttaggaaaatagggttctgagatttaaaaataatactttggaagcaaaataaagtaattatgttagtggagttttgttttctaattataaacaataaaaacctgtgatgtatatcataatgagc

SEQ ID NO: 577714 - DNA, 547 bp, Homo sapiens
gtaccaggttagtgaagggatggtctacattagttagtatccaaaaatgtaaagccaaatttagatgtttgctaaggaaggcagagtcgcccagttgcaggtgtacaaactttgaaggcagactgactgggttcaaatcttgccctctcccttactgacatcttaggcagggtagttagtaatcacctccattttttcacctttatattgagatccatataagcaccaacacatacaacagcatcacattcaacagttgtgtaaaaagtgatatgtagtacccagcacaaagcaagtgatatgtattagctgtgctctcrtaacccagaagaaaataaataagatctatgtaaagcttgttttaggaaatttttcataagctatagttaagcatatatggggcaatactaaaatattaaaactaaatcttgatgaaaaatctatcagtagtgcaatttatctcaaacccaagaagaaaattgcattttaaccttaaacaatgcagtgaaaatatagaattttgagataaaattttgataaacatgtt

SEQ ID NO: 577715 - DNA, 607 bp, Homo sapiens
gctctgttcctttggatagtgttgactaatacaatgtgtataaaattacatctatttacataaatgacattgtaatatataacacattaacagtattgcatgtcttcttatttactaatgatagtgtcaacatttttatgttcataatgtacaaataccccttattctcttgacagacattcaatgactgtcatgtatacaaaccatgactatccaggtgcatgaattaaaattatttgtttgcttctgaagtatatgyagactctattcatcagctatttccaccacactgctgttgacaaaatatctcataattcagtaggttacatcagcattattcccatgttcatggaaactggtggctgtgcctcaggctttatgttgtctagacttaaatccagattgtaggaatggttcaggtctctctccatttatgtctgtttcggaacactggctgaaaaggccaaagttatgtttgagcatgctcttctcctagaggatcacaagcttgaaggacacaatgtttaagcacatttaagacctctgttcttcacatctaatctactgatcaatacaaatcagatgtctaagggcaacatcaagagaa

SEQ ID NO: 577716 - DNA, 607 bp, Homo sapiens
gctctgttcctttggatagtgttgactaatacaatgtgtataaaattacatctatttacataaatgacattgtaatatataacacattaacagtattgcatgtcttcttatttactaatgatagtgtcaacatttttatgttcataatgtacaaataccccttattctcttgacagacattcaatgactgtcatgtatacaaaccatgactatccaggtgcatgaattaaaattatttgtttgcttctgaagtatatgtagactctattcatcagctatttccaccacactgctgttgacaaaatatctcataattcagtrggttacatcagcattattcccatgttcatggaaactggtggctgtgcctcaggctttatgttgtctagacttaaatccagattgtaggaatggttcaggtctctctccatttatgtctgtttcggaacactggctgaaaaggccaaagttatgtttgagcatgctcttctcctagaggatcacaagcttgaaggacacaatgtttaagcacatttaagacctctgttcttcacatctaatctactgatcaatacaaatcagatgtctaagggcaacatcaagagaa

SEQ ID NO: 577717 - DNA, 565 bp, Homo sapiens
ttgctcaggttggatggagtgcaacggctcgatctcggctcactgcaacctccgcctcctgggttcaagcaattctcctgcctcagcctcctgagtagctgggattacaggcatgcaccaccacactcggctaattttttgtatttttagtaraaacagggtttctccatgttggtcaggctggtcttgaactcctaatctcaaatgatccacccaccttggcctcccaaagtgctgggattacaggtgtgagccaccaggcctgacccctgttccttcttattgcaacatgatgaatctcccttccatttattcctcatctatctgtctagtcccatcatatttaaaaatcttatacctttacccagcttactttttcttctcccatttttagatcacctaatcctctatgaatctgtgaaactctacctctcaacatttgtttgaaaccattcttaaccaaggtcaatgaactttttctctaggcaaatctgtttttccacattgttagtcatctctttctcaaaatttggcagccatttcatagtagaaacaaaaatttcaa

SEQ ID NO: 577718 - DNA, 565 bp, Homo sapiens
ttgctcaggttggatggagtgcaacggctcgatctcggctcactgcaacctccgcctcctgggttcaagcaattctcctgcctcagcctcctgagtagctgggattacaggcatgcaccaccacactcggctaattttttgtatttttagtaaaracagggtttctccatgttggtcaggctggtcttgaactcctaatctcaaatgatccacccaccttggcctcccaaagtgctgggattacaggtgtgagccaccaggcctgacccctgttccttcttattgcaacatgatgaatctcccttccatttattcctcatctatctgtctagtcccatcatatttaaaaatcttatacctttacccagcttactttttcttctcccatttttagatcacctaatcctctatgaatctgtgaaactctacctctcaacatttgtttgaaaccattcttaaccaaggtcaatgaactttttctctaggcaaatctgtttttccacattgttagtcatctctttctcaaaatttggcagccatttcatagtagaaacaaaaatttcaa

SEQ ID NO: 577719 - DNA, 534 bp, Homo sapiens
ctgtttctcttcttcaaccacgcttcccaccccaccattctcccactcagtggcagattttctcatctgtaaaatggacttgaaacacctcccatgagattgctgtggggatcaaatcaaagtctgtctttggagaggctttgtaaatcctaaagtactcaccaaaggctcttactagcacgtaaggacctgtctcaggagaatctgcctagcatgacttcctttgttgaaggttacaatcaagggctcccccaaaaatctattttaggttggagtcacgtagacatgaatggaaagtggcaggaagactgttccccactgctgacaccakgcccacaaaccagctattggcaaagagttgcagttttgaaaagctcaaactccaaagtagatacgggcatgtgattccgtggtcaggagacactgaggtcactgtgcaggccaaagattcagagaggaagcaaaactacagaaatgaaagctcctttctaaagacttgtgaagaaacaagtggagtttcgctgtgttgtcaag

SEQ ID NO: 577720 - DNA, 346 bp, Homo sapiens
tgtgcctgtagtccctgctactcaggaggctacagtgagagcccaggaagctcagggctgcactgtactccagcctcggtgacagagaccctgcctcaaawaaataaataaataaataaaaataaaaataaaaaaataaaaaaaagattctttaatgaatactgaaggaggtacaaaaggcctgaacagacatatataataaatgtgaatactgcactgatcagactagaagacctgtgacagacataaaagatgctgtgaacaatcgagaaaactcattaccttcagactagcctctcactgagccaccgctcctggccctgacttttaagcagacttatattag

SEQ ID NO: 577721 - DNA, 590 bp, Homo sapiens
ctcctaaaattgttccaatttaagtcaacttgctccatttataaaactgttatataggcagtcggatgtctgctttcagcaagtgcatgcgcagtgggacctgaaattgagagcatgtgaaatccgcaattcgtatgataagatattcttcctgaataatgaaaattgcagtagggaaacaaaccttcaagcaggaatcagytttttaagcatttttttttaaaaagatatctgtgcccattatgaagtaagagagcgtaaaatgtaccttttggcgagagaaacaaaaatactccttactacagatggcaaactgtagacaaatgccctgtatgtggtatcacatgtaattatatcattttgtcttgaaacattttatgagtttgccttgctggatgtctgttgtctttatcttgtctcatatgcatatactcagttatatgtatgtatacatataatttgattggataaatccacctaaattaactactcttggctttttctttgccatgtggctggaggggtcacatatttgagatttcaaaataaagaacatttaaggtatcagtggaaaaaacttaggaaaaaaa

SEQ ID NO: 577722 - DNA, 590 bp, Homo sapiens
ctcctaaaattgttccaatttaagtcaacttgctccatttataaaactgttatataggcagtcggatgtctgctttcagcaagtgcatgcgcagtgggacctgaaattgagagcatgtgaaatccgcaattcgtatgataagatattcttcctgaataatgaaaattgcagtagggaaacaaaccttcaagcaggaatcagttttttaagcatttttttttaaaaagatatctgtgcccattatgaagtaagagagcgtaaaatgtaccttttggcgagagaaacaaaaatactccttactacagatggcaaactgtagacaaatgccctgtatgtggtatcacatgtaattatatcattttgtcttgaaacattttatgagtttgccttgctggatgtctgttgtctttatcttgtctcatatgcatatactcagttatatgtatgtatacatataatttgattggataaatccacctaaattaactactcttggcttttyctttgccatgtggctggaggggtcacatatttgagatttcaaaataaagaacatttaaggtatcagtggaaaaaacttaggaaaaaaa

SEQ ID NO: 577723 - DNA, 555 bp, Homo sapiens
atggaatgtaaattcattggtgtatattttagggctcttcattttcaaactaaagaatagtattttacaatatctcaagataagtaaaccaggtacccaaataaaatatgtgggcagaaattgaaagcctgttttctctccattgaggacagacagaagtggagaaggcagaggaaaatggaggaagagagaggagagatggaaatcagaagctacggggaaaggaaacacagcttaaaactaaaatgcagaggaaaatataaaacattccactcatcttttttttaagagagaacaagaaacaaaaccatttaataaatataaaaaaccataaagcaccttctgttctaaattataatcagttgagagagggtgtgagggtaggaggaaggggagaaaggaagatgcggagaacagtccaacagacagaaggagggccctcagtagcttcagaggtatattgagccccaggagggctgtgatgagagtgcacagaacatccgttkttccccttaactgtgggtgttagagtaacctaggctacttcttatcact

SEQ ID NO: 577724 - DNA, 658 bp, Homo sapiens
atgtacaaatctgcaaaaaaataatatcaagtggtaaagctaatttcccttcattctctactgccgtgatccccaaagagtagtctctgggtcagcagcatcagcatcacctgggagcctgttagaaatgtacattgcttggcctcagcctagacctaccaaatcagaaaatatggggtaaggcctagaaatctgtgttttaccaagccctccagaggatttggaaggaagatcaagttgaagaaccactgttccagtgcastgtcatctccagcttccctgcctcccatgcatttctgctggaccaaagcaacatcagaataaacataagacaacgctgttaacaatactggccaaatgccaaaggctaaggcactacagtgacatcaccatgacttgggtacactattacgaagcaatcatgacaggaccctgagaataggaagaagaccaggtccacataaaagcaaacattaaacatacacccaggcccacagggttgttccctacaaaaaaggcaaagaacttaatgaaaaccatgcccttgagacaaagggaaatttaacacactctgactttcctttccttcttagtctcaaatgacagtttgattttttcaaagaactccatatgtcttggggaaataaaatggggggtt

SEQ ID NO: 577725 - DNA, 555 bp, Homo sapiens
gtgacatctctaattgtaggcatctttatgcttttcagtgtgggcaaatgtcacactggcaaaaataaattattagacaactttagggctgggcacggtggctcacccctgtaatcctagcactttgggaggctgaggcaggagaattgcttgagccaaggagttcgagaccaagcctaggcaacatagggagaccccatctctcccaaaaaaaaaaaaaaaaaaaaaaattaaaagattagccaggcatggtggtgctattaggtcccagctactcaaraggctgatgtgggaggattgcttgggcctgggaggttgagcatgcagtgagccactgcactccaggctaggtgacagaacaagaactttctcaaaaaagaaaaaataaaactttgatagaagaattttttaaaaatataggcaatacattaggaataaatgggtaaaagtaaacatacacatagatataatacttatggttcatttcaaacacttatttatgaaccagaaaagatgcctgagagtcactgtcaactattacttgaagtctcaatg

SEQ ID NO: 577726 - DNA, 531 bp, Homo sapiens
gctatgaacagtttattaagcacggagaaagcctctgaatgagagaaacactatacctacccaccctcactacactcacatgttaataggtacataggctaatatatgagcaattctaataaaataatgctcatatccagcctaatttattattatgcaccctaacaatgccttagaaaaaaatggyccaaaatccatcataattaagatgctgtttctgagcacctcaatatgattttgccatttctgagtagtcttagtgaatgaagaccattcagattgattatcacaagatcaattcagagtaaacctatttaaatataagctttttagattctgaattttctatatagctttgaattttatccaagaggtagctttaaagaatgcaaacacctaaaatactttataattcagtaaagatgatccatcataaattaagatttgtttttagatactttggtattattggtattctttctgttttgctttgtgtgtgtacatgtgcacatgtatttaaacactgtgtga

SEQ ID NO: 577727 - DNA, 531 bp, Homo sapiens
gctatgaacagtttattaagcacggagaaagcctctgaatgagagaaacactatacctacccaccctcactacactcacatgttaataggtacataggctaatatatgagcaattctaataaaataatgctcatatccagcctaatttattattatgcaccctaacaatgccttagaaaaaaatggcccaaaatccatcataattaagatgctgtttctgagcacctcaatatgattttgccatttctgagtagtcttagtgaatgaagaccattcagattgattatcacaagatcaattcagagtaaacctatttaaatataagctttttagattytgaattttctatatagctttgaattttatccaagaggtagctttaaagaatgcaaacacctaaaatactttataattcagtaaagatgatccatcataaattaagatttgtttttagatactttggtattattggtattctttctgttttgctttgtgtgtgtacatgtgcacatgtatttaaacactgtgtga

SEQ ID NO: 577728 - DNA, 531 bp, Homo sapiens
gctatgaacagtttattaagcacggagaaagcctctgaatgagagaaacactatacctacccaccctcactacactcacatgttaataggtacataggctaatatatgagcaattctaataaaataatgctcatatccagcctaatttattattatgcaccctaacaatgccttagaaaaaaatggcccaaaatccatcataattaagatgctgtttctgagcacctcaatatgattttgccatttctgagtagtcttagtgaatgaagaccattcagattgattatcacaagatcaattcagagtaaacctatttaaatataagctttttagattctgaattttctatatagctttgaattttatccaagaggtagctttaaagaatgcaracacctaaaatactttataattcagtaaagatgatccatcataaattaagatttgtttttagatactttggtattattggtattctttctgttttgctttgtgtgtgtacatgtgcacatgtatttaaacactgtgtga

SEQ ID NO: 577729 - DNA, 515 bp, Homo sapiens
ggaggaggctaaaaactgcattttccagaaactctaggtaatttccatgctcctaacattgagaattgtcgccttcataatggtgtttgtcactacacaggtgttgtaaacctctctaaatggtttcttcagcattcaagtttgacatgacaaaatgtgcatgcatgcagtattcaattactgtttagcactgtaccctctgagaggaggagatcctgrggtatggtgtcaccccttccaacttcccctcctttgcttatccatttcctttcacactttatttttagagtccatccaagtaagaaatttatccatatatatttttattattgtgaaaaatttggaagttcatacctaaccattataatgcacattcttattcataaagaaattaaaataatgtttgatgaatgcacattcttattcctaaacaaagtaaaatagtgtttgatgtggtttatattatgtattttgttctttgtaaaggaactaaagtgaaattctttcttacctga

SEQ ID NO: 577730 - DNA, 521 bp, Homo sapiens
gactatttgccagactcaccatgtttgaaagttatgtaaataaatgttttattcaatgtcatttaaagctgcatatctcataacagttatattttcaaaattgtatatgttcacaaaattttttgacacattgtgattattgccactctccataaggcctgagtttgacatggacataaaatcctgaataaaataccaaggaacacatttctatttgcagtgtttccgttgtaggtggaacggccaccagacagagaggctttctaggatgcattcggtctctgcagttgaatggggtggccctggatctggaagaaagagccacartgatgccaggagtggagccagggtgtgcaggacactgcagcacctatggacacttgtgtcgcaatggagggagatgcagagagaaacgcaggggggtcacctgtgactgtgccttctcaacctatgatggaccgttctgctccaatggtaagtgtgaccaaggagcaggttatagggaaagtacatgaaactta

SEQ ID NO: 577731 - DNA, 521 bp, Homo sapiens
gactatttgccagactcaccatgtttgaaagttatgtaaataaatgttttattcaatgtcatttaaagctgcatatctcataacagttatattttcaaaattgtatatgttcacaaaattttttgacacattgtgattattgccactctccataaggcctgagtttgacatggacataaaatcctgaataaaataccaaggaacacatttctatttgcagtgtttccgttgtaggtggaacggccaccagacagagaggctttctaggatgcattcggtctctgcagttgaatggggtggccctggatctggaagaaagagccacaatgaygccaggagtggagccagggtgtgcaggacactgcagcacctatggacacttgtgtcgcaatggagggagatgcagagagaaacgcaggggggtcacctgtgactgtgccttctcaacctatgatggaccgttctgctccaatggtaagtgtgaccaaggagcaggttatagggaaagtacatgaaactta

SEQ ID NO: 577732 - DNA, 539 bp, Homo sapiens
acttgtgtcgcaatggagggagatgcagagagaaacgcaggggggtcacctgtgactgtgccttctcarcctatgatggaccgttctgctccaatggtaagtgtgaccaaggagcaggttatagggaaagtacatgaaacttaaatagtatgaagaatgcttctggcatttgatattataaagagaggataagattgaattatttgaaatggaataatttctgtaccaaattcctctattgaatttagaagggatatgactgtttttgaaaacttaaggctatcagtcctctctgggtttcttatttagaagatctctgggttaccccagcatctgttcaatgctaatcctctcgaaataatttggttttcaaaactctgtccttgtactgttctaattttaacatcagtaaagcatcattcttatttttgtttttaatttttagagacaacgtattgctattcaagcctctctgttgcccaggccggacttgaactcctaggcttgagcaatcgtcttacccattgtcccttgtgaca

SEQ ID NO: 577733 - DNA, 588 bp, Homo sapiens
ggtaagtgtgaccaaggagcaggttatagggaaagtacatgaaacttaaatagtatgaagaatgcttctggcatttgatattataaagagaggataagattgaattatttgaaatggaataatttctgtaccaaattcctctattgaatttagaagggatatgactgtttttgaaaacttaaggctatcagtcctctctgggtttcttatttagaagatctctgggttaccccagcatctgttcaatgctaatcctctcgaaataatttggttttcaaaactctgtccttgtactgttctaattttaacatcagtaaagcatcattcttatttttgtttttaatttttagagacaacrtattgctattcaagcctctctgttgcccaggccggacttgaactcctaggcttgagcaatcgtcttacccattgtcccttgtgacagtgactttaagtgattcaaaaggcctttatagaaatgtcttttcttataaaacaagcatactaactagaaggggaaaagaatatttaaatattgacagtcattaacaggatcactcaaacactttgctctatgatgtttgactc

SEQ ID NO: 577734 - DNA, 592 bp, Homo sapiens
acatctttggcataaaagaacatttctaaattctgaccttgaaggagggttggtcttcaaatcaccttttctctagttacttcaggagctctgtttcatgcttcctacaaagyaaatcgatttttaaagaggaggtaacattcaaataaaaaacctggtactctggcatttccaggctggccacataaggagctctgtaaaccctctctcatacgaaacaggcataactagtaaaaattattattttaaaaaacaactattgaaagtctttagaaaatgtcctaaggaaatacatcaaatgaagaaacatttattaatcagtaataacagtgagagtttgaggcatttaagccaagaccctctccctgcacctccccatccctagctcagtatgacggaagctccactctatatggatataaccaagaagccaaaggtttcctctctacccaggtcctactacagagatactgcattaccccaagattgggtgccagcatttcttgtcatccccagttttgtaggacagaagctctgtccacgcagaaacagctgagaagtctggggtttccttcctacaccaactcctcat

SEQ ID NO: 577735 - DNA, 592 bp, Homo sapiens
acatctttggcataaaagaacatttctaaattctgaccttgaaggagggttggtcttcaaatcaccttttctctagttacttcaggagctctgtttcatgcttcctacaaagcaaatcgatttttaaagaggaggtaacattcaaataaaaaacctggtactctggcatttccaggctggccacataaggagctctgtaaaccctctctcatacgaaacaggcataactagtaaaaattattattttaaaaaacaactattgaaagtctttagaaaatgtcctaaggaaatacatcaaatgaagaaacatttattaatcagtaataacagtgaragtttgaggcatttaagccaagaccctctccctgcacctccccatccctagctcagtatgacggaagctccactctatatggatataaccaagaagccaaaggtttcctctctacccaggtcctactacagagatactgcattaccccaagattgggtgccagcatttcttgtcatccccagttttgtaggacagaagctctgtccacgcagaaacagctgagaagtctggggtttccttcctacaccaactcctcat

SEQ ID NO: 577736 - DNA, 592 bp, Homo sapiens
acatctttggcataaaagaacatttctaaattctgaccttgaaggagggttggtcttcaaatcaccttttctctagttacttcaggagctctgtttcatgcttcctacaaagcaaatcgatttttaaagaggaggtaacattcaaataaaaaacctggtactctggcatttccaggctggccacataaggagctctgtaaaccctctctcatacgaaacaggcataactagtaaaaattattattttaaaaaacaactattgaaagtctttagaaaatgtcctaaggaaatacatcaaatgaagaaacatttattaatcagtaataacagtgagagtttgaggcatttaagccaagaccctctccctgcacctccccatccctagctcagtawgacggaagctccactctatatggatataaccaagaagccaaaggtttcctctctacccaggtcctactacagagatactgcattaccccaagattgggtgccagcatttcttgtcatccccagttttgtaggacagaagctctgtccacgcagaaacagctgagaagtctggggtttccttcctacaccaactcctcat

SEQ ID NO: 577737 - DNA, 607 bp, Homo sapiens
aattattattttaaaaaacaactattgaaagtctttagaaaatgtcctaaggaaatacatcaaatgaagaaacatttattaatcagtaataacagtgagagtttgaggcatttaagccaagaccctctccctgcacctccccatccctagctcagtatgacrgaagctccactctatatggatataaccaagaagccaaaggtttcctctctacccaggtcctactacagagatactgcattaccccaagattgggtgccagcatttcttgtcatccccagttttgtaggacagaagctctgtccacgcagaaacagctgagaagtctggggtttccttcctacaccaactcctcattccaggacataaggtcttcaggtgtggcagctggaaaaatcctgtgtcccaattgccctcactccagcttacttgtaaggaacagtttctccaccaggagaggcaaggcaagaagttacctttcccaccctgtgccctacttgtaagcagaggttttactacaaaggagcaggccactctcactctccacagcttcagagcagtgaggcacatttaaccaagaggtagagggaggccatgaaaatacaca

SEQ ID NO: 577738 - DNA, 592 bp, Homo sapiens
acatctttggcataaaagaacatttctaaattctgaccttgaaggagggttggtcttcaaatcaccttttctctagttacttcaggagctctgtttcatgcttcctacaaagcaaatcgatttttaaagaggaggtaacattcaaataaaaaacctggtactctggcatttccaggctggccacataaggagctctgtaaaccctctctcatacgaaacaggcataactagtaaaaattattattttaaaaaacaactattgaaagtctttagaaaatgtcctaaggaaatacatcaaatgaagaaacatttattaatcagtaataacagtgagagtttgaggcatttaagccaagaccctctccctgcacctccccatccctagctcagtatgacggaagctccactctatatggatatarccaagaagccaaaggtttcctctctacccaggtcctactacagagatactgcattaccccaagattgggtgccagcatttcttgtcatccccagttttgtaggacagaagctctgtccacgcagaaacagctgagaagtctggggtttccttcctacaccaactcctcat

SEQ ID NO: 577739 - DNA, 451 bp, Homo sapiens
tgaaaatacacagcttggtagccctccccaagtgaactgatttctatttggaacagagcacrgataagtttaagctagtggtatgaagatattggcagtaagcaattaagagaatgttgataactccaagagagtaatgagttaagccagggaagtttaacagagaaaagaaaaaagaatcagcaaacttgaagcaagatcagtagagattatgtatcctgaagaatacagagaaataataatgaaaaaaataaacagatcatcagagaaatatcagacataactaagcacaccaacatatacgtaattgaaaataccaggagagagagaaaggatcagaaaaaaatatttgaaaaataatggttgaaaacatccccaaattaataaaaatcattaatctaagatacagaagctcagtgaaatacagatgacacaaagaagtttatatcca

SEQ ID NO: 577740 - DNA, 502 bp, Homo sapiens
caaggcaagaagttacctttcccaccctgtgccctacttgtaagcagaggttttactacaaaggagcaggccactctcactctccacagcttcagagcagtgaggcacatttaaccaagaggtagagggaggccatgaaaatacacagcttggtagccctccccaagtgaactgatttctatttggaacagagcacagataagtttaagctagtggtatgaagatattggcagtaagcaattaagagaatgttgataactcyaagagagtaatgagttaagccagggaagtttaacagagaaaagaaaaaagaatcagcaaacttgaagcaagatcagtagagattatgtatcctgaagaatacagagaaataataatgaaaaaaataaacagatcatcagagaaatatcagacataactaagcacaccaacatatacgtaattgaaaataccaggagagagagaaaggatcagaaaaaaatatttgaaaaataatggttga

SEQ ID NO: 577741 - DNA, 451 bp, Homo sapiens
tgaaaatacacagcttggtagccctccccaagtgaactgatttctatttggaacagagcacagataagtttaagctagtggtatgaagatattggcagtaagcaattaagagaatgttgataactccaagagagtaatgagttaagccagggaagtttaacagagaaaagaaaaaagaatcagcaaacttgaagcaagatcagtagagattatgtatcctgaagaatacagagaaataataatgaaaaaaataaacagatcatcagagaaatatcagacataactaagcacaccaacatatacgtaattgaaaayaccaggagagagagaaaggatcagaaaaaaatatttgaaaaataatggttgaaaacatccccaaattaataaaaatcattaatctaagatacagaagctcagtgaaatacagatgacacaaagaagtttatatcca

SEQ ID NO: 577742 - DNA, 615 bp, Homo sapiens
taactaagcacaccaacatatacgtaattgaaaataccaggagagagagaaaggatcagaaaaaaatatttgamaaataatggttgaaaacatccccaaattaataaaaatcattaatctaagatacagaagctcagtgaaatacagatgacacaaagaagtttatatccagacacatcttattaaaaactttgaaagccaaagtcaagaaggaaattttaaaagcagtaagagaaaaatcatatatacaaggaaacaccaggatcaacagctaacttctaatctgaaagaatggaggccaaaggacagtgagataacatattcaaagagatgaaagaaaaccattgtcatgaagaaacttacacccagcacaaccatctttcatgttcagtagcacaggatgactatagttaacaataatttattgtatatttcaaaataactagaagagtggaactggaatgttcctaacaaaaagaaatgataaatgtttaaggtgatggatatctcagttaccctgatttgatcattacacattgtttggttgtatcaaaatattacctctaccccataaatacatacaactattaggtattcataaaaactaaaaattat

SEQ ID NO: 577743 - DNA, 451 bp, Homo sapiens
tgaaaatacacagcttggtagccctccccaagtgaactgatttctatttggaacagagcacagataagtttaagctagtggtatgaagatattggcagtaagcaattaagagaatgttgataactccaagagagtaatgagttaagccagggaagtttaacagagaaaagaaaaaagaatcagcaaacttgaagcaagatcagtagagattatgtatcctgaagaatacagagaaataataatgaaaaaaataaacagatcatcagagaaatatcagacataactaagcacaccaacatatacgtaattgaaaataccaggagagagagaaaggatcagaaaaaaatatttgaaaaataatggttgaaaacatycccaaattaataaaaatcattaatctaagatacagaagctcagtgaaatacagatgacacaaagaagtttatatcca

SEQ ID NO: 577744 - DNA, 615 bp, Homo sapiens
taactaagcacaccaacatatacgtaattgaaaataccaggagagagagaaaggatcagaaaaaaatatttgaaaaataatggttgaaaacatccccaaattaataaaaatcattaatctaagatacagaagctcagtgaaatacagatgacacaaagaagtttatatccagacacatcttattaaaaactttgaaagccaaagtcaagaaggaaattttaaaagcagtaagagaaaaatcatatatacaaggaaacrccaggatcaacagctaacttctaatctgaaagaatggaggccaaaggacagtgagataacatattcaaagagatgaaagaaaaccattgtcatgaagaaacttacacccagcacaaccatctttcatgttcagtagcacaggatgactatagttaacaataatttattgtatatttcaaaataactagaagagtggaactggaatgttcctaacaaaaagaaatgataaatgtttaaggtgatggatatctcagttaccctgatttgatcattacacattgtttggttgtatcaaaatattacctctaccccataaatacatacaactattaggtattcataaaaactaaaaattat

SEQ ID NO: 577745 - DNA, 577 bp, Homo sapiens
ttagccaggcgcggtggcgggcgcctgtagtcccagctactcaggagcctgaggcaggagaatggcgtgaacctgggaggcggagcttgcagtgagccgagatggcaccactrcactccagactgggcgacagagcaagactccgtctcagaaaacaaagaaaagtgtattatcataaaagtatttgaaaacaatttcattaaaatgtacccatttcattgtactaacaataacatgtaatgatctatgatgatgcaaacactctatacttgtaaaatgatttaaaatttcccacttgttaactgaaggatgtacgcggtggtagagacatgtatgtctctattcttttaaatctgaaagcattatctaaaacccaatcatcatatacctgtagggaaaaagcctaacacagccatatccaaaagtcatagtccgtcagaagtatgttaaatgttataaaattacttgacctcagcatttctgagttttggtgttttcaatttataatataataggtggttggtttattttaaccaaacttaaaaagcaatgatgcctgcaaagcctctgattggac

SEQ ID NO: 577746 - DNA, 524 bp, Homo sapiens
aattgtaatagtgtttcttacccactagcatcatacattgccgtggagaagtctgagactaaatgtatttttatttcctgttctacctcaatgtgtgggggctacttctgagaggggtggttcaacaaggagcctgagcctctctgtacattcttgccgagtgtgccagatggtgtggtgtctccatcccctaataccaagcagtttctgtagccaatcgtgtaggcagctaagtagttcaaagagaacacaacatcactatygatgcgtactcactccccagagagggcggggaccggcttgtctcctgcttgatgaaggagtcccggacccttgtctgggggctcctcatctgagatgcaaacctacccactgtgtgtgtagcatccacctgggccaatggattgtgttgccctgtgaaatttggagataaggggaaccaatgcaaatattctgacactcatgctgcatgctgtgctgtgagcaataaagttctttaactctgacccagaaattttgtgttt

SEQ ID NO: 577747 - DNA, 524 bp, Homo sapiens
aattgtaatagtgtttcttacccactagcatcatacattgccgtggagaagtctgagactaaatgtatttttatttcctgttctacctcaatgtgtgggggctacttctgagaggggtggttcaacaaggagcctgagcctctctgtacattcttgccgagtgtgccagatggtgtggtgtctccatcccctaataccaagcagtttctgtagccaatcgtgtaggcagctaagtagttcaaagagaacacaacatcactatcgaygcgtactcactccccagagagggcggggaccggcttgtctcctgcttgatgaaggagtcccggacccttgtctgggggctcctcatctgagatgcaaacctacccactgtgtgtgtagcatccacctgggccaatggattgtgttgccctgtgaaatttggagataaggggaaccaatgcaaatattctgacactcatgctgcatgctgtgctgtgagcaataaagttctttaactctgacccagaaattttgtgttt

SEQ ID NO: 577748 - DNA, 546 bp, Homo sapiens
gtgctcctgctctagttcttttatgtaccttgttttaagtcttccttgttccccgctccctctcaccataaggacgtggctctgctgacttttctctttaaaactctatcctaccctgctccattcacctcttttatactaattaaagcctcctcttccttctgatctcagcttaagagacactgtcttgaggcacctttcgttagccttccaaatctggctctttcgtaaaaccatcctacagatcattgttctttttcatcagcatggttgtctcaatttgatgactgatgtgatgatgtgaccggtgcatgtcttcagtgaactgtcggaaagcggagctcgtgtgcactgcagagtgtattcctgttcccttccaggtgcgtgtggatgacccagcagccaggtccagcactggcctaaggctccaaacttctacarttagaaaattggcaaagatactgatttaactttggcgcgtttgttaggcttcttcttctctttttttttttttttttttggataacactttaaataacatatgat

SEQ ID NO: 577749 - DNA, 585 bp, Homo sapiens
gtcccagcaactaggaaggcttaggtgagatgatctcttgagcccaggaatgtgaggtggcagtgaactatgatcatgccactgcactccagcctgggtgacaaagtgagacctcatctctaaaataaataaataaattgattaatgaagaaagaaagaaaaataaaatattctcttctgtaaaacttgtagcttcctcttcgtttctcttttcctttccttatcttcatctctgttttctttaacataacacttattgattcttttcccttcttttggggcagctgggactaggggatctgcagggatagggtcaaggaatgaccactgggttagaagcttggttccacactggggaatgagcaaatatgtaaawacagtgaggagcataggagtgacctcactgaggaaagagttatacatgtgggaaggaggaagactgtaatgaaccctgtggtgctgggttaaaaacggaggtatccacatgaactcatggattttaatatacataatagataactgtagaatacacatagaagagagagactgcgtgtgtgtatgtgtgtgtgagagagagagagagag

SEQ ID NO: 577750 - DNA, 585 bp, Homo sapiens
gtcccagcaactaggaaggcttaggtgagatgatctcttgagcccaggaatgtgaggtggcagtgaactatgatcatgccactgcactccagcctgggtgacaaagtgagacctcatctctaaaataaataaataaattgattaatgaagaaagaaagaaaaataaaatattctcttctgtaaaacttgtagcttcctcttcgtttctcttttcctttccttatcttcatctctgttttctttaacataacacttattgattcttttcccttcttttggggcagctgggactaggggatctgcagggatagggtcaaggaatgaccactgggttagaagcttggttccacactggggaatgagcaaatatgtaaatamagtgaggagcataggagtgacctcactgaggaaagagttatacatgtgggaaggaggaagactgtaatgaaccctgtggtgctgggttaaaaacggaggtatccacatgaactcatggattttaatatacataatagataactgtagaatacacatagaagagagagactgcgtgtgtgtatgtgtgtgtgagagagagagagagag

SEQ ID NO: 577751 - DNA, 601 bp, Homo sapiens
tcaagagaaaagctatttcttggtttgtttgtttgtttttgagatggagtctcgctctgttgcgcaggctggagtgcagtggcaggatctcggctcactgcaagctccgcctcccgggttcacgtcattctcctgcctcagcctcccgactagctgggactacaggcacccaccaccatgcctggctaattttttgtatttttagtagagacggggtttcaccgtgttagccaggatggtctggatctcctgacctcatgatccgtccgccttrgcctcccaaactgctgggattacaggcgtgagccactgcgcctagccgagaaaagctatttctaacggaggcatgtcaaccaattaatgtggaaggaatgacagagcttagaaaatcaccattggcagccatcagaataaaaattcaatcaggagccatcaatatattgtaaaaccattggatgaaaaaattttaaactgggtaaagttgtgtttctgtaaccttaaagtgtcaaaaatacatgaaaaaagagaaaaataataacttcatgttggagaaactggacaaatgccactttacaaggcagttgaaactaacaggaccagt

SEQ ID NO: 577752 - DNA, 601 bp, Homo sapiens
tcaagagaaaagctatttcttggtttgtttgtttgtttttgagatggagtctcgctctgttgcgcaggctggagtgcagtggcaggatctcggctcactgcaagctccgcctcccgggttcacgtcattctcctgcctcagcctcccgactagctgggactacaggcacccaccaccatgcctggctaattttttgtatttttagtagagacggggtttcaccgtgttagccaggatggtctggatctcctgacctcatgatccgtccgccttagcctcccaaactgctgggattacaggcgtgagccactgcgcctagccgagaaaagctatttctaacggaggcatgtcaaccaattaatgtggaaggaatgacagagcttagaaaatcacyattggcagccatcagaataaaaattcaatcaggagccatcaatatattgtaaaaccattggatgaaaaaattttaaactgggtaaagttgtgtttctgtaaccttaaagtgtcaaaaatacatgaaaaaagagaaaaataataacttcatgttggagaaactggacaaatgccactttacaaggcagttgaaactaacaggaccagt

SEQ ID NO: 577753 - DNA, 567 bp, Homo sapiens
aacctccacctgccgggttcaagcgattctcctgcctcagcctcctgagtagctgggattacaggcgcaggtgccaccacgcctggctaatttttgtatttttaatagagacacggttttaccatgttggccaggatggtcgtgatctcttgacctgatgatccacccacctcagcctctcaaagtgctgggattacaggcgcgagccaccgggccctgcagtatctcagtgtttaggtatcaatgtttaggtattgtcatctgtttacagatgagatagccaagcctcagagargtggagtaaccagctaatgagagggatcccaggatagccgacccccaaatttgaaccattcacattgcagaggattggcatatgtgacagctatattttatcaacactattagtgagatcattagacatttttatccattccttcagtttcacttctcggtggagttagagagcttgtaattgggacagaagtcctccagggtccactcaaaaccagatcgcaggatacccgctgattggaagcagcactgcgcacctcccccgcggccagg

SEQ ID NO: 577754 - DNA, 567 bp, Homo sapiens
aacctccacctgccgggttcaagcgattctcctgcctcagcctcctgagtagctgggattacaggcgcaggtgccaccacgcctggctaatttttgtatttttaatagagacacggttttaccatgttggccaggatggtcgtgatctcttgacctgatgatccacccacctcagcctctcaaagtgctgggattacaggcgcgagccaccgggccctgcagtatctcagtgtttaggtatcaatgtttaggtattgtcatctgtttacagatgagatagccaagcctcagagaggtggagtaaccagctaatgagagggatcccaggatagccgacccccaaayttgaaccattcacattgcagaggattggcatatgtgacagctatattttatcaacactattagtgagatcattagacatttttatccattccttcagtttcacttctcggtggagttagagagcttgtaattgggacagaagtcctccagggtccactcaaaaccagatcgcaggatacccgctgattggaagcagcactgcgcacctcccccgcggccagg

SEQ ID NO: 577755 - DNA, 443 bp, Homo sapiens
tctctggtcaatgttacatctctgtrtaatgaagaaacgagagagctggagttttcacttaaagtgtaatgttcttgaaaatggtatgtcattgaggagccagttgcaaaatatgcggaaatctctgaaatgataaatacatttttgttatgttaacaaaatgtaagtccaacggtcttgttttaagtacatttagagaatgagaccaaaccttaaatatcctgggagataaagtaatagtgaaatcctttcctgttttattttttatttttcactttttaaagttttttaaaaactacaacttgaagaaaaagtagcaaactccaatatactcataacccagaattgactaacacttaatagagattttaattctctaaatcatcctcatcttatatttacatataactaattcttcagtataaatgtataatttataggtg

SEQ ID NO: 577756 - DNA, 631 bp, Homo sapiens
tgtaaaattctatgtcttttagtatatttgcaggcatgtgcaaacattgccatgatcaattttagagtatttttactsccctcccccgtgcaccttcttattccctcctacaaaaacctccatatcctctagcagtcattctctgtttctccccaacaccccagcctaggcaactactaatttactttctgtctctgcagaggttcctattcgagagatttcatatcagtggaatcatataacgtgtggtcttttcaatctggcctctttcacttagcatggtattttcaaggttcatccatcttgtagcatgtatgagtattttatgcattttattgaataatatttcattggatgtaaatagtaatggatgtgccacattttgcggatctatttaacagttgatagacatttgggttgtttccactttttgactattataaataatgcttccatgaaaattcacgtgtaagtttttctatggatacgtttttatttttcttaggaatatacctaggagtaaaattgttcaatcttatgataacaccaactttaaaatttggaggagctgccatattttttccaaaatagctataccattttacattccaaacagaaatcatgagggttt

SEQ ID NO: 577757 - DNA, 631 bp, Homo sapiens
tgtaaaattctatgtcttttagtatatttgcaggcatgtgcaaacattgccatgatcaattttagagtatttttactgccctcccccgtgcaccttcttattccctcctacaaaaacctccatatcctctagcagtcattctctgtttctccccaacaccccagcctaggcaactactaatttactttctgtctctgcagagkttcctattcgagagatttcatatcagtggaatcatataacgtgtggtcttttcaatctggcctctttcacttagcatggtattttcaaggttcatccatcttgtagcatgtatgagtattttatgcattttattgaataatatttcattggatgtaaatagtaatggatgtgccacattttgcggatctatttaacagttgatagacatttgggttgtttccactttttgactattataaataatgcttccatgaaaattcacgtgtaagtttttctatggatacgtttttatttttcttaggaatatacctaggagtaaaattgttcaatcttatgataacaccaactttaaaatttggaggagctgccatattttttccaaaatagctataccattttacattccaaacagaaatcatgagggttt

SEQ ID NO: 577758 - DNA, 631 bp, Homo sapiens
tgtaaaattctatgtcttttagtatatttgcaggcatgtgcaaacattgccatgatcaattttagagtatttttactgccctcccccgtgcaccttcttattccctcctacaaaaacctccatatcctctagcagtcattctctgtttctccccaacaccccagcctaggcaactactaatttactttctgtctctgcagaggttcctattcgagagatttcatatcagtggaatcatataacgtgtggtcttttcaatctggcctctttcacttagcatggtattttcaaggttcatccatcttgtagcatgtatgagtattttatgcattttattgaataatatttcattggatgtaaatagtaatggatgtgccacattttgcggatctatttaacagttgatagacatttgggttgtttccactttttgactattataaataatgcttccatgaaaattcacgtgtaagtttttctatggatacgtttttatttttcttaggaatatacctaggagtaaaattgttcaatcttatgawaacaccaactttaaaatttggaggagctgccatattttttccaaaatagctataccattttacattccaaacagaaatcatgagggttt

SEQ ID NO: 577759 - DNA, 602 bp, Homo sapiens
cattgtgactttgattgcctactggctaatgttgccaactattttttcatgattttattggacattcacacatatttgctgaataaatatytacttataagctttacctattatttaattaggttaaatttctttttcttattcagttgttggttttttgtttttatttttgtttttttgagacagagtctcgctctgttgcccaggctggagtgcagtggcgtgatctccgctcactgcaagctctgcctcctgggttcacgccattctcctgcctcagccacctgagtagctgggactacaggcgcccgccaccacgcccgtctaattttttgtatttttagtagagatggggtttcactgtgttagccaggatggtctcgaactcctgacctcgtgatctgcccacctcggcctcccaaaatgctgggattacaggtgtgagccaccacgcacggcatcttattcagttgtaaaactctttaaataatttgaatactagacccttataagagacatgatttgcaataatttcttccattctgtgggttatcttctcttttgttctcccatgttttaacagttttatagttttagttctt

SEQ ID NO: 577760 - DNA, 602 bp, Homo sapiens
cattgtgactttgattgcctactggctaatgttgccaactattttttcatgattttattggacattcacacatatttgctgaataaatatctacttataagctttacctattatttaattaggttaaatttctttttcttattcagttgttggttttttgtttttatttttgtttttttgagacagagtctcgctctgttgcccaggctggagtgcagtggcgtgatctcygctcactgcaagctctgcctcctgggttcacgccattctcctgcctcagccacctgagtagctgggactacaggcgcccgccaccacgcccgtctaattttttgtatttttagtagagatggggtttcactgtgttagccaggatggtctcgaactcctgacctcgtgatctgcccacctcggcctcccaaaatgctgggattacaggtgtgagccaccacgcacggcatcttattcagttgtaaaactctttaaataatttgaatactagacccttataagagacatgatttgcaataatttcttccattctgtgggttatcttctcttttgttctcccatgttttaacagttttatagttttagttctt

SEQ ID NO: 577761 - DNA, 602 bp, Homo sapiens
cattgtgactttgattgcctactggctaatgttgccaactattttttcatgattttattggacattcacacatatttgctgaataaatatctacttataagctttacctattatttaattaggttaaatttctttttcttattcagttgttggttttttgtttttatttttgtttttttgagacagagtctcgctctgttgcccaggctggagtgcagtggcgtgatctccgctcactgcaagctctgcctcctgggttcacgccattctcctgcctcagccacctgagtagctgggactacaggcgcccgccaccacgcccgkctaattttttgtatttttagtagagatggggtttcactgtgttagccaggatggtctcgaactcctgacctcgtgatctgcccacctcggcctcccaaaatgctgggattacaggtgtgagccaccacgcacggcatcttattcagttgtaaaactctttaaataatttgaatactagacccttataagagacatgatttgcaataatttcttccattctgtgggttatcttctcttttgttctcccatgttttaacagttttatagttttagttctt

SEQ ID NO: 577762 - DNA, 568 bp, Homo sapiens
tgttagactgaggaagttatcgtctataattagtttactgaatttaaacaaaaattcatgaraggatgttgggttttatcaaatgacttttctgcatcagtagagactatcatgtgtttctgtcctttattctaagatatagtatattatattaattgattttcagctgttaaaacaactttccatttctgggatcatttccactttgtcttgatgtatagtcatttttatatgtgactggatttgctttggtaatactctgttcagggttttcacatctatctacttaaatgatattgatctgtagatttaaaatatatatactggtatatctatgtctggctttggtattagggaaatactgaccttacagaataagttgaaaaatgctcctttctcttttattttttggaagagttttgaagaattaatacttcttatttaaatagttgatatatttttaaatagttgatatattctgatagttgatagcatcaattgtttgaaaccatctggacctgggctttactttctgtggtattttaatattattaagacattcctttta

SEQ ID NO: 577763 - DNA, 568 bp, Homo sapiens
tgttagactgaggaagttatcgtctataattagtttactgaatttaaacaaaaattcatgagaggatgttggrttttatcaaatgacttttctgcatcagtagagactatcatgtgtttctgtcctttattctaagatatagtatattatattaattgattttcagctgttaaaacaactttccatttctgggatcatttccactttgtcttgatgtatagtcatttttatatgtgactggatttgctttggtaatactctgttcagggttttcacatctatctacttaaatgatattgatctgtagatttaaaatatatatactggtatatctatgtctggctttggtattagggaaatactgaccttacagaataagttgaaaaatgctcctttctcttttattttttggaagagttttgaagaattaatacttcttatttaaatagttgatatatttttaaatagttgatatattctgatagttgatagcatcaattgtttgaaaccatctggacctgggctttactttctgtggtattttaatattattaagacattcctttta

SEQ ID NO: 577764 - DNA, 568 bp, Homo sapiens
tgttagactgaggaagttatcgtctataattagtttactgaatttaaacaaaaattcatgagaggatgttgggttttatcaaatgacttttctgcatcagtagagactatcatgtgtttctgtcctttattctaagatatagtatattatattaattgattttcagctgttaaaacaactttccatttctgggatcatttccactttgtcttgatgtatagtcatttttatatgtgactggatttgctttggtaatactctgttcagggttttcacatctatctacttaaatgatattgrtctgtagatttaaaatatatatactggtatatctatgtctggctttggtattagggaaatactgaccttacagaataagttgaaaaatgctcctttctcttttattttttggaagagttttgaagaattaatacttcttatttaaatagttgatatatttttaaatagttgatatattctgatagttgatagcatcaattgtttgaaaccatctggacctgggctttactttctgtggtattttaatattattaagacattcctttta

SEQ ID NO: 577765 - DNA, 540 bp, Homo sapiens
tgaccttacagaataagttgraaaatgctcctttctcttttattttttggaagagttttgaagaattaatacttcttatttaaatagttgatatatttttaaatagttgatatattctgatagttgatagcatcaattgtttgaaaccatctggacctgggctttactttctgtggtattttaatattattaagacattccttttattgttataggccaatttatattttctcctccttcttgaaacagaagtagtagtttgtgttaattttgtagttagtgtcaccctaggaattcgtccattttatctaagttatgtaatttttttcaacatacagttgtttatattctcttgcaatccatgttatttctgtaaggttggtagtaatatcactctttcatatgtcattctagtaatttgaatcatctcttttattcttggtcagttgtactaaaggtttgccaattttgttaacaattttaaaggactgacttttggtttggttaattttttctgtcacttttatattatccatttga

SEQ ID NO: 577766 - DNA, 540 bp, Homo sapiens
tgaccttacagaataagttgaaaaatgctcctttctcttttattttttggaagagttttgaagaattaatacttcttatttaaatagttgatatatttttaaatagttgatatattctgatagttgatagcatcaattgtttgaaaccatctggacctgggctttactttstgtggtattttaatattattaagacattccttttattgttataggccaatttatattttctcctccttcttgaaacagaagtagtagtttgtgttaattttgtagttagtgtcaccctaggaattcgtccattttatctaagttatgtaatttttttcaacatacagttgtttatattctcttgcaatccatgttatttctgtaaggttggtagtaatatcactctttcatatgtcattctagtaatttgaatcatctcttttattcttggtcagttgtactaaaggtttgccaattttgttaacaattttaaaggactgacttttggtttggttaattttttctgtcacttttatattatccatttga

SEQ ID NO: 577767 - DNA, 529 bp, Homo sapiens
atattgatctgtagatttaaaatatatatactggtatatctatgtctggctttggtattagggaaatactgaccttacagaataagttgaaaaatgctcctttctcttttattttttggaagagttttgaagaattaatacttcttatttaaatagttgatatatttttaaatagttgatatattctgatagttgatagcatcaattgtttgaaaccatctggacctgggctttactttctgtggtattttaatattattaagrcattccttttattgttataggccaatttatattttctcctccttcttgaaacagaagtagtagtttgtgttaattttgtagttagtgtcaccctaggaattcgtccattttatctaagttatgtaatttttttcaacatacagttgtttatattctcttgcaatccatgttatttctgtaaggttggtagtaatatcactctttcatatgtcattctagtaatttgaatcatctcttttattcttggtcagttgtactaaaggtt

SEQ ID NO: 577768 - DNA, 540 bp, Homo sapiens
tgaccttacagaataagttgaaaaatgctcctttctcttttattttttggaagagttttgaagaattaatacttcttatttaaatagttgatatatttttaaatagttgatatattctgatagttgatagcatcaattgtttgaaaccatctggacctgggctttactttctgtggtattttaatattattaagacattccttttattgttataggccaatttatattttctcctccttcttgaaacagaagtagtagtttgtgttaattttgtagttagtgtcaycctaggaattcgtccattttatctaagttatgtaatttttttcaacatacagttgtttatattctcttgcaatccatgttatttctgtaaggttggtagtaatatcactctttcatatgtcattctagtaatttgaatcatctcttttattcttggtcagttgtactaaaggtttgccaattttgttaacaattttaaaggactgacttttggtttggttaattttttctgtcacttttatattatccatttga

SEQ ID NO: 577769 - DNA, 540 bp, Homo sapiens
tgaccttacagaataagttgaaaaatgctcctttctcttttattttttggaagagttttgaagaattaatacttcttatttaaatagttgatatatttttaaatagttgatatattctgatagttgatagcatcaattgtttgaaaccatctggacctgggctttactttctgtggtattttaatattattaagacattccttttattgttataggccaatttatattttctcctccttcttgaaacagaagtagtagtttgtgttaattttgtagttagtgtcaccctaggaattcgtccattttatctaagttaygtaatttttttcaacatacagttgtttatattctcttgcaatccatgttatttctgtaaggttggtagtaatatcactctttcatatgtcattctagtaatttgaatcatctcttttattcttggtcagttgtactaaaggtttgccaattttgttaacaattttaaaggactgacttttggtttggttaattttttctgtcacttttatattatccatttga

SEQ ID NO: 577770 - DNA, 632 bp, Homo sapiens
taaaggtttgccaattttgttaacaattttaaaggactgacttttggtttggttaattttttctgtcacttttatattatccatttgagaaatttctcctgttttatttaytatttcctgtttctccttacattagatttagtttgctcttcttttttcagtgtcttaaggtggcaggtcaggttttttatttgggaaccatttttctttttaaatattgatgtttgcagctttaaaattccctctaaaccctgctttagctgtgttagtatatgttttagtaatgttgtatttttgctttcatttatctcaaaaccttttctaatttcccttttgatttcggagtgtatagtttaatttccacatatttgtgatattccacaatttctttatgttattaatttcatctcattgtgttttaaaaagacccttcatatgatttcaatccttttaaatgtgttgaggcttgatttacaggtagcatgttgtctaacctagaatatgttccatgaacacttgagaagaatatacattctgctattgttaagtggtgtgttctacagatgtgtgttagaatgattgcgtttttatttttttcaactctattttcttggtaatcttctgagtaatta

SEQ ID NO: 577771 - DNA, 489 bp, Homo sapiens
cactctttcatatgtcattctagtaatttgaatcatctcttttattcttggtcagttgtactaaaggtttgccaattttgttaacaattttaaaggactgacttttggtttggttaattttttctgtcacttttatattatccatttgagaaatttctcctgttttatttactatttcctgtttctccttacattagatttagtttgctcttcttttttcagtgtcttarggtggcaggtcaggttttttatttgggaaccatttttctttttaaatattgatgtttgcagctttaaaattccctctaaaccctgctttagctgtgttagtatatgttttagtaatgttgtatttttgctttcatttatctcaaaaccttttctaatttcccttttgatttcggagtgtatagtttaatttccacatatttgtgatattccacaatttctttatgttattaatttcatctcattgtgttttaaaaagac

SEQ ID NO: 577772 - DNA, 489 bp, Homo sapiens
cactctttcatatgtcattctagtaatttgaatcatctcttttattcttggtcagttgtactaaaggtttgccaattttgttaacaattttaaaggactgacttttggtttggttaattttttctgtcacttttatattatccatttgagaaatttctcctgttttatttactatttcctgtttctccttacattagatttagtttgctcttcttttttcagtgtcttaaggtggcaggtcaggttttttatttgggaaccatttttctttttraatattgatgtttgcagctttaaaattccctctaaaccctgctttagctgtgttagtatatgttttagtaatgttgtatttttgctttcatttatctcaaaaccttttctaatttcccttttgatttcggagtgtatagtttaatttccacatatttgtgatattccacaatttctttatgttattaatttcatctcattgtgttttaaaaagac

SEQ ID NO: 577773 - DNA, 632 bp, Homo sapiens
taaaggtttgccaattttgttaacaattttaaaggactgacttttggtttggttaattttttctgtcacttttatattatccatttgagaaatttctcctgttttatttactatttcctgtttctccttacattagatttagtttgctcttcttttttcagtgtcttaaggtggcaggtcaggttttttatttgggaaccatttttctttttaaatattgatgtttrcagctttaaaattccctctaaaccctgctttagctgtgttagtatatgttttagtaatgttgtatttttgctttcatttatctcaaaaccttttctaatttcccttttgatttcggagtgtatagtttaatttccacatatttgtgatattccacaatttctttatgttattaatttcatctcattgtgttttaaaaagacccttcatatgatttcaatccttttaaatgtgttgaggcttgatttacaggtagcatgttgtctaacctagaatatgttccatgaacacttgagaagaatatacattctgctattgttaagtggtgtgttctacagatgtgtgttagaatgattgcgtttttatttttttcaactctattttcttggtaatcttctgagtaatta

SEQ ID NO: 577774 - DNA, 578 bp, Homo sapiens
aatttctcctgttttatttactatttcctgtttctccttacattagatttagtttgctcttcttttttcagtgtcttaaggtggcaggtcaggttttttatttgggaaccatttttctttttaaatattgatgtttgcagctttaaaattccctctaaaccctgctttagctgtgttastatatgttttagtaatgttgtatttttgctttcatttatctcaaaaccttttctaatttcccttttgatttcggagtgtatagtttaatttccacatatttgtgatattccacaatttctttatgttattaatttcatctcattgtgttttaaaaagacccttcatatgatttcaatccttttaaatgtgttgaggcttgatttacaggtagcatgttgtctaacctagaatatgttccatgaacacttgagaagaatatacattctgctattgttaagtggtgtgttctacagatgtgtgttagaatgattgcgtttttatttttttcaactctattttcttggtaatcttctgagtaattattctatcctttattgaaagtgaagtattgaatcctc

SEQ ID NO: 577775 - DNA, 512 bp, Homo sapiens
taaaggtttgccaattttgttaacaattttaaaggactgacttttggtttggttaattttttctgtcacttttatattatccatttgagaaatttctcctgttttatttactatttcctgtttctccttacattagatttagtttgctcttcttttttcagtgtcttaaggtggcaggtcaggttttttatttgggaaccatttttctttttaaatattgatgtttgcagctttaaaattccctctaaaccctgctttagctgtgttagtatatgttttagtaatgttgtatttttgctttcatttatctcaaaaccttttctaatttcccttttgatttcrgagtgtatagtttaatttccacatatttgtgatattccacaatttctttatgttattaatttcatctcattgtgttttaaaaagacccttcatatgatttcaatccttttaaatgtgttgaggcttgatttacaggtagcatgttgtctaacctagaatatgttccatga

SEQ ID NO: 577776 - DNA, 501 bp, Homo sapiens
gtatgtccttagacagcatatagttaagatttcttttgttatccattctgacaatatttgtcttttgattggattgctcaatcgatgaacatttaatattattattgatacagttagatttacatctgccattttctttttctttttctatgtgyttcatttgttttcttttcactttccttctgactcattattttgtgttggtggatattttggagtgtaacattttaatttctttcttgatttcactatactttggggtaaaatatatataatatataatttgccacttaaccatttaaaatatgaaattcagtagcattaattaaattcacaatgttgtgcaattatcacctcttttgatatccaaaatttttcatcatcccaaaattaaactgtattcattaagcaataactctccattgccccctcatctcagctgctggtatccttgaatctactttgtctctacaaatttgtctattgatatctagtaaacat

SEQ ID NO: 577777 - DNA, 590 bp, Homo sapiens
ttctggtattagtatagtccctttggctctctagggttactctttgcatggtacatgttttcccttcttttattttcaactaaattacccctttcaatctaaattgtatgtccttagacagcatatagttaagatttcttttgttatccattctgacaatatttgtcttttgattggattgctcaatcgatgaacatttaatattattattgatacagttagatttacatctgccattttctttttctttttctatgtgcttcatttgttttcttttcactttccttctgactyattattttgtgttggtggatattttggagtgtaacattttaatttctttcttgatttcactatactttggggtaaaatatatataatatataatttgccacttaaccatttaaaatatgaaattcagtagcattaattaaattcacaatgttgtgcaattatcacctcttttgatatccaaaatttttcatcatcccaaaattaaactgtattcattaagcaataactctccattgccccctcatctcagctgctggtatccttgaatctactttgtctctacaaatttgtctatt

SEQ ID NO: 577778 - DNA, 554 bp, Homo sapiens
gagttccgttgttttgatttttagatcccacaaataaatgagaacatggcaatgtttgtctttctatgcctggcctatttcacttaacataatgacctccagttccatccatgctgtcgcaagtgacaggatctcattctcttttatggctgaagagtactccattttgtatgtgaaccacattttcttcattcatctgttgatgaacacttagggtgtttccaaatcttagctgttataaacagtattgcaacaaataaaagagtgcagatggaaaattgattttgatggcttttttctttaataaaacattaatttcttcatgtataactggaaggcaaacaaatgatccatttgcttagtttattcttgaatccataatrtaagtgacagaaatggattattaaaatatacttgaatttggggaagaatgatatggacacattttaaatcaaaacatgatgaattggctgtttaacctactacctcattggccaatctggggcaagatgaaagtatttgtaaacactgttttggcaattatgtgtaaagag

SEQ ID NO: 577779 - DNA, 590 bp, Homo sapiens
ttctggtattagtatagtccctttggctctctagggttactctttgcatggtacatgttttcccttcttttattttcaactaaattacccctttcaatctaaattgtatgtccttagacagcatatagttaagatttcttttgttatccattctgacaatatttgtcttttgattggattgctcaatcgatgaacatttaatattattattgatacagttagatttacatctgccattttctttttctttttctatgtgcttcatttgttttcttttcactttccttctgactcattattttgtgttggtggatattttggagtgtaacattttaatttctttcttgatttcactatactttggggtaaaatatatataatatataatttgccacttaaccatttaaaatatgaaattcagtagcattaattaaattcacaatgttgtgcaattatcacctcttttgatatccaaaatttttcatcwtcccaaaattaaactgtattcattaagcaataactctccattgccccctcatctcagctgctggtatccttgaatctactttgtctctacaaatttgtctatt

SEQ ID NO: 577780 - DNA, 590 bp, Homo sapiens
ttctggtattagtatagtccctttggctctctagggttactctttgcatggtacatgttttcccttcttttattttcaactaaattacccctttcaatctaaattgtatgtccttagacagcatatagttaagatttcttttgttatccattctgacaatatttgtcttttgattggattgctcaatcgatgaacatttaatattattattgatacagttagatttacatctgccattttctttttctttttctatgtgcttcatttgttttcttttcactttccttctgactcattattttgtgttggtggatattttggagtgtaacattttaatttctttcttgatttcactatactttggggtaaaatatatataatatataatttgccacttaaccatttaaaatatgaaattcagtagcattaattaaattcacaatgttgtgcaattatcacctcttttgatatccaaaatttttcatcatcccaaaattaaactstattcattaagcaataactctccattgccccctcatctcagctgctggtatccttgaatctactttgtctctacaaatttgtctatt

SEQ ID NO: 577781 - DNA, 322 bp, Homo sapiens
ggcagctcattatacttttcgtttgcatttctttaataactaatgatgtcgagtatcatctttccatgtgattattgactctttgtatatctttttggagaaatgtctcatcaagtcctttgtccaattagactttttgttgttaagttgtggaaattattaacatattctagatagtgaacctccatcagatacataatttgcaaatattttatcacattctgtggattgtctttttactctcttgatagtgttctttgatacacagaagttgttaawttttataaagtccaaataatctatttttgttgttgttgttgcc

SEQ ID NO: 577782 - DNA, 571 bp, Homo sapiens
aaatattttatcacattctgtggattgtctttttactctcttgatagtgttctttgatacacagaagttgttaatttttataaagtccaaataatctatttttgttgttgttgttgcccgtgcttttggggtgatttttaaaaaaccactgccaaatccaagatcatgaagatctgcctatatatcttctaaaaattttatagttttagcttttagatttraaactttgattcattttgagttaattttggtaagggtctaacttcaatctttgcatgtgaacatccacttttcctacctttatgttgaatagactgttacttccctactgaatgatcttgacaaagactatgttaaacatcaattgactgtatgtatgtaggtttatttctggcctctcagctctattccattgatttataggtttatcctcattcagtaccacattgttttgaataatgtagtttatagtaagttttgaagtcaagaagggtgaatcctccaactttgttcttttgtaaaattgttttgcttattctgggctttttcaaattttatttaaatattgata

SEQ ID NO: 577783 - DNA, 586 bp, Homo sapiens
tttctacatataagataaggtaatctgagagagagatagcctttctattgaaatttggatgccttttatttcttcttcttgcttaatgactttagctggaacttccagtactatgataaatagaggtggtaaaactgagcatacttgttgtgtttcttattttacggaagaagctttcaccattgagtatgatgttagttgcaggtttttcatatatggcctttatcatattgagaaagttcccttctattcctagtttattgagtgtttttgtttttcaatcatgaaaggttactggagtttgttaaatgtttttttttttcagcaacaattaagataatcatgttttttttcccctctcattctattaatcttgtgtaatatgttgactgattttcatttgttgaaccactcctgaaatcctgggataaatcctactaggttttggtatataggccttttaatatacttcatgacaatgttttattttctttagtgattgctctaagcttgcattayatatatcttatcaataatctgcttcaggtttacactaacttaatacaagtgagatttagaaaagtta

SEQ ID NO: 577784 - DNA, 524 bp, Homo sapiens
tatttagctagtccacagaaacacatatttttgtagattttcttttttttttttttttttcggagatggggtctcattctgtgtcccagtctgtaatctgtagtgcaaaggtgcaatcacacccattgcagcctcaacttcccaggctccrgtgatcctcccacctcaaactcctgagtggctggaaccacaggtgcatgccaccatgcctggctaatttttttttctttgtagaggtggagtctcactatgttgcccaggctggtcttgaactcttgggctcaagtgatcctcccaccttgacctctcaaactgctgggattacaggtgtgagccaccacacctggacatgtagatgttcaataacaagaaatgtaaacagtaaagatatagtattagagacaattatctattttttaagacctccagacagcgattattccttcagctgcgagaaaacgtaaatgcaaaatacctgcaaaatgcgatgacttcctgtaatgtggcatcactggcaagctgtg

SEQ ID NO: 577785 - DNA, 524 bp, Homo sapiens
tatttagctagtccacagaaacacatatttttgtagattttcttttttttttttttttttcggagatggggtctcattctgtgtcccagtctgtaatctgtagtgcaaaggtgcaatcacacccattgcagcctcaacttcccaggctccggtgatcctcccacctcaaactcctgagtrgctggaaccacaggtgcatgccaccatgcctggctaatttttttttctttgtagaggtggagtctcactatgttgcccaggctggtcttgaactcttgggctcaagtgatcctcccaccttgacctctcaaactgctgggattacaggtgtgagccaccacacctggacatgtagatgttcaataacaagaaatgtaaacagtaaagatatagtattagagacaattatctattttttaagacctccagacagcgattattccttcagctgcgagaaaacgtaaatgcaaaatacctgcaaaatgcgatgacttcctgtaatgtggcatcactggcaagctgtg

SEQ ID NO: 577786 - DNA, 557 bp, Homo sapiens
acgtgatgtggccttagttatggcatttaaatagtgggtttaactcatcaaatttccctaataatataacactaatatatttagctagtccacagaaacacatatttttgtagattttcttttttttttttttttttcggagatggggtctcattctgtgtcccagtctgtaatctgtagtgcaaaggtgcaatcacacccattgcagcctcaacttcccaggctccggtgatcctcccacctcaaactcctgagtggctggaaccacaggtgcatgccaccatgcctggctaatttttttttctttgtagaggtggagtctcactatgttgcccaggctggtcttgaacycttgggctcaagtgatcctcccaccttgacctctcaaactgctgggattacaggtgtgagccaccacacctggacatgtagatgttcaataacaagaaatgtaaacagtaaagatatagtattagagacaattatctattttttaagacctccagacagcgattattccttcagctgcgagaaaacgtaaatgcaaaatacctgca

SEQ ID NO: 577787 - DNA, 524 bp, Homo sapiens
tatttagctagtccacagaaacacatatttttgtagattttcttttttttttttttttttcggagatggggtctcattctgtgtcccagtctgtaatctgtagtgcaaaggtgcaatcacacccattgcagcctcaacttcccaggctccggtgatcctcccacctcaaactcctgagtggctggaaccacaggtgcatgccaccatgcctggctaatttttttttctttgtagaggtggagtctcactatgttgcccaggctggtcttgaactcttgggctcaagtgatcctcccaccttgacctctcaaactgctgggattacaggtgtgagccaccacrcctggacatgtagatgttcaataacaagaaatgtaaacagtaaagatatagtattagagacaattatctattttttaagacctccagacagcgattattccttcagctgcgagaaaacgtaaatgcaaaatacctgcaaaatgcgatgacttcctgtaatgtggcatcactggcaagctgtg

SEQ ID NO: 577788 - DNA, 524 bp, Homo sapiens
tatttagctagtccacagaaacacatatttttgtagattttcttttttttttttttttttcggagatggggtctcattctgtgtcccagtctgtaatctgtagtgcaaaggtgcaatcacacccattgcagcctcaacttcccaggctccggtgatcctcccacctcaaactcctgagtggctggaaccacaggtgcatgccaccatgcctggctaatttttttttctttgtagaggtggagtctcactatgttgcccaggctggtcttgaactcttgggctcaagtgatcctcccaccttgacctctcaaactgctgggattacaggtgtgagccaccacacctggacatgtagatgttcaataacaagaaatgtaaacagtaaagatatagtattagagacaattatctattttttaagayctccagacagcgattattccttcagctgcgagaaaacgtaaatgcaaaatacctgcaaaatgcgatgacttcctgtaatgtggcatcactggcaagctgtg

SEQ ID NO: 577789 - DNA, 596 bp, Homo sapiens
gtgcaaaggtgcaatcacacccattgcagcctcaacttcccaggctccggtgatcctcccacctcaaactcctgagtggctggaaccacaggtgcatgccaccatgcctggctaatttttttttctttgtagaggtggagtctcactatgttgcccaggctggtcttgaactcttgggctcaagtgatcctcccaccttgacctctcaaactgctgggattacaggtgtgagccaccacacctggacatgtagatgttcaataacaagaaatgtaaacagtaaagatatagtattagagacaattatctattttttaagacctccagacagcgattattccttcagctgcgagaaaacgtaaatgcaaaatacctgcaaaatgcgatgacttcctgtaatgtggcatcacwggcaagctgtggcttttcagaagatacattcaccctgttaccttacagctctaccaagtgggacaccccagagatccttatatattatgtctttttaatagttattcccagacattgtttctctgcatttattttcaaagtattaatccaatttaacactcatcttcctggcaagaacagtaaag

SEQ ID NO: 577790 - DNA, 601 bp, Homo sapiens
aagatcctcccactggagaagcaaaatttcaagtcttggtctttagaagtaatgctaaaaggtaaactctcttctcacttgtccacaaaagtcatacttttagcattttaaaacacttgcaagagcaaagaaaagttctcccagctggtcaggtgcagtggctcatgcttgtaatcccagccctttgggaggctgacgcgggcagatcacttgggcccaagagttcgagaccagcctgggcagcatggcaagactggtcgcacttgcttatattcccagctacttggaagggggaggtgggaggatcgcttgagctcgggaggtggaggctgcagtgagcagtgcttgtgtcactgcaccccagcctgggcaacacagcaagaccccatttcaagaaagaacagttctacctagccataatcaatgcaaatattcccctacaatatatatttgaataatacactaaaataaaataattccagtaacacatttaatataatcttttctcagaaatctgttggaaaaaatcctttgtatgaaattcaattatataaataggaaatgtagtggratactggaaaattaatgtcacttattatgt

SEQ ID NO: 577791 - DNA, 582 bp, Homo sapiens
aaacgtagtaactgctgcatttctacattatttttggagattttaaatgtttaccaggttaagggttcaaagaagacttttgtttcaaattagcrtttaccagatgtaattgactgtggacacgtttttacataaaatttattagcacacacatggtagaattagttcagaagaaaagcacatctgtcagtaaatgttcagtacaagcaagccaaatatgaaatatctcattttatatccaaacctctagaatcagttaaaatctggaacttgctcatttagtcgctttaataacctttctaaagatctacattttttttagaattgcatctatcacctggtgacttttgaaatcattttatacattttatattttaaaaatatgagaccatttattgtttttacctacagaccatgacattcaaggttgcctatggctgatcacccacccactccatccccaccattaactgtcctggcctctttgtcactctgtattctatatattggagatttatatccattatttcagtttcctgaacccactgagttcttccatccattgccatttcctctgcttgg

SEQ ID NO: 577792 - DNA, 332 bp, Homo sapiens
aagcttacacatcacagttgagagagagataccttttgcatggggaaaggaaagtgaagtgagtgcctgactctcwcatggattttggcaccagactcctaccagtgaatcttggcacaaagccggtcccattgttccaggctacagatccaccttcatggtctcaggcaccagacctgttcccatggaatcaggtaccagtgtgccctaataccagtgtgcctaatgccagactgatccctgtggtctcaatatgtggctcattttcatagacttaacttccaggctcaccccagcaccaattcagcttccaggttcgccccagcaccagg

SEQ ID NO: 577793 - DNA, 594 bp, Homo sapiens
tacatgcagaagaatgaaattggacccttgtctcacaccacatgcaaaaatcaactcaaaatggattaaaaacttaaacacctaacaatgtaaaaatactgggggaaaaccttcttaacattattctgtggaataaatttttggatacgactccaaaagcaaaggcaacaaaagcaaaaatagacaaatgggattacatcaaaccaaaaaacttcttcatagcaaaggcaataatcaacaaagtgaagaaacaatttatagaatgggagaaaatatttgtgagccatacatctggtaaggggtcagtatccaacatatatactaaaatcaaacaactcaatttcaagaaaacaaataacccagttttaaaaatgggcaagggacttaagtagacatttctccaaaggatatatctatttggccaacaaatgtatgaaaaaattttataatatatttgtattatatcaatatattgatatatcaaaatcactagtcatcagaaaaaaatgtaaatcaaaccacagcgaggtgtaatttyataatctagaatggctattataaaaaagattaaagataagtgttgatgaaggtgtg

SEQ ID NO: 577794 - DNA, 288 bp, Homo sapiens
gatgttctcaccacacacacacacacacacgcacaccacacacacaaatggtgactatttgaggtgatgcatatgttcattagcttggtagtggtatcatttcacaatgtatatgtgtatcaaaacatcagattgtataccttttttgatgtttgttttgttttgaaacagagtctcacttttgttgcccaggctggagtgcagtggtgagatctyggctcactgcaacctccccctcctgggttcaagcagttctgcctcagcctcctgagtagctgggattacaga

SEQ ID NO: 577795 - DNA, 588 bp, Homo sapiens
tgttctcaccacacacacacacacacacgcacaccacacacacaaatggtgactatttgaggtgatgcatatgttcattagcttggtagtggtatcatttcacaatgtatatgtgtatcaaaacatcagattgtataccttttttgatgtttgttttgttttgaaacagagtctcacttttgttgcccaggctggagtgcagtggtgagatctcggctcactgcaacctccccctcctgggttcaagcarttctgcctcagcctcctgagtagctgggattacagacacccaccaccacgaccagctaatttttgtatttttagtagagacggggtttcaccatgctggccaggctggtctcgaactcctgacctggggtgattcgccagccttggccccccaaagtgctgggattacaggcatgagccactgcgccaggcctgtataccttaaatatacacaattttgtttacatgcccccggctctgctttcttggacacaagctgcctgactctaggaagatgccaacaccctgtccatagtctcactacaaccatttccttacagcactgaaaatcatttacac

SEQ ID NO: 577796 - DNA, 588 bp, Homo sapiens
tgttctcaccacacacacacacacacacgcacaccacacacacaaatggtgactatttgaggtgatgcatatgttcattagcttggtagtggtatcatttcacaatgtatatgtgtatcaaaacatcagattgtataccttttttgatgtttgttttgttttgaaacagagtctcacttttgttgcccaggctggagtgcagtggtgagatctcggctcactgcaacctccccctcctgggttcaagcagttctgcctcagcctcctgagtagctgggattacagacacccaccaccacgaccagctaatttttgtatttttagtagagayggggtttcaccatgctggccaggctggtctcgaactcctgacctggggtgattcgccagccttggccccccaaagtgctgggattacaggcatgagccactgcgccaggcctgtataccttaaatatacacaattttgtttacatgcccccggctctgctttcttggacacaagctgcctgactctaggaagatgccaacaccctgtccatagtctcactacaaccatttccttacagcactgaaaatcatttacac

SEQ ID NO: 577797 - DNA, 588 bp, Homo sapiens
tgttctcaccacacacacacacacacacgcacaccacacacacaaatggtgactatttgaggtgatgcatatgttcattagcttggtagtggtatcatttcacaatgtatatgtgtatcaaaacatcagattgtataccttttttgatgtttgttttgttttgaaacagagtctcacttttgttgcccaggctggagtgcagtggtgagatctcggctcactgcaacctccccctcctgggttcaagcagttctgcctcagcctcctgagtagctgggattacagacacccaccaccacgaccagctaatttttgtatttttagtagagacggggtttcaccatgctggccaggctggtctcgaactcctgacctggggtgattcgccagccttggccccccaaagtgctgggattacaggcatgagccactgcgccaggcctgtataccttaaatawacacaattttgtttacatgcccccggctctgctttcttggacacaagctgcctgactctaggaagatgccaacaccctgtccatagtctcactacaaccatttccttacagcactgaaaatcatttacac

SEQ ID NO: 577798 - DNA, 286 bp, Homo sapiens
atttatcatttatgtgttttgcaaaaatgtttcctaattttttgcctctccattctctgaatagtctcagaaatttttaattttaatgaaattcacctttttaaaaaatgttatggatcgaggattcagtgttggatgtaaaaagtcgctgccaaataaaaagtcacctatgctataatctcagctactccacagggtaaggcaagaggattacataagcccaggagctcaaagctgcagygagccatgatagcaccaaccacactccagcctgggcgacagagcg

SEQ ID NO: 577799 - DNA, 572 bp, Homo sapiens
acaatcaaaggaatctaaggaatttatttaaatgatgcragaagtgaacgacaaaatcaccattctgagaatgaaacccatctgatagagctgaaaaactcactacaagaatttcataatacaatcagaaatgttaacagcagaatagaccaagctgaggaaagaatctcagaacttgaagaccagatctttgaatcaactcaatcagacaaaaatgaataaaaaagcataaacacaacttcagagaaatatgggattatgtaaagagaccaattctgtggctcactggcatccctgaaagagaggaagagagagcaagcaagttggaaaacatatttgatgataactgtccatgaaaatttccccaactttgctaaagagctcgacattcaaattcgggaaatgcaaagaaccccttgagatactacacaagatgtccattcccaagacacgtatttattagattctccaaggtcaacctgaaagaaaaaataataaagacaactagggagaaggggtaggtcacttaaaaaggaaccccatcaggctaacagcagacctttcagcaggaa

SEQ ID NO: 577800 - DNA, 581 bp, Homo sapiens
cccaatgacatgcagttttcaagagacccatctcacatgcaatgacacccataggctcaaagtaaaagaataaagaaaaatctatcaagcaaatataaarcaaaaacaagcaaggttgctattctaatttcagataaaacagagtttataccaataacaaccaaaaagaagacaaagaaaggcatcacataatgataaagagttcaattcaacaagaagacttaacaatcctaaatataaacgcacccaatactgagcactcagattgataaaacaaattcttagagacctacgaaaaaacttagataaccacacaataatagtgggagacttcaacaccccattgacagtattaaacagatcatcaaggcagaaaacaaagatattcatgacctgaactcaacacttgaccaaatggacctaacagacatttccagaatgctccactcaacagcagactatatatattttttcatctgcacatggcccttactaaaaaactgcccacatgattaaccataaaacaattctcaacaaattaaaaaaaaaccaaaatcataccaaccacactcttggaccac

SEQ ID NO: 577801 - DNA, 581 bp, Homo sapiens
cccaatgacatgcagttttcaagagacccatctcacatgcaatgacacccataggctcaaagtaaaagaataaagaaaaatctatcaagcaaatataaaacaaaaacaagcaaggttgctattctaatttcagataaaacagagtttataccaataacaaccaaaaagaagacaaagaaaggcatcacataatgataaagagttcaattcaacaagaagacttaacaatcctaaatataaacgcacccaatactgagcactcagattgataaaacaaattcttagagacctacgaaaaaacttagataaccacacaataatagtgggagacttcaacaccccattgacagtattaaacagatcatcaaggcagaaaacaragatattcatgacctgaactcaacacttgaccaaatggacctaacagacatttccagaatgctccactcaacagcagactatatatattttttcatctgcacatggcccttactaaaaaactgcccacatgattaaccataaaacaattctcaacaaattaaaaaaaaaccaaaatcataccaaccacactcttggaccac

SEQ ID NO: 577802 - DNA, 581 bp, Homo sapiens
cccaatgacatgcagttttcaagagacccatctcacatgcaatgacacccataggctcaaagtaaaagaataaagaaaaatctatcaagcaaatataaaacaaaaacaagcaaggttgctattctaatttcagataaaacagagtttataccaataacaaccaaaaagaagacaaagaaaggcatcacataatgataaagagttcaattcaacaagaagacttaacaatcctaaatataaacgcacccaatactgagcactcagattgataaaacaaattcttagagacctacgaaaaaacttagataaccacacaataatagtgggagacttcaacaccccattgacagtattaaacagatcatcaaggcagaaaacaaagatattcatgacctgaactcaacacttgaycaaatggacctaacagacatttccagaatgctccactcaacagcagactatatatattttttcatctgcacatggcccttactaaaaaactgcccacatgattaaccataaaacaattctcaacaaattaaaaaaaaaccaaaatcataccaaccacactcttggaccac

SEQ ID NO: 577803 - DNA, 581 bp, Homo sapiens
cccaatgacatgcagttttcaagagacccatctcacatgcaatgacacccataggctcaaagtaaaagaataaagaaaaatctatcaagcaaatataaaacaaaaacaagcaaggttgctattctaatttcagataaaacagagtttataccaataacaaccaaaaagaagacaaagaaaggcatcacataatgataaagagttcaattcaacaagaagacttaacaatcctaaatataaacgcacccaatactgagcactcagattgataaaacaaattcttagagacctacgaaaaaacttagataaccacacaataatagtgggagacttcaacaccccattgacagtattaaacagatcatcaaggcagaaaacaaagatattcatgacctgaactcaacacttgaccaaatggacctaacagacatttccagaatgctccactcaacagcagactatatatattttttcatctgcrcatggcccttactaaaaaactgcccacatgattaaccataaaacaattctcaacaaattaaaaaaaaaccaaaatcataccaaccacactcttggaccac

SEQ ID NO: 577804 - DNA, 483 bp, Homo sapiens
ttttagagaaaactaggaattacagcaaaagttagacattagtttyggatacctattataggcgatgatactttaaacaaacaaagcaagaggaagtcttagaagtgagaaacctttgccataaatgattgaagatcctgaccaaaacacacaacttatatttgaagaccaaaattttgaaatgatttttataagctgttaatcttgatataattatatatatacatatacgtgtgtgtgtgtatgttaaacatactcaaataggtgataaatttaaactttttaactctaattttgaaataattacctttactaacatattaaataatggataaatatattatctttaacttaccaacttaataacctgcacactttttaaatcagacaacatatattcattatcaagtgtacatattctcttttccctgtacatattcctcttgagggatgatatatccgaaatagtgcctcactgtggaa

SEQ ID NO: 577805 - DNA, 483 bp, Homo sapiens
ttttagagaaaactaggaattacagcaaaagttagacattagtttcggatacctattataggcgatgatactttaaacaaacaaagcaagaggaagtcttagaagtgagaaacctttgccataaatgattgaagatcctgaccaaaacacacaacttatayttgaagaccaaaattttgaaatgatttttataagctgttaatcttgatataattatatatatacatatacgtgtgtgtgtgtatgttaaacatactcaaataggtgataaatttaaactttttaactctaattttgaaataattacctttactaacatattaaataatggataaatatattatctttaacttaccaacttaataacctgcacactttttaaatcagacaacatatattcattatcaagtgtacatattctcttttccctgtacatattcctcttgagggatgatatatccgaaatagtgcctcactgtggaa

SEQ ID NO: 577806 - DNA, 558 bp, Homo sapiens
acctattataggcgatgatactttaaacaaacaaagcaagaggaagtcttagaagtgagaaacctttgccataaatgattgaagatcctgaccaaaacacacaacttatatttgaagaccaaaattttgaaatgatttttataagctgttaatcttgatataattatatatatacatatacgtgtgtgtgtgtatgttaaacatactcaaataggtgataaatttaaactttttaactctaattttgaaataattacctttactaacatattaaataatggrtaaatatattatctttaacttaccaacttaataacctgcacactttttaaatcagacaacatatattcattatcaagtgtacatattctcttttccctgtacatattcctcttgagggatgatatatccgaaatagtgcctcactgtggaaatagtttctgccttctgaaacacaacttgaggatataacagaatttccagcagggaggtatagtttgaaaagattccagaaacgattctgataccacactcactgttgctaatcaatgacaatat

SEQ ID NO: 577807 - DNA, 558 bp, Homo sapiens
acctattataggcgatgatactttaaacaaacaaagcaagaggaagtcttagaagtgagaaacctttgccataaatgattgaagatcctgaccaaaacacacaacttatatttgaagaccaaaattttgaaatgatttttataagctgttaatcttgatataattatatatatacatatacgtgtgtgtgtgtatgttaaacatactcaaataggtgataaatttaaactttttaactctaattttgaaataattacctttactaacatattaaataatggataaatatattatctttaayttaccaacttaataacctgcacactttttaaatcagacaacatatattcattatcaagtgtacatattctcttttccctgtacatattcctcttgagggatgatatatccgaaatagtgcctcactgtggaaatagtttctgccttctgaaacacaacttgaggatataacagaatttccagcagggaggtatagtttgaaaagattccagaaacgattctgataccacactcactgttgctaatcaatgacaatat

SEQ ID NO: 577808 - DNA, 566 bp, Homo sapiens
ttgatataattatatatatacatatacgtgtgtgtgtgtatgttaaacatactcaaataggtgataaatttaaactttttaactctaattttgaaataattacctttactaacatattaaataatggataaatatattatctttaacttaccaacttaataacctgcacactttttaaatcagacaacatatattcattatcaagtgtacatattctcttttccctgtacatattcctcttgagggatgatatatccgaaatagtgcctcactgtggaaatagtttctgccttctgaaacacaacttgaggatataacagaatttccagcagggaggtatagtttgaaaagattccagaaacgattctgataccacactcactgttgckaatcaatgacaatatgtcacttccatttgagaaattaaatagtaaatgatgtttattactccctagattttaatgtaaagtttaatagttcagtttagttttatacatattttgtcctaagcagtttacagatcaatatttttaaaagtttctactttttattaatttcattaaagt

SEQ ID NO: 577809 - DNA, 402 bp, Homo sapiens
atgctttttctagggcctcagttgatcagaagtggacagcagctgttccatcaaaaactcaaayggggttgtggggatttgcaacctcaacctctttcccagagcatattaggaggacacagataaaaggagtcaataaacgcattggcaaattacaatgtgaaaagtcaccactgtggggtattatttgctatgtagctaatccctctggggactctctgagacagcccatggaacgtgtctcagaatcttcctgtccactgattgctatcctgcatttgttggatgtcacctccagggacattgtcccctcttcctgccacacacatgtaattctgggttgtttttgcatgtgtccaatcttctatacaaaactcttccctgggaagagtgacaaggcag

SEQ ID NO: 577810 - DNA, 402 bp, Homo sapiens
atgctttttctagggcctcagttgatcagaagtggacagcagctgttccatcaaaaactcaaacggggttgtggggatttgcaacctcaacctctttcccagagcatattaggaggacacagataaaaggaktcaataaacgcattggcaaattacaatgtgaaaagtcaccactgtggggtattatttgctatgtagctaatccctctggggactctctgagacagcccatggaacgtgtctcagaatcttcctgtccactgattgctatcctgcatttgttggatgtcacctccagggacattgtcccctcttcctgccacacacatgtaattctgggttgtttttgcatgtgtccaatcttctatacaaaactcttccctgggaagagtgacaaggcag

SEQ ID NO: 577811 - DNA, 402 bp, Homo sapiens
atgctttttctagggcctcagttgatcagaagtggacagcagctgttccatcaaaaactcaaacggggttgtggggatttgcaacctcaacctctttcccagagcatattaggaggacacagataaaaggagtcaataaacgcattggcaaattayaatgtgaaaagtcaccactgtggggtattatttgctatgtagctaatccctctggggactctctgagacagcccatggaacgtgtctcagaatcttcctgtccactgattgctatcctgcatttgttggatgtcacctccagggacattgtcccctcttcctgccacacacatgtaattctgggttgtttttgcatgtgtccaatcttctatacaaaactcttccctgggaagagtgacaaggcag

SEQ ID NO: 577812 - DNA, 402 bp, Homo sapiens
atgctttttctagggcctcagttgatcagaagtggacagcagctgttccatcaaaaactcaaacggggttgtggggatttgcaacctcaacctctttcccagagcatattaggaggacacagataaaaggagtcaataaacgcattggcaaattacaatgtgaaaagtcaccactgtggggtattatttgctatgtagctaatccctctggggactctctgagacagcccatggaacgtgtctcagaatcttcctgtccactgattgctatccygcatttgttggatgtcacctccagggacattgtcccctcttcctgccacacacatgtaattctgggttgtttttgcatgtgtccaatcttctatacaaaactcttccctgggaagagtgacaaggcag

SEQ ID NO: 577813 - DNA, 605 bp, Homo sapiens
aaatgctgatcagggtttcctggatgagatgttgcttctcagggtagccatatcatcacactattagagactacagacccctagaacttggccttttgatatataggaccaggagaaggggttgaagtacatgaaggttttctaagagcatakgatcaattggtcaattttcatttgaaaagggctgagagttcagcttgtagaaaataaagaccaagagggagaagcagcaaagagctacatattagtaggaggtcagcttaagagctaagagggagcaacctcagggccttatggcaattaaagatattgaatatcaaggaattagaaggatttaaagaattatgactgagagtcttctattgtattcactttgacagagttcataagtcttatggactttttacttgcctttgttggctgggtttcattttttaaaattgcagttctacagagatacttagccatgaggcaagacaattatatttgtgctactcaattaaattgtgttacatcttaatgtcagagtctattctctataaattctaccagtaattttcgattttatggtctgcttcctagcattaggatgaacccctatggca

SEQ ID NO: 577814 - DNA, 605 bp, Homo sapiens
aaatgctgatcagggtttcctggatgagatgttgcttctcagggtagccatatcatcacactattagagactacagacccctagaacttggccttttgatatataggaccaggagaaggggttgaagtacatgaaggttttctaagagcataggatcaatkggtcaattttcatttgaaaagggctgagagttcagcttgtagaaaataaagaccaagagggagaagcagcaaagagctacatattagtaggaggtcagcttaagagctaagagggagcaacctcagggccttatggcaattaaagatattgaatatcaaggaattagaaggatttaaagaattatgactgagagtcttctattgtattcactttgacagagttcataagtcttatggactttttacttgcctttgttggctgggtttcattttttaaaattgcagttctacagagatacttagccatgaggcaagacaattatatttgtgctactcaattaaattgtgttacatcttaatgtcagagtctattctctataaattctaccagtaattttcgattttatggtctgcttcctagcattaggatgaacccctatggca

SEQ ID NO: 577815 - DNA, 605 bp, Homo sapiens
aaatgctgatcagggtttcctggatgagatgttgcttctcagggtagccatatcatcacactattagagactacagacccctagaacttggccttttgatatataggaccaggagaaggggttgaagtacatgaaggttttctaagagcataggatcaattggtcaattttcatttgaaaagggctgagagktcagcttgtagaaaataaagaccaagagggagaagcagcaaagagctacatattagtaggaggtcagcttaagagctaagagggagcaacctcagggccttatggcaattaaagatattgaatatcaaggaattagaaggatttaaagaattatgactgagagtcttctattgtattcactttgacagagttcataagtcttatggactttttacttgcctttgttggctgggtttcattttttaaaattgcagttctacagagatacttagccatgaggcaagacaattatatttgtgctactcaattaaattgtgttacatcttaatgtcagagtctattctctataaattctaccagtaattttcgattttatggtctgcttcctagcattaggatgaacccctatggca

SEQ ID NO: 577816 - DNA, 605 bp, Homo sapiens
aaatgctgatcagggtttcctggatgagatgttgcttctcagggtagccatatcatcacactattagagactacagacccctagaacttggccttttgatatataggaccaggagaaggggttgaagtacatgaaggttttctaagagcataggatcaattggtcaattttcatttgaaaagggctgagagttcagcttgtagaaaataaagaccaagagggagaagcagcaaagagctacatattagtaggaggtcagcttaagagctaagagggagcaacctcagggccttatggcaattaaagatattgaatatcaaggaattagaaggatttaaagaattatgactgagagtcttctattgtattcactttgacagagttcataaktcttatggactttttacttgcctttgttggctgggtttcattttttaaaattgcagttctacagagatacttagccatgaggcaagacaattatatttgtgctactcaattaaattgtgttacatcttaatgtcagagtctattctctataaattctaccagtaattttcgattttatggtctgcttcctagcattaggatgaacccctatggca

SEQ ID NO: 577817 - DNA, 551 bp, Homo sapiens
ttctctataaattctaccagtaattttmgattttatggtctgcttcctagcattaggatgaacccctatggcaaccctattcttatccattggcgcaaaatgataacttaatcgtataatatatcaaaaaagtgttttgtagtatttcactagttctttgcctttgtctcataattggctaattgaaattgggattaaataactttaattttcacatggctacagttgtaaacagagtcattttttcccataatacatcaacatttggcaaataatttcatctcctgggtcttatgccagaattttcagaacatccttaaaaactgtgaatgaaatgacttggcaattgaatgctgaatgaaaaagaaatacttaaaacaatttagtctacttttaatcattttcattaaaaaaaactttgttgatcataaagtaagtttcccagtttatgctattaattctccattgttttcagataaagcacttgtaaactgttgaacatttttatgaagtgttatatcacaaattggggctattgaataaatgttatg

SEQ ID NO: 577818 - DNA, 551 bp, Homo sapiens
ttctctataaattctaccagtaattttcgattttatggtctgcttcctagcattaggatgaacccctatggcaaccctattcttatccattggygcaaaatgataacttaatcgtataatatatcaaaaaagtgttttgtagtatttcactagttctttgcctttgtctcataattggctaattgaaattgggattaaataactttaattttcacatggctacagttgtaaacagagtcattttttcccataatacatcaacatttggcaaataatttcatctcctgggtcttatgccagaattttcagaacatccttaaaaactgtgaatgaaatgacttggcaattgaatgctgaatgaaaaagaaatacttaaaacaatttagtctacttttaatcattttcattaaaaaaaactttgttgatcataaagtaagtttcccagtttatgctattaattctccattgttttcagataaagcacttgtaaactgttgaacatttttatgaagtgttatatcacaaattggggctattgaataaatgttatg

SEQ ID NO: 577819 - DNA, 551 bp, Homo sapiens
ttctctataaattctaccagtaattttcgattttatggtctgcttcctagcattaggatgaacccctatggcaaccctattcttatccattggcgcaaaatgataacttaatygtataatatatcaaaaaagtgttttgtagtatttcactagttctttgcctttgtctcataattggctaattgaaattgggattaaataactttaattttcacatggctacagttgtaaacagagtcattttttcccataatacatcaacatttggcaaataatttcatctcctgggtcttatgccagaattttcagaacatccttaaaaactgtgaatgaaatgacttggcaattgaatgctgaatgaaaaagaaatacttaaaacaatttagtctacttttaatcattttcattaaaaaaaactttgttgatcataaagtaagtttcccagtttatgctattaattctccattgttttcagataaagcacttgtaaactgttgaacatttttatgaagtgttatatcacaaattggggctattgaataaatgttatg

SEQ ID NO: 577820 - DNA, 551 bp, Homo sapiens
ttctctataaattctaccagtaattttcgattttatggtctgcttcctagcattaggatgaacccctatggcaaccctattcttatccattggcgcaaaatgataacttaatcgtataatatatcaaaaaagtgttttgtagtatttcactagttctttgcytttgtctcataattggctaattgaaattgggattaaataactttaattttcacatggctacagttgtaaacagagtcattttttcccataatacatcaacatttggcaaataatttcatctcctgggtcttatgccagaattttcagaacatccttaaaaactgtgaatgaaatgacttggcaattgaatgctgaatgaaaaagaaatacttaaaacaatttagtctacttttaatcattttcattaaaaaaaactttgttgatcataaagtaagtttcccagtttatgctattaattctccattgttttcagataaagcacttgtaaactgttgaacatttttatgaagtgttatatcacaaattggggctattgaataaatgttatg

SEQ ID NO: 577821 - DNA, 577 bp, Homo sapiens
atggctacagttgtaaacagagtcattttttcccataatacatcaacatttggcaaataatttcatctcctgggtcttatgccagaattttcagaacatccttaaaaactgtgaatgaaatgacttggcaattgaatgctgaatgaaaaagaaatacttaaaacaatttagtctacttttaatcattttcattaaaaaaaactttgttgatcataaagtaagtttcccagtttatgctattaattctccattgttttcagataaagcacttgtaaactgttgaacatttttatgaagtgttatatcacaaattggggctattgmataaatgttatgttattctagcccacctaaaatataacttctttctgcactctactcttcttcaagttgtcttataatatccaaaatttgcaccatcattttttcactcaggaaaatacttttggacaattaaattatatgtatttaatacagcgttaaatgatttatgatatttcttaatatctgaatatttttgcttaaccactgagcttatttggcataaattatgtcaagcattaagaaaataataagt

SEQ ID NO: 577822 - DNA, 577 bp, Homo sapiens
atggctacagttgtaaacagagtcattttttcccataatacatcaacatttggcaaataatttcatctcctgggtcttatgccagaattttcagaacatccttaaaaactgtgaatgaaatgacttggcaattgaatgctgaatgaaaaagaaatacttaaaacaatttagtctacttttaatcattttcattaaaaaaaactttgttgatcataaagtaagtttcccagtttatgctattaattctccattgttttcagataaagcacttgtaaactgttgaacatttttatgaagtgttatatcacaaattggggctattgaataaatgttatgttattctagcccacctaaaatataacttctttctgcactctactcttcttcaagttgtcttataatatccaaaatttgcaccatcattttttcactcagraaaatacttttggacaattaaattatatgtatttaatacagcgttaaatgatttatgatatttcttaatatctgaatatttttgcttaaccactgagcttatttggcataaattatgtcaagcattaagaaaataataagt

SEQ ID NO: 577823 - DNA, 427 bp, Homo sapiens
gtttatgctattaattctccattgttttcagataaagcacttgtaaactgttgaacatttttatgaagtgttatatcacaaattggggctattgaataaatgttatgttattctagcccacctaaaatataacttctttctgcactctactcttcttcaagttgtcttataatatccaaaatttgcaccatcattttttcactcaggaaaatacttttggacaattaaattatatgtatttaatacarcgttaaatgatttatgatatttcttaatatctgaatatttttgcttaaccactgagcttatttggcataaattatgtcaagcattaagaaaataataagttatcctatagagaaatttaatgtgtttagaactattattattattattttttgagacggagtctcgctctgtcgcccag

SEQ ID NO: 577824 - DNA, 577 bp, Homo sapiens
atggctacagttgtaaacagagtcattttttcccataatacatcaacatttggcaaataatttcatctcctgggtcttatgccagaattttcagaacatccttaaaaactgtgaatgaaatgacttggcaattgaatgctgaatgaaaaagaaatacttaaaacaatttagtctacttttaatcattttcattaaaaaaaactttgttgatcataaagtaagtttcccagtttatgctattaattctccattgttttcagataaagcacttgtaaactgttgaacatttttatgaagtgttatatcacaaattggggctattgaataaatgttatgttattctagcccacctaaaatataacttctttctgcactctactcttcttcaagttgtcttataatatccaaaatttgcaccatcattttttcactcaggaaaatacttttggacaattaaattatatgtatttaatacagcrttaaatgatttatgatatttcttaatatctgaatatttttgcttaaccactgagcttatttggcataaattatgtcaagcattaagaaaataataagt

SEQ ID NO: 577825 - DNA, 427 bp, Homo sapiens
gtttatgctattaattctccattgttttcagataaagcacttgtaaactgttgaacatttttatgaagtgttatatcacaaattggggctattgaataaatgttatgttattctagcccacctaaaatataacttctttctgcactctactcttcttcaagttgtcttataatatccaaaatttgcaccatcattttttcactcaggaaaatacttttggacaattaaattatatgtatttaatacagcgttaaatgatttatgatatttcttaatatctgaatatttttgcttaaccactgagcttatttggcataaattatgtcaagcattaagaaaataataagttatcctatagagaaatttwatgtgtttagaactattattattattattttttgagacggagtctcgctctgtcgcccag

SEQ ID NO: 577826 - DNA, 577 bp, Homo sapiens
  misc_feature 264, 265, 266, 267, 268, 269, 270, 271, 272, 273, 274, 275,276, 277, 278, 279, 280, 281, 282, 283, 284, 285, 286, 287,288, 289, 290, 291, 292, 293, 294, 295, 296, 297, 298, 299,300, 301, 302, 303, 304, 305, 306, 307, 308, 309, 310: n = A,T,C or G
  misc_feature 311, 312, 313, 314, 315, 316, 317, 318, 319, 320, 321, 322,323, 324, 325, 326, 327, 328, 329, 330, 331, 332, 333, 334,335, 336, 337, 338, 339, 340, 341, 342, 343, 344, 345, 346,347, 348, 349, 350, 351, 352, 353, 354, 355, 356, 357: n = A,T,C or G
  misc_feature 358, 359, 360, 361, 362, 363: n = A,T,C or G
ttcaggtctccccagcagggttgtgaggtcccaaagaacgggaggcaggccttgggccatagtstcctgcatccctccagagcctgcagcaggagctgggcccaaggatgctgctgagtgagtccacatgactgacatacactgctctggaagcaccattccggcagactaaccctcttcttcccatgtaatccaagaagggtgttatagatagtccagatttttctagataatcttgtaacatattcacattcaacatacatnnnnnnnnnnnnnnnnnnnnnnnnnnnnnnnnnnnnnnnnnnnnnnnnnnnnnnnnnnnnnnnnnnnnnnnnnnnnnnnnnnnnnnnnnnnnnnnnnnnnaggccagcaaaatgttttcgatctcaggggttaaatggattcaaaacagaaatcagtaaagctgtcattgcagatttctgtaatagagaggcaagtataacaattgattaagaactctatccctttatatctatagaacatataaggcccctggatacccctggacctcaacgctccacattccccatttcagaaatccaggaggacgtgtggc

SEQ ID NO: 577827 - DNA, 493 bp, Homo sapiens
accttaaaattaacaactctccttttaaaatacattgttaagagaataagagtcaagctacagactgggagaaaatatttgcaacactttatttgaatgctgtaattttttttcagaatatagttcataaagaactcttaacaactcaataattagcaaaaataaaatgaaaataatgaatataagaaaaaatgacgaaaagtgctacgccagtggacaaaaagcacacaaaaatgttcaatatcgttttgtcattaaggaaatgcaaattaaaaccacagtgagttattcttcccactaaaatggttatgattaaaaatattgtcagtaccacgtrttgttgagaatatggagcaattataattctcatacattattgttggaatgtaaaatgctacaaccacttaggaaaaattgtttaacattgttttatataattaagcatacatgaaacctatgacccaacaattccaatcctaggttgaaaagaaat

SEQ ID NO: 577828 - DNA, 548 bp, Homo sapiens
ttcttcccactaaaatggttatgattaaaaatattgtcagtaccacgtattgttgagaatatggagcaattataattctcatacattattgttggaatgtaaaatgctacaaccacttaggaaaaattgtttaacattgttttatataattaagcatacatgaaacctatgacccaacaattccaatcctaggttgaaaagaaatgaaaacttatgcccattataagacttacacaagaacgtttatagcatctttacttataatatccccaaactgtaaactgcctaaaagaccttcaacaagaaaatggacaaacaatttgtgttgtattaataatgaaatactcttcagctataaaatggacaaaactactggtaactgcaacaaacatggctgaatctaaaaaaccttgtgttgaatgaataaatctagacactatagggtacattytgaagtcctagaacaagcgaaactaagatatagcagtagaaattgtatcagtagttacctgggttgaggtgggatgggagttgactgcagagaaaca

SEQ ID NO: 577829 - DNA, 577 bp, Homo sapiens
  misc_feature 264, 265, 266, 267, 268, 269, 270, 271, 272, 273, 274, 275,276, 277, 278, 279, 280, 281, 282, 283, 284, 285, 286, 287,288, 289, 290, 291, 292, 293, 294, 295, 296, 297, 298, 299,300, 301, 302, 303, 304, 305, 306, 307, 308, 309, 310: n = A,T,C or G
  misc_feature 311, 312, 313, 314, 315, 316, 317, 318, 319, 320, 321, 322,323, 324, 325, 326, 327, 328, 329, 330, 331, 332, 333, 334,335, 336, 337, 338, 339, 340, 341, 342, 343, 344, 345, 346,347, 348, 349, 350, 351, 352, 353, 354, 355, 356, 357: n = A,T,C or G
  misc_feature 358, 359, 360, 361, 362, 363: n = A,T,C or G
ttcaggtctccccagcagggttgtgaggtcccaaagaacgggaggcaggccttgggccatagtctcctgcatccctccagagcctgcagcaggagctgggcccaaggatgctgctgagtgagtccacatgactgacatacactgctctggaagcaccattccggcagactaaccctcttcttcccatgtaatccaagaagggtgttatagatagtccagatttttctagataatcttgtaacatattcacattcaacatacatnnnnnnnnnnnnnnnnnnnnnnnnnnnnnnnnnnnnnnnnnnnnnnnnnnnnnnnnnnnnnnnnnnnnnnnnnnnnnnnnnnnnnnnnnnnnnnnnnnnnaggccagcaaaatgttttcgatctcaggggttaaatggattcaaaacagaaatcagtaaagctgtcattgcagatttctgtaatagagagrcaagtataacaattgattaagaactctatccctttatatctatagaacatataaggcccctggatacccctggacctcaacgctccacattccccatttcagaaatccaggaggacgtgtggc

SEQ ID NO: 577830 - DNA, 568 bp, Homo sapiens
gcccccagccccctatcctggctctccagcactgcaccaccagctcagggccaagacttccataattacatggtgttaatgagcatttagtctgcattcagagaagagttaggggccatgagaatcacaacttttcaagtatttcaaaggccaaggcatggaaaagcctgtgtgaactgatcagaagagggggagctggagcgacaggcaaggttggctggggtgggggcccaccctcataccatttttaaaagagcagctgttcctcttcccccacatccttctccccctcctccccttccttcttaatataatggagcatcttaagatcatacctgacttgaagattccacaaattttaaaaaacattaaaaaccactgctgtttgatatcaacagggagagaataaytttagttcaaaatatttggaaataagaactatttaagtgatctagagactatcaacatgtatacactatttttcttcaactaaacacaacatcaattgtgaaaaatttacatgtagtacaaataatagaggaagtagctagcatgcagaagaccaaca

SEQ ID NO: 577831 - DNA, 568 bp, Homo sapiens
gcccccagccccctatcctggctctccagcactgcaccaccagctcagggccaagacttccataattacatggtgttaatgagcatttagtctgcattcagagaagagttaggggccatgagaatcacaacttttcaagtatttcaaaggccaaggcatggaaaagcctgtgtgaactgatcagaagagggggagctggagcgacaggcaaggttggctggggtgggggcccaccctcataccatttttaaaagagcagctgttcctcttcccccacatccttctccccctcctccccttccttcttaatataatggagcatcttaagatcatacctgacttgaagattccacaaattttaaaaaacattaaaaaccactgctgtttgatatcaacagggagagaataattttagttcaaaatatttggaaataagaactatttaagtgatctagagactatcaacatgtatacactatttttcttcaactaaacacaacatcaattgtgaaaaatttacatgtaktacaaataatagaggaagtagctagcatgcagaagaccaaca

SEQ ID NO: 577832 - DNA, 612 bp, Homo sapiens
gcctgtgtgaactgatcagaagagggggagctggagcgacaggcaaggttggctggggtgggggcccaccctcataccatttttaaaagagcagctgttcctcttcccccacatccttctccccctcctccccttccttcttaatataatggagcatcttaagatcatacctgacttgaagattccacaaattttaaaaaacattaaaaaccactgctgtttgatatcaacagggagagaataattttagttcaaaatatttggaaataagaactatttaagtgatctagagactatcaacatgtatacactatttttcttcaactaaacacaacatcaattgtgaaaaatttacatgtagtacaaataatagaggaagtagctagcatgcagaagaccaacagaggggaagatggcagagggagggcargagtggggtcagcagcctggtcagcacagccaggtgaggaggtgacggaggcctccctgctcagggagccccagttggaacgcagcacaggactccactggaagctctgccatgtggtatacagggcaaaccttaaaacagtataggagtctgatgtaagaggtgattaagaagttaaaacc

SEQ ID NO: 577833 - DNA, 612 bp, Homo sapiens
gcctgtgtgaactgatcagaagagggggagctggagcgacaggcaaggttggctggggtgggggcccaccctcataccatttttaaaagagcagctgttcctcttcccccacatccttctccccctcctccccttccttcttaatataatggagcatcttaagatcatacctgacttgaagattccacaaattttaaaaaacattaaaaaccactgctgtttgatatcaacagggagagaataattttagttcaaaatatttggaaataagaactatttaagtgatctagagactatcaacatgtatacactatttttcttcaactaaacacaacatcaattgtgaaaaatttacatgtagtacaaataatagaggaagtagctagcatgcagaagaccaacagaggggaagatggcagagggagggcaagagtggggtcagcagcctggtcagcacagccaggtgaggaggtgacrgaggcctccctgctcagggagccccagttggaacgcagcacaggactccactggaagctctgccatgtggtatacagggcaaaccttaaaacagtataggagtctgatgtaagaggtgattaagaagttaaaacc

SEQ ID NO: 577834 - DNA, 588 bp, Homo sapiens
acaccacatggtgaaagaaagattagcagaactgttgatattcctataattcattactggaaaatatttattgaattaataatcctcttaattcttaacttaatgtgtttatttcttaatgattagtgagatgcagtagaattatacaaagttcactctctatcccattcttcagaaggttctgctgtaccatttaaacttttatttcttttgtaaatataaaaatataaaagattttagtcttcaaacttttaaacaaatatggtgttaaatgttaaacttccaagtgtctgtgaggttatgtatrgtttcgataagctaaaaagaagccttaatatgagggaggcttttactttagggatctaaagcagaaagtattaaagttaaagagataaagcttcagttattaaaatagaaatctaaacacaacatttaatttttatggaacttttagggaggaaataagagtacaggcattgagaggtgcttcatttattccagtaagaggaatcttcattgactattttttgaaattgtgctagtgattaacaatataaggtcaaagagaggtcaatgaaaaacacataa

SEQ ID NO: 577835 - DNA, 532 bp, Homo sapiens
taattcagaatatggatatgaatgaagatcattaagattaagcagaatgttgaaacccaatctayggaagctaagaggcacaataaaatgatacaggagctgacagataaaatagctgtagagaaaagaatgtaacccacccgatagagctgaaaaacacgctacaagaatgtcataatgcaatggcaagtattaacagcaggatagaccaagctgaggaaagaatctcagagcttgaagactggctttctgaaataagacagccagacaagaagaaagaagaaagagtgaaagtaagaaatctctgagaaacatagaattatgtaaagagaccgaatctatgactcattggtgtctctgaaagagatggggagaatggaaactacttgaaaacatattttaggatttcatccatgagacctttcccaacctagctaaagagaccaacattcagattctgaaaatgcagagaaccctgcaaaatccttcacaagaaaatcatccccaagagacatgactatcagattctcca

SEQ ID NO: 577836 - DNA, 596 bp, Homo sapiens
catgactatcagattctccaagcttgaaatgaagcaaaaaaatcttaaaggcagagaaaaagtaatgagagataacctacaaaggtacaaagggaagtccattagactaacagcagacctattagcagaaacctcacaagccagaagaggttgggagccaatattcaacattcttagataaatggaattcccaccaagatttcaaatctaaccaacctgagcttcataagtgaaggagaaataagatccttttcagacaaagaagtgctgagaagatttttttttttaccaccagacatgccttataaggctcctaaaggaagtactaaatatggaaagaaaagcctgttaccagccactaaaaaaaaaatacactgaaatacacagcccagtgacactataaggcaaccacataagcmagtctttaaaataaccagctaacattatgatgacaagattacattcacacgtatcagtattaatcttgaatggaaatggacttaattccccaatttaaaggcacagagtggcaagctgactgaaaaagcaatacccaatggtatgctgtctttaaaaaccttatctcacatgcaatg

SEQ ID NO: 577837 - DNA, 574 bp, Homo sapiens
cattcaaaaaaattcaccattaaaataaataccagggtaatttgcacactaaagataaaatctatttgaaattatgaaatgttcattgagaaagtttaatattatacaaagacattgatttatctcatcccatctttttgctaactacctgtatattacacatttggaaagatatggtattctctgtcagtacttactaatttttggaggtatttgtttttattgcattggatgtcctgactctttatttggaggttaaggaatgacattgataggcttttctcatctctgaggttagagatttctcatgcgaagaaacaaagtgccctgggtcaactacagctctgacgagtgcgcctccttctcagcactgacaatgattaaatgatagagtcagacactaactcagatctatagaactgcatattaggacaagggatgctgccaggggttgggagtgargattggggtgatggactgacagcacatcacagtaaagttaggataatttaaaaagcaggtgtcaggccacctatcttaaaaaaggaaaggggtcagaggccacaagttgcag

SEQ ID NO: 577838 - DNA, 552 bp, Homo sapiens
ggatatctgatcatcctccatatgaaatcagggtctgcatcttccactgtctcccaggtgaggtctgatcacccccatctggcttcggcagatttaaccagaatccccctcacccctaatatttccttcctcttagtaactttttatccactgactcccacactgctccatagctacaaattcccacctgcccatgctgtattcagggttaagctcagtctgtctcctctcctgcaatattctattgccttgatgaatttgttaattaaacatgacttattcatttcacaatgtaaayatatatcagaacatcacattgtatcccacacatatatgcaactgttatttatacattaaaaataagattttaagaagtctaaaaactaaaaaacacacacaaaaatttaggaaacagcacacacacacacaatggtaactatatgaaatgatggttatgttaattttgttgactatggtaattattttaccatgtgtacatataccaaattactatgtaccttgagtatatgtaaattcgtatttgtctgttac

SEQ ID NO: 577839 - DNA, 580 bp, Homo sapiens
acagacactgaaaaatactatttttcaaccactaatttctaacgttggtgaaggcaagcttcatttcccccaggaagctttcactttgaagatacaaactccctgagtggaacaggagttttatcttcactttggagctctagaggaccatagacagaatctagtccaacattacagataaagaaactgaggcctagaggagacaggtgacttgtagaaaggtcctacagggagtagcagaaccygaacccacatgcagtccacctaactctgagaccgggtcgcactgacaatgccatgtccaccttcattacagcacaaaattcagggaatggggagcatctatagagctcttgggaaataaaacaccaaagcttacagatccactgatgaacccagtgctgcatttatagacccacgttaagggtcaagcacacacgtcagctagtgaagaaaagaaattctgacctggacagagtacattagcatccttatagttgcatttgctaaataagtctcttctaagctcaactctctgaagaacctccaggagttatgagaggttttgaagagaaattgt

SEQ ID NO: 577840 - DNA, 595 bp, Homo sapiens
tgttttaacagggcgctgattggtgcgtttacaatccctgagctagatacaaaggttctccacctccccatcagattagttagatacagagtttccacacacaggttctccaaggccccaccagagcagctagatacacagtgtcgattggtgcattcacaaaccttgagctaaacacagggtgctgattggtgtatttacaatccctgagctagacataaagactctccacctccccaccagactcaggagcccagctggcttcacctagtggatcctgcacaggggctgcaggtggagctgcctgccagtccygcgccgtgcgctcgcactcctcagccctagggtggtcgatgggaccgggcgccgtggagcagggggtggtgctcgtcggggaggctcgggctgcacaggagcccatggagtgggtgggaggctcaggcatggcgggttgcaggtccccagccctgccccgtgggaaggcagctaaggcccggcgagaaatcgagcgcagcaccggtgggccggcactgctgggggacccagtacaccctctgcagctgctggcccgggtgctaagtccctcattgcccgg

SEQ ID NO: 577841 - DNA, 548 bp, Homo sapiens
ttggttgtggtgtttatttttaaaaatygtttggttcaatttgctaatattttttaaggattacttcatccatgttcaagggagatatttgtttgcagtttacttttttgtaaggttttgctggtttgggtattagggtaatgctggcccatggaatgagttaagaaatagtcactctgcttctattttctgcaacagattgtggaaaattggtatcatttatttctccaatgttgatagaactcaccagtgaatcatctgggcttggtactttctgtttgggaaggttattaattactgccttagttaaaaaattttgtttctctcgagactttctctttcaccatgttttattatttagaaatgtgtttttaaattttttggtatttgaggatatttcagctctctttctgctattattagtttaattccattctgattcaagaacatgccttttgtgatttctattcttttaaatttggtaaagtgttctgtggcctagaatgtggtttaacttaatgaattgtgcatttgtatttgagaagaat

SEQ ID NO: 577842 - DNA, 548 bp, Homo sapiens
ttggttgtggtgtttatttttaaaaatcgtttggttcaatttgctaatattttttaaggattrcttcatccatgttcaagggagatatttgtttgcagtttacttttttgtaaggttttgctggtttgggtattagggtaatgctggcccatggaatgagttaagaaatagtcactctgcttctattttctgcaacagattgtggaaaattggtatcatttatttctccaatgttgatagaactcaccagtgaatcatctgggcttggtactttctgtttgggaaggttattaattactgccttagttaaaaaattttgtttctctcgagactttctctttcaccatgttttattatttagaaatgtgtttttaaattttttggtatttgaggatatttcagctctctttctgctattattagtttaattccattctgattcaagaacatgccttttgtgatttctattcttttaaatttggtaaagtgttctgtggcctagaatgtggtttaacttaatgaattgtgcatttgtatttgagaagaat

SEQ ID NO: 577843 - DNA, 564 bp, Homo sapiens
ccagattttaggttctgtctacacaggaactgagcaatagatcttatgttatgacttattttggtaaaataaatggtcagcgtagcaagaaaatgagtttaattgaagtttttcctgccaaagattgtaggttccctcgtttatagatactgtatcatggaatttactttaggtagttttttttttttccttctctgtctctgaaaagaccttgcatagtagtaggcttattttggcttagtgattgtcagccctgacttgattactcattaaagtaacctggaaagctttaaaaatactgaggccaggcccctccccacagattatattgaattgaactgtgatggggctagagaattaggatgttttttgaagcagctggacttgtgagtcactggtagccacacgaaaatattatttattacatgcagttgtttgattgaattaaatttttgtctgaatttctgaccagttttgataaagtatttcatccagtaccccatgtgcatacagactcacttgtctactataagakgaaagtattgtgtgacatgttttcatgag

SEQ ID NO: 577844 - DNA, 412 bp, Homo sapiens
gtgaagcactggtgagcacaggactgtgtgagttctccttgcacattcacgtgggtggtagtagccgctcagaacaggggtgggtcctctgttctcggtgcctattgtcacactggtggtagtgtyggtgcaggggcagggtgttggcaggggcggggctggcgggcttcatgcccactcatcaatgctccaacagtaatggcagtatggtggggggtcgagagggtgaagtgcactcaggatggcagcagtagcatggcacacacactgtggcaggaaaggggaggcaaggtccacccacacacacatgcactggcaaaacgatgtgggggatggccgtgggctagtgcatgcaggcaaagtggcacggggagactgcagtgggggcagggcacagttaggctgatgtgtg

SEQ ID NO: 577845 - DNA, 567 bp, Homo sapiens
agtcagccagcacaggaactatgatgcaggtcctcaggaggtagcctccactgcaccccgctgtgaagctgcactgcaagcaggtgtggccaggctggggccccaggaggggcgagcagactgaaggatgcttaggtcagactggccctgtctcaggggcaagactgcccygcagagttcaggtctgacagttgccctagggctgaagtctcctatgagaacaagtctagcctagggcaatgggtgtccctgaccattctccactacagatgctcccacacaaaaccttctgggctttgcacagtctggagttctaccattaacactttataagcaggtcttcctgacaactcaagtgtccctggtggttgtagggtctcctcctttcaggaattcagggacctgcgacaagaggaggttgccccttgcctgttcaactcacctctcctccaggagattttggggacctggaatgagtcctggtgcacggttgccctttgcagggttcccggcttcctcccccttcagcccaacatctgtgtcttccctctgtctgctctcaaagcc

SEQ ID NO: 577846 - DNA, 580 bp, Homo sapiens
gtcagccagcacaggaactatgatgcaggtcctcaggaggtagcctccactgcaccccgctgtgaagctgcactgcaagcaggtgtggccaggctggggccccaggaggggcgagcagactgaaggatgcttaggtcagactggccctgtctcaggggcaagactgccctgcagagttcaggtctgacagttsccctagggctgaagtctcctatgagaacaagtctagcctagggcaatgggtgtccctgaccattctccactacagatgctcccacacaaaaccttctgggctttgcacagtctggagttctaccattaacactttataagcaggtcttcctgacaactcaagtgtccctggtggttgtagggtctcctcctttcaggaattcagggacctgcgacaagaggaggttgccccttgcctgttcaactcacctctcctccaggagattttggggacctggaatgagtcctggtgcacggttgccctttgcagggttcccggcttcctcccccttcagcccaacatctgtgtcttccctctgtctgctctcaaagccttccctctgaagat

SEQ ID NO: 577847 - DNA, 580 bp, Homo sapiens
gtcagccagcacaggaactatgatgcaggtcctcaggaggtagcctccactgcaccccgctgtgaagctgcactgcaagcaggtgtggccaggctggggccccaggaggggcgagcagactgaaggatgcttaggtcagactggccctgtctcaggggcaagactgccctgcagagttcaggtctgacagttgccctagggctgaagtctcctatgagaacaagtctagcctagggcaatgggtgtccctgaccattctccactacagakgctcccacacaaaaccttctgggctttgcacagtctggagttctaccattaacactttataagcaggtcttcctgacaactcaagtgtccctggtggttgtagggtctcctcctttcaggaattcagggacctgcgacaagaggaggttgccccttgcctgttcaactcacctctcctccaggagattttggggacctggaatgagtcctggtgcacggttgccctttgcagggttcccggcttcctcccccttcagcccaacatctgtgtcttccctctgtctgctctcaaagccttccctctgaagat

SEQ ID NO: 577848 - DNA, 402 bp, Homo sapiens
ggtctgacagttgccctagggctgaagtctcctatgagaacaagtctagcctagggcaatgggtgtccctgaccattctccactacagatgctcccacacaaaaccttctgggctttgcacagtctggagttctaccattaacactttataagcaggtcttcctgacaactcaagtgtccctggtggttgtrgggtctcctcctttcaggaattcagggacctgcgacaagaggaggttgccccttgcctgttcaactcacctctcctccaggagattttggggacctggaatgagtcctggtgcacggttgccctttgcagggttcccggcttcctcccccttcagcccaacatctgtgtcttccctctgtctgctctcaaagccttccctctgaagatct

SEQ ID NO: 577849 - DNA, 580 bp, Homo sapiens
gtcagccagcacaggaactatgatgcaggtcctcaggaggtagcctccactgcaccccgctgtgaagctgcactgcaagcaggtgtggccaggctggggccccaggaggggcgagcagactgaaggatgcttaggtcagactggccctgtctcaggggcaagactgccctgcagagttcaggtctgacagttgccctagggctgaagtctcctatgagaacaagtctagcctagggcaatgggtgtccctgaccattctccactacagatgctcccacacaaaaccttctgggctttgcacagtctggagttctaccattaacactttataagcaggtcttcctgacaactcaagtgtccctggtggttgtagggtctcctcctktcaggaattcagggacctgcgacaagaggaggttgccccttgcctgttcaactcacctctcctccaggagattttggggacctggaatgagtcctggtgcacggttgccctttgcagggttcccggcttcctcccccttcagcccaacatctgtgtcttccctctgtctgctctcaaagccttccctctgaagat

SEQ ID NO: 577850 - DNA, 567 bp, Homo sapiens
gtcagccagcacaggaactatgatgcaggtcctcaggaggtagcctccactgcaccccgctgtgaagctgcactgcaagcaggtgtggccaggctggggccccaggaggggcgagcagactgaaggatgcttaggtcagactggccctgtctcaggggcaagactgccctgcagagttcaggtctgacagttgccctagggctgaagtctcctatgagaacaagtctagcctagggcaatgggtgtccctgaccattctccactacagatgctcccacacaaaaccttctgggctttgcacagtctggagttctaccattaacactttataagcaggtcttcctgacaactcaagtgtccctggtggttgtagggtctcctcctttcaggaattcagggacctgygacaagaggaggttgccccttgcctgttcaactcacctctcctccaggagattttggggacctggaatgagtcctggtgcacggttgccctttgcagggttcccggcttcctcccccttcagcccaacatctgtgtcttccctctgtctgctctcaaagcct

SEQ ID NO: 577851 - DNA, 473 bp, Homo sapiens
caatgggtgtccctgaccattctccactacagatgctcccacacaaaaccttctgggctttgcacagtctggagttctaccattaacactttataagcaggtcttcctgacaactcaagtgtccctggtggttgtagggtctcctcctttcaggaattcagggacctgcgacaagaggaggttgccccttgcctgttcaactcacctctcctccaggagattttggggacctggaatgagtcctggtgcacggttgcccyttgcagggttcccggcttcctcccccttcagcccaacatctgtgtcttccctctgtctgctctcaaagccttccctctgaagatctgccaggagcacaccagtcttcccaatgtcctggtcccttggtgggagctgttcctcctggctgtgtctagtcagccatcttccctcatattttcttcacacaagttaacaatggttattttcacatt

SEQ ID NO: 577852 - DNA, 654 bp, Homo sapiens
tgtgataatttgctaatatttctcccaatgagcacatatgttttgttgtttccttcaacaaagacagtgatagctccacatcattgttctgattttatcagatctataggaggaaaactcaaactgtgatgaaggcattcagtgaagatctaaataaatggagagttgttctaagtatatggatagaaagactcaatattgtgaagatgtcagttctttcaaatttcatctatagattaaaagcaatcccaatagaaatcccagcaagttatctagtgggtattgacaaactgattccaaagtttayataaaaaggcaaaagatccagattagccaacaaatgttaaagaagaacaagtttgaaagtcttacactgtatagcttcaaaatctatgataaagttatagtgatcaagacagtgtggtattggtgaaagaataaaaaaatagatcaatggaacataccagcgggccaaaaaatagacccacatgtacgtagtgaactgatctctgacacagaagcaagagcaattcaaaagaaaaggtagtcttctcaacaaatggtggtagaataactggtcatccaacatgcaaaaatataaatctatacacagaccttacacctgtcacaaaaattaagtcaaaatggatcata

SEQ ID NO: 577853 - DNA, 553 bp, Homo sapiens
gatggttatagcagctttgtccataattgccaagacttggaagatgacttttaatagctaaatggataaataacctgtggtacattcagacaaccaaatattatgcagtgataaatagaaatgagctagcagagacatgtaaagacattgaggaaacttagatatatgttgttaagtgaaagaagtcaatccaaaaaggctacatactttaggacctctgggggaagggagggatgaataggtggagcagagaggatttttttgggtggtgaaagtattctgtatgatactgtaatgatggatatgtgtcattgtgtgtttctcataacctatagaatgtaaaatacaaagagtgttccctaatgtaaactacggtcttaataatagtgtattagtattggctcatcaattgtaacaaatgtaccaggagatgttaatagtaggggaaattcctgcaagaattgcccactcccaccctctcatttcacagatgaagtcccktgacccagaagtgcaaagccatctgttgccgctcccatcctattggaaacat

SEQ ID NO: 577854 - DNA, 559 bp, Homo sapiens
ggctttaaaaaaaaaaaagcgtaatctgaaaaagaaaaaggcacagacgaagaggctgacttctgcttgagaccagggggatatcatactcaaaaaaagattycttttggctgtaagaggcacacgtgactatactgctattaaatgttgtggtacgaaagcacgatttcaagacccgtgaagaaattcggagggtggggccttatctcagtacttctggaacaatcaggcaagtcctgggtgttagaatctgtgtccacctcacacaggtgtttcaggggagataaaacagatattcagaggagacgtatattttttatcttttagaaatgcaaacctagtttccatttcctcacgaataagattttttccaagaaaggttaaaatcgtgacccacacacagatacagaatgaacacatgtcagagattttctttaactcattgatgagagaaccagtgttagggaaataagtaaagataaagttgcctaccaacatagtgaatcagtttcacaaggtagaaatgaaatagtcttattatggaataagtattaagcca

SEQ ID NO: 577855 - DNA, 559 bp, Homo sapiens
ggctttaaaaaaaaaaaagcgtaatctgaaaaagaaaaaggcacagacgaagaggctgacttctgcttgagaccagggggatatcatactcaaaaaaagattccttttggctgtaagaggcacacgtgactatactgctattaaatgttgtggtacgaaagcacgatttcaagacccgtgaagaaattcggagggyggggccttatctcagtacttctggaacaatcaggcaagtcctgggtgttagaatctgtgtccacctcacacaggtgtttcaggggagataaaacagatattcagaggagacgtatattttttatcttttagaaatgcaaacctagtttccatttcctcacgaataagattttttccaagaaaggttaaaatcgtgacccacacacagatacagaatgaacacatgtcagagattttctttaactcattgatgagagaaccagtgttagggaaataagtaaagataaagttgcctaccaacatagtgaatcagtttcacaaggtagaaatgaaatagtcttattatggaataagtattaagcca

SEQ ID NO: 577856 - DNA, 559 bp, Homo sapiens
ggctttaaaaaaaaaaaagcgtaatctgaaaaagaaaaaggcacagacgaagaggctgacttctgcttgagaccagggggatatcatactcaaaaaaagattccttttggctgtaagaggcacacgtgactatactgctattaaatgttgtggtacgaaagcacgatttcaagacccgtgaagaaattcggagggtggggccttatctcagtacttctggaacaatcaggcaagtcctgggtgttagaatctgtgtccacctcacacaggtgtttcaggggagataaaacagatattcagaggagacgtatattttttatcttttagaaatgcaaacctagtttccatttcctcacgaataagattttttccaagaaaggttaaaatcgtgacccacacacagatacagaatgaacacatgtcagagattttctttaactcattgatgagagaaccagtgttagggaaataagtamagataaagttgcctaccaacatagtgaatcagtttcacaaggtagaaatgaaatagtcttattatggaataagtattaagcca

SEQ ID NO: 577857 - DNA, 559 bp, Homo sapiens
ggctttaaaaaaaaaaaagcgtaatctgaaaaagaaaaaggcacagacgaagaggctgacttctgcttgagaccagggggatatcatactcaaaaaaagattccttttggctgtaagaggcacacgtgactatactgctattaaatgttgtggtacgaaagcacgatttcaagacccgtgaagaaattcggagggtggggccttatctcagtacttctggaacaatcaggcaagtcctgggtgttagaatctgtgtccacctcacacaggtgtttcaggggagataaaacagatattcagaggagacgtatattttttatcttttagaaatgcaaacctagtttccatttcctcacgaataagattttttccaagaaaggttaaaatcgtgacccacacacagatacagaatgaacacatgtcagagattttctttaactcattgatgagagaaccagtgttagggaaataagtaaagataaarttgcctaccaacatagtgaatcagtttcacaaggtagaaatgaaatagtcttattatggaataagtattaagcca

SEQ ID NO: 577858 - DNA, 617 bp, Homo sapiens
gtcctcaagaaaaacactcctggaaacaagaaagaggctaaataagattttgtttgtttgtttgtttgtttgaagattttaaagatgtacaattacaagttttctgaaagaaatgctctaaggaaaaaaagtgaatgamagtgtgtatcccttttagcactaagaaagcttttgtttgttttggtttgtgtttacccttacaccagtaaggcctgtttaaagaagtaccacacatttatagtcagaaaagagatgccgactagctaaacttttcaatatccaaagggaaaggcaaatcccttctctgtacacactttgcatctctatggacaagcattatttgcattattatcaatgttctgcaagttaacttctgtcactacacagctgtaaagtaactagtccaagatgatggtttacaatcccgtaatatcagctgatctttccattgaaaagatacccagtaatctcctttgcccatttcaaagactgccctcaatttttttcctacagtagttggttcagttttactgctgatgagttgcatatattctggattcaatgaagtgctgaacaagcacttcatccagttctgggttgcacaataactagaatta

SEQ ID NO: 577859 - DNA, 617 bp, Homo sapiens
gtcctcaagaaaaacactcctggaaacaagaaagaggctaaataagattttgtttgtttgtttgtttgtttgaagattttaaagatgtacaattacaagttttctgaaagaaatgctctaaggaaaaaaagtgaatgacagtgtgtatcccttttagcactaagaaagcttttgtttgttttggtttgtgtttacccttacaccagtaaggcctgtttaaagaagtaccacacatttatagycagaaaagagatgccgactagctaaacttttcaatatccaaagggaaaggcaaatcccttctctgtacacactttgcatctctatggacaagcattatttgcattattatcaatgttctgcaagttaacttctgtcactacacagctgtaaagtaactagtccaagatgatggtttacaatcccgtaatatcagctgatctttccattgaaaagatacccagtaatctcctttgcccatttcaaagactgccctcaatttttttcctacagtagttggttcagttttactgctgatgagttgcatatattctggattcaatgaagtgctgaacaagcacttcatccagttctgggttgcacaataactagaatta

SEQ ID NO: 577860 - DNA, 246 bp, Homo sapiens
actaagtatgcaattaccatatatgacccacctattgccytttggggcattaattccagagaaatgaaaactaatgttcacacaaaacctgtacacaatgttcataaaagctttattcataattgccccaaactgtaaacaaacaacccagatgcccttcaatgagtgaataaactctggtatatccatgccaccgattgctaatcagcaatgaaaaggaacaaattactgatatacacaattatg

SEQ ID NO: 577861 - DNA, 596 bp, Homo sapiens
gaattcttgtgctgatggaaatactgtgtatcttgactgtatggatgtcaagattccggctgtgatattgcactatacttctacaagatgtcaccttggggtgggggaactgctkaacggctattcgggttctctctgttacttctcacaagtgtatgtaaatctacaattatctcaaaatttttttaaaattatcttttcaaaagaggagaaatagggaaattctcactgatgggagtagaatattccatttcttgtgttattttagcccctagcccagtagtttccaaaagatcacctggggattttttttttaaacaattccaaagccaaggctacacttcactcaacagcaatgaactaacaaataattaagttttgtaatgccaactttaaaaaactggagaactgggaaggagagtttcttacttactgaacttatgtaagatatctcatttataaaagaaaccccatgagatcagtactacagggtccatttcatcaaagaggaaacaaagtctgagaaagattaaggaatggcctaaatttccacaactgctaagtgacagacttagcacttgaacttcaaactttga

SEQ ID NO: 577862 - DNA, 500 bp, Homo sapiens
aggatggtctgatttcctgacctcgtgatccgcccgcctcggcctcccgaagtgttgggattacaggcatgagccaccgtgcccggccaataggaggaattcttgtgctgatggaaatactgtgtatcttgactgtatggatgtcaagattccggctgtgatattgcactatacttctacaagatgtcaccttggggtgggggaactgcttaacggctaytcgggttctctctgttacttctcacaagtgtatgtaaatctacaattatctcaaaatttttttaaaattatcttttcaaaagaggagaaatagggaaattctcactgatgggagtagaatattccatttcttgtgttattttagcccctagcccagtagtttccaaaagatcacctggggattttttttttaaacaattccaaagccaaggctacacttcactcaacagcaatgaactaacaaataattaagttttgtaatgccaactttaaaaaactgg

SEQ ID NO: 577863 - DNA, 500 bp, Homo sapiens
aggatggtctgatttcctgacctcgtgatccgcccgcctcggcctcccgaagtgttgggattacaggcatgagccaccgtgcccggccaataggaggaattcttgtgctgatggaaatactgtgtatcttgactgtatggatgtcaagattccggctgtgatattgcactatacttctacaagatgtcaccttggggtgggggaactgcttaacggctattcgggttctctctgttacttctcacaagtgtatgtaaatctacaattatctcaaaatttttttwaaattatcttttcaaaagaggagaaatagggaaattctcactgatgggagtagaatattccatttcttgtgttattttagcccctagcccagtagtttccaaaagatcacctggggattttttttttaaacaattccaaagccaaggctacacttcactcaacagcaatgaactaacaaataattaagttttgtaatgccaactttaaaaaactgg

SEQ ID NO: 577864 - DNA, 596 bp, Homo sapiens
gaattcttgtgctgatggaaatactgtgtatcttgactgtatggatgtcaagattccggctgtgatattgcactatacttctacaagatgtcaccttggggtgggggaactgcttaacggctattcgggttctctctgttacttctcacaagtgtatgtaaatctacaattatctcaaaatttttttaaaattatcttttcaaaagaggagaaatagggaaattctcactgatgggagtagaatattccatttcttgtgttattttagcccctagcccagtagtttccaaaagatcacctggggattttttttttaaacaattccaaagccaaggctacacttcaytcaacagcaatgaactaacaaataattaagttttgtaatgccaactttaaaaaactggagaactgggaaggagagtttcttacttactgaacttatgtaagatatctcatttataaaagaaaccccatgagatcagtactacagggtccatttcatcaaagaggaaacaaagtctgagaaagattaaggaatggcctaaatttccacaactgctaagtgacagacttagcacttgaacttcaaactttga

SEQ ID NO: 577865 - DNA, 641 bp, Homo sapiens
ttattctgttgaccaggctggtctcaaattcttgtgctcaagcaatcctcctacattggcctcccaaagggctcggattacrgggatgtacaaccgtgcctggccaggagtgccatttagcatggaaatgagattataatgaagcctgaggctttagctatcctggttctaacaagtgttagtgggtctggttacaaagggaacttcctagagcaagtgtcgtgttttttaaagataagcagagttagggcagtgtggaaattcagctatgtcatggcagcatgctaccacttaacagtaatatctgaaaaattagtaacatggaaattttttgtacattttagacagatcatataaaaatacaaagaaataatatatatgtgataaatatcaagttacatataaagtagaataaaaatggctaaattatattggttactttttatttcatgagttgaactcaacaggatataaggattgagcatctgcctttatatgcatatagtccaattcaaacacaaactgtgcagtggaataacaaggagaaattgacaaatttgacaaatctatccatgatggtagatatcaatgtatctccctcatgaataaagagtttaattagacataatgtaaagaagaat

SEQ ID NO: 577866 - DNA, 626 bp, Homo sapiens
tttttaaatgtcatttttcttgcatctcatcaaatatactttcatacactataaaaatgatgttgggtcatatgtatcacatgtctgtaattcagaaatgcaaacctttggacactgactcaacatctggagatattttttctggttcttatggctggtgttctcctacagctctctacgagcagtcttgtgaagcccacaagcaccgagggaacccatccgggctttactatattgatgcagatggaagtggccccctgggaccatttcttgtgtactgcaatatgacaggtatgttgataatcgttagatgcatagatcagaatagaccaagragaaatttacctagttggcagcattattaaaacatgcagtttgatagtgtgtacttgctaagtagaagcattaaatatgtatttattaattttgttgtcaacaaaattttcttgtatttcttctttgcctgggttggattataggcaagattcaatgctctgccaaggcatctctctagctcctacactcctcataatacatctgttcatgtgcatcatgataaaatacaaacctctgattcggtgatttacatgctttctgtatttagaaaaaacagaggtgtttaaaaa

SEQ ID NO: 577867 - DNA, 626 bp, Homo sapiens
tttttaaatgtcatttttcttgcatctcatcaaatatactttcatacactataaaaatgatgttgggtcatatgtatcacatgtctgtaattcagaaatgcaaacctttggacactgactcaacatctggagatattttttctggttcttatggctggtgttctcctacagctctctacgagcagtcttgtgaagcccacaagcaccgagggaacccatccgggctttactatattgatgcagatggaagtggccccctgggaccatttcttgtgtactgcaatatgacaggtatgttgataatcgttagatgcatagatcagaatagaccaaggagaaatttacctagttggcagcattattaaaacatgcagtttgatagtgtgtacttgctaagtagaagcattaaatatgtatttattaattttgttgtcaacaaaattttcttgtatttcttctttgcctgggttggattataggcaagattcaatgctctgccaaggcatctctctagctcctacactcctcataatacatctgttcatgtgcatcatgataaaatacaaacctctgattcggtgatttacatgytttctgtatttagaaaaaacagaggtgtttaaaaa

SEQ ID NO: 577868 - DNA, 564 bp, Homo sapiens
gacaggcaggcttatatacagaatgacarttttcttccacaagcactaacctttggggaaaccgttgtcaaggtaggaaaacctaaacttaattgacgaattgttggatgttcgatgtggacacatctgagagttaaaaactccaggaagacccagacagagaagggtccccacacttctgtgagtttgacacctagcttgaccgggttctcacagtgaatgttggagaaaaatcttctcatgcttccagaaagggaaggtgaaaaggaaccgtcttgaagtacaccagagctttctgttcttcttaacaaggtctttcctcaagggcaaatatttcacctaagctactggtgttttgttttcttttgttttgttttgttttgttttttgttttcagagcctaacctgcctggaggaaggaaattacccacctctggccatcctgtcccatgtaagggtggtgatgggagggagggctgagaagctcttgtgaaggtcacagcccagaggcacaggctccctaaaggactcagacctaatcacaggactacagaacctttcccc

SEQ ID NO: 577869 - DNA, 585 bp, Homo sapiens
tgacagttttcttccacaagcactaacctttggggaaaccgttgtcaaggtaggaaaacctaaacttaattgacgaattgttggatgttygatgtggacacatctgagagttaaaaactccaggaagacccagacagagaagggtccccacacttctgtgagtttgacacctagcttgaccgggttctcacagtgaatgttggagaaaaatcttctcatgcttccagaaagggaaggtgaaaaggaaccgtcttgaagtacaccagagctttctgttcttcttaacaaggtctttcctcaagggcaaatatttcacctaagctactggtgttttgttttcttttgttttgttttgttttgttttttgttttcagagcctaacctgcctggaggaaggaaattacccacctctggccatcctgtcccatgtaagggtggtgatgggagggagggctgagaagctcttgtgaaggtcacagcccagaggcacaggctccctaaaggactcagacctaatcacaggactacagaacctttccccttcccacacatgttacttatagtactgcaggcctctttacagca

SEQ ID NO: 577870 - DNA, 585 bp, Homo sapiens
tgacagttttcttccacaagcactaacctttggggaaaccgttgtcaaggtaggaaaacctaaacttaattgacgaattgttggatgttcgatgtggacacatctgagagttaaaaactccaggaagacccagacagagaaggrtccccacacttctgtgagtttgacacctagcttgaccgggttctcacagtgaatgttggagaaaaatcttctcatgcttccagaaagggaaggtgaaaaggaaccgtcttgaagtacaccagagctttctgttcttcttaacaaggtctttcctcaagggcaaatatttcacctaagctactggtgttttgttttcttttgttttgttttgttttgttttttgttttcagagcctaacctgcctggaggaaggaaattacccacctctggccatcctgtcccatgtaagggtggtgatgggagggagggctgagaagctcttgtgaaggtcacagcccagaggcacaggctccctaaaggactcagacctaatcacaggactacagaacctttccccttcccacacatgttacttatagtactgcaggcctctttacagca

SEQ ID NO: 577871 - DNA, 564 bp, Homo sapiens
gacaggcaggcttatatacagaatgacagttttcttccacaagcactaacctttggggaaaccgttgtcaaggtaggaaaacctaaacttaattgacgaattgttggatgttcgatgtggacacatctgagagttaaaaactccaggaagacccagacagagaagggtccccacacttctgtgagtttgacacctagcttgaccrggttctcacagtgaatgttggagaaaaatcttctcatgcttccagaaagggaaggtgaaaaggaaccgtcttgaagtacaccagagctttctgttcttcttaacaaggtctttcctcaagggcaaatatttcacctaagctactggtgttttgttttcttttgttttgttttgttttgttttttgttttcagagcctaacctgcctggaggaaggaaattacccacctctggccatcctgtcccatgtaagggtggtgatgggagggagggctgagaagctcttgtgaaggtcacagcccagaggcacaggctccctaaaggactcagacctaatcacaggactacagaacctttcccc

SEQ ID NO: 577872 - DNA, 564 bp, Homo sapiens
gacaggcaggcttatatacagaatgacagttttcttccacaagcactaacctttggggaaaccgttgtcaaggtaggaaaacctaaacttaattgacgaattgttggatgttcgatgtggacacatctgagagttaaaaactccaggaagacccagacagagaagggtccccacacttctgtgagtttgacacctagcttgaccgggttctcacagtgaatgttggagaaaaatctyctcatgcttccagaaagggaaggtgaaaaggaaccgtcttgaagtacaccagagctttctgttcttcttaacaaggtctttcctcaagggcaaatatttcacctaagctactggtgttttgttttcttttgttttgttttgttttgttttttgttttcagagcctaacctgcctggaggaaggaaattacccacctctggccatcctgtcccatgtaagggtggtgatgggagggagggctgagaagctcttgtgaaggtcacagcccagaggcacaggctccctaaaggactcagacctaatcacaggactacagaacctttcccc

SEQ ID NO: 577873 - DNA, 437 bp, Homo sapiens
gtccaataacctcccaccaggttcctcctycaatattggggactacaattcaacatgagatttgggtgggaacacagagccaaaccatatcagaccccttcctgtctattatccccaatgtatccacagttatctttgagatggaagcctgatcatgtcatccacaggtcaaaatggtgttaatgtgttcccattatctcagtggtgtcaaggacttctggttattccaatgcccaggagataaagtccaaagactcagctaggcctctaaaatcctgtacggtctttctgtgtccccccaagtcaccatgcacagggctccccactctgctcactgtgccacaccagccttcactcaggcccccaacactccttgctctcctgacacagcgatttcacataagccagttctactttctgaattgctcttctcacta

SEQ ID NO: 577874 - DNA, 437 bp, Homo sapiens
gtccaataacctcccaccaggttcctcctccaatattggggactacaattcaacatgagatttgggtgggaacacagagccaaaccatatcagaccccttcctgtctattatccccaatgtatccacagttatctttgagatggaagcctgatcatgtcatccacaggtcaaaatggtgttaatgkgttcccattatctcagtggtgtcaaggacttctggttattccaatgcccaggagataaagtccaaagactcagctaggcctctaaaatcctgtacggtctttctgtgtccccccaagtcaccatgcacagggctccccactctgctcactgtgccacaccagccttcactcaggcccccaacactccttgctctcctgacacagcgatttcacataagccagttctactttctgaattgctcttctcacta

SEQ ID NO: 577875 - DNA, 437 bp, Homo sapiens
gtccaataacctcccaccaggttcctcctccaatattggggactacaattcaacatgagatttgggtgggaacacagagccaaaccatatcagaccccttcctgtctattatccccaatgtatccacagttatctttgagatggaagcctgatcatgtcatccacaggtcaaaatggtgttaatgtgttcccattatctcagtggtgtcaaggasttctggttattccaatgcccaggagataaagtccaaagactcagctaggcctctaaaatcctgtacggtctttctgtgtccccccaagtcaccatgcacagggctccccactctgctcactgtgccacaccagccttcactcaggcccccaacactccttgctctcctgacacagcgatttcacataagccagttctactttctgaattgctcttctcacta

SEQ ID NO: 577876 - DNA, 450 bp, Homo sapiens
aataacctcccaccaggttcctcctccaatattggggactacaattcaacatgagatttgggtgggaacacagagccaaaccatatcagaccccttcctgtctattatccccaatgtatccacagttatctttgagatggaagcctgatcatgtcatccacaggtcaaaatggtgttaatgtgttcccattatctcagtggtgtcaaggacttctggttattccaatgcccaggagataaagtccaaagactcagctaggcctctaaaatcctgtacggtctttctgtgtccccccaagtcaccatgcacagggctycccactctgctcactgtgccacaccagccttcactcaggcccccaacactccttgctctcctgacacagcgatttcacataagccagttctactttctgaattgctcttctcactacaaaaactctcacatta

SEQ ID NO: 577877 - DNA, 456 bp, Homo sapiens
ataacctcccaccaggttcctcctccaatattggggactacaattcaacatgagatttgggtgggaacacagagccaaaccatatcagaccccttcctgtctattatccccaatgtatccacagttatctttgagatggaagcctgatcatgtcatccacaggtcaaaatggtgttaatgtgttcccattatctcagtggtgtcaaggacttctggttattccaatgcccaggagataaagtccaaagactcagctaggcctctaaaatcctgtacggtctttctgtgtccccccaagtcaccatgcacagggctccccactctgctcactgtgccacaccagccttcactcaggcccccaacactccttgctctcctgmcacagcgatttcacataagccagttctactttctgaattgctcttctcactacaaaaactctcacattaatttttt

SEQ ID NO: 577878 - DNA, 435 bp, Homo sapiens
tccaatattggggactacaattcaacatgagatttgggtgggaacacagagccaaaccatatcagaccccttcctgtctattatccccaatgtatccacagttatctttgagatggaagcctgatcatgtcatccacaggtcaaaatggtgttaatgtgttcccattatctcagtggtgtcaaggacttctggttattccaatgcccaggagataaagtccaaagactcagctaggcctctaaaatcctgtacggtctttctgtgtccccccaagtcaccatgcacagggctccccactctgctcactgtgccacaccagccttcactcaggcccccaacactccttgctctcctgacacagcgatttcacataagccagttctactttctgaattgctyttctcactacaaaaactctcacattaatttttttc

SEQ ID NO: 577879 - DNA, 564 bp, Homo sapiens
ctattaaaaataaagctgccataaacatttgtgtacaaatagttctgtggacatttgtatttattaggcttttttattctgtagtattaatgctttgacatcttggtgccttactgactcrctgatatactttttcttcaataggaatgtaaccaagtgagtaattaagacaaaatgtgaaagcagtttaatatttgtctagtcttacacaagaatttttctgtctcatttttcaactataagaaaaagtactaaagattaatttattcaaaagttggaactttcttccttatttttgccaaaatatcacacctgaaggattttgttgttgttataaatgttgagaggtatgcatttttgtattcctatgaaatgtcatagatatgaaatactacattctagggaatattttaaaacaaaatatgacagtttttctagcattaactattaatggctataaaaaattagcattatctttgtgcttggctgctcagctttgtgttgagataaactacacgttaggtaggaatgacagccaacttacaattaacatttttcatatca

SEQ ID NO: 577880 - DNA, 663 bp, Homo sapiens
gaccctgtctcaaaaaatacaaaaaacaaacaaaaaaccccaaacactcagcgctcaccttttgtcgaacagacattgtcctgggaattgaggacacagagtaaaaaatatattttagtctctgccttctgaaagcacacagcctattgaataccatgagtattaattatgtgactgggaaaataaatgcacacgtctgtgtccaatacaaagagacctggaggatcccctaggggaacctggggtcctggtcttagctatgccactaattttgtctctggccaaaataaagrcatttgtctactctgctgcaaaagtattttattatatatgtgtatgtaactgtatatgtaataaatatttggccaataatattgcatatatgcatatataataaaatgcttatatttatatacttttggttatattttattacatatatgtctcaactgcatgtatattctgatttacagacaaaacactcttagtccagttacggttagaaactccacagtatctagtaaatactgtattttttaaattgcccagttctcaaaccttcttttgtatgcatttgtggcaaaagatcacaataattgatatttcatcattgcaacacttttgtattttcagaataaggctgttctgaattaaaaaaaatta

SEQ ID NO: 577881 - DNA, 612 bp, Homo sapiens
gtaaagaaagcttatttctaaaattcagactaaaaccctgttgctttacctagttaagattctgttattcattttwatgcaaagaacagaatatggattatctaaaggcatcaccattcagctttagagtggactgatggtagacaagctagaaatatgtctcctgctgaatgaggtaggtctaggaaattttttattaatgtggtagccattaaaaattaccatttcaacttctgtgatcatcattttagcaagacagtctagtagagaaaatgcaatttaattatttatggaggatgcttgtattttaaaagatctatttcacgggagctccaagtttcattccattttcaatactgactgtgcaaaatattgagaatgtgtaaatgaaatccacatttcagtttaattagggcagatactataataaagtcttgttttttcattgttttggaaagtctggtgttttcattctgagcataaagatagccagtgtttttcaccagtttcttattgttacaggcagattcccaacctttggaaatcaaaatagaatactcaggatttgtaatagttatcagacttcctcaaaacttcctaattaatagggac

SEQ ID NO: 577882 - DNA, 612 bp, Homo sapiens
gtaaagaaagcttatttctaaaattcagactaaaaccctgttgctttacctagttaagattctgttattcattttaatgcaaagaacagaatatggattatctaaaggcatcaccattcagctttagagtggaytgatggtagacaagctagaaatatgtctcctgctgaatgaggtaggtctaggaaattttttattaatgtggtagccattaaaaattaccatttcaacttctgtgatcatcattttagcaagacagtctagtagagaaaatgcaatttaattatttatggaggatgcttgtattttaaaagatctatttcacgggagctccaagtttcattccattttcaatactgactgtgcaaaatattgagaatgtgtaaatgaaatccacatttcagtttaattagggcagatactataataaagtcttgttttttcattgttttggaaagtctggtgttttcattctgagcataaagatagccagtgtttttcaccagtttcttattgttacaggcagattcccaacctttggaaatcaaaatagaatactcaggatttgtaatagttatcagacttcctcaaaacttcctaattaatagggac

SEQ ID NO: 577883 - DNA, 612 bp, Homo sapiens
gtaaagaaagcttatttctaaaattcagactaaaaccctgttgctttacctagttaagattctgttattcattttaatgcaaagaacagaatatggattatctaaaggcatcaccattcagctttagagtggactgatggtagacaagctagaaatatgtctcctgctgaatgaggtaggtctaggaaattttttattaatgtggtagccattaaaaattaccatttcaacttctgtgatcatcattttagcaagayagtctagtagagaaaatgcaatttaattatttatggaggatgcttgtattttaaaagatctatttcacgggagctccaagtttcattccattttcaatactgactgtgcaaaatattgagaatgtgtaaatgaaatccacatttcagtttaattagggcagatactataataaagtcttgttttttcattgttttggaaagtctggtgttttcattctgagcataaagatagccagtgtttttcaccagtttcttattgttacaggcagattcccaacctttggaaatcaaaatagaatactcaggatttgtaatagttatcagacttcctcaaaacttcctaattaatagggac

SEQ ID NO: 577884 - DNA, 604 bp, Homo sapiens
ctttacctagttaagattctgttattcattttaatgcaaagaacagaatatggattatctaaaggcatcaccattcagctttagagtggactgatggtagacaagctagaaatatgtctcctgctgaatgaggtaggtctaggaaattttttattaatgtggtagccattaaaaattaccatttcaacttctgtgatcatcattttagcaagacagtctagtagagaaaatgcaatttaattatttatggaggatgcttgtattttaaaagatctatttcacgggagctccaagtttcattccattttcaatactgactgtgcaaaatattgagaatgtgtaaatgaaatccacatttcagtttaattagggcagatactataataaagtcttgttttttcattgttttggaaagtctggtgttttcattctgagcataaagatagccagtgtttttcaccagtttcttattgttacaggcagattcccaacctttggaratcaaaatagaatactcaggatttgtaatagttatcagacttcctcaaaacttcctaattaatagggacatctcatttttcttttctccctattattttctaaa

SEQ ID NO: 577885 - DNA, 604 bp, Homo sapiens
ctttacctagttaagattctgttattcattttaatgcaaagaacagaatatggattatctaaaggcatcaccattcagctttagagtggactgatggtagacaagctagaaatatgtctcctgctgaatgaggtaggtctaggaaattttttattaatgtggtagccattaaaaattaccatttcaacttctgtgatcatcattttagcaagacagtctagtagagaaaatgcaatttaattatttatggaggatgcttgtattttaaaagatctatttcacgggagctccaagtttcattccattttcaatactgactgtgcaaaatattgagaatgtgtaaatgaaatccacatttcagtttaattagggcagatactataataaagtcttgttttttcattgttttggaaagtctggtgttttcattctgagcataaagatagccagtgtttttcaccagtttcttattgttacaggcagattcccaacctttggaaatcaaaatagaatactcaggatttgtmatagttatcagacttcctcaaaacttcctaattaatagggacatctcatttttcttttctccctattattttctaaa

SEQ ID NO: 577886 - DNA, 622 bp, Homo sapiens
ctaaaaccctgttgctttacctagttaagattctgttattcattttaatgcaaagaacagaatatggattatctaaaggcatcaccattcagctttagagtggactgatggtagacaagctagaaatatgtctcctgctgaatgaggtaggtctaggaaattttttattaatgtggtagccattaaaaattaccatttcaacttctgtgatcatcattttagcaagacagtctagtagagaaaatgcaatttaattatttatggaggatgcttgtattttaaaagatctatttcacgggagctccaagtttcattccattttcaatactgactgtgcaaaatattgagaatgtgtaaatgaaatccacatttcagtttaattagggcagatactataataaagtcttgttttttcattgttttggaaagtctggtgttttcattctgagcataaagatagccagtgtttttcaccagtttcttattgttacaggcagattcccaacctttggaaatcaaaatagaatactcaggatttgtaatagttatcagacttcctcaaaacttcctaattaatagggacatctcatttttcttttctcyctattattttctaaagctt

SEQ ID NO: 577887 - DNA, 459 bp, Homo sapiens
gtctacacttggaaatagtgctttcataggtaccataatctcttggagcagtattaaaaattcagtaagagaactttcaaagactttttgcttttattttatattttattaaaatttttatttattagaaattcctacggttctggaaattgtactttcctaggaagtgtgaaaacttctaaaagctactacttattatttgccagggaactttatttaaggcaaagtagagccataagtttgggaggttgcaaagaaagctaaaagggagaaatgttgagtcaactttttaacttttttttctttttttttttttttttcgagacagagtctcacwcttgtcgcccaggctggagtgcaatggtgtgatctctgctcactgcaacctccacccccaggattcaagcgattctcctgcctcagcctccagagtagctgggattacatgcgtgcgccact

SEQ ID NO: 577888 - DNA, 459 bp, Homo sapiens
gtctacacttggaaatagtgctttcataggtaccataatctcttggagcagtattaaaaattcagtaagagaactttcaaagactttttgcttttattttatattttattaaaatttttatttattagaaattcctacggttctggaaattgtactttcctaggaagtgtgaaaacttctaaaagctactacttattatttgccagggaactttatttaaggcaaagtagagccataagtttgggaggttgcaaagaaagctaaaagggagaaatgttgagtcaactttttaacttttttttctttttttttttttttttcgagacagagtctcactcttgtcgcccaggctggagtgcaatggtgtgatctctgctcacygcaacctccacccccaggattcaagcgattctcctgcctcagcctccagagtagctgggattacatgcgtgcgccact

SEQ ID NO: 577889 - DNA, 485 bp, Homo sapiens
aagagtcgaaatcacccccgattgagaactattgctttaagatactgagtyatactatccacgacagtagtgagtcaatccatttatttggctgtccttaattctcttgaataagtttttgtaattttttccataaaagtactgcagttattccacagaactttacatttttgttaatattgcaaataaaatttttctaggtgtgtaatggtaattattttacgattttatagaaattcaagtaattcctcaatactgactgaccataaattcagcaaacttactgaactctcatttttcctgatatttctttatattattttggattttctatgtaggcaatcatattatctacaatatctgccaggtttgtttcttttccaaacttttcatcacttacatctattttatttcctcttgtgtctttaactgacacatgcatgagcttttaaaagttatatattcattattgattacagttaaga

SEQ ID NO: 577890 - DNA, 556 bp, Homo sapiens
agttattccacagaactttacatttttgttaatattgcaaataaaatttttctaggtgtgtaatggtaattattttacgattttatagaaattcaagtaattcctcaatactgactgaccataaattcagcaaacttactgaactctcatttttcctgatatttctttatattattttggattttctatgtaggcaatcatattatctacaatatctgccaggtttgtttcttttccaaacttttyatcacttacatctattttatttcctcttgtgtctttaactgacacatgcatgagcttttaaaagttatatattcattattgattacagttaagaatatagtttccatcatgacaattccgtaaaatttgttaagattccatccatttacaaaattttttatacttattcaacaataatgtataatacattctataaagaaacaatttttccttgctaaacgatatatggctgctatatcgtttgttaattataatattaaaatattcttacctgcttcacttactcattcccaaaaatgttatgttaatt

SEQ ID NO: 577891 - DNA, 556 bp, Homo sapiens
agttattccacagaactttacatttttgttaatattgcaaataaaatttttctaggtgtgtaatggtaattattttacgattttatagaaattcaagtaattcctcaatactgactgaccataaattcagcaaacttactgaactctcatttttcctgatatttctttatattattttggattttctatgtaggcaatcatattatctacaatatctgccaggtttgtttcttttccaaacttttcatcacttacatctattttatttcctcttgtgtctttaactgacacatgcatgagcttttaaaarttatatattcattattgattacagttaagaatatagtttccatcatgacaattccgtaaaatttgttaagattccatccatttacaaaattttttatacttattcaacaataatgtataatacattctataaagaaacaatttttccttgctaaacgatatatggctgctatatcgtttgttaattataatattaaaatattcttacctgcttcacttactcattcccaaaaatgttatgttaatt

SEQ ID NO: 577892 - DNA, 556 bp, Homo sapiens
agttattccacagaactttacatttttgttaatattgcaaataaaatttttctaggtgtgtaatggtaattattttacgattttatagaaattcaagtaattcctcaatactgactgaccataaattcagcaaacttactgaactctcatttttcctgatatttctttatattattttggattttctatgtaggcaatcatattatctacaatatctgccaggtttgtttcttttccaaacttttcatcacttacatctattttatttcctcttgtgtctttaactgacacatgcatgagcttttaaaagttatatattcattattgattacagttaagaatatagtttccatcatgacaattccgtaaaatttgttaagattccatccatttacaaaattttttatacttattcaacaataatgtataatacattctataaagaaayaatttttccttgctaaacgatatatggctgctatatcgtttgttaattataatattaaaatattcttacctgcttcacttactcattcccaaaaatgttatgttaatt

SEQ ID NO: 577893 - DNA, 642 bp, Homo sapiens
gtagctgggattacaggcacctgccatcatgcccggctaaattttttttgtgtgtgtatttttgtagatacagggtttcaccattttagccaggctcgtcttcaactcctgatctcaggtgatccgccggcctcagcctcccagattgctgggattacaggcgtgggccaccacctaagatatatgtatatatatatatgtaatctttttcagtatattctcagggtgtgtttgaggaaaccttttttttttttttttttttttggccattgtccaagggtttagaactgaatgggaatgtctgtaaatggatctgatggaggttggaatgtgtatcagcttttaatcatcactgtaacaaattactaaaayattctctttattatctctcactttagaagtgtgggagggctggactgatgactctgcttatagtcttacaaggacaaaatcaaggtgctcttgggctccttatgaaggccctagggcagaatgtgtgtccaagcacatacaggttagagcagaattcaacttcttgtagttgtaggagtgaggtcccaattcatcactggctggtagttggggcctctcagcaatgtcaggctgcctgcgttgctcttcatagtgcccagtttattttct

SEQ ID NO: 577894 - DNA, 622 bp, Homo sapiens
ccctgctattaaatgagtactactactaatgcctgctactaaatgagaccagagctctcattaccacaactagctgcccttaccaatgcctctgctgttgccactccctttccaacagccctattcgcctgccagcagtggctggcacctacctgcacctgcacccagagacacgtgggcctcstgagtatctgtgttcctttattctactctcatctggagctgatgctataggaatgctggggtcgggagaaaatacactgtaaatcttagagttgtaacttgggaggttctatgatagtaatgacagattgattttatatttcagatatggtaaggcaaaagaggattttgtttaccagcttaaagtgccacacactattggaaaatgattcccaatttcaactgagcttgtaaattccaatttaacttttaaatttaagccaactagtacgttaggaatggactctgcaaagcctaatgaaagaaaaaaataccctcccacaaaacaaatggtcagaatgtaaatatccaaaattgtaaataaatatccaaatttagttgttttgattttatactaattactaaaatagtattataattttaattcattttatataat

SEQ ID NO: 577895 - DNA, 606 bp, Homo sapiens
ttggattagctttaatcattgccagaagtacaggaggttccatgtagcaggaggtacatgtacctttttataccttatacatctcatctttgtgcctaattataattcctgatttccagatcactgatgccctgagaagttatgaaacttgtagctttacacacccttctttatatacccttgcgtagggcagtggttggacatgaagcagtgcaaagatgggcaaaagccacaaagggccctggactttgaacttcgctgaaagctgtgggacacattaaatcatttatgtcaagatgagacataattgattttgttgcagaaagtttagaggcagagataaccaaggctcaattgaggaagttgagatttaaggcaggaaaatcctctgtgcatccctstacagtgttgtcaagccccctgccctcaaatgctcaggctagggtaggttcactttgatctttttctctttgggaattaagaattgtgacaattccaatctattgtggatgcttgaactagaagtacctccaaagttatggtggtagagattgaccagatacaagcaagagaagaggatgttctctaagagaaagaagaagggtg

SEQ ID NO: 577896 - DNA, 591 bp, Homo sapiens
ttttccttgtcccaggctacttgtcccatagtaaagatgcttttgcctattttccaaagtagatttggagagacccaaacttcgttgcgtgtaggatatgaggcattgataatcttgtctttattgggtggctgcacttttccattcaccagaacagtgggccaaggaatgctaagaagttgttcattgaatccctgagttctaaacatagctctccctgtctatccccgctaggtagcagcaatctaattactgctgttaaggatatattaccccttttctatatattggttctatgacctaaggaacccctaatgcctgggggtaagacttagcttccatttcattggaaccatgtctattatacttcccatttttttagaagaggacactaaaaccaagagaatttgcaatatttgcctaagagtgcatagttagtacaacaatggaactagaagctcagcctcctgactttcagactcatttgcttcccacatactggaggagtacagctgtgtcttatcactgtaacaggtggacatgggaaacagcaataacacaacrttagactgtgataaaggtgactcaagg

SEQ ID NO: 577897 - DNA, 401 bp, Homo sapiens
atggttttaaaaatgggagtttccctgcacaagctctctctttgcctgctgcsgtccatgtaagatgtgacttgttcctccttgccttccaccatgattgtgaggcctccccagccatgtggaactttgagaccaactaaaacttcttccttttgtaaattgcccagtttcaggtatgtctttatcagccacgtgaaaatggactaatacagatgtttaggaccaaacttaactaacaataactacagcacttaagtatgatgaacatggtagtaaatttgattcatttttctgcagttttcatttcaatactcatttgggatatttcccttgtaaatcttcctatcttttgttttctctcctcaggaatgatttttggggtccacagaagacagtgccct

SEQ ID NO: 577898 - DNA, 631 bp, Homo sapiens
ggcaataaataactagcaattacaatattacwtttatggtgtgtggcagtaaggactttaaaaaaatgtaacaagacagtttcactagcaacaaatagatatgcaactcaatgtaaaagctgctctgcatacccattaaaatgagcaaataacataaaacccactcttagtatggctttcaggagacatgcctgctggtggcactttaacatgattcaattttctgaagtacaagttggtaaatgtaacaaaagctataaaactgcagctgggaaaatagccaagaaataaaagaacctcgtaattatttttacaagatatctatatcttcttgctgctattgtaatttgagaaaaaaagatatatcagtactacagtatttgtaatagtgagaaatgactcaacgtcaaagattaaagaaatagctaaacaaactacaatatattaatcatggtagaccttctggctataaaaaatgtaaaaaaggaaaattattttaatatatgggatatgctgttaaataaaatagaagctaaaataaaatatgcatgctgattagacttatgcaatcaaaagttaaaagggaatatatgggattggaaatggttaaaatctattgctcgttaggtta

SEQ ID NO: 577899 - DNA, 400 bp, Homo sapiens
tctctacaaaaaaaaaaaaaaaaaaaattgccaggtgtgggtgtggcggtgggctcctatagtcccagctactcaggaggctgagatggaaggattccttgagcccaggagttcaaggctgcagtgagcgatgattgcaccactgcagttcagcctgggcaacacggcaagaccctgtctcaaaaaacaaaaaccaacmaaaaaaaaaaaacccttgtagaattgtagaaatgtagagtgaaactcataacatgatactgggctctggggttatatgcagagtttactgagcataataggactgggtctctctgctaacagaatttacccatacattgtaatatcatcagacaagggaatctcaaattattatcaggaaattatcaagaaatagcgtatg

SEQ ID NO: 577900 - DNA, 449 bp, Homo sapiens
gagttgaagcccaggaattccagaccagcctgggcaacacagcaaaaccctatctctacaaaaaaaaaaaaaaaaaaaattgccaggtgtgggtgtggcggtgggctcctatagtcccagctactcaggaggctgagatggaaggattccttgagcccaggagttcaaggctgcagtgagcgatgattgcaccactgcagttcagcctgggcaacacggcaagaccctgtctcaaaaaacaaaaaccaacaaaaaaaaaaaaacccttgtaraattgtagaaatgtagagtgaaactcataacatgatactgggctctggggttatatgcagagtttactgagcataataggactgggtctctctgctaacagaatttacccatacattgtaatatcatcagacaagggaatctcaaattattatcaggaaattatcaagaaatagcgt

SEQ ID NO: 577901 - DNA, 400 bp, Homo sapiens
tctctacaaaaaaaaaaaaaaaaaaaattgccaggtgtgggtgtggcggtgggctcctatagtcccagctactcaggaggctgagatggaaggattccttgagcccaggagttcaaggctgcagtgagcgatgattgcaccactgcagttcagcctgggcaacacggcaagaccctgtctcaaaaaacaaaaaccaacaaaaaaaaaaaaacccttgtagaattgtagaaatgtagagtgaaactcakaacatgatactgggctctggggttatatgcagagtttactgagcataataggactgggtctctctgctaacagaatttacccatacattgtaatatcatcagacaagggaatctcaaattattatcaggaaattatcaagaaatagcgtatg

SEQ ID NO: 577902 - DNA, 564 bp, Homo sapiens
aactatgtgccaggcactgtttttatccgtatttattttatttaagaaacttcttaaataaaacaacttcttttaatcttcataactctatgaggtaagttctattagcaccctcattttgtagctgaagartctgaggcacagaaaatgtgggtgattatcccaagttcacacaaccagtaagtatctggacccaggatttgaacagatcattgttaatctgtactttcaactccagaatctgtactttcaactccctcttttggttcaattaatttagtattttgaagttaagaaaattccacaagaacatatatctgaacatatacctgagaaggaggtattttatgtagtgcttctagttatttatgtgatattttttattgcagatgaaacagaatttagaaacttcatcgtttggcttgaagaccagaaaatcaggcactacaagattgaagacagagggaatttaagaaacatccacagcagcgactggcccaagttctttgaaaaggtaatgaattaggaagtaaagtaaaaatacagagagtttgtctgaaaaat

SEQ ID NO: 577903 - DNA, 238 bp, Homo sapiens
accataccactagttgtggtggcatgcacctgttgtctcagctactcaggaggctgaagtgggaggatcacttgaacctgggaggttgaggctgcagtgagccgygatcatgccactgcactgcaccctgagtggcagagtgagaacctgtttgtttgtatgtttatttgtttgtttttaataaagaacaaagaaaatccaaatagcaccattaaaaagagcaaaggatttaaataga

SEQ ID NO: 577904 - DNA, 609 bp, Homo sapiens
ctaaacatgaaaatgatccactcccacttaatgaatagtaaatatatgttctctgccttatgattttcttaataacattttttctgtatcttattttgttgtaaaaatactgtatataatacatgtaacacaccaaatatgtgttaattgactttgtgttattggtaaggcttctggtcaacagcaggatattaatagttaagttttgggggagtcaaaagttatacgtagatttttgactacataaagggtcagtaccccaactcttatgttgttcaagggtcagctgtataaaaaagatcttttgcgttctatttaacccagtggaaggcaaaattcctccattagacatttaattatcaatgtctgctgtgtccttaacaaataatacaggttgaagaatataaacagacaattgataatggcaaaactttgtagacaattaacaggctgatatgaaaactgagaacttggcattctaagccagatcatttargctcaactaccgcttgcagccacctactcttagtgcagcctttgaagaatgaaacaacctttctaagcctcagtttctctttctgtaaaaacgccaataataaccataccaac

SEQ ID NO: 577905 - DNA, 565 bp, Homo sapiens
tttgacacctggtggggatcattcttaatacctccctcctcaataaaataaatttattttcagtaaaaaccatgaaataaagcaaataataaattaaattctagagggtatttaatggataatcagacaacataagcaagcagtgaaatttttaataytgtattattcatgataataaaaataaaaactgaaaaaaaagttaaagtagaaaaggaaagaaataataggttaacattttatgattacattaactgtctattttttaaggagggggtagtaaacaaattaagaaatacttccaagagagtaaactctgcagggttctaagaatgatttgcatagagaatgacagaattgaaataactcaagttctgttttttcatctttaaatcattgtgctatcagtatttattttgaaactactgtttaaatgcataaacatatagtaccacaaggactggggacacagggaactgtgcccaaaaggagctggaacaatttcacatgattatgaatgtacccttcaaacacacatatgtagctgagtgtatgtgtgtcagaggct

SEQ ID NO: 577906 - DNA, 565 bp, Homo sapiens
tttgacacctggtggggatcattcttaatacctccctcctcaataaaataaatttattttcagtaaaaaccatgaaataaagcaaataataaattaaattctagagggtatttaatggataatcagacaacataagcaagcagtgaaatttttaatactgtattattcatgataataaaaataaaaactgaaaaaaaagttaaagtagaaaaggaaagaaataataggttaacattttatgattacattaactrtctattttttaaggagggggtagtaaacaaattaagaaatacttccaagagagtaaactctgcagggttctaagaatgatttgcatagagaatgacagaattgaaataactcaagttctgttttttcatctttaaatcattgtgctatcagtatttattttgaaactactgtttaaatgcataaacatatagtaccacaaggactggggacacagggaactgtgcccaaaaggagctggaacaatttcacatgattatgaatgtacccttcaaacacacatatgtagctgagtgtatgtgtgtcagaggct

SEQ ID NO: 577907 - DNA, 565 bp, Homo sapiens
tttgacacctggtggggatcattcttaatacctccctcctcaataaaataaatttattttcagtaaaaaccatgaaataaagcaaataataaattaaattctagagggtatttaatggataatcagacaacataagcaagcagtgaaatttttaatactgtattattcatgataataaaaataaaaactgaaaaaaaagttaaagtagaaaaggaaagaaataataggttaacattttatgattacattaactgtctattttttaaggagggggtagtaaacaaattaagaaatacttccaagagagtaaactctgcagggttctaagaatgatttgcatagagaatgacagaattgaaataactcaagttctgttttttcatctttaaatcattgtgctatcagtatttattttgaaactactgtttaaatgcataaacatatagtaccacaaggactggggasacagggaactgtgcccaaaaggagctggaacaatttcacatgattatgaatgtacccttcaaacacacatatgtagctgagtgtatgtgtgtcagaggct

SEQ ID NO: 577908 - DNA, 565 bp, Homo sapiens
tttgacacctggtggggatcattcttaatacctccctcctcaataaaataaatttattttcagtaaaaaccatgaaataaagcaaataataaattaaattctagagggtatttaatggataatcagacaacataagcaagcagtgaaatttttaatactgtattattcatgataataaaaataaaaactgaaaaaaaagttaaagtagaaaaggaaagaaataataggttaacattttatgattacattaactgtctattttttaaggagggggtagtaaacaaattaagaaatacttccaagagagtaaactctgcagggttctaagaatgatttgcatagagaatgacagaattgaaataactcaagttctgttttttcatctttaaatcattgtgctatcagtatttattttgaaactactgtttaaatgcataaacatatagtaccacaaggactggggacacagggaactgtgcccaaaaggagctggaacaattycacatgattatgaatgtacccttcaaacacacatatgtagctgagtgtatgtgtgtcagaggct

SEQ ID NO: 577909 - DNA, 406 bp, Homo sapiens
tcttcatgcaatggtaaaatggtttctaggggaaggctaacttattattattattgcaaattattatggtggtaagatatggttgtatcagatctaccagtctgctaacatcacacagatgaatggcaagactaaaccaattgaaacctaatcaaaatagttctaagaactgttttaactgagaatgttatttacattacacattgcggtgccatagggcctgtcatctgtgtttcctattgtctcattacaacagawtgggaagcattgacaaggagcctgacccacacagcagtaatgggcactattgtgggtcttggcccgtaacctcaaatttaatgatttgatcattcaattacagcagattcatggcaacccagttatctttgagtggttgacccatatc

SEQ ID NO: 577910 - DNA, 613 bp, Homo sapiens
ccattttatgacattactcttgcacttactgtttctttctcactttttattcctgatatcttactgaatttgatgtatcaatgtaaactgccttaaattctttttgaaacatggcagggtgtaaatacttaaataacaataaaatcacataaactattcactatatcctatactcaagactcttcctaaatttactcttagcagccttcaatacaagctgaaaatactaaattttttmaaactgcaaaatatctgttttcttacatctgaatttgtgtgttttcaaaatgatgtctgttttctcaactatttgagaaaatcgtgccattatatttattatatgctttagagttttcaaatcactttgactgttcttttgtttttgaaaatagaaatacaatagttgtcatcttttgttcagttttgtttcataatttaattttataacataaattcacagaattttataacactaatagttttatttgattttgtgctaaagattttttctattgaagaaaatagactagaacaaaagtgagaaaaagacatattagagctgtcaagatatattatttttgccagaaaaaaagggaaaaatgccttccacttc

SEQ ID NO: 577911 - DNA, 613 bp, Homo sapiens
ccattttatgacattactcttgcacttactgtttctttctcactttttattcctgatatcttactgaatttgatgtatcaatgtaaactgccttaaattctttttgaaacatggcagggtgtaaatacttaaataacaataaaatcacataaactattcactatatcctatactcaagactcttcctaaatttactcttagcagccttcaatacaagctgaaaatactaaattttttcaaactgcaaaatatctgttttcttacatctgaatttgtgtgttttcaaaatgatgtctgttttctcaactatttgagaaaatygtgccattatatttattatatgctttagagttttcaaatcactttgactgttcttttgtttttgaaaatagaaatacaatagttgtcatcttttgttcagttttgtttcataatttaattttataacataaattcacagaattttataacactaatagttttatttgattttgtgctaaagattttttctattgaagaaaatagactagaacaaaagtgagaaaaagacatattagagctgtcaagatatattatttttgccagaaaaaaagggaaaaatgccttccacttc

SEQ ID NO: 577912 - DNA, 479 bp, Homo sapiens
ccccagatgtgaccatctagttgcaggaaaacaagctcagggctgtcactgattccacattgtggtgagttgtataattattttattatatatcacaacgtaatagaaataaagtacacaataaatgtaatacacttgaatcatccctaaaccatcgcccccacccccaggtcagtggaaaaatggtcttccatgaaaccagttcctggtgccaaaaagtgtggggactgctgtgttaaaggatccttctaatattccatgaacacaattttctgtacaaaaaaaaaasatttagtagaaaattaaataagattatataatgttgaacaaatgctatttaaaacacttaagatttaaccactttatgattacttatcctgatgccctaggatatgacatagctatcaaagtcctttgagttaactcaaacatctgcttaatttcacttttgtactatttttaagaatgtaatgaaagtt

SEQ ID NO: 577913 - DNA, 479 bp, Homo sapiens
ccccagatgtgaccatctagttgcaggaaaacaagctcagggctgtcactgattccacattgtggtgagttgtataattattttattatatatcacaacgtaatagaaataaagtacacaataaatgtaatacacttgaatcatccctaaaccatcgcccccacccccaggtcagtggaaaaatggtcttccatgaaaccagttcctggtgccaaaaagtgtggggactgctgtgttaaaggatccttctaatattccatgaacacaattttctgtacaaaaaaaaaacatttagtagaaaattaaataagattatataatgttgaacaaatgctatttaaaacacttaagatttaaccactttatgattacttatcctgatgccctaggatatgacatagctatcaaagtcctttgagttaactcaaacatctgcttaatttcacttttgtastatttttaagaatgtaatgaaagtt

SEQ ID NO: 577914 - DNA, 479 bp, Homo sapiens
ccccagatgtgaccatctagttgcaggaaaacaagctcagggctgtcactgattccacattgtggtgagttgtataattattttattatatatcacaacgtaatagaaataaagtacacaataaatgtaatacacttgaatcatccctaaaccatcgcccccacccccaggtcagtggaaaaatggtcttccatgaaaccagttcctggtgccaaaaagtgtggggactgctgtgttaaaggatccttctaatattccatgaacacaattttctgtacaaaaaaaaaacatttagtagaaaattaaataagattatataatgttgaacaaatgctatttaaaacacttaagatttaaccactttatgattacttatcctgatgccctaggatatgacatagctatcaaagtcctttgagttaactcaaacatctgcttaatttcacttttgtactawttttaagaatgtaatgaaagtt

SEQ ID NO: 577915 - DNA, 591 bp, Homo sapiens
acctttgagttgttcaatatcatttgaaaatggtaggatttgtggttattttcattaccctattagatttaagatagagaggctgggatgacagaggcctccttgaatagctatgaagcctcattcagcatatcaaatggtagtctgagttctaagaaaccttaagtaatttatcattctgtaaatactcttataagcaataatttttatttgtatttttgaaaacaaactacttaaatatggaaaaatattaactggaaagccagcagtagggttttctatttttaaaagacatttcaaggatttcctgtaatcccagcactttgggagccaaggtggatagatcacctgaggtcaggaattggagatcagcctggccaacatggtgaaaccccatctctactaaagatacaaaaattagctggatgtggtggcacacacgtgtaatcccagctacttgggaggctgaggcaagagaatcrcttgaaccccagaggcggaggttgcagtgagctgagatcatgccattgcactccagcctgggtgaaaagagcgaaactccatctttaaataagtaaataaatgaataat

SEQ ID NO: 577916 - DNA, 591 bp, Homo sapiens
acctttgagttgttcaatatcatttgaaaatggtaggatttgtggttattttcattaccctattagatttaagatagagaggctgggatgacagaggcctccttgaatagctatgaagcctcattcagcatatcaaatggtagtctgagttctaagaaaccttaagtaatttatcattctgtaaatactcttataagcaataatttttatttgtatttttgaaaacaaactacttaaatatggaaaaatattaactggaaagccagcagtagggttttctatttttaaaagacatttcaaggatttcctgtaatcccagcactttgggagccaaggtggatagatcacctgaggtcaggaattggagatcagcctggccaacatggtgaaaccccatctctactaaagatacaaaaattagctggatgtggtggcacacacgtgtaatcccagctacttgggaggctgaggcaagagaatcacttgaaccccrgaggcggaggttgcagtgagctgagatcatgccattgcactccagcctgggtgaaaagagcgaaactccatctttaaataagtaaataaatgaataat

SEQ ID NO: 577917 - DNA, 634 bp, Homo sapiens
tttcatcctctgaaggcaacgtccaaaattaacattttcttaaattcaaaaactatttgttttttacattaaaatcactcgttttttcactgggttgtaagatgagttttagtaatttctagaaaaacacttccgttatttctatgacaagtatgatttgagctctcttagtagattagcrtatcttgtaattgaccaaaaaaatacgtatttttttataggaccaacatggttgttctgaggtgtttgaagtaaattataaaaggagtttaagaataaagaactcagaagtaaagtcgtacacctacagccacttgatctttgacaaagtcgacaaaaataagcaatgggaaaaggtcaataaatggtgctggaatggctggctagcaacactcagaaaaaagtaactgcaccccgtacctttcaccgcatacaaaaattaactcaagatagattaaaaatttacgtgtaagatctaaaactataagaattctaaaagaataactaggaaataccattctggacattggactcgggaaattgtgactaagtcctgaaaagcaattgcaacaaaaatgaaaattcacatgggacctaagtaaactaaagagcttctgcacagcaaaagaaacta

SEQ ID NO: 577918 - DNA, 594 bp, Homo sapiens
attataattattcaatttgtttcttaattatgctttttattatttttagtatttcattaatttgttcttattgtctactttagtatctggaactaaatgtgcactcaatgaatcttctttgacggaattaattaaataatcattggcaagagtcttatggctattttgacctaatggatcatgtcaatgataagctaaagctaatactcaattattagtatttatttctattatcttcataaagacactggcttgtttttcccaaaacaaagatggtaattttctacttcattcttttggaatgaaaagaggtagttctctcttttctttctagattttgtagctagctgtttgctttgaagattgtgtataatattgttttaaatttatttttcacaatcactacggtgttctttattacttgacaaatacttgtagatatgcacaagcctattaaaatgagtaaatttaaatagttctggacttttttaygattgtattaaaatgtcacatatggttatatctattttctaaacaacatctgcttttaattcttggggattttacacagacacataaacacacaaaaatatg

SEQ ID NO: 577919 - DNA, 552 bp, Homo sapiens
ccttcccgcggggcagggctcgggacctgcagcccgccatgcctgagcctcccacccactccatgggctcctgtgcggcccgagcctccctgatgagcgccaccccctgctccacggcgcccagtcccatcgaccacccaagagctgaggagtgcgggcgcccggcgccggactggtaggcagctccacctgcagccctggtgcgggatccactgggtgaagccagctggratcctgagtctggtggggacgtggagaacctttatgtctagctcagggattgtaaatacaccaattggcactctgtatctagctcaaggtttgtaaacacaccaatcagcaccctgtgtctagctcagggtttgtgaatgcaccaatccacactctgtatctagcttctctggtggggccttggagaacctttgtgtccatactctgtatctaactaatctgatggggacgtggagaacctttgtatctagctcagggattgtaaacgcaccaatcagtgccctgtcaaaacagaccactgggctctaccaatcagcagga

SEQ ID NO: 577920 - DNA, 608 bp, Homo sapiens
acaaggagctcaaataaatcagcaagaaaaagtcaaataatcccatcaaaaagtggacaaagaacatgaatagacaactctcaaaagaagatataaaaatggccaacaaacctatgaaaaaatgctcaacatcactaatgatcaggggatgtgaatcaaaaccacaatgtgataaccactttactcctggaagtatggccttaattaaaaaattaaaaactaatagatgttagcatgatgtggtgtaaaggcaacacttttacactgttggtagaaatataaactagtacaaccactatggaaaacagtatggagatacattayagaactaaaagtagaactaccatttgatatagcattcccactatgcactatggtatctacccagagggcaataagtcattttatgaaaaagacacttgcacacacatgtttatagcagcacaatttgcagttgcaaaaatatgaaaccaaccagcctaaatgcccatcaaccaaagagtggataaagaaaatgtgagagagagagatgtatatgcatacatatatatcacatatcagtattccatgagtgtgtgtgtgtgtgtgtgtgtatgcatatgtgtaca

SEQ ID NO: 577921 - DNA, 608 bp, Homo sapiens
acaaggagctcaaataaatcagcaagaaaaagtcaaataatcccatcaaaaagtggacaaagaacatgaatagacaactctcaaaagaagatataaaaatggccaacaaacctatgaaaaaatgctcaacatcactaatgatcaggggatgtgaatcaaaaccacaatgtgataaccactttactcctggaagtatggccttaattaaaaaattaaaaactaatagatgttagcatgatgtggtgtaaaggcaacacttttacactgttggtagaaatataaactagtacaaccactatggaaaacagtatggagatacattatagaactaaaagtagaactaccatttgatatagcattcccactatgcactatggtatctacccagagggcaataagtcattttatgaaaaagacacttgcacacacatgtttatagcagcacaatttgcagttgcaaaaatatgaaaccaaccagcctaaatgcccatcaaccaaagagtggataaagaaaatgtgagagagagagatrtatatgcatacatatatatcacatatcagtattccatgagtgtgtgtgtgtgtgtgtgtgtatgcatatgtgtaca

SEQ ID NO: 577922 - DNA, 621 bp, Homo sapiens
tagctgggattacaagtgcatgccaccacgcctagctaattatcatattattagtagagacagggttttgccatgttggccaggctggtctcaaactcctgacctcaggtgatctgcccaccttggcctcccaaagcgctgsgattacaggtgtgagccaccatgcccagcggcaatatttcattttttaaaatagagacaaggccttgctccgtttctcaggctggtctcgaactcctggcctcatgtgatccttccacctcagccttcaaaatgctgggattacaggaacaagtcactgtacctgaccatcccaggcaaagggaacagcaagaacaatggagtcgaggtgggaaacgtctttgaggtatgggggcttgaaggggagttttgtggtcagatttaggagggtaagttggggacaaatagtgagcgcctgcttgggagtttaggctgtgtaccagcggggagaggattgaaggcttctctgaagataagtgacaccaacacatttgtgccatataaacacagctctgccagcagtgtgaagctggcatgggactggatgaagttaggtacagaggcagtttgcgaggcagttgtaatggtctggttgagcac

SEQ ID NO: 577923 - DNA, 608 bp, Homo sapiens
aaattctttgaactgaatgataatagtgacacaacctatcaaaacctctgggatacagcaaaggttgtgctaggaggaaaattcatagatttaagtgcttacataaaaaagtctgaaagagcacaaatagacaacctaagctcacacctcaaggaagtagaaaaacaagaacaagccatacccaagcccagcagaagaaaataaataacaaagatcagagcagaactaaataaaattgaaacaaacaaaaratacaaaagataaatgaaacaaaaaactgtttctttgaaaagataaacaaaaaattgatagaccactggcaagactaaccaaaaaaaaagagaagatccaaataagctcaactagaaacaaaatgggagatattacaactgattccacagatacacaaaagatcattcaagactcttatgaatacctttaagtgcataaactagaaaacctagaggagatggataaattcctggaaatatgtaactctcctagattaaaccaggaagaaatagaaactctgaacagaccaacagcaagaagtgaggttgaaatggtaatttaaaaattgccaataaaaaaaatgtccagggccagac

SEQ ID NO: 577924 - DNA, 545 bp, Homo sapiens
gtgtgtgtatatatatatacatatctgtgtgtatatatatatacacatatctgtgtgtatatatatatacacacagatatgtgtgtatatatatatacacacatatatatataaaaagaatgaaataatggcattcacagcaacctggatgaaatcgaagaccattattctaagtgamgaaattcaggaatggaaaatcacacatcgtatgttatcattcataagtgggagctaagctttgaggatgcaaaggcgtaaggatgatacaatggactttgcggacttgagggaaagggtgtgaggtgggtgagggataaaagactacacattgggtacagtgtacaccgcttgggggatgggtgcaccaaaacctcagaaatcctcactaaagaacttactcatgtaaccaaacaccatctattccctaaaaaaattattgaaattttaaaaaaagaatcaagaagaacggaattcctccctcctaccactgaatctgcctccaaactgccctgcacttcctgcgggtatctaggagctgtaacacg

SEQ ID NO: 577925 - DNA, 545 bp, Homo sapiens
gtgtgtgtatatatatatacatatctgtgtgtatatatatatacacatatctgtgtgtatatatatatacacacagatatgtgtgtatatatatatacacacatatatatataaaaagaatgaaataatggcattcacagcaacctggatgaaatcgaagaccattattctaagtgaaraaattcaggaatggaaaatcacacatcgtatgttatcattcataagtgggagctaagctttgaggatgcaaaggcgtaaggatgatacaatggactttgcggacttgagggaaagggtgtgaggtgggtgagggataaaagactacacattgggtacagtgtacaccgcttgggggatgggtgcaccaaaacctcagaaatcctcactaaagaacttactcatgtaaccaaacaccatctattccctaaaaaaattattgaaattttaaaaaaagaatcaagaagaacggaattcctccctcctaccactgaatctgcctccaaactgccctgcacttcctgcgggtatctaggagctgtaacacg

SEQ ID NO: 577926 - DNA, 545 bp, Homo sapiens
gtgtgtgtatatatatatacatatctgtgtgtatatatatatacacatatctgtgtgtatatatatatacacacagatatgtgtgtatatatatatacacacatatatatataaaaagaatgaaataatggcattcacagcaacctggatgaaatcgaagaccattattctaagtgaagaaattcaggaatggaaaatcacacatcgtatgttatcattcataagtgggagctaagctttgaggatgcaaaggcgtaaggatgatacaatggactttgcggacttgagggaaagggtgtgaggtgggtgagggataaaagactacacaytgggtacagtgtacaccgcttgggggatgggtgcaccaaaacctcagaaatcctcactaaagaacttactcatgtaaccaaacaccatctattccctaaaaaaattattgaaattttaaaaaaagaatcaagaagaacggaattcctccctcctaccactgaatctgcctccaaactgccctgcacttcctgcgggtatctaggagctgtaacacg

SEQ ID NO: 577927 - DNA, 495 bp, Homo sapiens
ttggttggaatttcttttctttaagaattttcaatataggcccccagtctctcctggcttgtakcgtttctcctgagaggtttgatgttagtctgatggacttccttttgtaggtgacttgttctttctctctagctgcctttaacattttttctttcatttcaatcttggagaatctgatgattagtgtcttggggataatctccttgtgcagtattttgcaggggttctctgtatttcctgtacttgaatgttggcctctctagctaggttggggaagttctcatggatgatatcctgaaatatgttctccaagttgtttccattctccccatctcagggacaccaaagagctgtagactaggtctctttacataattccatacttcttggaagttagttccctttcattattttctctttattcttgtctgtcttatttcagaaaaacagtcttcaagctctgagattctttcctctgcttggtctattcta

SEQ ID NO: 577928 - DNA, 551 bp, Homo sapiens
ctgggattacaggcatgcaccaccatgcccagctaatttttgtatttttttagtagagatgaggttttgccatgttaaccaggctggtctcaaattcctgaccccaggtgatccacccgccttggcctcccaaagtkctgggattataggtgtgagccactgagtctggccctctggtagttctttatagcaacataagaacagacttatacagtgccccagatgtgtaataataaggggcttcctaaaaacaaaccccagattaaacagagcaccaccagccaaaggctgtgctggtccactcaaagtcctgtaattgcccctagacaatttatggcaggaggttcaaaggggaaagagtgatactttctgtgggtggctagacttcaaagagaaaaaagagaaaatggggcagagctgggcatccctagttctcatcccaaatacccaacagatgggaataagtgaggaggtagactgtagctaatatatgtccttctgtgtgaaaacaggagggaaaaaataaatttaatttaagtacatccaggcac

SEQ ID NO: 577929 - DNA, 551 bp, Homo sapiens
ctgggattacaggcatgcaccaccatgcccagctaatttttgtatttttttagtagagatgaggttttgccatgttaaccaggctggtctcaaattcctgaccccaggtgatccacccgccttggcctcccaaagtgctgggattataggtgtgagccactgagtctggccctctggtagttctttatagcaacayaagaacagacttatacagtgccccagatgtgtaataataaggggcttcctaaaaacaaaccccagattaaacagagcaccaccagccaaaggctgtgctggtccactcaaagtcctgtaattgcccctagacaatttatggcaggaggttcaaaggggaaagagtgatactttctgtgggtggctagacttcaaagagaaaaaagagaaaatggggcagagctgggcatccctagttctcatcccaaatacccaacagatgggaataagtgaggaggtagactgtagctaatatatgtccttctgtgtgaaaacaggagggaaaaaataaatttaatttaagtacatccaggcac

SEQ ID NO: 577930 - DNA, 481 bp, Homo sapiens
atatatattttataatatataatatacattatttttgttgtaagtgattcaggttgaatttctgtcattggcagccaaaagagtcctgagctcagtaaggggctcaactgagccaggacaggatactctgggacttttagcagcacagagcactagctggtgcttggaaatgatgtttcctctgctcttggctargtggaatccccaggccagcatccccaagatgaaatgtgcccctccctttagaaggcaagaattgatgacagtgagttttttgtttggtttggtttgaagtagcccaaatgtccccttcctgccacgagggcaatgcagcttctatcttatggcatctgggaggagccattttttatggcctggatcaccgagacgggaagagggagagcaaaccgggggatggcacactcctccaggctgggtccggggaatgtggctattaggaggaggacagccgccacagcag

SEQ ID NO: 577931 - DNA, 481 bp, Homo sapiens
atatatattttataatatataatatacattatttttgttgtaagtgattcaggttgaatttctgtcattggcagccaaaagagtcctgagctcagtaaggggctcaactgagccaggacaggatactctgggacttttagcagcacagagcactagctggtgcttggaaatgatgtttcctctgctcttggctaagtggaatccccaggccagcatccccaagatgaaatgtgcccctccctttagaaggcaagaattgatgacagtgagttttttgtttggtttggtttgaagtagcccaaatgtccccttcctgccacgagggcaatgcagcttctatcttatggcatctgggaggagccattttttatggcctggatcaccgagacgggargagggagagcaaaccgggggatggcacactcctccaggctgggtccggggaatgtggctattaggaggaggacagccgccacagcag

SEQ ID NO: 577932 - DNA, 481 bp, Homo sapiens
atatatattttataatatataatatacattatttttgttgtaagtgattcaggttgaatttctgtcattggcagccaaaagagtcctgagctcagtaaggggctcaactgagccaggacaggatactctgggacttttagcagcacagagcactagctggtgcttggaaatgatgtttcctctgctcttggctaagtggaatccccaggccagcatccccaagatgaaatgtgcccctccctttagaaggcaagaattgatgacagtgagttttttgtttggtttggtttgaagtagcccaaatgtccccttcctgccacgagggcaatgcagcttctatcttatggcatctgggaggagccattttttatggcctggatcaccgagacgggaagagggagagcaaacygggggatggcacactcctccaggctgggtccggggaatgtggctattaggaggaggacagccgccacagcag

SEQ ID NO: 577933 - DNA, 521 bp, Homo sapiens
actggcgatgggacttcactgtgaaactcccattcatcctgcaagtttcccttgggtgacagctgaggagccaccaccgcagtgccaccaagmctgaggggtgtccccgcctgtgacctcaggtcccccttctgcctctttagtcctccattccttgttccaccaatgaccaatattaaattctctctgctaaactaaccagtgcattttctgtttttctgaccagaccatcatgggtacagagagccagcgtcagctcagagtgaatattcataaaacctgatttcttgcttaatcttaagcaataatctcatctcttcttcctggtcctcagtggatcacctcacaccccagggacatgatcactgctctataacatagaactcatgggacatttaatgttaacttaattacccccatcattggcttgctgtgtacccactgtggcactgaatcatggcacccaaaaagatgcccacgtcctaatccccagaacgtgtggatgtgacctcacatggtaa

SEQ ID NO: 577934 - DNA, 521 bp, Homo sapiens
actggcgatgggacttcactgtgaaactcccattcatcctgcaagtttcccttgggtgacagctgaggagccaccaccgcagtgccaccaagactgaggggtgtcyccgcctgtgacctcaggtcccccttctgcctctttagtcctccattccttgttccaccaatgaccaatattaaattctctctgctaaactaaccagtgcattttctgtttttctgaccagaccatcatgggtacagagagccagcgtcagctcagagtgaatattcataaaacctgatttcttgcttaatcttaagcaataatctcatctcttcttcctggtcctcagtggatcacctcacaccccagggacatgatcactgctctataacatagaactcatgggacatttaatgttaacttaattacccccatcattggcttgctgtgtacccactgtggcactgaatcatggcacccaaaaagatgcccacgtcctaatccccagaacgtgtggatgtgacctcacatggtaa

SEQ ID NO: 577935 - DNA, 592 bp, Homo sapiens
tttctcccattccataggttgtctgcttattctgttgctgtgcagaagctgtttagtttaattaggtatcacttgtcaatttttgtttttgttgcaattgcttggggacttagccaaaaattatttgccaaggccagtgctgacatragtatttcctaggttttactctagtgcttttatagtttgagatcttacatttaaatatttaatccatcttgagtaaatatttgtattagtgaaagataagaatttggtttcatttttctgcttatggcaagccagttaacctgaaacatttatcaaatggcaaatcctttccctattgcttgttttcattgaccttgtcgaaaatcagatggttgtaagtgagcagctttatattttagctttctattctgttccattagtctatgtgtctgtttttgtatcagtactatgctgttttttcactgtagccttattgtttgaagttgatagtgtaaggcctccagctttgttctttttgcttaggtttgcattggctatttgggctcttttttggttccacataaattttagaatagtttttctaattctatgataggttgatagg

SEQ ID NO: 577936 - DNA, 519 bp, Homo sapiens
agaagggcattcgcttttagatctaaaagaaatgatttcttttgtgtgtttatgaaaaacaaatcatatttttatrgaaacccaggcattaagaagtataatacaaataatttgccatctggaaataatcatggagtctgagaatgctaacaaggtcatggagacagtaattttcattcagtataacactgaggagttccttgtatagtaagtagttccttgtagcagttactacctttctttattcacagataagtaagcaaactcactcctgtaatattctccatggaaattcagtgtggattcttgcattgccgtcattcatacagtagaggaaaacatgcttttggtttcctaaagttacataggtgtttcagctgttacttataccaaatgagtttctaggtagtatatgtagctataagtactattttgggttaataacattgattcattttggttccttaactgtttattaaaacttggaaaattgtccttaaagttaagccagatacagag

SEQ ID NO: 577937 - DNA, 543 bp, Homo sapiens
acggtggtgcgatcttggctcactgcaacctctgcctcccaggttcaagcaattctcctgtctcagccttccaagtagcagggattacaggtgtgtgccaccatgcacggctaatttttgtatttttagtagagacggggttttgctatgttggccaggctggtctcgaactcctaacttcaggtgatctacctgcctcggcctctcattaagtgatgggattacaggcatgagccacagcacccagccaaaaaattgtgtcttttttgacctctaacttttggatgctatagagtgccaatgcagcatataaaagaataagaaacagaattttttttttgttgaattacatggaaagcattgtcaaaaatgtttgatcttcaacttaatattttaataaatgttattaatgtttatttcaaaatgtatgaaatttccttttttttgagacggagtcttgctctgtcaccaggctggagtgcagtggtgcaatcktggctcactgcaaccccgcctcccaggttcaagtgattctcctgcctc

SEQ ID NO: 577938 - DNA, 549 bp, Homo sapiens
gcgcccgccatcacacccggctaatttttttatttttatttatttttatttttattttatttatttttatttttagtagagacggagtttcaccgtgttagccaggatggtctcgatctcctgacctcatgatccgcccgcctcggcctcccaagtgctgggattacaggcgtgagccaccatgcccggccctaaagttgtttttcttttagaagttttcaaatgtattctctgatcaaaartgaataatctgttgttgggctttgattttctaaactcatccctcagctatttttccaaattattctatgtcctttcaaaatgtttctgcaatttttttgagatggggtctcattctatcacccaggctggagtgtagtggtgtaatcaattatggcttactgcggcttttaccttccatactcaagccatcctcctgccctagtcacagagtacctcggactacaggcatgcaacatcatgcttggctaattttttttcatgaagacaggattttactatgtcgcccacgctgtgtttgaactgctg

SEQ ID NO: 577939 - DNA, 501 bp, Homo sapiens
ttttgaaaaatttaataagataataaccacttatcttattatcttataacaaagttaataagattaataaaccactaataagattagtgaaaaaagaagaaccaaataaacacaattagaaatgacaaaagcgacattaccactgaccccacaaaaatatgaataagtactgaagtctactacaaacttctctgtgaaaactagaaaatctaaaaaaaaaaaatggataaatttctggaaaaatccatcttcccataactgaacaaaaacaacaaaatgaatcagtgaatagaccaataacaagctccaaaattgaaatagtagtaaacagcctaccaaccaaaagaaagcccaggacsagccagttgtgctggctcatgcctgtaatcccagcactttgggaagccgaggtgggaggatcacctgaggttaggagttcgagaccagcctggccaacatggtgaaatactgtctctactacaaatacaaaaattagccggt

SEQ ID NO: 577940 - DNA, 521 bp, Homo sapiens
cactgtggctgagtcatcttctggtgtgctgtttttttggaaagctactcccttgagatattaatattgyctttacccaacccagcttccatttcttggagccacattgctgttcagacaatcagatgctggtattgaaggggaaaccaaaataatttttgcccctgcattctcttaggggacagaaaaatagtgaaataaaaatggtaaaaggtttgtgaaataaaatagcactccgaagacaaaaacaactgaccccagtgagatggtgcaaaaacttgcaaagtaaaatatacctggggcactcactggggcatagttcagagtctcctgagagaatgattattgagcacttaagtgaacaggatggggtgggagaatctctcaagtaattggatggcctgacttgacacatgagtcagacatatccgtaccttgacatgattaaatgcattgttcacttattttgacctcagggttttttttttggtttttttttttgtttttttttttgacagtgt

SEQ ID NO: 577941 - DNA, 521 bp, Homo sapiens
cactgtggctgagtcatcttctggtgtgctgtttttttggaaagctactcccttgagatattaatattgcctttacccaacccagcttccatttcttggagmcacattgctgttcagacaatcagatgctggtattgaaggggaaaccaaaataatttttgcccctgcattctcttaggggacagaaaaatagtgaaataaaaatggtaaaaggtttgtgaaataaaatagcactccgaagacaaaaacaactgaccccagtgagatggtgcaaaaacttgcaaagtaaaatatacctggggcactcactggggcatagttcagagtctcctgagagaatgattattgagcacttaagtgaacaggatggggtgggagaatctctcaagtaattggatggcctgacttgacacatgagtcagacatatccgtaccttgacatgattaaatgcattgttcacttattttgacctcagggttttttttttggtttttttttttgtttttttttttgacagtgt

SEQ ID NO: 577942 - DNA, 628 bp, Homo sapiens
tatgtgtgcttgtgtgtgtatatatatatatataggtgtgtatgtatatatgtgtgtatacatatatgaaataatcagataggtaaatgtataattacctgaagtaayggaatatgtgcatttgtacataaaagatcgctgtctgtgtgtgtgcatgagcactcatacttgtacagaagattaaagcttttgattctattccaaagccaagtagatattacagacaacatgttgtactggaaagaccactggaggagaatctgggagacctcccaccagctccatctttgtcaatccaattactacaatgacttttacttcctgcttagagcaccaatgcctctgctagcaaactacctgacaacactgatttctcagagacactgaacagaaaagagaaagtggcggaaagagaaacaagtgcactcagaatgaaccccacaagggaaacctgaatcttgaggcttagaatttaatttttctgataatggcataattctgctctcaagtgaatcactctttactccactttattttgcacatattatctctaaggtacaatttttaatctataattatcttaccacgtgatttaaaccttgtatacagcagtaagatatgcattata

SEQ ID NO: 577943 - DNA, 466 bp, Homo sapiens
ttgtcaaagccattcaacaagtctctaggtagttccaaattttctcatattttcttgtcttcttctgagccctccaaactgttccaacctcagcctgttacccagttccaaagtcgctgccacattttgggtatcttttcagcaacaccccactctactggtatcaatttactgtattagttttcatgctgctgacaaagacatactagagactgggaagcaaaagagatttaatttccacatggcctcacaatcatgacagaaggcaaggaggagcaagtcatgtcttacatggatggcagcaggcaaagagagagcttgtgcatggaawctcccgtttttaaaatcatcagatctcatgagactcattcactattacaagaacagcacaggaaagacctgtctccataattcaattacctcccactgagttcctgttatgacacgtgggaattgtgggagttac

SEQ ID NO: 577944 - DNA, 467 bp, Homo sapiens
tatcgtgaattgtaactcccacaattcccacgtgtcataacaggaactcagtgggaggtaaytgaattatggagacaggtctttcctgtgctgttcttgtaatagtgaatgagtctcatgagatctgatgattttaaaaacgggagtttccatgcacaagctctctctttgcctgctgccatccatgtaagacatgacttgctcctccttgccttctgtcatgattgtgaggccatgtggaaattaaatctcttttgcttcccagtctctagtatgtctttgtcagcagcatgaaaactaatacagtaaattgataccagtagagtggggtgttgctgaaaagatacccaaaatgtggcagcgactttggaactgggtaacaggctgaggttggaacagtttggagggctcagaagaagacaagaaaatatgagaaaatttggaactacctagagacttgttgaatg

SEQ ID NO: 577945 - DNA, 616 bp, Homo sapiens
tgaacatttgtgcaggagtttttgagtggaaaggtatcattctttcttcyttttttttttttttttttttggagacagggtgtcactttgacacccaggctgtagtgcagcggcacgatctcagctcactgcatgcaacctccgtctcctaggctcaagtgatcttctggcctcaccccccacccctcaagtagctgggactactggtgcatgccaccatgcctgactaatttttgtgtttttgtagagacaaggtcttgccatgttgcccaggttggtctacaatgcctggtctcaagcaatctgctcacctcatcctcccaaagtgctgggattacaggagggggagccactgtgcccagtcatatgtttcactaaagcattctcatcctcaaaatctttgaccttgtccagtccagtctccaaactaatctttaaaaaaattgcttacctcaagtcctcttcatttcacaattggcttatttattatttaactgaaatataaaaattcaaagtttctttaacaaaactgctttggatgaatatgttggtcaggatttttggttgcaagcactggaatctaactctggtttaataagcagtcaagaaatatatc

SEQ ID NO: 577946 - DNA, 521 bp, Homo sapiens
actatgttgcccaggatgatcttgaactccgggcctcaagtgatcctcctgccttggtctcccatgatcctcctgccttggcctcccaaagtgcagggattataggtgtgagccactgtgcctggctagaccaaatgtttatatcccaaatgttctgattctcacctctaatagttttaaasagttagtgatttctttcttcaaattttcttctgccaagtcacgggacctctcttcaagcttcactctcttctccaaggtaaaccagtcacacttaaatcccaaagataatctgagaaattctgcctgttgtcaaaataatgtgagggtgaggaagaggagagaaaaccgggtgtggtcagatgtttcagtttaatactgttttatactgaggcatttctttctccccccagcaacataatgctgacatgcacagggttcacctgcactgagtcacagccaagccaaacagacaccgagcatatgagagcttgtgccaaaacatgaagtgactgtagcag

SEQ ID NO: 577947 - DNA, 486 bp, Homo sapiens
  misc_feature 447: n = A,T,C or G
gtttcttctttaagtgcttcagaaaatgcctcactctcttccttgatcttcagtctttgtgctctgtcaccactaaacattaaaagggcccaattaggattctcagtacattcttcagtaaggggttccctcmcctaaaaaaaaaaaaaaaaaaaaaaaaaaatttcaagccagttgttaataattcctcttttattcaaaattttgggagcaaattattatttgaagggctcaatttatcccccaaaattgcaaaggttaaaaaaaacagtctatgggttccattactgggttttgaaaaaccatcacactgtttatattttggggattatggagcttatccacatgttttaattcatgccacaaatatttattgagtgcctttcattgggaagagactggtctaagggctgggggtataaccgagaaagaaaaccccgagaaatnttgactttccacatttttaataacaactgcaacaacaaa

SEQ ID NO: 577948 - DNA, 486 bp, Homo sapiens
  misc_feature 447: n = A,T,C or G
gtttcttctttaagtgcttcagaaaatgcctcactctcttccttgatcttcagtctttgtgctctgtcaccactaaacattaaaagggcccaattaggattctcagtacattcttcagtaaggggttccctcacctaaaaaaaaaaaaaaaaaaaaaaaaaaatttcaagccagttgttaataattcctcttttattcaaaattttgggagcarattattatttgaagggctcaatttatcccccaaaattgcaaaggttaaaaaaaacagtctatgggttccattactgggttttgaaaaaccatcacactgtttatattttggggattatggagcttatccacatgttttaattcatgccacaaatatttattgagtgcctttcattgggaagagactggtctaagggctgggggtataaccgagaaagaaaaccccgagaaatnttgactttccacatttttaataacaactgcaacaacaaa

SEQ ID NO: 577949 - DNA, 486 bp, Homo sapiens
  misc_feature 447: n = A,T,C or G
gtttcttctttaagtgcttcagaaaatgcctcactctcttccttgatcttcagtctttgtgctctgtcaccactaaacattaaaagggcccaattaggattctcagtacattcttcagtaaggggttccctcacctaaaaaaaaaaaaaaaaaaaaaaaaaaatttcaagccagttgttaataattcctcttttattcaaaattttgggagcaaattattatttgaagggctcaatttatcccccaaaattgcaaaggttaaaaraaacagtctatgggttccattactgggttttgaaaaaccatcacactgtttatattttggggattatggagcttatccacatgttttaattcatgccacaaatatttattgagtgcctttcattgggaagagactggtctaagggctgggggtataaccgagaaagaaaaccccgagaaatnttgactttccacatttttaataacaactgcaacaacaaa

SEQ ID NO: 577950 - DNA, 515 bp, Homo sapiens
cctgatggacgattgtatattttttttgggaagtgttctaaacatatctaaacacagaaaaggtacagtaaaaaacatggtataaaagataaacacgccaggcacggtggctcacacctttaatcccagcactttgggaggccgaggcaggctgaccacaaggtcaggagttcaagaccagcctgaccaatatgatgaaaccccatctttactaaaaatacaaaaaaatcagccaggcatggtgatgcatgcctgtagtctcagctactcgggagactgagacaggagaatcgcttgaacatgggaggtggaggttgctgtgagctgagatcatggcactgcactccagcctgggtgacagagcragactctgtctcaaaaaaaaagtgtgtgtgtatatatatcatatatatcatatatatgatatatatatgatatatatgatatatatataaaatgtatatatgatatataatatatattatatatattatatatatatatatataaacagt

SEQ ID NO: 577951 - DNA, 662 bp, Homo sapiens
cccactcaaatctcatgtcgaattgtaatccccaatgttggaggaggggtctggtgggaggtgattggatcataggggcagatttcctccttgctgttctcatgctagtgaatgagttctcacaagatttggttgtttaaaagtgtagcacctcccactttgctctcttcctccttctctggccatgtaagatgtgcctgcttcccctttgccttctgccatgattctaagtctcctgaggcctccccagccatgcttcctgtacagcctgtaaactgtgagccaattaaacctcttttatttataaattgtccagtctcaggtagttctttatatagcaatgtgagaacggactaatacaattaaggaaattcatcttattgtataactgttagaaatatttccctcagggtytcagtcactgccaccagcccatggactctgttctcccaccactctgccacccccctcctctgctggtcacaatggaagaagaaatcaccatgcttttcattgacattggctccagcatgtacaaagctggctttgctggggtgacgcttcccgagccatgttcccttccattgtcaggtgcccctggcaccatggtgtcatggtgggcatgagccagaaggattcctatgtgggcgatgaggcccaga

SEQ ID NO: 577952 - DNA, 593 bp, Homo sapiens
ctgtgagccaattaaacctcttttatttataaattgtccagtctcaggtagttctttatatagcaatgtgagaacggactaatacaattaaggaaattcatcttattgtataactgttagaaatatttccctcagggtctcagtcactgccaccagcccatggactctgttctcccaccactctgccacccccctcctctgcyggtcacaatggaagaagaaatcaccatgcttttcattgacattggctccagcatgtacaaagctggctttgctggggtgacgcttcccgagccatgttcccttccattgtcaggtgcccctggcaccatggtgtcatggtgggcatgagccagaaggattcctatgtgggcgatgaggcccagaccaagcacagcatcctgaccctgaagtaccccatcaagcatgacatcatcaccaatgaggtgggacaacatggagaagatctggcaccacaccttctacaacaagctgcatgtggccccagaagagtaccttgtgctgatgaccaaggcccccccttgtgctgatgaccaaggccaacagagagatgactcagatcatgtttgagg

SEQ ID NO: 577953 - DNA, 593 bp, Homo sapiens
ctgtgagccaattaaacctcttttatttataaattgtccagtctcaggtagttctttatatagcaatgtgagaacggactaatacaattaaggaaattcatcttattgtataactgttagaaatatttccctcagggtctcagtcactgccaccagcccatggactctgttctcccaccactctgccacccccctcctctgctggtcacaatggaagaagaaatcaccatgcttttcattgacattggctccagcatgtacaaagctggctttgctggggtgaygcttcccgagccatgttcccttccattgtcaggtgcccctggcaccatggtgtcatggtgggcatgagccagaaggattcctatgtgggcgatgaggcccagaccaagcacagcatcctgaccctgaagtaccccatcaagcatgacatcatcaccaatgaggtgggacaacatggagaagatctggcaccacaccttctacaacaagctgcatgtggccccagaagagtaccttgtgctgatgaccaaggcccccccttgtgctgatgaccaaggccaacagagagatgactcagatcatgtttgagg

SEQ ID NO: 577954 - DNA, 593 bp, Homo sapiens
ctgtgagccaattaaacctcttttatttataaattgtccagtctcaggtagttctttatatagcaatgtgagaacggactaatacaattaaggaaattcatcttattgtataactgttagaaatatttccctcagggtctcagtcactgccaccagcccatggactctgttctcccaccactctgccacccccctcctctgctggtcacaatggaagaagaaatcaccatgcttttcattgacattggctccagcatgtacaaagctggctttgctggggtgacgcttcccgagccatgttcccttccattgtcaggtgcccctggcaccatggtgtcatggtgggcatgagccagaaggattcctatgtgggcgatgaggcccagaccaagcacagcatcctgaccctgaagtaccccatcaagcatgacatcatcaccaatgaggtgggacracatggagaagatctggcaccacaccttctacaacaagctgcatgtggccccagaagagtaccttgtgctgatgaccaaggcccccccttgtgctgatgaccaaggccaacagagagatgactcagatcatgtttgagg

SEQ ID NO: 577955 - DNA, 600 bp, Homo sapiens
gaggccttgtctctacaaaaagtaaaagagttagccagggatggtggcgcatgcctatggtcctagctactggcaaggctgaagtgggaggatcgctttagcccaggtcttggctgcagtgagtgcaccactgcactccagcccgagtaacagaatgagatcctgtctaaacagaaggtagttggagataaatataacatcttacacaaaaagagtatgaaatggggatatatgacagtatttgaacaagttcactttaragctgattagtggcagtgttaggcttaaaagccaggcttggctggatgccgtggctcacacctgtaatcccagcactttgggagactgaggcaaggggatcacctgaggacaggagttcctgaccagcctggcaaacatagggaaaccctgtctgtactaaaaatacaaaaagtagctgggcatgctggcccgtgcctctaatcccagctatgctggaggctgaggcaggagaatcgcttgaacctgggaggcagaggttgcagtgagccaagatggtgttattccagcctgggcaacagagtgagaccctgttttaaaaaaaaaaaaaaaaaaagccag

SEQ ID NO: 577956 - DNA, 600 bp, Homo sapiens
gaggccttgtctctacaaaaagtaaaagagttagccagggatggtggcgcatgcctatggtcctagctactggcaaggctgaagtgggaggatcgctttagcccaggtcttggctgcagtgagtgcaccactgcactccagcccgagtaacagaatgagatcctgtctaaacagaaggtagttggagataaatataacatcttacacaaaaagagtatgaaatggggatatatgacagtatttgaacaagttcactttaaagctgattagtggcagtgttaggcttaaaagccaggcttggctggatgccgtggctcacacctgtaatcccagcactttgggagactgaggcaaggggatcacctgaggacaggagttcctgaccagcctggcaaacatagggaaaccctgtctgtactaaaaatacaaaaagtagctgggcatgctggcccgtgcctctaatcccagctatgctggaggctgaggcaggagaatcgcttgaacctgggaggcagaggttgcagtgagccaagatggtgttattccagcctgggcaacagagtgagaccctgtyttaaaaaaaaaaaaaaaaaaagccag

SEQ ID NO: 577957 - DNA, 574 bp, Homo sapiens
tctcaatgtgttctttttcatttaccttatttaaaaaaataaccatttaaagattttcacctccctgggatgaatcctttgactctccattttgtctccatttgtttttttaactaacttaatgttttattagcatctataagacccatgaggaaaagctgagacaccaaatttgataaggctcctccaagggaacatcacaacatggggtgcccacatagaagaggcccccttaaccatagcacttgccgtgacctaagtaacaggtgcctgctagaggcccccttaactacagcgcttaccatgccctagggggaacatcctctaatcatatacaatatttattcccagaaaacatttaggtgatggagatacaactactttatacaaagtgtgtttaaayatgttaactttcataatcctatcaacttttatattttatgttctagtcccaggaatctttttttttctacccccaaaccattttaccctctctggtgaaaaagaatttgggttcttaccaggggttgagctaaaggaagaaggtcctttgttgatctttattttgattaac

SEQ ID NO: 577958 - DNA, 574 bp, Homo sapiens
tctcaatgtgttctttttcatttaccttatttaaaaaaataaccatttaaagattttcacctccctgggatgaatcctttgactctccattttgtctccatttgtttttttaactaacttaatgttttattagcatctataagacccatgaggaaaagctgagacaccaaatttgataaggctcctccaagggaacatcacaacatggggtgcccacatagaagaggcccccttaaccatagcacttgccgtgacctaagtaacaggtgcctgctagaggcccccttaactacagcgcttaccatgccctagggggaacatcctctaatcatatacaatatttattcccagaaaacatttaggtgatggagatacaactactttatacaaagtgtgtttaaacatgttaactttcataatcctatcaacttttatattttatgttctrgtcccaggaatctttttttttctacccccaaaccattttaccctctctggtgaaaaagaatttgggttcttaccaggggttgagctaaaggaagaaggtcctttgttgatctttattttgattaac

SEQ ID NO: 577959 - DNA, 440 bp, Homo sapiens
ttttattatctttcaaataaaagatcctagagaagaattttawaacgtaccatcaacccaagggaaaaagtacaggtagaaaacagccaaaactgtctaatgtgatctattttgcaaacagtatggtagtggatccaaaatagaatattaaaccacaccacataatcaggatggcagtatgctgccttatcttatacttttaaagaaaaaacagtaaatgattgtggctaagcagtagagtggggaaaataggattccaaaaaaacacggtagcatctggcattgtgtttaaactaaaaaaatcaaaaactaaggttttaccctaatcaagatatttccaaaacagtcatatttctgaatattttaattaaagtccatcagttgagaattctctcaattcaaactaaaaagtcactgttattaaagaagtttagttctat

SEQ ID NO: 577960 - DNA, 560 bp, Homo sapiens
  misc_feature 515, 539, 540, 541, 542, 543, 544, 545, 546, 547, 548, 549,550, 551, 552, 553, 554, 555, 556, 557, 558, 559, 560: n = A,T,C or G
aaaatgggtagtatctaggaataggaaagttaaagaagaggaaactttaaaatcttagaatcatataataaaatacattgaatatttaatgccagggaaatgcaaattaaaatgacgtatacatttgtatatctaagactgaaaaaaatttacaaatccagctaatgtcaaatgttggtgtgatcataaagtctatctgtttggatgggcaagcattagctatgaagamgaataacacaaaaaccttggtggctaaatacactgaaggtttatttattgttcatcccacatgtaaattacagtgttatagtcccccactcatgcacgcagaaacccaggctcatatatcacaaccaattgaacattgttgatcatcatgcaggtgggaaaaggaaagctctttgagctgaaaatgggggagttagttgtggggaactggggctttgtataagcaaataaatgatgcgtgtaactttttcccacaattccccggccagaagtatccataggtttcncaactacaggaatgaaaggaaccnnnnnnnnnnnnnnnnnnnnnn

SEQ ID NO: 577961 - DNA, 458 bp, Homo sapiens
ccttgtaattccagcactttgcaaggctgagatgggtggaagtcttgaggtcaggagtttgagaccagcctggtcaacatagtgaaacccagtgtctactaataatacaaaaattagctgggcatggtgctgtgtgcctgtagtcccagctactcaggaagctgaggcacaagaattgcttgaacccaggaggcagaggtagcaatgagccaaaaatcatgtcactgcactctagcctggacgacaccatgagccctcatctcaaaaaaaaaaaaaaaaaaaaaaaaaaargccacccacaaaagatccctctgagttcctttatcctcaaattaaagttttacaatatgtaaacataattatcctttgttccccagttgaggaaaactctcaaaaggctcttaattttctggctaacacaggatataacatctcaaaatctaaaactcagctccatc

SEQ ID NO: 577962 - DNA, 634 bp, Homo sapiens
cctctttctccaacctgtttttccgmtgggaagctgatgctctcaggcaacatgggattgtggcaattggagaggagaggaattagggcactgcacaggagagagcagagcctgccagccaagtattctgtagctaaactggagttaaatgtcagttaaaatattattgatgtaaacctatttctatgcacttttggtttgttttctctgagttttgagctttaatttagggaaaccagaataaaaagggggttttatttacaggatagagtggtggaacagaatccctaagaataagtcccaggggtgattttaggtagccagatcaacttcagaaccggaaaagaacagcagcaaagaaaatgagaataaaagagggtgaaaacagaggtcagctgaggacactgactctttccctcctgacttgttctttcccaggaaatgatgggaatggagaggggctttaagatacactgtggaagtaaagtcaaataggaaatgtactctcagcattgtgtatagctgtttactcctcctgattgcttttttcctaacactgagtcacaaagtttattatgaacttcaggtcctttccaagtatagaaatgtagggctcctttcttctccttaccag

SEQ ID NO: 577963 - DNA, 578 bp, Homo sapiens
tcattagttttacaagaacaatatagtctttgagaagagctattatsatttaaattataaactaaattcctcccaatgttagcttggcccatgcccaggaatgagcaaagatagccagcctatgaagttagaagcaagacggagtcagttatgtcataatggctcttactgtcacactttcgctaaggcaattttaactgcctccgtatctgcttgttttgtctctccagttttgaaggcagcagtttgccctgtgacctcatttcccttactgattcaggaggagttgctgatttttctgtttgttcagctttttctagtcactagaacagactggtgacttctatgctgcttacatgtgcaattgaaaagcagaacctcctgtataatattattctaacatttttaaattgtttcaggatatgaccaatatttttcacatcttctactattaaaaataatacatgtctatgaacacagaaaaataacaactaaccaaaactatcaaccataacatttttccaaaaattttcatctcattattaaacacaaaatattagtgtttagcagttctttga

SEQ ID NO: 577964 - DNA, 589 bp, Homo sapiens
ggaaccaactcaaatgcccatcaatgatagactggataaagaaaagtggcacatacatgccatggaattctatgtaggcataaaaagaatgagttcatgtcctttgcagggacatggatgaagatggaaaacatcattctcagcaaactaacacaggaacagaaaaccaaacaccgcatgttctcactcacaagtgagagtgagacaatgagaacacagggacatggggcacgggggcatcacacaccaggcctgtcggggggtgagaggctgggggaaggatagcattagktgaaatacctaaagtagatgacagattgatgggtgcaacaaactaccatggcatgtgtatacctatgtaacaaacctacacgttctgcgcatgtaccccagaactttaagtataataaaaaaagaaaaagcaaaaacacaaaacaaaatataaaaattcaaattaaacaaagaaaaacgaagaacaaaaaccagaaacaaaaaaaaaggatagaaacaacaatagagaaaataaattaaaaaataaagaaaaacaatactggttacttctcatgagtctacattttagctgtgtggt

SEQ ID NO: 577965 - DNA, 589 bp, Homo sapiens
ggaaccaactcaaatgcccatcaatgatagactggataaagaaaagtggcacatacatgccatggaattctatgtaggcataaaaagaatgagttcatgtcctttgcagggacatggatgaagatggaaaacatcattctcagcaaactaacacaggaacagaaaaccaaacaccgcatgttctcactcacaagtgagagtgagacaatgagaacacagggacatggggcacgggggcatcacacaccaggcctgtcggggggtgagaggctgggggaaggatagcattagttgaaatacctaaagtagatgacagattgatgggtgcaacaaactaccatggcatgtgtatacctatgtaacaaacctacacgttctgcgcatgtaccccagaactttaagtataataaaaaaagaaaaagcaaaaacacaaaacaaaatataaaaattcaaattaaacaaagaaaaacgaagaacaaaaaccagaaacawaaaaaaaggatagaaacaacaatagagaaaataaattaaaaaataaagaaaaacaatactggttacttctcatgagtctacattttagctgtgtggt

SEQ ID NO: 577966 - DNA, 528 bp, Homo sapiens
tgtgtccagaattggtgggttcttggtctcactgacttcaagaatgaagcygcagaccctcgcggtgagtgttacagctcttaaggtggcgcatctggagtctgtcctttctgatgttcagatgtgttcggagtttcttccttctggtgggttcgtggtctcgctggctcaggagtgaagctgcagaccttcgcagtgagtgttacagctcttaaggcagcacgtcttgagttgttcgttcctcccagtgggctcctggtctcgctgggctcaggagtgaagctgcagatcttcgcagtgagtgttacagctcataaaatcagcatggacccaaagagtgagcagtagcaagatttattgcaaagagcgtcagaacaaagcttccacagtgtggaagaggacccaagcaggttgccaacgctggcttgggcagcctgcttttattcttttatctggccctacccacatcctgctgattggtagagctgagtggcctattttgacagggtgctgattggtgcgtttaca

SEQ ID NO: 577967 - DNA, 528 bp, Homo sapiens
tgtgtccagaattggtgggttcttggtctcactgacttcaagaatgaagccgcagaccctcgcggtgagtgttacagctcttaaggtggcgcatctggagtctgtcctttctgatgttcagatgtgttcggagtttcttccttctggtgggttcgtggtctcgctggctcaggagtgaagctgcagaccttcgcagtgagtgttacagctcttaaggcagcacgtcttgagttgttcgttcctcccagtgggctcctggtctcgctgggctcaggagtgaagctgyagatcttcgcagtgagtgttacagctcataaaatcagcatggacccaaagagtgagcagtagcaagatttattgcaaagagcgtcagaacaaagcttccacagtgtggaagaggacccaagcaggttgccaacgctggcttgggcagcctgcttttattcttttatctggccctacccacatcctgctgattggtagagctgagtggcctattttgacagggtgctgattggtgcgtttaca

SEQ ID NO: 577968 - DNA, 528 bp, Homo sapiens
tgtgtccagaattggtgggttcttggtctcactgacttcaagaatgaagccgcagaccctcgcggtgagtgttacagctcttaaggtggcgcatctggagtctgtcctttctgatgttcagatgtgttcggagtttcttccttctggtgggttcgtggtctcgctggctcaggagtgaagctgcagaccttcgcagtgagtgttacagctcttaaggcagcacgtcttgagttgttcgttcctcccagtgggctcctggtctcgctgggctcaggagtgaagctgcagatcttcgcagtgagtgttacagctcataaaakcagcatggacccaaagagtgagcagtagcaagatttattgcaaagagcgtcagaacaaagcttccacagtgtggaagaggacccaagcaggttgccaacgctggcttgggcagcctgcttttattcttttatctggccctacccacatcctgctgattggtagagctgagtggcctattttgacagggtgctgattggtgcgtttaca

SEQ ID NO: 577969 - DNA, 587 bp, Homo sapiens
gattcaatggccttcagcttattatttcagaaatctctaaatttatgttttctttcactgatggcaaatttcaatgaccatgcatgattcctttaagccactacatcttcctcctcccctcttttyaaggggaagaaaaccctccctgaagttcaaggcctaggttctatatagtggacttgcttcatcctgcttccaagactttctgtgttatgctccttgctcttctacatcttctcttgccttaaccaaatcatttggacttcatggtggaatcaatgaatcaatccctgctgtactgtcttactatcctctcctcatcttgcctaagaccagcccagccagaaaccaaattctggttctagagccttgttcagtgcgtggaatactgtaggtattcaataactttgtgtcatcactgaacaaacgaatgaatgaaagatgaatgaaaaaaaggaagggaggtaggaggatagacaaaataatagaaaagaacaactctattcttctgatagatttaacctagatgacacacaccaaaacattggttgagctggtttatttctggcaaaaggcagtactgccta

SEQ ID NO: 577970 - DNA, 587 bp, Homo sapiens
gattcaatggccttcagcttattatttcagaaatctctaaatttatgttttctttcactgatggcaaatttcaatgaccatgcatgattcctttaagccactacatcttcctcctcccctcttttcaaggggaagaaaaccctccctgaagttcaaggcctaggttctatatagtggacttgcttcatcctgcttccaagactytctgtgttatgctccttgctcttctacatcttctcttgccttaaccaaatcatttggacttcatggtggaatcaatgaatcaatccctgctgtactgtcttactatcctctcctcatcttgcctaagaccagcccagccagaaaccaaattctggttctagagccttgttcagtgcgtggaatactgtaggtattcaataactttgtgtcatcactgaacaaacgaatgaatgaaagatgaatgaaaaaaaggaagggaggtaggaggatagacaaaataatagaaaagaacaactctattcttctgatagatttaacctagatgacacacaccaaaacattggttgagctggtttatttctggcaaaaggcagtactgccta

SEQ ID NO: 577971 - DNA, 392 bp, Homo sapiens
actttttttttaattggggttgcattttaatgaaatatttcagacttataaaaatacatagctagcaatataatagacacccttgaacatactgcctagcctaagaaataaaacattccaaatccattggaatcctcctrgacatcatttctccattgtgttcctctccctccacctgggaggtaaccacttcgctgaatttagttttcattgttccaatacatatctttacatttgtactacatttggctgggtgcagtgcctcatacctgtattcccagcactttgggaggccgaggcagacagatcacttgaagtcgggagtttgagaccagcctggccaacatggcaaaacctcgtttctactaaaaatacaaaaaactagtcaggca

SEQ ID NO: 577972 - DNA, 523 bp, Homo sapiens
ggtggttgctgaagggtggagtggctgtggcaatttcctgaaatagggcaacaatgaagtttgctgcatctagtcactccctttcacaaaagatttctctgtagcatgcaattccatttggtagcattttacccagagttaaacttctttcaaacttcgtatcaatcctctcaaaccctgccccagctttatccactaagtttaggtaatattctaaattttttgttgtaatttcaacaatattcacagcatattcactaagagtagaatctatctcaaaaaaagaaaaaaaaaaaacaacactttctgtgctcatstacaagaagcaaccgttatgggattacagcaattcagttacatattcagggtccacttctaattctagttctcttggtgtttccaccacatctgaagttacttcctacactggtctttgtagtcttgaaccccttgaagtcatccatgagggctggaatcaacttcttccaaatttgtgttgatgttgatattttgtcctcctccc

SEQ ID NO: 577973 - DNA, 553 bp, Homo sapiens
ttctataaaccaacttttgatgaacacttttaagaaaagaagatatttgcgactgagaattttatatatagtgtgtgtgtggtgtgtgtatatatatacacagataagaaaaatatatgcacataatttagagaatacaggacagaagaagccgctaaaaaaaatctgtaatcttacgacctcggagtaatcatggtcaatgttttcttgaattctatcagctttttctagatacagatacactttctattgtcctttttgaaaatttgggatcatcttataaatacaatttatatgatttattttatgagtttaaaattacattttaagaatttgccaatgaagtctttttcatttctaacagttgcttagaatttattaaatcatattcttaatgttggacttttctaatgtttctaaatattgatattactgatagtaaataaacaygcttaaacatatatgtatgtttgagttgattatttctatagaatagatttctagaaatggtattgctggaacaaaggatctaggttttttttggaggtttctg

SEQ ID NO: 577974 - DNA, 279 bp, Homo sapiens
ggaggctgaggtaggagaatcacttgaacctaggaggcagaggttgcagtgagccaagatcgtaccaccacacttcagcctgggcaatagagtgagactccatctcaaaaacaaacaaacaracaaagcccccaaaactcaaaaagttgggctaaataatttcaggaataaaatgaaaaatacaatcacagcttcaacaatagactaggttgagcagaagagagaatttctgaacttgaagccaagtctttagaaataatacagtcagaaaaaataata

SEQ ID NO: 577975 - DNA, 279 bp, Homo sapiens
ggaggctgaggtaggagaatcacttgaacctaggaggcagaggttgcagtgagccaagatcgtaccaccacacttcagcctgggcaatagagtgagactccatctcaaaaacaaacaaacaaamaaagcccccaaaactcaaaaagttgggctaaataatttcaggaataaaatgaaaaatacaatcacagcttcaacaatagactaggttgagcagaagagagaatttctgaacttgaagccaagtctttagaaataatacagtcagaaaaaataata

SEQ ID NO: 577976 - DNA, 279 bp, Homo sapiens
ggaggctgaggtaggagaatcacttgaacctaggaggcagaggttgcagtgagccaagatcgtaccaccacacttcagcctgggcaatagagtgagactccatctcaaaaacaaacaaacaaacaaagcccccaaaactcaaaaagytgggctaaataatttcaggaataaaatgaaaaatacaatcacagcttcaacaatagactaggttgagcagaagagagaatttctgaacttgaagccaagtctttagaaataatacagtcagaaaaaataata

SEQ ID NO: 577977 - DNA, 607 bp, Homo sapiens
agacaaagtcaaagacagagagggagagacagacaaaaaagggagtcagaaagagagagacaaagaagaagtcaaagagaaagagagaagtagtaaagaaaaaatagtgtactctattcctttaaaagccagggtaaatttaaaacctataattgataattgaaggtcctctctgtaaccctataacactccaataccatyttgttgtcagtgtaaacaagggagtagcccgacagcactgaggccactgacaacctgtagccttcctatcaaaaatctttaaaccaacaagtttcctaacaggggatctaaatcttaattaattaccatacaaagttcctaccagatctaggaggagctcagaacaggacaatagatgtttcctccagggtgattaagggaaaaagacacaatgggtattcagtaggtaataaggaaactcttgtagaagcagagttaggaaaattgcctaataattggtctgttcgaacgtgggagttgttttgcactcagccaaaccttaaagtacttacagtatcaggaaggagccatctataccaactctaagttaatatggactgaacgaggtcttattaatagcaaagaa

SEQ ID NO: 577978 - DNA, 607 bp, Homo sapiens
agacaaagtcaaagacagagagggagagacagacaaaaaagggagtcagaaagagagagacaaagaagaagtcaaagagaaagagagaagtagtaaagaaaaaatagtgtactctattcctttaaaagccagggtaaatttaaaacctataattgataattgaaggtcctctctgtaaccctataacactccaataccattttgttgtcagtgtaaacaagggagtagcccgacagcactgaggccactgacaacctgtagccttcctatcaaaaatctttaaaccaacaagtttcctaacaggggatctaaatcttaattaattaccatacaaagttcctaccagatctaggaggarctcagaacaggacaatagatgtttcctccagggtgattaagggaaaaagacacaatgggtattcagtaggtaataaggaaactcttgtagaagcagagttaggaaaattgcctaataattggtctgttcgaacgtgggagttgttttgcactcagccaaaccttaaagtacttacagtatcaggaaggagccatctataccaactctaagttaatatggactgaacgaggtcttattaatagcaaagaa

SEQ ID NO: 577979 - DNA, 607 bp, Homo sapiens
agacaaagtcaaagacagagagggagagacagacaaaaaagggagtcagaaagagagagacaaagaagaagtcaaagagaaagagagaagtagtaaagaaaaaatagtgtactctattcctttaaaagccagggtaaatttaaaacctataattgataattgaaggtcctctctgtaaccctataacactccaataccattttgttgtcagtgtaaacaagggagtagcccgacagcactgaggccactgacaacctgtagccttcctatcaaaaatctttaaaccaacaagtttcctaacaggggatctaaatcttaattaattaccatacaaagttcctaccagatctaggaggagctcagaacaggacaatagatgtttcctccagggtgattaagggaaaaagacacaatgggtattcagtaggtaataaggaaactcttgtagaagcagagttaggaaaattgcctaataattggtctgttcgaacgtgsgagttgttttgcactcagccaaaccttaaagtacttacagtatcaggaaggagccatctataccaactctaagttaatatggactgaacgaggtcttattaatagcaaagaa

SEQ ID NO: 577980 - DNA, 443 bp, Homo sapiens
cctggaccaacccactggccctttcactggcctaaagagttcccctctggaggacactacaactgcagggccccttcttcgctcctatccagcaggaattagctagagcagtcatcgcccaattcccaacagcagttggggtgtcatgtttagatgggggattgagagrtgaagccagctgggcttctgggtcaggtggggacttggagaacttttctgtctagctaaaggattgtaaacacaccgatcagtgctctgtgtctagctaaaggtttgtaaatgcaccaatcagcactctgtaaaaacgcaccaatctgcgttctgtgtctagctaaaggtttgtaaacacaccaatcagcactctgtaaaaatgcaccaatcagtgctctgtgtctagctaaaggtttgtaaatgcaccaatcagctctctgtaaaaatggacc

SEQ ID NO: 577981 - DNA, 443 bp, Homo sapiens
cctggaccaacccactggccctttcactggcctaaagagttcccctctggaggacactacaactgcagggccccttcttcgctcctatccagcaggaattagctagagcagtcatcgcccaattcccaacagcagttggggtgtcatgtttagatgggggattgagagatgaagccagctgggcttctgggtcaggtggggacttggagaacttttctgtctagctaaaggattgtaaacacaccgatcagtgctctgtgtctagctaaaggtttgtaaatgcaccaatcagcactctgtaaaaacgcaccaatctgcgytctgtgtctagctaaaggtttgtaaacacaccaatcagcactctgtaaaaatgcaccaatcagtgctctgtgtctagctaaaggtttgtaaatgcaccaatcagctctctgtaaaaatggacc

SEQ ID NO: 577982 - DNA, 575 bp, Homo sapiens
aatcatgaatttaatttaaaygcatatgtcagggagagtatgttggtaatattagtgagaaaaaggactctattctattggagaaaagtaatacatacgtaaggattgattcatagaaataaaatgtgtcaattctgaaaattcaggttaacatgcacaggtctcaaacacgtaagattatgtgaaggagaatcagatcacagccgaatatttatatctttatgaagggtagtcttattaaaaagacatttaaaaaattatagtccttttaaggaggagggatatgtcaagattaattcatggtgagttctatggaaaaataagaggcataattttaggctgaagccatagagtcagtgggaaaatcagcgagcatgagtgatgaaacacgtcattatgggaaagaaagtgatggaaaccaaattggaattgcagatgagttctatttttgagatgcttcactgacccattaatgatattcatccactcatgctccattaaagctccaattgcagaatttgcatgcaggtctacctatgagacatgcaaaggttagggctcactccacatgacct

SEQ ID NO: 577983 - DNA, 506 bp, Homo sapiens
aggaatctctcacgatttcttctagtactttaacaatttcattttttctgcctctactcagctataattgaaatataaaattgtatgtatataaggtgtacaccctgatgctctgatatgtrtatattgtgaaattattgtcatgatcaaattagttaacacctccaccacttcacatagttaccattttttgagtgtgtgtagtgagaacattttagatctagtctttcagcaaattttaaatatacaatacagtgtaattaactacagtgaccatgctgtacattagatcctcagaacctattcttcttataaatgaatattttctccctttgaccaacatttcctcatttcctccatccacaacctttgacaatcaccattctaccctctgtttctatgagtttttagattccacatgtaaatgagattatttgtctttcattgtctgacctacttcacttagcataatgtcctcaaagtccatccatgttgtcccaaatgac

SEQ ID NO: 577984 - DNA, 437 bp, Homo sapiens
ctaataacattttctcttctctaacttacattaatgtaagaatacagaatacaatacacataacacataaaatgtgtgttgattgtttatgttttcagtaaggctctggtcaacaataggctattaataactgagttttgggaaagtcaaagttattctttaatttctggctgcacagggtattggcaccataacacttgtctcatttgagggccaactgtatatctgtatctccacctgtgtatatgtatatttsaacagcttaagattaaacaagcaaaaagataagttgctccaatggaaattcataatcctttatccagtttccagatgtgagttgattattggacctagaatgtatcaactgaaggagaggccagtcctcccaaaaacggggtcacagcaaatagtagcctcactagtcctttcccataaat

SEQ ID NO: 577985 - DNA, 684 bp, Homo sapiens
acacatggacacagagaggagagcaacacatattaggggctgttggggggtggggaatgagaggagggaatttagaggatgggtcaataggtgcagcaaaccaccaaggcacacatatacctatgtaacaaacctgcacgttctcctgcatgtgtatttcatttttttttagaagagaaagaaaagaargaaagaaagcaagcaagcaagaaagcaagcaagcaagaaagaaagaaagcaagcaagaaagaaagaaagaaaagaaagaaagaaagaaagaaagaaagaaagaaagaaagaaagaaagaaagaaagaaaagaaaaagaaagaaaagaagagccttaaggtcaacctacaaactacagagttcctaagttctcttttttctctattttcttttctgcctgctttaaatctgctgttatttttctattaagatcaaaaccactgtttggatacaacaggctttttgtttgcaacctggtgaatttgtatttgtctcatggctaaagttctgaagtaaaagctataggatttctgtgtgtgtgtttgtgtgtgtgtgtgtgtgtgtgtgtgtgtatctatttaaaaggcctttataatttttataattttatgtttaattggcaattaaatccattttgacttccctctagcaccaccagactttttctctctgtacc

SEQ ID NO: 577986 - DNA, 622 bp, Homo sapiens
ttttaattaatgaatttttaaactatttttattgaaatttaatttttattttgatatttccaagttggaaattaaatgaagataatagcatcttttctaattcagttcaggaycaacagattaacttcactgtgaattttttgacccctgaggcaagtgttcaaaccagtattgacttggcttcttccaaccttcattttatgtgtcagctgtgatgcaatacttcaagtgcttcataaagataagggctgcacttttccctcagagcactggccaaataataatcaggtaattggaatgtatgtagcactttcatctgaaaaactcactcctcagactttttttatgttatccctattaagaggttggttgaagaattttgggtctgggtggagggaacatagtaaatattcaatagatgtttaataggttgacatcatcttttatttaagtcttgctaggttaacttgaaaaaaattactatatgaacttacagttgaatgacattaaatgtgatgaaataaaatgaaaccaaaactacatctttttcttatcattttaaagatacggttggttatctaggcatcccaacacaacacattagttaacagagaggttgttt

SEQ ID NO: 577987 - DNA, 488 bp, Homo sapiens
ttgtatttttggtagagatggggtttcaacatgttggccaggctggtctcaaactcctgacttcaagtgatctgcctgcctcagcctcccaaaatgctaaggttgcaggcgtgagccaccgctcccagcctcaaaatagtttctaatgattggatacatccagttctccagatccagcattytggttacttaacaaagagataatagtttcttttattgcttctttaaattataggatggccttttggagatcacaatcccagtcaagaaacgattccaaatcacagtgagtaatccatgatcattggaactggcaaaatattgacagttaaaaggacagcacacaaagcagcaaggcagagacctcagctgaacaaacagaagcactgagcttttggttcattgtaaatcagagatcagttctgttattcactcgtttcaaattaggataagagtaatgtatatgaagggaagggggtgctctgtct

SEQ ID NO: 577988 - DNA, 652 bp, Homo sapiens
ctgccaccacagccagctaatttttgtattttcagtagagacagggtttcaccatgttggccaggcttgtctcgaactcctgacctcaggtaatccacctgcctcagcctcccaaagtgctaagattacaggtggaaaccactgcaccggccttttttttttgagacggagtctcactctgtcgcccaggctggagtgccatggcatgatcttggctcactgcaaccttcacctcctgggttcaggcaattctcctgcctcaacctcccaagtagctgagattacaggtgcctgccaccacacctggctaatttttgtatttttagtagagacggggtttcaccatgttggccaggctggtctcaaactcctgacctcaggtgacccatctgcctggacstctcaaagtgctgggattataggcgtgagccaccgcgcccggccaggtaaactttttcttaaaggaccatagagcaaacatgtttggctttgtggtccttatgtttgatgtcaagattaatcaactctgctgttgtagcagagaggagctatagatgatgtggaataggtgtaactgtgttccaataaaactttatttacaaaagcaggcaataggcaggatttaacccatgagtcatcgtttgctgaaccc

SEQ ID NO: 577989 - DNA, 587 bp, Homo sapiens
tatagatacgtaataccaatttgtagctccagtggtgcaatcaattagcatgtggtacttataagaaatgcaatacagattacatttttacacagagttatgagaataacattttcaatttgttatcttttttattctttcaatcttaatatatgatcaatcatatcttattgttattataatttttatttctttgagtattagtataacagaatattgtttatattgtttaatgactatgtgtatgctttgtcagggtttccttccttgttatatctccagggcctaaaacaacctgacacatagtaggacatgaacatactttaatttgttattaactgtattttatatcttaatttattttcaattgtattgtattcctaatgtataaaaaactcagacmctgacatatttagccccagatttaatagttgttgactttgtttattgcttagattttccttttttatatttattttattttattttttttttttttgagacagagctttgctctgtcgcccagactagagtgtggtggcatgatctcagctcactgcaacctcagcctcccaagttcaagccat

SEQ ID NO: 577990 - DNA, 402 bp, Homo sapiens
acagtttcttttaggagaaccaacaaaatcccaaagatttatcaccctgtaagacattaaccagattaaccagttttagatcaacaccttacccccttggatacatatttattttgtatttatatgagtcctgattttaccattttgagtattatgctttaatataatatggttaatataaatgtacttttttatttaggtaatttaaattaggcttctttaatttagaatttaaaatcacagcacatagaaagttactcatttctccctattttaaatttgtccacatgagcagagatcttatttgcaagttgccaaatcaactaaaatatatgctaaataatatatttttacagaataaaggaatrtaaaaactgaacttttcacatgtgaagaaaattt

SEQ ID NO: 577991 - DNA, 637 bp, Homo sapiens
ttgaaaatatggtgatgggagaagaccagtactcctcacgcaccaatgacttaggcacgccaagcctcagagcttaatttcctcaactgtaaagtgggtttgttgtaccagttcaccactgtgcgctcttcatcattgtactttcttcataggtctcctaagaaagttaagtgaaataatrcatatgaaattgctaggatacaccacaggatttttcctaatacagcaacagatgttgttcttgagatgaatcatggctaattcatgcaagaccggcttctgcggatggatggagctgcctttgatctggagcttaacatttgtcatggtgtcagatatccagtcattaaatccctagtagatctacttcttaaaataaaaccctctatgatgcatatgcacttacataatatatatccatgaaaatgaactgactctgtctggatttgcaataacaaagttcccaaacctaagataagaagtcattcaaaagcagagtgcagtgagaacactcacacttaactaaagttataaataacaaaagcacagtagcttctagctttaatgttaatatatataataccttttgataatgaggaaatacagtgttcttcagcagtaaaagcaaatattcagt

SEQ ID NO: 577992 - DNA, 637 bp, Homo sapiens
ttgaaaatatggtgatgggagaagaccagtactcctcacgcaccaatgacttaggcacgccaagcctcagagcttaatttcctcaactgtaaagtgggtttgttgtaccagttcaccactgtgcgctcttcatcattgtactttcttcataggtctcctaagaaagttaagtgaaataatgcatatgaaattgctaggatacaccacaggatttttcctaatacagcaacagatgttgttcttgagatgaatcatggctaattcatgcaagacmggcttctgcggatggatggagctgcctttgatctggagcttaacatttgtcatggtgtcagatatccagtcattaaatccctagtagatctacttcttaaaataaaaccctctatgatgcatatgcacttacataatatatatccatgaaaatgaactgactctgtctggatttgcaataacaaagttcccaaacctaagataagaagtcattcaaaagcagagtgcagtgagaacactcacacttaactaaagttataaataacaaaagcacagtagcttctagctttaatgttaatatatataataccttttgataatgaggaaatacagtgttcttcagcagtaaaagcaaatattcagt

SEQ ID NO: 577993 - DNA, 672 bp, Homo sapiens
cctatcatggtacccaatatactgtagatacttaatactatttaatatttaaatgaataaattcatataaaagataacttttccagagccatttactttytttatgattgaggaaattcagtggcagagtgagccttcctctgagtccctgatcagcgaaggagtcattgctccattatctttctcatcaggccattcccattgagagatgcgcttcaggccagggcttctggattgcttgtcagcaagtcatcttactctgcacataacatgttttctagctccacataagtaaacaaacagcagaagaaaaaaggggagagtcaaaagatcaggaacaaatagattgctatcttttggaaacacttgcctcaaaggatttggcagcactactcataataattttgtctatgtttttttgaagcatcaacaaataatatcatttaaaaaaagcacaatgttttcaaaggatgcaaacgagaggaaataaaaaggatattatttccactagcatcaatacataccaatctggttaaactttgtggaagtcacgataaagggatgcctggctatagtcacaggagcactatacactgtatatttgttataagcgatccactgtaaactgactattttcttcctcatgtaattttagtgttgttttttagagca

SEQ ID NO: 577994 - DNA, 610 bp, Homo sapiens
aatgtatgtgtttattttgtttatatattgcatatttgtgatgattttcacttttacagtttaggcatgggtaggaaggacacttacatgagtacttaagttcttggttatgacttgagaaactcacaaggtagcatggaatggcacgtaaacaaggctttgatagggtgaaagggaattatcaggacaaaaytgactagtggcagtgacttttgagcagagtgctgcaaactgaaaaggcagagagcattgtaggcagagagaaagcatagacacatgtgagatacatgtgaaatacttagacaaatgtgaggtgtgtggtaacattgtacatacctagggctccttcctgtgtagctgtaaagctggagtataggcatcacaacaggcagcagaagccaagaaactagaaaagtagacaaaggccacgttataaaagatcttgtaggataggtaaagagttttaatactatcctgaaagcagtgtggggtgggaggcatgacattaaggaaatttaataagtgatgaaagaccaagattttcatcttcagaagacttctctggaggtgggtggaccacttgatgtcaggagttcaagaccagcctggt

SEQ ID NO: 577995 - DNA, 588 bp, Homo sapiens
ttgggggaaatattcataatacatgtttcagaccaaggttctgtacccaaaatatataaagaactcttacaacttaataataagaatatattgaaaaaccaggttttttcaaaatgttggcaagtatttcaamatgtcatttataaacaaaagatatataaatgatcagtaagcacatgagaaaaatgtttgccatgttatcagagaaaagcaaattaaaatctcaagaagatataagcacaaaaccactagattagcaaaagttaaaaagctgaaaaatagcaagtagcaagtgttggtatgaatgttacacctcactggtggaaatgtcaagtgagacaggcctttggcaagcagtttggaagtttcttacaaagtcgaacattcacttagcatatggcatggtgcttgtgtgcctaggtatttgcgtaagataaatgaaaacataatccaacaaacgcttgcacatgaatgttcatagcaattttactcaacagccccactaaatcaccacattgaaaattatgccttaataatgatgcttgaaaaaaaattgtgtttttgaatatcattagagagaggttggaa

SEQ ID NO: 577996 - DNA, 588 bp, Homo sapiens
ttgggggaaatattcataatacatgtttcagaccaaggttctgtacccaaaatatataaagaactcttacaacttaataataagaatatattgaaaaaccaggttttttcaaaatgttggcaagtatttcaaaatgtcatttataaacaaaagatatataaatgatcagtaagcacatgagaaaaatgtttgccatgttatcagagaaaagcaaattaaaatctcaagaagatataagcacaaaaccactagattagcaaaagttaaaaagctgaaaaatagcaagtagcaagtgttggtatgaatgttacacctcactggtggaaatgtcaagtgagacaggcctttggcaagcagtttggaagtttcttacaaagtygaacattcacttagcatatggcatggtgcttgtgtgcctaggtatttgcgtaagataaatgaaaacataatccaacaaacgcttgcacatgaatgttcatagcaattttactcaacagccccactaaatcaccacattgaaaattatgccttaataatgatgcttgaaaaaaaattgtgtttttgaatatcattagagagaggttggaa

SEQ ID NO: 577997 - DNA, 588 bp, Homo sapiens
ttgggggaaatattcataatacatgtttcagaccaaggttctgtacccaaaatatataaagaactcttacaacttaataataagaatatattgaaaaaccaggttttttcaaaatgttggcaagtatttcaaaatgtcatttataaacaaaagatatataaatgatcagtaagcacatgagaaaaatgtttgccatgttatcagagaaaagcaaattaaaatctcaagaagatataagcacaaaaccactagattagcaaaagttaaaaagctgaaaaatagcaagtagcaagtgttggtatgaatgttacacctcactggtggaaatgtcaagtgagacaggcctttggcaagcagtttggaagtttcttacaaagtcgaacattcacttagcatatggcatggtgcttgtgtgcctaggtatttgcgtaagataaatgaaaacataatccaacaaacgcttgcacatgaatgttcatagcaattttactcaacagccccactaaatcaccacattgaaarttatgccttaataatgatgcttgaaaaaaaattgtgtttttgaatatcattagagagaggttggaa

SEQ ID NO: 577998 - DNA, 396 bp, Homo sapiens
atcatctgggcatgtgaaaaatcccaactcatgatgctatggtttgaatgcttgtcccctccccagctcatgttgaaatttgattgccattttaacagtattaaacagtggtatctttaagaggtgattaggccatgaggrctttgcccttatgaagggattaatgccattaacttggtaattttttccttttattgtgggggtgtgtttcttatacaaggattcattcaggttaactcttgttccccctccccatctcaccttctgccatgagatgacaagcaagaaggccctctccaaatgctggcaccttgatcttgaactttccagccttcagaactgtgagccaataaatctctgtcctttataaattactcagtattagggattctgtta

SEQ ID NO: 577999 - DNA, 415 bp, Homo sapiens
gattgtacaaatcctaccacttcaaaaacttatgctgtaagctggtatggtggttcacacctgtaatcccaacacttcaggagcccaaggcaggaggattgcttgagctcaggagtttgagaccagcctgggctatatagggagaccctacttgtacaaaaaaatttaaaaagtattcaggcatgatggcttgtgcctgtaatcccaggtgctcaggggactgaagctggagggtgcttgagtctaggaggttgaggctgcagtaagcaatgattgtgctactgcactctagtctgggtgacagaggaagaccttgtctcaacaattttttwaaaaaaggtatattgcaaagagataatgaagatagtgaagtatgtagagaaaagtgcaggctctaaggaaaattttcttttta

SEQ ID NO: 578000 - DNA, 590 bp, Homo sapiens
gaagcctgacctaagtaaaatagtaatagcagtgactggatttcactaatcactgctgactctacagataatataaatagaattagaaataagactgccgagtgatgtaatttagggagaaaaaaaagcaagcaaaaaaatcctcggcatttttattacatcctctctgcatatccrtagtattctttttattgatcaaaatggtcataggcatctgcttttcaaaaaatgaataaaataacttgaaagattttttataggtacacatttgtatgttagaagcctaccaaaaaatgtcatggaaactatagtgacaaggtcaaatgaaaggctttaaccacaaacaattaatgcacataatgtagatcctagtcaatcacagtaattggggcaaagccacttctataagttaatgtcgtgcagatgctaaaattgctaaaatcaaccccaaataccacacctctcaacaattattttgagatggtttgtatgttttcagcatgtgtacagcttgcttttgtaatcatttttgctttcttagaaacataaacgttttctgtcttctatctatctattcatctattaattgg

SEQ ID NO: 578001 - DNA, 598 bp, Homo sapiens
agtatgagagaaaactaaaaccagaaggcagggtcttgccttgtttgacttcagctgggaatgtaagtgttgcataacaaatttttttgctgttctgtgcatgtcagcaaatgattgcaaaagtgctgtgaatcacaaatttctgtggatatgcaaatttacaaatatggaaccactcataataaggattgaccatatgtcatttctgaatatacatgtgtatgtatctatatctatatgtaacccataactatgtatagagatttggactgtctccagttagatgtcattatactcctatgaacattcctgtactttcctctcttggggcatttgtgcaaataattcttcagagatactggacaggaattatagaagatttattgtagaaatttacactgaaaccagcagtgcataagagttctccttgtcacatatcctgaccaatgcataattttwaaattttttctaatgcagtagacatgaaaaaattcattgtagttttaatttgcattctgtgattactaataattttgagtatcttttcatgtagttagagccattctgttctttaaatatcagttcttttattttacta

SEQ ID NO: 578002 - DNA, 352 bp, Homo sapiens
agtgaggggctatagataaaactcccatctccctgggaaagagcacctgagggaaggggcagctgtgggtgcagcttcagcagaattaagtgttcctgcgtgctggctctgaaaagagcaacagatttcctagcacagtgctcgagctctgctaagagaaagactgccttcttaagtgggtcactgagccctgtgcctcctgaccgtggtcaacaaacacctcccagcagtggtcaccagacacctcatacaggaaagctctggctggcatctggcaggtgcctctctgggacgaagcttccrgaggaagaaataggcagcaatctttgctgttctgcagccttcgctggtg

SEQ ID NO: 578003 - DNA, 573 bp, Homo sapiens
gcttttggctgaaacactttgttttgtgacattagattacttagttattttgagcttcaatgccttcctcagtaaaacttcaaaaaaaatataatcttctttgttcttaaattttagataatatttttaaaacacttaccagagtgtctgacccatgaaagtcttcaatatatggcagttgtgatagttatccttctgtgaaaaatcatcccaatcgtcatatgttagctgtctttagtatttagtattaagccgcatcttctccagtgttggtttcaggccccatagctctgattccacattttccctttcagctctggtaatctaacttccattttcctacctgcttatactcatctgaccaaagattggcttctgcccaactgaatttccacaaaacagcatttcaaacgcttaaaaaactgataggtcyttcttaaataaaaaaaaattcttatggagcactagttttgacttcaattatgtttattattaagctgctgctgctgcttctttttttttttttttttttttagtcagagtcttactctgtggcccaagctggagtgcagt

SEQ ID NO: 578004 - DNA, 288 bp, Homo sapiens
agtcttctcaagaaggataagcacaaacaaacccagactgtgaagacaacaaaaaatatgtaactcttcactgcccagacactgtcaaacacccacaagcataaagacatccagaaaaacatgacatcaccaaacaaatgaaataaggtaccagggaccaatcctggagaaacagatatgtgatgttccacacgaagaattcaaaatagctgttttgaggaaacaaagaaatcaaagataacmcagagaagaaattcagaatttgatcagataaatttaacaaaaata

SEQ ID NO: 578005 - DNA, 577 bp, Homo sapiens
atgactttcagtgataaaacctggtaggtctcaraaaaactggcacagctgcttaaataacttcggtagaagcagaaaaaccaattaggaagctattgcaataattttcagcaattatggggcttaagactaaaacagtagccatggagttggcgagatacgatcatgttatagatttattctgaagttacaagcaattggatttgagagactggacaatgtggtttgagaggtggggagtcaagaattaccccaattgaaaatattgaattgctattaactgagttgagcaaggctatggatggagtggaattttaggaaaaaaatcgattttggtcatgttaagtttaaaatgtgcattagacattcaagtgaatatatttattaggtgggtagatatacaaatatggagtaggcttgtaaaactcgggctggacatctattttcaggagacatcagcaagaaagctcagatgaatcatcgaggaattgataagagaggaaatttaagggtcagatgaaatcacctacttaaagtatatggaatggaaggcattttaacatttacatttctaaca

SEQ ID NO: 578006 - DNA, 577 bp, Homo sapiens
atgactttcagtgataaaacctggtaggtctcaaaaaaactggcacagctgcttaaataacttcggtagaagcagaaaaaccaattaggaagctattgcaataattttcagcaattatggkgcttaagactaaaacagtagccatggagttggcgagatacgatcatgttatagatttattctgaagttacaagcaattggatttgagagactggacaatgtggtttgagaggtggggagtcaagaattaccccaattgaaaatattgaattgctattaactgagttgagcaaggctatggatggagtggaattttaggaaaaaaatcgattttggtcatgttaagtttaaaatgtgcattagacattcaagtgaatatatttattaggtgggtagatatacaaatatggagtaggcttgtaaaactcgggctggacatctattttcaggagacatcagcaagaaagctcagatgaatcatcgaggaattgataagagaggaaatttaagggtcagatgaaatcacctacttaaagtatatggaatggaaggcattttaacatttacatttctaaca

SEQ ID NO: 578007 - DNA, 577 bp, Homo sapiens
atgactttcagtgataaaacctggtaggtctcaaaaaaactggcacagctgcttaaataacttcggtagaagcagaaaaaccaattaggaagctattgcaataattttcagcaattatggggcttaagactaaaacagtagccatggagttggcgagatacgatcatgttatagatttattctgaagttacaagcaattggatttgagagactggacaatgtggtttgagaggtggggagtcaagaattaccccaattgaaaatattgaattgctattaactgagttgagcaaggctatggatggagtggaattttaggaaaaaaatcgattttggtcatgttaagtttaaaatgtgcattagacattcaagtgaatatatttattaggtgggtagatatacaaatatggagtaggcttgtaaaactcgggctggacatctattttcaggagacatyagcaagaaagctcagatgaatcatcgaggaattgataagagaggaaatttaagggtcagatgaaatcacctacttaaagtatatggaatggaaggcattttaacatttacatttctaaca

SEQ ID NO: 578008 - DNA, 635 bp, Homo sapiens
gtatagagtggttctacaaatcctctctgttggaaagagtgtaactggaatgtccagaagacagaaatataacctgagaataaacaacatttgagttaaatgtcatggcttttgtttttcactaatagagtaagctaaatttagagaatagcatgtctaccactgtagaaggcttgtgccaacaattggcaataaaaaacccaggcatgagttttgcagagaattctgtcaagtcggctccacatgattccactttaggagcacagatcgctcartttggagtggaaaaaaaatctcaaggcaaatgtaacatggaaatattactcactgttattcaagtaatttcaaacactccaaagacacctgtactctggaaacattccctcagattgtatccttgttctttcacatgcttttgtgcttgtcttttctacagtctcaggcaatagacccatcattgacctcagtgctatcagggtagtgtggggcagtgtatagagccctggaacagtagtccacaggatacagatgctgtggctgtctcctccacttagcaaacacataaatctgtgcaaggtacacattcatagatcctagtgctgggattaaatagtaggcaggtaagttattttaca

SEQ ID NO: 578009 - DNA, 598 bp, Homo sapiens
tataaatatatttaagcagttggttgtggaagcgtctgaccaaaatatcaaggggggcaagaaaggaccaaatgagctttttaatcaaaatcaatgtgcacagacttttgtcctatctctagagtcactctaaraaaattcctaaactaaacctgctgccggtgttcccagagcccatgaaggcccagtgaggaccactgtattttcttctccatgagctacccttttagctccctttgaatttcctaggcttggaatagcttgtgctatttctatgccaatagaaacattgccatctcctttctatttccttctgttaatttctcctttcctgttgacccagtaaattgactttgattaaataaggttaacttatttttaacatcattatacctgaaaaatccctggagtgatatcgcatcatatccatgtcttctgctcacattcagggaaaaggatgatatgagatatatatatgtatacacacaccaggggggcaggaatcttgagaactgtcttagaattctgtctaccacatggactatcccataatgcctatcacacagttctttacacagtagataatatatatctgttc

SEQ ID NO: 578010 - DNA, 598 bp, Homo sapiens
tataaatatatttaagcagttggttgtggaagcgtctgaccaaaatatcaaggggggcaagaaaggaccaaatgagctttttaatcaaaatcaatgtgcacagacttttgtcctatctctagagtcactctaaaaaaattcctaaactaaacctgctgccggtgttcccagagcccatgaaggcccagtgaggaccactgtattttcttctccatgagctacccttttagctccctttgaatttcctaggcttggaatagcttgtgctatttctatgccaatagaaacattgccatctcctttctatttccttctgttaatttctcctttcctgttgacccagtaaattgactttgattaaataaggttaacttatttttaacatcattatacctgaaaaatccctggagtgatatcgcatcatatccatgtcttctgctcacattcagkgaaaaggatgatatgagatatatatatgtatacacacaccaggggggcaggaatcttgagaactgtcttagaattctgtctaccacatggactatcccataatgcctatcacacagttctttacacagtagataatatatatctgttc

SEQ ID NO: 578011 - DNA, 599 bp, Homo sapiens
gtgtagcatggtttttgtcaactatttgaaaaaatacttcaaaatgaaataaatgacattggctgttacatttccattaatatatactggcatacctgatttgattgctattcactttactgtgttttacagatatgcttttttacaaattgaggtttgtggataaaatgcatcaagtaagtctttggtgccatttttttccaacagcatgggctcacttcatgtttctgtgtcacatgttggcaagtctcaacatattgtttcaatcattttaattgttatatctgttatgatgatctgtgatcagtaatctttgagattactattgtaattgtttcggggtactaagaaatgcatccatatgagacagcaaatttaatccataaagatagagtgtgttttgactgctctactggttgactgttccctcatccctctcatcctctttggacctccctatttcctgagatacaatcayattgaaattaagccagttaataaccctccaatggcatgtaagtgttcaggtgaaaggaagagtcacatgtcttgcactttaaatcaaaagctagaaatgattcagcttaatgaggaaggcc

SEQ ID NO: 578012 - DNA, 599 bp, Homo sapiens
gtgtagcatggtttttgtcaactatttgaaaaaatacttcaaaatgaaataaatgacattggctgttacatttccattaatatatactggcatacctgatttgattgctattcactttactgtgttttacagatatgcttttttacaaattgaggtttgtggataaaatgcatcaagtaagtctttggtgccatttttttccaacagcatgggctcacttcatgtttctgtgtcacatgttggcaagtctcaacatattgtttcaatcattttaattgttatatctgttatgatgatctgtgatcagtaatctttgagattactattgtaattgtttcggggtactaagaaatgcatccatatgagacagcaaatttaatccataaagatagagtgtgttttgactgctctactggttgactgttccctcatccctctcatcctctttggacctccctatttcctgagatacaatcatattgaaattaagccagttaataaccctccaatggcatrtaagtgttcaggtgaaaggaagagtcacatgtcttgcactttaaatcaaaagctagaaatgattcagcttaatgaggaaggcc

SEQ ID NO: 578013 - DNA, 555 bp, Homo sapiens
attggtaaaataatatcatcaatgtctttagaattgttagcattttgtttgcatctattgatcatggagtttcatgtttattcccgcagaatactataaaatttccaataagggttattgacaataaaacccagctcaagacagaataatctttgtttgtatatgcttatgaaatattgttggcttaaatggaaacagcttaaataatgagttattggtataaatacccttaaattttaccataagttttattacttaagtacctgaaattcacagctataaaaatggtaattacgaaaataactttaaatattggctatcacagtttttttgtaaataatctaggtaaactactaaattaatcaggtaaatgtaataaaattaatctttgtaaacaaacttgtcataatttaggatctaaggttattaattggtattaagtatctgagcaatttccaatataagaattataaaaaaacgttgtttttaaatgttcttattaaaggtaaaatatgtttgtytaattcaaagcttatttaagggttatgtataaaa

SEQ ID NO: 578014 - DNA, 479 bp, Homo sapiens
actaataaaaaattaaataattggtttaaacaagattttattacaaatattgacttatttttaatgtaagaagttttaaaatttttaaattctataatctatttcctttaacattcttcagattggtatcttaaaagtgcaactgtttctcttttgaaaaggccttgaattctggctctctccttcaccttttgttggctcctgtaacttttactaattacctaaagtaagggagaaaaattgtttttgaaaacaggcaagtaaagtatttttttgaacatggcttttattttgcatgcctattatatctctatttttatatgtgtaatgtagaagtgatatttcactaccaaactatacagaagaactctaatcaagtaacttaaaaatgtaagtgcttatcagattggtaaaagctagctcagatgccttttaatttatataaacttggtrctctttggtaaaaactaatttggtaa

SEQ ID NO: 578015 - DNA, 515 bp, Homo sapiens
tgaacaatgagaacacatggacacgggaaggggaacatcacacactgggacstgttgtggggtggggggagtggggaaggatagcattaggagatacacctaatataaatgatgagttaatgggtacagcacaccaacatggcacatgtatacatatgtaacaaacctgcacgttgtgtacatgtaccctagaacttaaaaaaaaaaatctttttgttttaagttatttgggtacagtatgtttttgcaaacaaatttacctttctgagtcttccaaaattcagattgtaattttatagcaatgtaattgtctgcataagttcaataatagtttgttttttaaaaaaaaaaaaaaaagcaattggagacactggttattttaccaagactgaaactaaaatagcctattttcaggtaaagttttggcaaaaccaactttaaaaggaacctatttggccagtcactttcttgctgcattttatgcaaataatcagacaagcataataagcctaaaa

SEQ ID NO: 578016 - DNA, 515 bp, Homo sapiens
tgaacaatgagaacacatggacacgggaaggggaacatcacacactgggacctgttgtggggtggggggagtggggaaggatagcattaggagatacacctaatataaatgatgagttaatgggtacagcacaccaacatggcacatgtatacatatgtaacaaacctgcacgttgtgtacatgtaccctagaacttaaaaaaaaaaatctttttgttttaagttatttgggtacagtatgtttttgcaaacaaatttacctttctgagtcttccaaaattcagattgtaattttatagcaatgtarttgtctgcataagttcaataatagtttgttttttaaaaaaaaaaaaaaaagcaattggagacactggttattttaccaagactgaaactaaaatagcctattttcaggtaaagttttggcaaaaccaactttaaaaggaacctatttggccagtcactttcttgctgcattttatgcaaataatcagacaagcataataagcctaaaa

SEQ ID NO: 578017 - DNA, 403 bp, Homo sapiens
tttgtggcccttacccaggaactgacttagcacaagaagacagccaccattgtaaaatggcggagactaaaacacagtattgccatgyggttacaggtcatgttcccaaagacatgaaacaagacggaggtttgtagccaactttgttactgaccgttttgttgggttggctcaaacagtaggcttatggggtccttggcctgcatcctgaagtaaaatgtgttttctttgacagaaccatacagaaagagatgcaaagcataccagatagtctacagcttaagaacaatctcacaaatcttttgtcattaattataaatttacagagataaacaatgatccttattatcccttttaccggcttgcacagggagagagaattcaaaagcccaactggtaagaa

SEQ ID NO: 578018 - DNA, 403 bp, Homo sapiens
tttgtggcccttacccaggaactgacttagcacaagaagacagccaccattgtaaaatggcggagactaaaacacagtattgccatgcggttacaggtcatgttcccaaagacatgaaacaagacggaggtttgtagccaactttgttactgaccgttttgttgggttggctcaaacagtaggcttatggggtccttggcctgcatcctgaagtaaaatgtgttttctttgacagaaccatacagaaagagatgcaaagcataccagatagtctacagcttaagamcaatctcacaaatcttttgtcattaattataaatttacagagataaacaatgatccttattatcccttttaccggcttgcacagggagagagaattcaaaagcccaactggtaagaa

SEQ ID NO: 578019 - DNA, 403 bp, Homo sapiens
tttgtggcccttacccaggaactgacttagcacaagaagacagccaccattgtaaaatggcggagactaaaacacagtattgccatgcggttacaggtcatgttcccaaagacatgaaacaagacggaggtttgtagccaactttgttactgaccgttttgttgggttggctcaaacagtaggcttatggggtccttggcctgcatcctgaagtaaaatgtgttttctttgacagaaccatacagaaagagatgcaaagcataccagatagtctacagcttaagaacaatctcacaaatyttttgtcattaattataaatttacagagataaacaatgatccttattatcccttttaccggcttgcacagggagagagaattcaaaagcccaactggtaagaa

SEQ ID NO: 578020 - DNA, 548 bp, Homo sapiens
ccaccatggcacacatttacctatgtaacaaacctgcacatcctgcatccctgaacttaaaagttgaaytttttttaaaagaagcataaataaagtgctaattgttttaaatgagtgaacacccccatccacttccaggtaggcagaaaaagctttgtggatgaaagctttataaaatggtaacatttcatacacaccttgaagaaagttatcatttcaattgcaagtgacttagaggtgagttgcagtagtagggattctctgtggagagagctatatgaacgaaaacatgcacctgacagagtaaggagtgtacagaagtctcctggtaactcactttggctgcaacacaggttccatcaagataattgtggaggaagagtctccagagttaaaccaagaagtttttttgcaaaagatctcaaataattcagggtgaataaatactagctgaggcatatatatgcatattatacaatctgtacagacatataaacaaacatatccatatgtatatattcatatatagatatatgtaccacatatgc

SEQ ID NO: 578021 - DNA, 479 bp, Homo sapiens
tctccacaatttctttcaaaatatgggtaaggaagaaataatttctataattttcattatgcttcatagaaatgttaaaagtgttatttatttcattataattttacattgggtacacaatctgtctaaataaccaggttgaaattagacaacaaatattgggttatctttatattttagtttcatgactataatatggatagggtaaatagttataagactaaattgttattttratgatattttagtattttgttaacgttataatgattttataagataacttctggtgaactagtacgttaaataattagaactgggtttaaggattcagatcataatgattcttagaattatttctaaattttctgatacaaatacccattcttttacttaattacatcctctgattaaagcttttaaggtgagtcacttacatattaacccttgtaaacttatacccattttaacaataattt

SEQ ID NO: 578022 - DNA, 479 bp, Homo sapiens
tctccacaatttctttcaaaatatgggtaaggaagaaataatttctataattttcattatgcttcatagaaatgttaaaagtgttatttatttcattataattttacattgggtacacaatctgtctaaataaccaggttgaaattagacaacaaatattgggttatctttatattttagtttcatgactataatatggatagggtaaatagttataagactaaattgttattttgatgatattttagtattttgttaacgttataatgattttataagataacttctggtgaactagtacrttaaataattagaactgggtttaaggattcagatcataatgattcttagaattatttctaaattttctgatacaaatacccattcttttacttaattacatcctctgattaaagcttttaaggtgagtcacttacatattaacccttgtaaacttatacccattttaacaataattt

SEQ ID NO: 578023 - DNA, 479 bp, Homo sapiens
tctccacaatttctttcaaaatatgggtaaggaagaaataatttctataattttcattatgcttcatagaaatgttaaaagtgttatttatttcattataattttacattgggtacacaatctgtctaaataaccaggttgaaattagacaacaaatattgggttatctttatattttagtttcatgactataatatggatagggtaaatagttataagactaaattgttattttgatgatattttagtattttgttaacgttataatgattttataagataacttctggtgaactagtacgttaaataattagaactgggtttaaggrttcagatcataatgattcttagaattatttctaaattttctgatacaaatacccattcttttacttaattacatcctctgattaaagcttttaaggtgagtcacttacatattaacccttgtaaacttatacccattttaacaataattt

SEQ ID NO: 578024 - DNA, 591 bp, Homo sapiens
tttaatattaagactcattttaaacactcataataacttgaattccggtaacttaactgcaaaagattctctttctcttccaactctctgtacccatttggtttttgtccttcatcatctatcctgaaacaacttttaggtaccatccaaactagacaaaattactccacttttcttttttttttaaatatatgtcctcatacctggtggttttcttatcaataacatttttcactttacttggatactttgcatacagagttatttttcttatgctgtttagaagttttaattaccacacgttaactagaactstcaattctcagcagctttattttcttggatataagtgattgcctagtacatatcacatccaaaatctgtagatggggaaacctatgaatacaccattttataatttgtagaagcatatgtttcttcacagcacaatttctcactgtagcaatgaaatatgtttgctagtgacctcaaatatttttatttcctatgtaataggaagcccaaagcagataagcctattttcagaaattaatgttttaacattttgtcttatttggaaatcagccaggt

SEQ ID NO: 578025 - DNA, 526 bp, Homo sapiens
ttatcactattcagatatcaaatctaaatgccaaaaataaggacatttttacttttctgaataaatgctcattgacaaatttctatgttaattctcaaaaagaaaatctgaacgtattactaccacaattacaatctctcaatagttttcctccaaattgagattaaagaacaaagtctgtgacctagtctccaaaycctgtgcaatcccactcatactgcttctttggccacatttggctccttcctgcttctctctttgattgccagccacatctgtcattttttgtttccccagtgatataggttctcttataatctaggccctccaatgatgaatgttatgtggaaggcaagtgtccacaggcatcactcagacaggaagactgctttttttttttctttctttctttctttttgagacagggtctcactctgtagcccaggccatctcggttcactgcaacctccgcctcctggattcaagcaattcttgtgtctcagcctctcaagtagctggaattaca

SEQ ID NO: 578026 - DNA, 526 bp, Homo sapiens
ttatcactattcagatatcaaatctaaatgccaaaaataaggacatttttacttttctgaataaatgctcattgacaaatttctatgttaattctcaaaaagaaaatctgaacgtattactaccacaattacaatctctcaatagttttcctccaaattgagattaaagaacaaagtctgtgacctagtctccaaaccctgtgcaatcccactcatactgcttctttggccacatttggctccttcctgcttctctctttgattgccagccacatctgtcatttttygtttccccagtgatataggttctcttataatctaggccctccaatgatgaatgttatgtggaaggcaagtgtccacaggcatcactcagacaggaagactgctttttttttttctttctttctttctttttgagacagggtctcactctgtagcccaggccatctcggttcactgcaacctccgcctcctggattcaagcaattcttgtgtctcagcctctcaagtagctggaattaca

SEQ ID NO: 578027 - DNA, 514 bp, Homo sapiens
aaagcctgtgtgcctgtgcatttttctggggagagggccagagctcttttttttttttttttaaagtagattttatttttttagaacagtcttaggttcacagcaaaattgggcagaaggcacagagatctttcacgtaacccctgcttcccacatgcatagcctcccgcttgatgagcatccttccccagagtggagcatctgttatgatgaagctacactgacatgattatcacccaaaggccatagttcatgttagggctcactcttggagttgcccattctacgggtttggacatgtgtaatgacatgtatccaccattacagtagacagagtagtttcagkgctccctaaaatcctctgagctccacctattcatccctccctccctgtaacccctggcaaccactgatttttttcactgccttcatagttttgccttttccgggttcatattgttggaatcatatcgcatgtaaccttttcagattggcttcttgcactaagcaattt

SEQ ID NO: 578028 - DNA, 573 bp, Homo sapiens
ttcattaagacctgtttgaagtcatgattgtaagatcattacgatgtttttaaaagatagtgggtttcaaagagttgtacttagaagacttaaaaagcttcatcatcttaattcctgtcctcagcaattttttcagagctatgatctgggtatgcagtaattgctatcattttcctcacaatttcacacccaacttctattgttctcattatacctagtgctcttcggaaatgactcatgtaataagaaatgtacaaataaaagagagcctagcatcttctaaggaatccggagccacagtagaagtggctgcatctgtgtgcacgcacaaaaaatggacttttatatatatccttagagaggggaaacygaggcaggggcatagcgtagtttacataaccatttcttactttcatgttatggtcatggcaagggaaatgccgacatggttataaattagacatcgacagatgagtcagtgaaaactcttggaaatgttgccatcttcgcaagatggggacagaggagaagaaggaaaaaggaagtccattctgatcctgaggtagaattggg

SEQ ID NO: 578029 - DNA, 557 bp, Homo sapiens
aatggtacattcctttggactggtagcacaaagaagggagtgggagggtccaataaagataaaagcaaaacaccaaaacctgagtagctataagaggtttaaagaaaacattccttcctctgagcagaacatagcaaagcttattctctttagaactttttgtgtaacacctcagagagagaagtttgctttgtagaagtggattgcatgttccaacctagtagtcaaagagaatggaatcagaaatcttagttgattatgcacattgaatttggactattaaccaacaagttttttaaatagcgrcaaagcaatttgtagttcatggctatctcaaaagtatctgtaaattctgcttaagcggttgactttggctatgatttactatctggtttgggcccaaattcttctcaccatacaaatcatcagttgagctttagcagttactgaaagatatggagcttgggtatggagcatgacgtgactttgtttctggattcctcgcctctctggagaagcaaacacagactacttcaggctgtgaggcgtgagacagg

SEQ ID NO: 578030 - DNA, 607 bp, Homo sapiens
aagctttaggaccttaagataaactgaataatggctggtgattctggggttagaagatgaatttccttgtagcctttcttcctagataagtactccctatgttcatattaggaatggttctataatctaaacaaactgattgtcattattttggcattcagaaaatcactatttaaagtagagagaggccgggcayggtggctcacacctgtaatcccagcactttgggaggccaaggcgggtggatcacgaggtcaggagttcaagaccagcctggccaagatggtgaaaccccgtctctactaaaaatacaaaaattagccaggcatggtggcaggcgcctataatcccagctacttgggaggctgagatagagaattgcttgaagccgggaggtggagtttgcagtgagcggagattgcgccactgcactccagcctgggtgacaaagtgggactctgtctcaaaaaaataaataaataaagtagagagagatggttgtgtgtaacttcagttacctcagctttttgtggcattttttgagggatctaatttggtggtttgtttgtttctccccccgccaccctccaagccttggtttcgttcg

SEQ ID NO: 578031 - DNA, 607 bp, Homo sapiens
aagctttaggaccttaagataaactgaataatggctggtgattctggggttagaagatgaatttccttgtagcctttcttcctagataagtactccctatgttcatattaggaatggttctataatctaaacaaactgattgtcattattttggcattcagaaaatcactatttaaagtagagagaggccgggcacggtggctcacacctgtaatcccagcactttgggaggccaaggcgggtggatcacgaggtcaggagttcaagaccagcctggccaagatggtgaaaccccgtctctactaaaaatacaaaaattagccaggcatggtggcaggcgcctataatcccagctacttgggaggctgagatagagaattgcttgaagccgggaggtggagtttgcagtgagcggagattgcgccactgcactccagcctgggtgacaaagtgrgactctgtctcaaaaaaataaataaataaagtagagagagatggttgtgtgtaacttcagttacctcagctttttgtggcattttttgagggatctaatttggtggtttgtttgtttctccccccgccaccctccaagccttggtttcgttcg

SEQ ID NO: 578032 - DNA, 572 bp, Homo sapiens
tacaatttatagttgtttaaaaaaaacttaggtgtaaatctaaaagaatatgtataggactctgaaagttgattacacaaattgggtcattcttgtcatacctaagtaggtcagagaggaggggctgggcaggggaggggggaatcactcagggcacatagcacccrctccaataattgaattttccacaagcccagatgctgaaatggcctgctgtagccctaagaccagtttcactgaggagctgctgaaacgacctgctgtgactctaagaccagttttacctgccactgtcattcaccaatcagagattgccagcttccaaaagcttttctagtgtcaatgtttcttcaaaacattacataacatttctctttctaataaaatgcccaaccttctgtttgttcctgggacatacagaagaccaccatggtctgtatgtatgccctaaattgcaattctgtgattcctaaataaatgttaatttagagatttattttattttgagtttgtcaacttacatgctgaaaactacaaactgctgatgaaaaaaaatcaaagctctaaataaa

SEQ ID NO: 578033 - DNA, 455 bp, Homo sapiens
tttttctaatgttgatcctctccaagagctccctgaagacagggcctatgtctaagtcatcagtaccaaaagagtgacttaaggcaggtcctccaagtacctcacacagagcaggcctcagtaaaagctagctgaattaaatatttgctttcccaagatatcacgcaggtgacaataaagacttttagcaatacttyaaagcactcacaacagagttatttcctgactgaaaaactacactatataatcctttaaatttagaatgattgaacattggctaagaatctgagaagttaaattcaaaaagaaaggaagagtaaccaaaggtaatcaaacaatcgccattacatttagtttgtaaatcacatggaagaactcacggtttattacttcatagagtataagtttcatttatgtaagtaggagtccattttaacatttgtatcccagtttgg

SEQ ID NO: 578034 - DNA, 574 bp, Homo sapiens
actttctttcccttttttatgtgcattatcttatttaatcctcaaagcaatcctctgagttaggagattttttttttaagggatacacgtgcagaacatgcaygtttctttcacaggtatacacgtgccatggtggtttgctgcacccatcaacctgtcatctacattaggtatttctcctaatgttatccctcccgtagcctcccacctcacacaggccccagtgtgtgatgtttccctccctgtgtccatgtgttctcattgttcaactcccacctatgtgtgagaacatgcagcgtttggtttcctgttcttgtgttaatttgctgagaatgatggtttccagcttcatcctgcaaaggacatgagctcatcctttttatggctgcatagtattccatggtgtatatgtgccacattttctgggagtgtaaattagttattcctctttttttaaccgtaaaatttgaatttatggagcattaagttcttgactgtaaaatcaaaaagcaaaaagagatgtgaggtcaaagaaaggagagacagtgaaaaatgggccaggagttaaaaagta

SEQ ID NO: 578035 - DNA, 574 bp, Homo sapiens
actttctttcccttttttatgtgcattatcttatttaatcctcaaagcaatcctctgagttaggagattttttttttaagggatacacgtgcagaacatgcatgtttctttcacaggtatacacgtgccatggtggtttgctgcacccatcaacctgtcatctacattaggtatttctcctaatgttatccctcccgtagcctcccacctcacacaggccccagtgtgtgatgtttccctccctgtgtccatgtgttctcattgttcaactcccacctatgtgtgagaacatgcagcgtttggtttcctgttcttgtgttaatttgctgagaatgatggtttccagcttcatcctgcaaaggacatgagctcatcctttttatggctgcatagtattccatggtgtatatgtgccacattttctgggagtgtaaattagttattcctctttttttaaccktaaaatttgaatttatggagcattaagttcttgactgtaaaatcaaaaagcaaaaagagatgtgaggtcaaagaaaggagagacagtgaaaaatgggccaggagttaaaaagta

SEQ ID NO: 578036 - DNA, 649 bp, Homo sapiens
acaatgtttcttatacaattaaactgcatttgaagtagatggtaatgtaataccaatcttgaaaagtttttcttttctaaaacaaggtgccaatgatgtactacactgtaattaacactgaaattctgggaactacttcatcatttccagtcactatagttgcaaagctgggaagtaaacactgtacatcagatgattgctttcccatggaatacaacaggctgaagttcccttcattatacaaattaataaaattcaaactatataaaatatatattagtcatcgatgattaattcacccatatctgggtaccaaaggtctggactacttaaaccatgtagattcaaaattctatattgggaaaaattataaggaaaacccgaagctttcatacagtgtgaaaattattcagcacatatggataatttttgatgtttgaaataagcagaaagatctstaatggagatgactttatgactttgtttaggaacagcataaaaataaacattttaaagtgctgttatataaaaataaaacaacagttacttctctatgttttgaaagctaaaactaaataaatgatagtaggagcagaggtgctttgttacaagttcttttcaagcacttacaattaatacctttaatggc

SEQ ID NO: 578037 - DNA, 649 bp, Homo sapiens
acaatgtttcttatacaattaaactgcatttgaagtagatggtaatgtaataccaatcttgaaaagtttttcttttctaaaacaaggtgccaatgatgtactacactgtaattaacactgaaattctgggaactacttcatcatttccagtcactatagttgcaaagctgggaagtaaacactgtacatcagatgattgctttcccatggaatacaacaggctgaagttcccttcattatacaaattaataaaattcaaactatataaaatatatattagtcatcgatgattaattcacccatatctgggtaccaaaggtctggactacttaaaccatgtagattcaaaattctatattgggaaaaattataaggaaaacccgaagctttcatacagtgtgaaaattattcagcacatatggataatttttgatgtttgaaataagcagaaagatctgtaatggagatgactttatgactttgtttaggaacagcataaaaataaacattttaaagtgctrttatataaaaataaaacaacagttacttctctatgttttgaaagctaaaactaaataaatgatagtaggagcagaggtgctttgttacaagttcttttcaagcacttacaattaatacctttaatggc

SEQ ID NO: 578038 - DNA, 437 bp, Homo sapiens
acacgattaactgataagacactgtggcaagctatatccgcagttcccaggaattcgcccggttgataggacccaaagcccccggggtttgtgtcccgttgatagcacccaaagcccccaggtctatcaccttgtgatggatttaaagccccygcacctggaactgtttgttttcccgtaaccatttgtccttttaacttttttgccttttttactcagctgattgcttcagctaagctccctctcccctttctaaaccaaagtataaaagaaaatctagccccttctccggggccaagagaattttgagcactaagggtctctcggttgccggctaataaaggactcctgaattcgtctcatagtgtggcagttaactacaactcgctcggttacaacattatgatatttccacaatacatacatcggcatgccgt

SEQ ID NO: 578039 - DNA, 437 bp, Homo sapiens
acacgattaactgataagacactgtggcaagctatatccgcagttcccaggaattcgcccggttgataggacccaaagcccccggggtttgtgtcccgttgatagcacccaaagcccccaggtctatcaccttgtgatggatttaaagcccctgcacctggaactgtttgttttcccgtaaccatttgtccttttaacttttttgccttttttactcagctgattgcttcagctaagctcccyctcccctttctaaaccaaagtataaaagaaaatctagccccttctccggggccaagagaattttgagcactaagggtctctcggttgccggctaataaaggactcctgaattcgtctcatagtgtggcagttaactacaactcgctcggttacaacattatgatatttccacaatacatacatcggcatgccgt

SEQ ID NO: 578040 - DNA, 437 bp, Homo sapiens
acacgattaactgataagacactgtggcaagctatatccgcagttcccaggaattcgcccggttgataggacccaaagcccccggggtttgtgtcccgttgatagcacccaaagcccccaggtctatcaccttgtgatggatttaaagcccctgcacctggaactgtttgttttcccgtaaccatttgtccttttaacttttttgccttttttactcagctgattgcttcagctaagctccctctcccctttctaaaccaaagtataaaagaaaatctagccccttctcyggggccaagagaattttgagcactaagggtctctcggttgccggctaataaaggactcctgaattcgtctcatagtgtggcagttaactacaactcgctcggttacaacattatgatatttccacaatacatacatcggcatgccgt

SEQ ID NO: 578041 - DNA, 502 bp, Homo sapiens
aataaatatattgaacttaaatatatttaattgttaaataaatatatttaacattatataacattatattaaatatgtaatatattaaaatgtaatatgttaaaatgtagccaaaaagaacctattcaratgaacaataggctatataaagtaaataggaataatcttaaacagaaatgtgttgtttataaatgacaaaagctatactattctaaaaaaaaaaaagttgacaaataaatttaaatacttattatggtattggagaaaaatgcaacatcgttcaacacatacattttccctcctataaaatgaaattcaataaaccatgagatatttttgagttcacaaaataattttcaaagtttgtgtgaaggcaaatcagattaaagtagtcaagaattagaaatattatttcattttgtttgtttgctttatgttttggtttttagctaacttaagctttttttattcgtacaaatttatgggatacgtgtggaatttt

SEQ ID NO: 578042 - DNA, 502 bp, Homo sapiens
aataaatatattgaacttaaatatatttaattgttaaataaatatatttaacattatataacattatattaaatatgtaatatattaaaatgtaatatgttaaaatgtagccaaaaagaacctattcagatgaacaataggctatataaagtaaataggaataatcttaaacagaaatgtgttgtttataaatgacaaaagctatactattctaaaaaaaaaaaagttgacaaatamatttaaatacttattatggtattggagaaaaatgcaacatcgttcaacacatacattttccctcctataaaatgaaattcaataaaccatgagatatttttgagttcacaaaataattttcaaagtttgtgtgaaggcaaatcagattaaagtagtcaagaattagaaatattatttcattttgtttgtttgctttatgttttggtttttagctaacttaagctttttttattcgtacaaatttatgggatacgtgtggaatttt

SEQ ID NO: 578043 - DNA, 502 bp, Homo sapiens
aataaatatattgaacttaaatatatttaattgttaaataaatatatttaacattatataacattatattaaatatgtaatatattaaaatgtaatatgttaaaatgtagccaaaaagaacctattcagatgaacaataggctatataaagtaaataggaataatcttaaacagaaatgtgttgtttataaatgacaaaagctatactattctaaaaaaaaaaaagttgacaaataaatttaaatacttattatggtattggagaaaaatgcaacatcgttcaacacatacattttccctcctataaaatgaaattcaataaaccatgagatatttttgagttcacaaaataattttcaaartttgtgtgaaggcaaatcagattaaagtagtcaagaattagaaatattatttcattttgtttgtttgctttatgttttggtttttagctaacttaagctttttttattcgtacaaatttatgggatacgtgtggaatttt

SEQ ID NO: 578044 - DNA, 502 bp, Homo sapiens
aataaatatattgaacttaaatatatttaattgttaaataaatatatttaacattatataacattatattaaatatgtaatatattaaaatgtaatatgttaaaatgtagccaaaaagaacctattcagatgaacaataggctatataaagtaaataggaataatcttaaacagaaatgtgttgtttataaatgacaaaagctatactattctaaaaaaaaaaaagttgacaaataaatttaaatacttattatggtattggagaaaaatgcaacatcgttcaacacatacattttccctcctataaaatgaaattcaataaaccatgagatatttttgagttcacaaaataattttcaaagtttgtstgaaggcaaatcagattaaagtagtcaagaattagaaatattatttcattttgtttgtttgctttatgttttggtttttagctaacttaagctttttttattcgtacaaatttatgggatacgtgtggaatttt

SEQ ID NO: 578045 - DNA, 530 bp, Homo sapiens
aaaataaaaattcaaagagaatttttttctttttttacttttatggcatgacttctaatatttttatatccttaacactttatacaaaaaaatcaaaggaagaagaacatttaagtttactttgtttcatttttcagagttaatagttgtttcacattctcaccaagatttgatttttaaatgttgatcttgtatcctgcaacccttgataaatttccttgtaaattatagttctttaaagacaccatagtatgctctacacatatatttcttctatgaataaatagatttttattttttcttcctaatattaatacctttaaaaaamaactttatttcagtggttagcacatgttgaatagaagtggtgaaagcatgaatacttgcattcttcctaatcttaaaggggcatgcattcaagattttatcatatgttataatggttgctataggtttttcataattgccctttattggactggagaggttccctttcatttccaatgtacttagaattttttacagacatg

SEQ ID NO: 578046 - DNA, 530 bp, Homo sapiens
aaaataaaaattcaaagagaatttttttctttttttacttttatggcatgacttctaatatttttatatccttaacactttatacaaaaaaatcaaaggaagaagaacatttaagtttactttgtttcatttttcagagttaatagttgtttcacattctcaccaagatttgatttttaaatgttgatcttgtatcctgcaacccttgataaatttccttgtaaattatagttctttaaagacaccatagtatgctctacacatatatttcttctatgaataaatagatttttattttttcttcctaatattaatacctttaaaaaaaaactttmtttcagtggttagcacatgttgaatagaagtggtgaaagcatgaatacttgcattcttcctaatcttaaaggggcatgcattcaagattttatcatatgttataatggttgctataggtttttcataattgccctttattggactggagaggttccctttcatttccaatgtacttagaattttttacagacatg

SEQ ID NO: 578047 - DNA, 530 bp, Homo sapiens
aaaataaaaattcaaagagaatttttttctttttttacttttatggcatgacttctaatatttttatatccttaacactttatacaaaaaaatcaaaggaagaagaacatttaagtttactttgtttcatttttcagagttaatagttgtttcacattctcaccaagatttgatttttaaatgttgatcttgtatcctgcaacccttgataaatttccttgtaaattatagttctttaaagacaccatagtatgctctacacatatatttcttctatgaataaatagatttttattttttcttcctaatattaatacctttaaaaaaaaactttatttcartggttagcacatgttgaatagaagtggtgaaagcatgaatacttgcattcttcctaatcttaaaggggcatgcattcaagattttatcatatgttataatggttgctataggtttttcataattgccctttattggactggagaggttccctttcatttccaatgtacttagaattttttacagacatg

SEQ ID NO: 578048 - DNA, 529 bp, Homo sapiens
cttgctttgggatgttatggaaacatatcccattagagctgtagaaagacttaggaaatctacagagaagagcaggcgacaaagacaaaagtaaatgttgtggcacagagtgagtgcccaggaaatttgatgagcttaattgaggaaaggagcccaatcgttagcccagactgatagaccacgtttcttcttcacatcttctgtttaattttcacaggcatttcagttcttctgtttccaaatctagtcctcctttagtctcccttaacccaggtaacggcatttgtattcccgcagtggcttcaaccagaaacttcgctccttccattttctcactcccacttccatcaaagctttctattacaatttcccttgtctaaaccttccctttctttctccttaaatgtttcgaagggcttctagtaatctccagctctctgcactgattttttttccagtcaatttctcctgaatgctcagagcagtctttaaaaataagataaatcwttaaaaataagataaataagtc

SEQ ID NO: 578049 - DNA, 449 bp, Homo sapiens
tattattctaagtgaagtaacgcgggagtggaaaatcaaacattgcatgttcttagttataaatgggagctaagctttgaggacacaaaatcctaagaatgatataatggactttggggacttgaaaggaagkgtggtaggagggtgaaggagaccacacattctgtacagtgtacactgcttgggtgatgggtgcatcaaaatctcagaaacaattgctaaataacttataatgtaaccaaaaaccacctcttcccctaaaaactattaaaataaagacaatttaacacctttccatcaccacttgatcaaatgaatatcagtatgaaaaaagaaaagttaaaaaataaaacagaaataaatatttgacatttataaccaattaactatatatatatatatttttccattggtaaatattaccaaacatttaacaagatagaatatat

SEQ ID NO: 578050 - DNA, 449 bp, Homo sapiens
tattattctaagtgaagtaacgcgggagtggaaaatcaaacattgcatgttcttagttataaatgggagctaagctttgaggacacaaaatcctaagaatgatataatggactttggggacttgaaaggaagtgtggtaggagggtgaaggagaccacacattctgtacagtgtacactgcttgggtgatgggtgcatcaaaatctcagaaacmattgctaaataacttataatgtaaccaaaaaccacctcttcccctaaaaactattaaaataaagacaatttaacacctttccatcaccacttgatcaaatgaatatcagtatgaaaaaagaaaagttaaaaaataaaacagaaataaatatttgacatttataaccaattaactatatatatatatatttttccattggtaaatattaccaaacatttaacaagatagaatatat

SEQ ID NO: 578051 - DNA, 449 bp, Homo sapiens
tattattctaagtgaagtaacgcgggagtggaaaatcaaacattgcatgttcttagttataaatgggagctaagctttgaggacacaaaatcctaagaatgatataatggactttggggacttgaaaggaagtgtggtaggagggtgaaggagaccacacattctgtacagtgtacactgcttgggtgatgggtgcatcaaaatctcagaaacaattgctaaataacttatmatgtaaccaaaaaccacctcttcccctaaaaactattaaaataaagacaatttaacacctttccatcaccacttgatcaaatgaatatcagtatgaaaaaagaaaagttaaaaaataaaacagaaataaatatttgacatttataaccaattaactatatatatatatatttttccattggtaaatattaccaaacatttaacaagatagaatatat

SEQ ID NO: 578052 - DNA, 548 bp, Homo sapiens
accctttaaaaactctattatatcaggtatcttttataaaatttaagtgtgttgcttttaagacagcaaaagcagaaatagtcctcaactgtttttttccgagtgttgccatttctacaacatctacactcatctgattcacctgggttgtagactttattttacacatctctgcaaccttttcttcttcttcaacacctgtaaaaaatattcaggtgcatatctattttcttaatatttatttggcttttagtaaaaatagtttttcctatattccaatatttatgatctgttatacaaacaaaaaataggtcaagtgaagtggctcacacttataatcccaccaccttgggaggctgaggcagaattgcttgagcccaggatttcaagaccagcttgagcaacatagaaacaacctatccctataaaaaaagattaataaaattaagtgtggtggtgcatatctgtagtcctagctactttggaggctgaagcaagaggattgcttgagtccaggaatttaaggttaygatgagctataattttac

SEQ ID NO: 578053 - DNA, 528 bp, Homo sapiens
  misc_feature 253: n = A,T,C or G
agctgtacaagaaatgcttaaaagacggcttcaaaggatgttaattgccaccatgaggtgaaaggatgttaattactaccatgaaagtatttaaactcactggtagaagtaaactcataattaaattcagagtgctacattattgtagtggtggtatacagtatgaaggttaaaagtcaaaatggtcaacaataaccatagctacaataagtttttaagaaataaaccatataaaagatgtgaattaagacanaattattaaattgggttggagggtaaaagtctagaatatttgcaggcaatcaaagttaaattgttattagcttaaaataaacctttagaactataagatttkttatgtaagccccagagtaacaaaaaagaaaaaagttacagcatatatgcaaatgaaaaagagaatggaataaaaccatgaaaccacaaaagcaaacacaagagaggaagaaagaaacaaagacctacaaaataaccagaaaacaatgaacaaaatggcaacagtaaatccat

SEQ ID NO: 578054 - DNA, 528 bp, Homo sapiens
  misc_feature 253: n = A,T,C or G
agctgtacaagaaatgcttaaaagacggcttcaaaggatgttaattgccaccatgaggtgaaaggatgttaattactaccatgaaagtatttaaactcactggtagaagtaaactcataattaaattcagagtgctacattattgtagtggtggtatacagtatgaaggttaaaagtcaaaatggtcaacaataaccatagctacaataagtttttaagaaataaaccatataaaagatgtgaattaagacanaattattaaattgggttggagggtaaaagtctagaatatttgcaggcaatcaaagttaaattgttattagcttaaaataaacctttagaactataagatttgttatgtaagccccagagtaacaamaaagaaaaaagttacagcatatatgcaaatgaaaaagagaatggaataaaaccatgaaaccacaaaagcaaacacaagagaggaagaaagaaacaaagacctacaaaataaccagaaaacaatgaacaaaatggcaacagtaaatccat

SEQ ID NO: 578055 - DNA, 528 bp, Homo sapiens
  misc_feature 253: n = A,T,C or G
agctgtacaagaaatgcttaaaagacggcttcaaaggatgttaattgccaccatgaggtgaaaggatgttaattactaccatgaaagtatttaaactcactggtagaagtaaactcataattaaattcagagtgctacattattgtagtggtggtatacagtatgaaggttaaaagtcaaaatggtcaacaataaccatagctacaataagtttttaagaaataaaccatataaaagatgtgaattaagacanaattattaaattgggttggagggtaaaagtctagaatatttgcaggcaatcaaagttaaattgttattagcttaaaataaacctttagaactataagatttgttatgtaagccccagagtaacaaaaaagaaaaaagttacagcatatatgcaaatgaaaaagagaatggaataaaaccatgaaaccacaaaagyaaacacaagagaggaagaaagaaacaaagacctacaaaataaccagaaaacaatgaacaaaatggcaacagtaaatccat

SEQ ID NO: 578056 - DNA, 633 bp, Homo sapiens
cagcaattagttacatcagtcccttgtagatgtcaattccagtgtcacaaatttcttgttttgcaacgttgagcaagtttttttcaatgtttctaagcctcagtttttttacctacaaaatgtaataatatttaaccattagtaatgttgtgaaaattaagcaaaaatacatgtaatatatttaacaatgcttggtgttcattaatgctttaatatatactaactacttatattattgttgctgttgtgttaaacatgcataagacagcaggtactagaatggaaataagggttcttacttgaaattaaatggcagaatttcatactgtaataggatgtatcaatttacctagtattaattagtgttaaaatactggatttttgtcaattattattagtctttgatgcatttctgtagctagcattgtcttttgtatgtgttggcctttgcatatttttccaaagaagtattatatacttttggggtttcttattttgaattgaagaatatgctaagattgcataaaagraaaaataataaatacactatgttcaataggtcaatgtcttgttttttgttttttgtttttttttcacagcaatgattttaaataaaataaacatagtttaaaa

SEQ ID NO: 578057 - DNA, 303 bp, Homo sapiens
aacaacaacaacaacaacaacaacaaaacagaaaaactctccagaagtttctatggggcccacttgagttgttattgaatagtaagatgaatacacaaaggctaaatcttctaaaatcaagraaaaattttgtagagctataagctgaactgtgtgagtttactcaggagacgtatgatgtctgatcagccagagaagacagtcttttaaaaatacccaagactggacgggtgcggtggctcatgcctataatcctagcactttgggaggccgaggcgggtggattacctgagatcgggagtt

SEQ ID NO: 578058 - DNA, 340 bp, Homo sapiens
gcttttgtcttgtacagtttctgctggaaggtctgcagatagcctaatggagttccctttataagtgacctgcaccttgtctccagctrcctttaatattttttctttcacacagaccttggagaatctgatgactacatgtcttgggtatggttatcttgtgtactatctcccaggggtcccctgaattttctgaatttgaatttcaacctctctaggaaagttaagaaaattcttatggacagtatcctaaaaaatgttttccaagttactcgttctgtcttcctttctcttagagatgccaatgagttgtagatttggcatcttcacataatcccat

SEQ ID NO: 578059 - DNA, 340 bp, Homo sapiens
gcttttgtcttgtacagtttctgctggaaggtctgcagatagcctaatggagttccctttataagtgacctgcaccttgtctccagctgcctttaatattttttctttcacacagaccttggagaatctgatgactacatgtcttgggkatggttatcttgtgtactatctcccaggggtcccctgaattttctgaatttgaatttcaacctctctaggaaagttaagaaaattcttatggacagtatcctaaaaaatgttttccaagttactcgttctgtcttcctttctcttagagatgccaatgagttgtagatttggcatcttcacataatcccat

SEQ ID NO: 578060 - DNA, 340 bp, Homo sapiens
gcttttgtcttgtacagtttctgctggaaggtctgcagatagcctaatggagttccctttataagtgacctgcaccttgtctccagctgcctttaatattttttctttcacacagaccttggagaatctgatgactacatgtcttgggtatggttatcttgtgtactatctcccaggggtcccctgaattttctgaatttgaatttcaacctctctaggaaagttaagaaaattcttatggacagtatcctaaaaaatgttttccargttactcgttctgtcttcctttctcttagagatgccaatgagttgtagatttggcatcttcacataatcccat

SEQ ID NO: 578061 - DNA, 534 bp, Homo sapiens
gcaccaactgaggaatgagacagcatcaatatccaggaataattatgaagaagaggatcgtctcccacctttcatccaccgtacactgttatgaatgcagtagcagttcttcctgcaagagctggtgagtgtgcactgwaagaaagtgattctttgtgctttcagcaggggtggtggatccatccctgctgaaaatgagactgtgcctgctctggctttcacaaggggtggggtccaactcccccttccaacacagagtggcagcaccctgacaacagaggatagactacaaagttgtctgtcctgtactggaggaagaggttctaccctgaccctcgttatagtggtagccatcagagaggcagatccatggcccacaaaggcactgtgctgggaactaaaggatgaagattttacaaacaaggtcatgagacctgtgacagggatatgatagggaagcagactgcatttcttctagttcaggatgaagagctggtgcacccctccatctctttcctggaggcttcagggcac

SEQ ID NO: 578062 - DNA, 534 bp, Homo sapiens
gcaccaactgaggaatgagacagcatcaatatccaggaataattatgaagaagaggatcgtctcccacctttcatccaccgtacactgttatgaatgcagtagcagttcttcctgcaagagctggtgagtgtgcactgtaagaaagtgattctttgtgctttcagcaggggtggtggatccatccctgctgaaaatgagactgtgcctgctstggctttcacaaggggtggggtccaactcccccttccaacacagagtggcagcaccctgacaacagaggatagactacaaagttgtctgtcctgtactggaggaagaggttctaccctgaccctcgttatagtggtagccatcagagaggcagatccatggcccacaaaggcactgtgctgggaactaaaggatgaagattttacaaacaaggtcatgagacctgtgacagggatatgatagggaagcagactgcatttcttctagttcaggatgaagagctggtgcacccctccatctctttcctggaggcttcagggcac

SEQ ID NO: 578063 - DNA, 434 bp, Homo sapiens
aaagaccacgtttcaaattaactcagtcagacaaaaagagagggaaagaatttaaaaaatgaacaaagtcttcaagaartattctatgatattatgttaaacaacaaaaacctatgacttactggcattcctgagaaagaagaagaaagagtaagcaaattggaaaacatatttcaggaaataattaaataaaatttccccaatcttgttagagacattgccatccagatatatgaaattaagaaaactactgagagatactaaacaatatgaccattcccaaggcaaatagtcatcagactattcatgattaatgtgaaataaaaaaaaatctcaaaggaagctagagaaaagggccaaattacccataaagggaataccatcagactaatggtggacatctcagcagaaaccttataagccagaagagattg

SEQ ID NO: 578064 - DNA, 434 bp, Homo sapiens
aaagaccacgtttcaaattaactcagtcagacaaaaagagagggaaagaatttaaaaaatgaacaaagtcttcaagaaatattmtatgatattatgttaaacaacaaaaacctatgacttactggcattcctgagaaagaagaagaaagagtaagcaaattggaaaacatatttcaggaaataattaaataaaatttccccaatcttgttagagacattgccatccagatatatgaaattaagaaaactactgagagatactaaacaatatgaccattcccaaggcaaatagtcatcagactattcatgattaatgtgaaataaaaaaaaatctcaaaggaagctagagaaaagggccaaattacccataaagggaataccatcagactaatggtggacatctcagcagaaaccttataagccagaagagattg

SEQ ID NO: 578065 - DNA, 581 bp, Homo sapiens
tagtgttaaatataaggagtggtgttaaattattttgaatgtacgtttttccagtttttattttcactaagataaacttctcagtaattttcttaccaagtcaatatatgaaacaaaagtttacctttatataaaactaaaattatcataaggataaaaactgatttgtgaaatactgcattcaagaggaacaagctcctcaaatactcttattcattcagacacttaaatttatagaaaatgttcattttgttttttttctgtgtcaaattctaggttagtcattccatatgcaaaattaaatttaagcaaatttaactatttacctttttcaggaacttgatttgcctaatttaatcataattgtttagtcaattaagtaggccagatgtttatttggacatgctaacatatacctatatggcagcactatttaaaattacttcatactttatgttttgtaataagagctgattatctttatcttgatcttttttttttttttttttttttttttttttgaracagggtctttttttgtcacccaggctgaagtgcgggggcatgattttggctcaccg

SEQ ID NO: 578066 - DNA, 581 bp, Homo sapiens
tagtgttaaatataaggagtggtgttaaattattttgaatgtacgtttttccagtttttattttcactaagataaacttctcagtaattttcttaccaagtcaatatatgaaacaaaagtttacctttatataaaactaaaattatcataaggataaaaactgatttgtgaaatactgcattcaagaggaacaagctcctcaaatactcttattcattcagacacttaaatttatagaaaatgttcattttgttttttttctgtgtcaaattctaggttagtcattccatatgcaaaattaaatttaagcaaatttaactatttacctttttcaggaacttgatttgcctaatttaatcataattgtttagtcaattaagtaggccagatgtttatttggacatgctaacatatacctatatggcagcactatttaaaattacttcatactttatgttttgtaataagagctgattatctttatcttgatcttttttttttttttttttttttttttttttgaaacagggtctttytttgtcacccaggctgaagtgcgggggcatgattttggctcaccg

SEQ ID NO: 578067 - DNA, 581 bp, Homo sapiens
tagtgttaaatataaggagtggtgttaaattattttgaatgtacgtttttccagtttttattttcactaagataaacttctcagtaattttcttaccaagtcaatatatgaaacaaaagtttacctttatataaaactaaaattatcataaggataaaaactgatttgtgaaatactgcattcaagaggaacaagctcctcaaatactcttattcattcagacacttaaatttatagaaaatgttcattttgttttttttctgtgtcaaattctaggttagtcattccatatgcaaaattaaatttaagcaaatttaactatttacctttttcaggaacttgatttgcctaatttaatcataattgtttagtcaattaagtaggccagatgtttatttggacatgctaacatatacctatatggcagcactatttaaaattacttcatactttatgttttgtaataagagctgattatctttatcttgatcttttttttttttttttttttttttttttttgaaacagggtctttttttgtcacccaggctgaagtgcggkggcatgattttggctcaccg

SEQ ID NO: 578068 - DNA, 540 bp, Homo sapiens
tggaaatattcaaaatgaaggcaatacaaaataattttcatataaaactgaaatactccatttcgagagacttgcaccaaaagaaatactgcagagaatatatttctaagtggaaatagggtatttaagaaaggaattaacaccagaaatgataatttattggtataagttaattgcttttaaacaccttaaaacaataataatcawgtcttttggtatttcagataaatatagaataaaacatatggacataatagcaaaatgacactgtagtttatggaaaaaggtttgaaatttctttgaattatgataaacttactgatttatgattaaatctaataaagtgcatattttactgactaaaatttataaatgaatatgtgtacaatgcaatgatagaaggataaaataaaactgcaaatatttaatgaattcaaaaaaggaaagaatagagaaaaatataagcaatagagaacaaattaaatagcttaacaaaacagaaaacaatagaaaggtagtcgatttaacacaaaatattca

SEQ ID NO: 578069 - DNA, 616 bp, Homo sapiens
taccactgtactccagcctgggcaacagagtgagaccccatctcttaaaaaaaaaaaaaggaagaagcagcgataagttctgtgaaagaaataagatggcaagaaagagtcactgatggaagccattttagataaggtagccagggaagatccttcaaggaagcactatctgagtaggaacccaaaggataaaaataagcaagttggcaagatttggggaagagcaatccaagcagacgacaaaacaattataaagtctcaraggtgggaaagggcttgctatgttggaggagctggaaaacagaagggagcagtggtatgactggaatgcagtgagcgcaggaagggaaggaatgaaaaaacaggcatgaggcagattatgcagacttataagctccaaggcaagggggttggggttttatcaaaagaataagaagccactgaagaactttaagcaggaaagttcatattctaagagatcatctgtctgctttgtggaaaatggattgcagggagaacaatggaagcagggaagagaccaattaggatgcttaggttcagatagaagacaacaatggtttagaatgatgattggtagaggatatgggcagaggta

SEQ ID NO: 578070 - DNA, 616 bp, Homo sapiens
taccactgtactccagcctgggcaacagagtgagaccccatctcttaaaaaaaaaaaaaggaagaagcagcgataagttctgtgaaagaaataagatggcaagaaagagtcactgatggaagccattttagataaggtagccagggaagatccttcaaggaagcactatctgagtaggaacccaaaggataaaaataagcaagttggcaagatttggggaagagcaatccaagcagacgacaaaacaattataaagtctcaaaggtgggaaagggcttgctatgttggaggagctggaraacagaagggagcagtggtatgactggaatgcagtgagcgcaggaagggaaggaatgaaaaaacaggcatgaggcagattatgcagacttataagctccaaggcaagggggttggggttttatcaaaagaataagaagccactgaagaactttaagcaggaaagttcatattctaagagatcatctgtctgctttgtggaaaatggattgcagggagaacaatggaagcagggaagagaccaattaggatgcttaggttcagatagaagacaacaatggtttagaatgatgattggtagaggatatgggcagaggta

SEQ ID NO: 578071 - DNA, 616 bp, Homo sapiens
taccactgtactccagcctgggcaacagagtgagaccccatctcttaaaaaaaaaaaaaggaagaagcagcgataagttctgtgaaagaaataagatggcaagaaagagtcactgatggaagccattttagataaggtagccagggaagatccttcaaggaagcactatctgagtaggaacccaaaggataaaaataagcaagttggcaagatttggggaagagcaatccaagcagacgacaaaacaattataaagtctcaaaggtgggaaagggcttgctatgttggaggagctggaaaacagaagggagcagtggtatgactggaatgcagtgagcgcaggaagggaaggaatgaaraaacaggcatgaggcagattatgcagacttataagctccaaggcaagggggttggggttttatcaaaagaataagaagccactgaagaactttaagcaggaaagttcatattctaagagatcatctgtctgctttgtggaaaatggattgcagggagaacaatggaagcagggaagagaccaattaggatgcttaggttcagatagaagacaacaatggtttagaatgatgattggtagaggatatgggcagaggta

SEQ ID NO: 578072 - DNA, 616 bp, Homo sapiens
taccactgtactccagcctgggcaacagagtgagaccccatctcttaaaaaaaaaaaaaggaagaagcagcgataagttctgtgaaagaaataagatggcaagaaagagtcactgatggaagccattttagataaggtagccagggaagatccttcaaggaagcactatctgagtaggaacccaaaggataaaaataagcaagttggcaagatttggggaagagcaatccaagcagacgacaaaacaattataaagtctcaaaggtgggaaagggcttgctatgttggaggagctggaaaacagaagggagcagtggtatgactggaatgcagtgagcgcaggaagggaaggaatgaaaaaacaggcatgaggcagattatgcagacttataagctccaaggcaagggggttggggttttatcaaaagaataagaagccactgaagaactttaagcaggaaagttcatattctaagagatcatctgtctgctttgtggaraatggattgcagggagaacaatggaagcagggaagagaccaattaggatgcttaggttcagatagaagacaacaatggtttagaatgatgattggtagaggatatgggcagaggta

SEQ ID NO: 578073 - DNA, 542 bp, Homo sapiens
gggctgaggcgggtgggtcacctgaggtcaggagttcgagatcagcctggccaacatggcgaaacctcatctctactaaaaatacaaaaattagccaggcatggtggtgggcacctgtaatcccagctactcaggaggctgaggcaggagaattgcttgaaccagggaggcggaggttgcattgagccgagattgcaccattgtactccagtctgggcaacagtagcgaaactctgtctcaaaaaaaaaaaaaaaaaaaaaaaaaaaaaaaaaaaagtccaatgtaggctgggtgtgggggctcacacttgtaatcccagcactttgggaggccaaggcaggaggatcacaggaggatcccagcccaggaattcaaraccagcatgggcaacatggtaaaatcccatctctactaaaaataatttttaaaaaagccaggcatggtggtgtgtgactgtactcccagctactcaggaggctgaggtgggtggatcaacctgagcctggaaagtcaagtggctgcagtgagctgtgataacacc

SEQ ID NO: 578074 - DNA, 618 bp, Homo sapiens
ctaccagatcttgtgaaaactcactcaccatcacaaaaacagcaagggggaaatacgcccccatgatccagtcacttcccaccaggcacctcctccaacactggggatgaatattcagacatgagatttgggcagacacacagatccaaaccatatcaaaacagaaaaaaaagccaggggggatacccaaccaatcacatataataatatcaatgcaaaatattggcctatagagttaactagaatattttccagaaatgaaaatttgtttcagtgttacaaactctcttartattattcattgtatgaatagtgtggcaggttgtgtagactgtctctctcaatagccatttaagcccccttggggtatgcttttcttgtactgcagaggctgaaattctaaaatctgcatttctgagttgcacttgcatctgggaagctgggtgtgatttaggttctgccgatcaggcaggcaaatcagactttaaggcttgaagttaaaactgagttaagaggaagagaggcagggagtgaggatctcatttgtgatacgaattcaggtgcagccctttggacctgtagtcaagctccctgattcagcaacttcagtaacaatgg

SEQ ID NO: 578075 - DNA, 520 bp, Homo sapiens
tttaattacagggctatgattaggatattgaagcaactatctcttaccaagaggttaggaaagatttacccacaccgagtgctacagaccaagaaggtgttaaccaggcagagtgagaagggagaaagggaaagttayggaagtggagactttttttttacattttctacatagtccacttcacagtatatccttctttttataatcaatgcttacttttccatgataatgaagaattaatatgaaaagttgaaatttgtaaacacatagcttcaaattccttttcccttcactaccacaccttttcttatagccagaaagattggcgtcagaacagtcttcgttattcttctctactggagctagtaataggtctaggtacacaacgaaagaaatgggagagaaaaggaagagaatcaaaagtggaacaacagagtcagcaaagcttgtgctgggggtctggagacttggattctaagcctgagacacactctctctgggtaaccttggctaggtcaag

SEQ ID NO: 578076 - DNA, 520 bp, Homo sapiens
tttaattacagggctatgattaggatattgaagcaactatctcttaccaagaggttaggaaagatttacccacaccgagtgctacagaccaagaaggtgttaaccaggcagagtgagaagggagaaagggaaagttacggaagtggagactttttttttacattttctacatagtccacttcacagtatatccttctttttataatcaatgcttacttttccatgataatgaagaattaatatgaaaagttgaaatttgtaaacacatagcttcaaattccttttcccttcactaccacaccttttcttatagccagaaagattggcgtcagaacagtcttcgttattcttctctactggagctagtaataggtctaggtacacaaygaaagaaatgggagagaaaaggaagagaatcaaaagtggaacaacagagtcagcaaagcttgtgctgggggtctggagacttggattctaagcctgagacacactctctctgggtaaccttggctaggtcaag

SEQ ID NO: 578077 - DNA, 427 bp, Homo sapiens
aaaggaaaatggttctgggtctgagggctcccagccttgcctgtcattcycttacccaaaacatggagcacagacacaacagaggaatcagacttacaggagccacacaagttgtggaaatggacattcagacattctaagagataaccaagggattaatttatccccatccccaggaatctggtatgatgtaagactgagcccctgacaatgctggaggaggagaacaacacagcagaaagggtttcttgctaggtgaacacagggaagctatggcaatgatttaaataggttgaattgtaatgaataagtattatttcctacatgtctaagtttgtgggctcagatttatgcttgcctctattagttaatgagacaattataaaattattttaagagaaattataaaaccagtaaaccacttgat

SEQ ID NO: 578078 - DNA, 427 bp, Homo sapiens
aaaggaaaatggttctgggtctgagggctcccagccttgcctgtcattcccttacccaaaacatggagcacagacacaacagaggaatcagacttacaggagccacacaagttgtggaaatggacwttcagacattctaagagataaccaagggattaatttatccccatccccaggaatctggtatgatgtaagactgagcccctgacaatgctggaggaggagaacaacacagcagaaagggtttcttgctaggtgaacacagggaagctatggcaatgatttaaataggttgaattgtaatgaataagtattatttcctacatgtctaagtttgtgggctcagatttatgcttgcctctattagttaatgagacaattataaaattattttaagagaaattataaaaccagtaaaccacttgat

SEQ ID NO: 578079 - DNA, 594 bp, Homo sapiens
tcaggtcccacttagaagggagaacatgcagtatttagttttctgttcctgcattagtttgctaaggataatagcctgtaactccatccatgttcccacaaaagacatgatctcattcktttttatggctgcatagtatttcatggtatatttgtaccatattttctttatccaatctgtcaatgatgggcatttaggttgattccatgtgtttgctattgtgaataagggcacaaaattctagtaggccaaagcgatctactgagaaaggtaagtctcttgctcctgtctcccaatctcccaattcctgctccacagacattaactgttatccattagtaaggtatccttgtttcccaagtagtttccacatgtcctcttcttcaaaatgttagctataactaatgttcttatttgtttcctaaagttaaatttgtatatttttgattaggtcatattacatgagctgaagcataatataaacatcattctacatcttgtaatttttttacttaaaaatagggtaaacatataatttacatttcagttgggctgatctgagggaggaaaatgaagcaattagcaattatgcca

SEQ ID NO: 578080 - DNA, 594 bp, Homo sapiens
tcaggtcccacttagaagggagaacatgcagtatttagttttctgttcctgcattagtttgctaaggataatagcctgtaactccatccatgttcccacaaaagacatgatctcattcgtttttatggctgcatagtatttcatggtatatttgtaccatattttctttatccaatctgtcartgatgggcatttaggttgattccatgtgtttgctattgtgaataagggcacaaaattctagtaggccaaagcgatctactgagaaaggtaagtctcttgctcctgtctcccaatctcccaattcctgctccacagacattaactgttatccattagtaaggtatccttgtttcccaagtagtttccacatgtcctcttcttcaaaatgttagctataactaatgttcttatttgtttcctaaagttaaatttgtatatttttgattaggtcatattacatgagctgaagcataatataaacatcattctacatcttgtaatttttttacttaaaaatagggtaaacatataatttacatttcagttgggctgatctgagggaggaaaatgaagcaattagcaattatgcca

SEQ ID NO: 578081 - DNA, 594 bp, Homo sapiens
tcaggtcccacttagaagggagaacatgcagtatttagttttctgttcctgcattagtttgctaaggataatagcctgtaactccatccatgttcccacaaaagacatgatctcattcgtttttatggctgcatagtatttcatggtatatttgtaccatattttctttatccaatctgtcaatgatgggcatttaggttgattccatgtgtttgctattgtgaataagggcacaaaattctagtaggccaaagcgatctactgagaaaggtaagtctcttgctcctstctcccaatctcccaattcctgctccacagacattaactgttatccattagtaaggtatccttgtttcccaagtagtttccacatgtcctcttcttcaaaatgttagctataactaatgttcttatttgtttcctaaagttaaatttgtatatttttgattaggtcatattacatgagctgaagcataatataaacatcattctacatcttgtaatttttttacttaaaaatagggtaaacatataatttacatttcagttgggctgatctgagggaggaaaatgaagcaattagcaattatgcca

SEQ ID NO: 578082 - DNA, 594 bp, Homo sapiens
tcaggtcccacttagaagggagaacatgcagtatttagttttctgttcctgcattagtttgctaaggataatagcctgtaactccatccatgttcccacaaaagacatgatctcattcgtttttatggctgcatagtatttcatggtatatttgtaccatattttctttatccaatctgtcaatgatgggcatttaggttgattccatgtgtttgctattgtgaataagggcacaaaattctagtaggccaaagcgatctactgagaaaggtaagtctcttgctcctgtctcccaatctcccaattcctgctccacagacattaactgttatccattagtaaggtatccttgtttcccaagtagtttccacatgtcctcttcttcaaaatgttagctataactaatgttcttatttgtttcctaaagttaaatttgtatatttttgattaggtcatattacatgakctgaagcataatataaacatcattctacatcttgtaatttttttacttaaaaatagggtaaacatataatttacatttcagttgggctgatctgagggaggaaaatgaagcaattagcaattatgcca

SEQ ID NO: 578083 - DNA, 632 bp, Homo sapiens
atgcatatactttctattagtctaattttctaaacatttaagagaacatagctgagtatgttcttatccccaatgcccaaagaaataatttaaaagaatattagggggaagaaaactaaaaagaatgagtagttgtgtttcctgtggtgtatttacccattcatttgtttaagaagtggttttgagcccctattttccttttaggggttctgagacacagagatgaacaaggcatctcttattaggaattataactttcagtggagagaaacacaaagataaacaaatagcaagaaaagttttggtagtgctaagagctatcataaagacaaaacaagatgacattcttgaaagatttgaggaactatctggattaggcaaccagagaaggttaaggaagtgtctttaatgagcgatccaaatggcaaggtggggcaagtcttctaaagaggtgagggaaaaacattccaggggagatggctcgaagtgggcctaaacatggtgtcttgaactaagagaagaaaggagagtttggctgtagcttgtgaatgaagcagaacacagtragaaatgcccaggctggttggcagaggccagactgtgcagggcctagaggctgaagaaaagaggtt

SEQ ID NO: 578084 - DNA, 549 bp, Homo sapiens
gatgttttaacttttaggttcaggggtacacatcaggtttgttatataggtaaactgtgtgtcatcggttttgatgtacagattgtttcatcatctaggtaagaagcatagtacttggataggtagtttttccgttctcgccctcctcccaccatccaccctaaagtaggtrctgtgtctgttctcttctttgtgtccatgagtacccaatgtttagctcccacttacaagtgagaacatgcagtatttggttttctgttcctgtgttaggtcgcttaggataatggcttccagctccactcatgttgctgcaaagaacatgatctcattcttttttatggctgaatagtattccatggtgtatatgtaacaccttttttttttttttaatccagtctactgttgatgggcatttaggttgattccatgtctttggtattgtgaatagtgctgcaacgaacatacacatgcatgtgtgtctttatggttaaacaatttatagtcctttgggtatatatcccataatgggatttctgggtcaaatggtaa

SEQ ID NO: 578085 - DNA, 585 bp, Homo sapiens
gattaagttctcttaaatagaagaagttcacaattactattagctcctcctatagaccatataagctagtctctggaccactccaaggaaaagaagtactggggcttaggacttcaacatatgaattctgggaaagacacagcttagtccattataggaagtgactgcttaatgagtatgagttccttttggggtgaagaaaatgttctggaaatagtagtaatggctacgtaacactataaacatgccaaatgccacttagttctacacttaaaccagttaaaatggtaaattstatgttgtgtgtattttattaaaataaaaaagtcatcacctagtcatgttgatttgatcttgggaaatgcttcaaatcagaatacatcttgccatctctaccattctagtccaagccaccattacttcctgcatgatatatgtcaatactttttaactacatttttgtgtccatctttgctctgcttcaatctttactctgccctaaaggcagatttttttgtttattcaattgtgttactccctgattaaaaattttcagtggtttctcattttgtttaaaatcaaata

SEQ ID NO: 578086 - DNA, 527 bp, Homo sapiens
tcatctcacagaattgaaactttcttttgattgagcagtttggaaacagactttttgtagaatytgtaaggggacattttgagcgctttgaggcctatggtggaaaaggaaatatcttcaaataaaaactagacagaggagttctgagaaacatctttgtgatatgtgccttcatctcacagagttaaagctttcttttcattgagcaatttggaaacactctttttgtagaatctgaaagtggacatttggagcactttgaggcctgtaatggaaaatgaaatatcctagacagagttttgtggccttcagtagaaacggaaatatcttcacataaaatctagacagaagaaatctgagaaacttcttagtgatgtgtgcattcatcccacagatttaaacttttcttttgatggagcagttttgaaaatctatttttgtaatatctgcaagtggacattttgagtgatttgaggcctatggtggaaaaggaaatatcttcacataaaaggtagacagaagaattc

SEQ ID NO: 578087 - DNA, 527 bp, Homo sapiens
tcatctcacagaattgaaactttcttttgattgagcagtttggaaacagactttttgtagaatctgtaaggggacattttgagcgctttgaggcctatggtggaaaaggaaatatcttcaaataaaaactagacagargagttctgagaaacatctttgtgatatgtgccttcatctcacagagttaaagctttcttttcattgagcaatttggaaacactctttttgtagaatctgaaagtggacatttggagcactttgaggcctgtaatggaaaatgaaatatcctagacagagttttgtggccttcagtagaaacggaaatatcttcacataaaatctagacagaagaaatctgagaaacttcttagtgatgtgtgcattcatcccacagatttaaacttttcttttgatggagcagttttgaaaatctatttttgtaatatctgcaagtggacattttgagtgatttgaggcctatggtggaaaaggaaatatcttcacataaaaggtagacagaagaattc

SEQ ID NO: 578088 - DNA, 527 bp, Homo sapiens
tcatctcacagaattgaaactttcttttgattgagcagtttggaaacagactttttgtagaatctgtaaggggacattttgagcgctttgaggcctatggtggaaaaggaaatatcttcaaataaaaactagacagaggagttctgagaaacatctttgtgatatgtgccttcatctcacagagttaaagctttcttttcattgagcaatttggaaacactctttttgtagaatctgaaagtggacatttggagcactttgaggcctgtaatggaaaatgaaatatcctagacagagttttgtggccttcagtagaaacggaaatatcttcacataaaatctagacagaagaaatctgagaaacttcttagtgatgtgtgcattcatcccacagatttaaacttttcttttgatggagcagttttgaaaatctatttttgtaatatctgcaagtggasattttgagtgatttgaggcctatggtggaaaaggaaatatcttcacataaaaggtagacagaagaattc

SEQ ID NO: 578089 - DNA, 494 bp, Homo sapiens
aaggaaacatcttcacataaaaactacacagaggcattctgagaaacttctttgtgatgtgtgctttcatctcaaattgttgaacctatcttatgattgagcagttttgaaacactctttttgtagaatctgcaagtgtttatttggagccgatgtggcctattgtgaaaaaggaaatatcttcacataaaaactacacagaagcattctgagaaaccactttgtgatatgtgcattaaactcacagaggtgaacctatctttycattgagcagttttgattccctctttttgtaggatctgcaagtggacatttggagccctttgtggcctatggagaaaaaggaaatatcttcaaataaaaactacccagaagcattctgaggaacttctttgctatgtatgcattcaactcacagagttgaaactatcttatgattcagcagttttgaagcactgtttttgtagaatcttcaagtggatatttggagcgct

SEQ ID NO: 578090 - DNA, 494 bp, Homo sapiens
aaggaaacatcttcacataaaaactacacagaggcattctgagaaacttctttgtgatgtgtgctttcatctcaaattgttgaacctatcttatgattgagcagttttgaaacactctttttgtagaatctgcaagtgtttatttggagccgatgtggcctattgtgaaaaaggaaatatcttcacataaaaactacacagaagcattctgagaaaccactttgtgatatgtgcattaaactcacagaggtgaacctatctttccattgagcagttttgattccctcyttttgtaggatctgcaagtggacatttggagccctttgtggcctatggagaaaaaggaaatatcttcaaataaaaactacccagaagcattctgaggaacttctttgctatgtatgcattcaactcacagagttgaaactatcttatgattcagcagttttgaagcactgtttttgtagaatcttcaagtggatatttggagcgct

SEQ ID NO: 578091 - DNA, 494 bp, Homo sapiens
aaggaaacatcttcacataaaaactacacagaggcattctgagaaacttctttgtgatgtgtgctttcatctcaaattgttgaacctatcttatgattgagcagttttgaaacactctttttgtagaatctgcaagtgtttatttggagccgatgtggcctattgtgaaaaaggaaatatcttcacataaaaactacacagaagcattctgagaaaccactttgtgatatgtgcattaaactcacagaggtgaacctatctttccattgagcagttttgattccctctttttgyaggatctgcaagtggacatttggagccctttgtggcctatggagaaaaaggaaatatcttcaaataaaaactacccagaagcattctgaggaacttctttgctatgtatgcattcaactcacagagttgaaactatcttatgattcagcagttttgaagcactgtttttgtagaatcttcaagtggatatttggagcgct

SEQ ID NO: 578092 - DNA, 494 bp, Homo sapiens
aaggaaacatcttcacataaaaactacacagaggcattctgagaaacttctttgtgatgtgtgctttcatctcaaattgttgaacctatcttatgattgagcagttttgaaacactctttttgtagaatctgcaagtgtttatttggagccgatgtggcctattgtgaaaaaggaaatatcttcacataaaaactacacagaagcattctgagaaaccactttgtgatatgtgcattaaactcacagaggtgaacctatctttccattgagcagttttgattccctctttttgtaggatctgcaagtggacatttggagccctttgtggcctatggagraaaaggaaatatcttcaaataaaaactacccagaagcattctgaggaacttctttgctatgtatgcattcaactcacagagttgaaactatcttatgattcagcagttttgaagcactgtttttgtagaatcttcaagtggatatttggagcgct

SEQ ID NO: 578093 - DNA, 549 bp, Homo sapiens
cttgttttctccatttggtgaggcagtttttcctaggctattcttattttttgtagatgtacatctctgtctacacattgatgaattaaatatttatttcagtcttctcagtctgggtttgtttttgactgtttctcagtgggcttgtttagaaattctgtgtggatttccattatattccattttagcattaggaggtgcccaaagcaaaggttagacataagtcttgcaatggggcttcaccactgatgcaatgtaactggatgggcccatgggtgatccacagagaggctgctgtctgtagggggagaacaagtcaggccatcaaatctggacagtctgtgtatcatgtttcccacagcrtgatgcccataaacaacctgtctggtataatatttcctctggtaggaatggctagccactgctaagtttcatatagtaagtattgctaacccaatcccttctctatgtccctagcatgcctctggtggttcagctctgttgacactcatggtgcttcttgtgggctgatgcaggagtgagtctact

SEQ ID NO: 578094 - DNA, 634 bp, Homo sapiens
caatagtccgaagaaattacttatggaagataatatgggttttttaatcttaaagggttcttttatatattcaagcttcgagattggctgccttgaatcctactaaaatttcagtgtaagttttacagagggaggaaagagtcaaagaaaaaattgcactggaaaaagttaaataagtaaggaagatattattcaagctattgcaatactggagagagtccagacctagtctgaactcagctcccctgatacaaaaggccrtggagtttttgaaagtgagggtaagggggcgatcataggccacctgtctttactaactgtcttttttcaaaggaaaaataaactttcttttatctttatgatataaggtaatttttacaacttggagcaagattaggctcttactctctcatggagactgggaaataaggtattatctttctggaggattacgtttgaaagggatggctcccagatccttgaaaaaggaagttttctgcttacaagttacacatgccacttctacctgcatttcactggctaaacaggtcaaatgtctaaatctgacccttccttcaataggacagaaatatataatcttctaggatatagggccactacagcaggaagacca

SEQ ID NO: 578095 - DNA, 507 bp, Homo sapiens
ggagtttttgaaagtgagggtaagggggcgatcataggccacctgtctttactaactgtcttttttcaaaggaaaaataaactttcttttatcttyatgatataaggtaatttttacaacttggagcaagattaggctcttactctctcatggagactgggaaataaggtattatctttctggaggattacgtttgaaagggatggctcccagatccttgaaaaaggaagttttctgcttacaagttacacatgccacttctacctgcatttcactggctaaacaggtcaaatgtctaaatctgacccttccttcaataggacagaaatatataatcttctaggatatagggccactacagcaggaagaccagatagtgggagaatggtaatataatctaccacaataaccacagtgaaaacattagtaatcctcagggttaaaccaagtcttcttggacacttaggttgattctaggctattttcaatagtggaataacaaaaaat

SEQ ID NO: 578096 - DNA, 507 bp, Homo sapiens
ggagtttttgaaagtgagggtaagggggcgatcataggccacctgtctttactaactgtcttttttcaaaggaaaaataaactttcttttatctttatgatataaggtaatttttacaacttggagcaagattaggctcttactctctcatggagactgggaaataaggtattatctttctggaggattacrtttgaaagggatggctcccagatccttgaaaaaggaagttttctgcttacaagttacacatgccacttctacctgcatttcactggctaaacaggtcaaatgtctaaatctgacccttccttcaataggacagaaatatataatcttctaggatatagggccactacagcaggaagaccagatagtgggagaatggtaatataatctaccacaataaccacagtgaaaacattagtaatcctcagggttaaaccaagtcttcttggacacttaggttgattctaggctattttcaatagtggaataacaaaaaat

SEQ ID NO: 578097 - DNA, 548 bp, Homo sapiens
gtagagaaaagcagccagccggagagtggcctccatgccaggggagtgtgtctgagctttgttttatttttcttatttgtctgtagttgtgtgattggtagaagagagtagatatgaagtctactgacacaggattsgtcttcaggcatgtcttaccaagcatttgggggaacagaggggttccacaaataagagagcaatgatcagactttcttctaaaaggagcagccacaagctaccttaactctccaacttgcccattaatcttcacctagagttaggaagatttcaccattagctgtggcccataaaagatccttaagcttgaccaaccacagaggtccatctccttgaggaggaagtgaaaggggtatggacagaagctgtgagctttctgtcctccgcaggcccccagctgtgtcttctacttcttgtacaagatagtctctaaatgatgttttctggctgacaatgccacataactgatccttatctcactatggaaatgaaagatttcaaagaatttgttgcctgaaatatggtgccat

SEQ ID NO: 578098 - DNA, 464 bp, Homo sapiens
aggattagtttggtactagtaacaatggagataagtaactaactttttgtgaaacttcttcctggggtgaaacaaaatctattggggaaactctttccaattatctctggaaatttattaagtgacctagtatataatgataatttaccatgatatttgataaaatagttttgtgtgttcagaataatttcttttttctttacctttgaaaataatgcattgataggtaattttctcctaaattggctgtttttatttccataaaaggtatttattgaatgtctccttacttttaatataactaggcattgtgtgatcaaagtaaaataaatatgttcttgtttctggaattactaaagctttgaaaatggacttatcgacctcaaaccaatgggacatattcctatgtggcctgctccyctgttagggttcccagggtaagtggtgattcctttcctgtcttt

SEQ ID NO: 578099 - DNA, 504 bp, Homo sapiens
tgcctgctgttacagataaatgactttcatttcactattggcttgtgcttgagaaggttattcaattgattccagttttttgcaatgccttgaaggcaaataatgttgtagcatccactgtcctcataatacactgtttcttttctaaggaaggttgttgtyataataccctagatatcaacagaaaatattccacttcttatcatatattaatttggctctggaataagtaaatgtaactaccagaatgctaatgaggatgttacgctgatgtttatttgtgtgttctaatctgtagataaacagcaagatctcttataattcatgattccaagtctcaggccacagcaggacaagcatcaaaacatctattctcaattcggagttgagatttctaataagaattatattttatccataatcataaaatagcaccagaaaaagtcaatatctaaaaatacagatcattgaaaaatagatctttctgcccttaacataaacaaa

SEQ ID NO: 578100 - DNA, 622 bp, Homo sapiens
acatgcttttacctacagtgctataaagctgcttgcaatagtcaaagttaatagaagctctcgtcagagctaatagaarccttgtatatgtaattatttaagaattctgtaaatatacacaatagggtaggaatgagaaaatctttagaggaaatattcaagtacgtttgatttctagcaaatccagatagacagttttgttaacaaccaagtcataattttaagtcttgttataggagctagaattttattcaagggacaactgatttgattagattagatgctgtgcactgcatgtttccttcaacaaatgcacaagttgaaactctaacaatagaatggcattagaaggaggacctttgggaagtaatttggttttgatgaggatggagtccccacaatggggttagcatcctaataagaagagtaggagactagagccctcttctctcagccatgtgaagataaaacaagaacacctgcaaaccagtaagagggccttcaccagacactggctctgctggcccagattttaatctttgaattcccacaactgtgagaaacaagtatatgctgtttaagccactcagtctacagttgtttgtagcagcagcctgagcag

SEQ ID NO: 578101 - DNA, 622 bp, Homo sapiens
acatgcttttacctacagtgctataaagctgcttgcaatagtcaaagttaatagaagctctcgtcagagctaatagaagccttgtatatgtaattatttaagaattmtgtaaatatacacaatagggtaggaatgagaaaatctttagaggaaatattcaagtacgtttgatttctagcaaatccagatagacagttttgttaacaaccaagtcataattttaagtcttgttataggagctagaattttattcaagggacaactgatttgattagattagatgctgtgcactgcatgtttccttcaacaaatgcacaagttgaaactctaacaatagaatggcattagaaggaggacctttgggaagtaatttggttttgatgaggatggagtccccacaatggggttagcatcctaataagaagagtaggagactagagccctcttctctcagccatgtgaagataaaacaagaacacctgcaaaccagtaagagggccttcaccagacactggctctgctggcccagattttaatctttgaattcccacaactgtgagaaacaagtatatgctgtttaagccactcagtctacagttgtttgtagcagcagcctgagcag

SEQ ID NO: 578102 - DNA, 622 bp, Homo sapiens
acatgcttttacctacagtgctataaagctgcttgcaatagtcaaagttaatagaagctctcgtcagagctaatagaagccttgtatatgtaattatttaagaattctgwaaatatacacaatagggtaggaatgagaaaatctttagaggaaatattcaagtacgtttgatttctagcaaatccagatagacagttttgttaacaaccaagtcataattttaagtcttgttataggagctagaattttattcaagggacaactgatttgattagattagatgctgtgcactgcatgtttccttcaacaaatgcacaagttgaaactctaacaatagaatggcattagaaggaggacctttgggaagtaatttggttttgatgaggatggagtccccacaatggggttagcatcctaataagaagagtaggagactagagccctcttctctcagccatgtgaagataaaacaagaacacctgcaaaccagtaagagggccttcaccagacactggctctgctggcccagattttaatctttgaattcccacaactgtgagaaacaagtatatgctgtttaagccactcagtctacagttgtttgtagcagcagcctgagcag

SEQ ID NO: 578103 - DNA, 520 bp, Homo sapiens
aaaataagtgcactttcccctcctttcttcagtgactagaaaacttccatacttttaaaataatcaaataataatttagagagcaacagccctcaactctttgctggtgcttatcacactgcctttcttcactccattcttagctctgctagtttcttcttgtctgtaatgataataagggaatgtgggtgggtcagcacttctgtgcctttccaaatttaccttccaaaaagccaaccaaataaacaaccaaaaaattgtgcaacaaaacacaaatagcattccaacagcttggcaagtgatgcattcacctgagattgagtggttttaggcggtcagtaacaaaatgcttctttgctgtctcagtagaaaggcaacaaattcttcaaagaaaccaagaaggttactaccttgacaacgtctctcattaccgtcctcctcttatgtcytttctctccacattatctgttgtgtgtccactatagaaggctacaaaacatacagcagaaaggatggcttg

SEQ ID NO: 578104 - DNA, 462 bp, Homo sapiens
cggctgtggtggcttgcacctctagtaataacactttgggaggctgaggtgggaagattgcttgagctcatgagtttgataccagcctgagaaayatagtaaaacctcatatctataaaaaaattaatttaaaaaaaggcagagcaaaaacaaatatgaaagaaaacattagaaatcagagctcgggcaaagagttcaacgtaagcaaagcagctctgccctgggggacctctggagcatcccggcttcctgtagaggccccaccacatggccctttcccatcactgggaaccgtcttctgtatcatgccaggattttcccccaaacttctcaacctaatttattcagccaaaacatatatatttcttgaatccttactaaaagcaaggcactgttcaacttaatgaaaatatgtcaacgatataaaacaaaaatgtttaccctatgcaaattatattccag

SEQ ID NO: 578105 - DNA, 462 bp, Homo sapiens
cggctgtggtggcttgcacctctagtaataacactttgggaggctgaggtgggaagattgcttgagctcatgagtttgataccagcctgagaaacatagtaaaacctcatatctatamaaaaattaatttaaaaaaaggcagagcaaaaacaaatatgaaagaaaacattagaaatcagagctcgggcaaagagttcaacgtaagcaaagcagctctgccctgggggacctctggagcatcccggcttcctgtagaggccccaccacatggccctttcccatcactgggaaccgtcttctgtatcatgccaggattttcccccaaacttctcaacctaatttattcagccaaaacatatatatttcttgaatccttactaaaagcaaggcactgttcaacttaatgaaaatatgtcaacgatataaaacaaaaatgtttaccctatgcaaattatattccag

SEQ ID NO: 578106 - DNA, 462 bp, Homo sapiens
cggctgtggtggcttgcacctctagtaataacactttgggaggctgaggtgggaagattgcttgagctcatgagtttgataccagcctgagaaacatagtaaaacctcatatctataaaaaaattaatttaaaaaaaggcagagcaaaaacaaatatgaaagaaaacattagaaatcagagctcgggcaaagagttcaacgtaagcaaakcagctctgccctgggggacctctggagcatcccggcttcctgtagaggccccaccacatggccctttcccatcactgggaaccgtcttctgtatcatgccaggattttcccccaaacttctcaacctaatttattcagccaaaacatatatatttcttgaatccttactaaaagcaaggcactgttcaacttaatgaaaatatgtcaacgatataaaacaaaaatgtttaccctatgcaaattatattccag

SEQ ID NO: 578107 - DNA, 462 bp, Homo sapiens
cggctgtggtggcttgcacctctagtaataacactttgggaggctgaggtgggaagattgcttgagctcatgagtttgataccagcctgagaaacatagtaaaacctcatatctataaaaaaattaatttaaaaaaaggcagagcaaaaacaaatatgaaagaaaacattagaaatcagagctcgggcaaagagttcaacgtaagcaaagcagctctgccctgggggacctctggagcatcccrgcttcctgtagaggccccaccacatggccctttcccatcactgggaaccgtcttctgtatcatgccaggattttcccccaaacttctcaacctaatttattcagccaaaacatatatatttcttgaatccttactaaaagcaaggcactgttcaacttaatgaaaatatgtcaacgatataaaacaaaaatgtttaccctatgcaaattatattccag

SEQ ID NO: 578108 - DNA, 542 bp, Homo sapiens
tggccctttcccatcactgggaaccgtcttctgtatcatgccaggattttcccccaaacttctcaacctaatttattcagccaaaacatatatatttcttgaatccttactaaaagmaaggcactgttcaacttaatgaaaatatgtcaacgatataaaacaaaaatgtttaccctatgcaaattatattccagtgagaaaagacagatcattaataaaataaatatgtaaaatatataatatgccagaaggtaataagtggcacagagaaaaattaagtttggaagggagctcaggaatgctgggagcaggtagatgtgaaggtagttagaatgctcaaggagggagtaataggcagaagaatggcctttttacatgtccatatccctatatggcaaaaaggacttatggatgtgatgaagttatggatcatgagatgaggagattattctggattacccatgttggcccaatgtcatcacaagaggacttaaaagcaaaagatggaggcaggagagtctgaggcaagaagcgtgacagct

SEQ ID NO: 578109 - DNA, 460 bp, Homo sapiens
aataaaataaatatgtaaaatatataatatgccagaaggtaataagtggcacagagaaaaattaagtttggaagggagctcaggaatgctgggagcaggtagatgtgaaggtagttagaatgctcaaggagggagtaataggcagaagaatggcctttttacatgtccatatccctatatggcaaaaaggacttatggatgtgatgaarttatggatcatgagatgaggagattattctggattacccatgttggcccaatgtcatcacaagaggacttaaaagcaaaagatggaggcaggagagtctgaggcaagaagcgtgacagctagggtcagaatgatgtggttgctgcctggaagggggccaggggccaagggatgcaggcatcctttaaaagctggagaaggtaagaaagtgttctctctcccctagagagagtgtgtgttcttttaggctac

SEQ ID NO: 578110 - DNA, 583 bp, Homo sapiens
gaaggtagttagaatgctcaaggagggagtaataggcagaagaatggcctttttacatgtccatatccctatatggcaaaaaggacttatggatgtgatgaagttatggatcatgagatgaggagattattctggattacccatgttggcccaatgtcatcacaagaggacttaaaagcaaaagakggaggcaggagagtctgaggcaagaagcgtgacagctagggtcagaatgatgtggttgctgcctggaagggggccaggggccaagggatgcaggcatcctttaaaagctggagaaggtaagaaagtgttctctctcccctagagagagtgtgtgttcttttaggctactagaggtgtgctaatttattccagcaatcatagaaaacttatatagataaggtctcactgagaagataacatttgaacaaagattccaaggaggtgagggcaccagctatgcagatatctggggaagagcactcgaggaagaaaaggcaggcaaacagcagggtgcctagcctatgtgcatgaagtagagaacactgggagtcagaaggctaacaggagacaggtcaga

SEQ ID NO: 578111 - DNA, 583 bp, Homo sapiens
gaaggtagttagaatgctcaaggagggagtaataggcagaagaatggcctttttacatgtccatatccctatatggcaaaaaggacttatggatgtgatgaagttatggatcatgagatgaggagattattctggattacccatgttggcccaatgtcatcacaagaggacttaaaagcaaaagatggaggcaggagagtctgaggcaagaagcgtgacagctagggtcagaatgatgtggttgctgcctggaagggggccaggggccaagggatgcaggcatcctttaaaagctggagaaggtaagaaagtgttctctctcccctagagagagtgtgtgttcttttaggytactagaggtgtgctaatttattccagcaatcatagaaaacttatatagataaggtctcactgagaagataacatttgaacaaagattccaaggaggtgagggcaccagctatgcagatatctggggaagagcactcgaggaagaaaaggcaggcaaacagcagggtgcctagcctatgtgcatgaagtagagaacactgggagtcagaaggctaacaggagacaggtcaga

SEQ ID NO: 578112 - DNA, 583 bp, Homo sapiens
gaaggtagttagaatgctcaaggagggagtaataggcagaagaatggcctttttacatgtccatatccctatatggcaaaaaggacttatggatgtgatgaagttatggatcatgagatgaggagattattctggattacccatgttggcccaatgtcatcacaagaggacttaaaagcaaaagatggaggcaggagagtctgaggcaagaagcgtgacagctagggtcagaatgatgtggttgctgcctggaagggggccaggggccaagggatgcaggcatcctttaaaagctggagaaggtaagaaagtgttctctctcccctagagagagtgtgtgttcttttaggctactagaggtgtgctaatttattccagcaatcatagaaaacttatatagataaggtctcactgagaagataacatttgaacaaagattccaaggaggtgagggcaccagmtatgcagatatctggggaagagcactcgaggaagaaaaggcaggcaaacagcagggtgcctagcctatgtgcatgaagtagagaacactgggagtcagaaggctaacaggagacaggtcaga

SEQ ID NO: 578113 - DNA, 564 bp, Homo sapiens
ttaggctactagaggtgtgctaatttattccagcaatcatagaaaacttatatagataaggtctcactgagaagataacatttgaacaaagattccaaggaggtgagggcaccagctatgcagatatctggggaagagcactcgaggaagaaaaggcaggcaaacagcagggtgcctagcctatgtgcatgaagtagagaacactgggagtcagaaggctaacaggagacaggtcagagagagggactgggttgggtcaactcacactcagcctcactggctattgtaagaacttcragttattctgagacactcagtataggagagtctatgaatatttatagaaattctgaacgtttacaagatgaataaaagttgtatgctagcaaacctattggttgggtggggggaagcccagatttgtaacatttgctgatttccactgtgtaaatatttctactgacggtttgacaaacacttcataaaatttctgggtacttaattatcagctccaggagagcgctgcatgtatgacaccacatttgccaattccacactagattc

SEQ ID NO: 578114 - DNA, 564 bp, Homo sapiens
ttaggctactagaggtgtgctaatttattccagcaatcatagaaaacttatatagataaggtctcactgagaagataacatttgaacaaagattccaaggaggtgagggcaccagctatgcagatatctggggaagagcactcgaggaagaaaaggcaggcaaacagcagggtgcctagcctatgtgcatgaagtagagaacactgggagtcagaaggctaacaggagacaggtcagagagagggactgggttgggtcaactcacactcagcctcactggctattgtaagaacttcaagttattctgagacactcagtataggaragtctatgaatatttatagaaattctgaacgtttacaagatgaataaaagttgtatgctagcaaacctattggttgggtggggggaagcccagatttgtaacatttgctgatttccactgtgtaaatatttctactgacggtttgacaaacacttcataaaatttctgggtacttaattatcagctccaggagagcgctgcatgtatgacaccacatttgccaattccacactagattc

SEQ ID NO: 578115 - DNA, 564 bp, Homo sapiens
ttaggctactagaggtgtgctaatttattccagcaatcatagaaaacttatatagataaggtctcactgagaagataacatttgaacaaagattccaaggaggtgagggcaccagctatgcagatatctggggaagagcactcgaggaagaaaaggcaggcaaacagcagggtgcctagcctatgtgcatgaagtagagaacactgggagtcagaaggctaacaggagacaggtcagagagagggactgggttgggtcaactcacactcagcctcactggctattgtaagaacttcaagttattctgagacactcagtataggagagtctatgaatatttatagaaattctgaacgtttacaagatgaataaaagttgtatgctagcaaacctattggttgggtggggggaagcccagatttgtaacatttgctgatttccactgtgtaaatatttctactgayggtttgacaaacacttcataaaatttctgggtacttaattatcagctccaggagagcgctgcatgtatgacaccacatttgccaattccacactagattc

SEQ ID NO: 578116 - DNA, 526 bp, Homo sapiens
actgtgtaaatatttctactgacggtttgacaaacacttcataaaatttctgggtacttaattatcagctccaggagagcgctgcatgtatgacaccayatttgccaattccacactagattctattgggaacaagctgtatgagagtcaactggtggcagaaataaggaagtcctcaataaaaatcagcatttacttttgacagatgtgagattctggaacttatttctctttacttgctctgcctggtgattaaattctgattttaaaagaaatagttttaatttcttatcagaatgctgccaccaaataaataaaatacgtactttaactatatgcaatcttgtctatattatactgttgtcaacagaaacattatcaggggccaacttcatgaaaggagatatgtgatagaagatggagttgttggaatggaaaaaaaaaagtcaaattttactttggattaatcagagggaagaaagcaaacagataggaaaggaaaggcaggcttagccaagttgaagag

SEQ ID NO: 578117 - DNA, 591 bp, Homo sapiens
tgtgtacacaccaaaacaaggctattatttaaaattttgagatcctttgtactcctcttcagagttagtttagaattcccaaggatcctttttgctctaatccattgtgtaaaaacacaagacctatgcagaccctctgtagtgattctctaaactgtagccacactaggggcttataagattactaataattagaagatgcaaaatttaatccagattcaggcttttttcttgttgttgttgacactcaactttcagtatattaatttctgaaggttattgttcacaaaaggtatcagttaaaattgttatagagtagtaaaaaatagtaaaaaaggctgggcaagggcaaaccgtgaatttaaagttaaactaacaaattgtaacgtcacattttattccttagagtaaaatattttcattattttagttaattctcattttgtatttcttgactattctttaattacatatcattatttaatttatatttacctaaaaataatggatacattaacaaaaggacagatcttttaaaatactttgggaatktttgggctgaagaaaggacaattataatagaataatata

SEQ ID NO: 578118 - DNA, 634 bp, Homo sapiens
tccgtaaggttgtggatggggtatgcactggagcaaaactttgtaggtttccattcctgccgtgccttttttttttccctctatgacattaggcaagttcctaacctctccrttactaagtttcctcatcttttgattaaggatagtaagaatttctaactgataagatttttgtgaggattgaaacagtatgtcacaacggttgcctggcatacagcaaacatagtatcatcatcataatcaatgttatcaccagactgaagtatatatatatggtttatgcatgtgtatctacataacatgtctccctaagtaaactgacatgtgtttatttctgctcaaaggagagtaactaaagtgaatgattttttatttatttattttttattatactttaagttttagggtatatgtgcacaacatacagatttgttacatatgtatacatgtgccatgttggtgtgctgcacccattaactcatcatttaacattaggtatatctcctaatgctatccctccccccacccctcaccccacaacaggcccagtgtgtgatgttccccttcctgtgtccatgtattctcattattcaattcccacctatgagtgagaacatgcggtgtttggtttttt

SEQ ID NO: 578119 - DNA, 659 bp, Homo sapiens
taataggcaatacactacaatagggtcttattagaaataatggggcatacattctcagttattctttttatgtaggacatgggatttcaggaacagatcatttgagtttcagtgaaagagcctgtgttcatttctttcatcatttatacctaattacaagcattctcatggtaaaggcatttttttcataagaataacattatactttccaagataattgggttttctatgctaagcaaatttgaatttattttcacagttgattgaggttgcttattaaaaaaatttggtcaaggaatgaattctagagacacaagggtaattatcacattcagcccctttaaaaggctgtaaatgaggttggcagcacagtccaagtctctagagttcaagtgacgtccttacctaattcctgggtaacttccttcaaattcatgttctgtattaacctgagaaaactgttattgtcaattaataagmaagacatagtactgaaacagttttatcaaattatagacagatagaaatttgtttaaagtaaaatgagtaagaatggagtatcatacagttacatggaggatctgaaccactttgacagagaaaagccctcaatttctagaccatgtttagagctttagaaaaggagtttctaaacccaa

SEQ ID NO: 578120 - DNA, 295 bp, Homo sapiens
tgtctacctgctaataggacaggtacatgttcactagtttttctgattcccaaaatttaatttgtaaatgggactgaacaacttcttgtccctctaatgacaccaaccagacaaaaaagagttattccttgaatccctctatttgtagggttaggactttctgcttccactatygcccttggagctggaatagcaggcgtttcaacttctgtcacaaccttccacagcctttctagtgacttttctattagcattacagatatatcacaaactttatcagtccgtcaggcccagg

SEQ ID NO: 578121 - DNA, 611 bp, Homo sapiens
ctatttagtcataaaaagattaaaccatgccatttgcaacaagttggatagaactggaagtcattatcttaaatgaaacaagtcaataacaaaaagataaatatcaaatgtttacacttacatgtaggagctagaaaaattgaacacataaaggtagagagtggaaaaaatagattacagagacaggaaaggatgagtcacgggtaaaggggaggataaagagaagtaggttgaaaggtacaaataaactataagattaaagtaataaatttaatgcttaacagcagaatatggtgaccatacttgaaaaaaaaggtttgtactcaagtgatgggcactgtaaatgctctgattgggtcactatgcataatacacacatgagaaaatttcttatgtaccctataaatttgtccaaacagaaatttagaaaattgtaaagtttaaaaagaatatggcacatacacaaaaaagccattttatacttaagaaaattataagatagatgacagtttctaccactttttataactttagtayactcaacgaacattttttcttgaatttttgtattattaactttattctaggtaaatgtatataaaataacaata

SEQ ID NO: 578122 - DNA, 611 bp, Homo sapiens
ctatttagtcataaaaagattaaaccatgccatttgcaacaagttggatagaactggaagtcattatcttaaatgaaacaagtcaataacaaaaagataaatatcaaatgtttacacttacatgtaggagctagaaaaattgaacacataaaggtagagagtggaaaaaatagattacagagacaggaaaggatgagtcacgggtaaaggggaggataaagagaagtaggttgaaaggtacaaataaactataagattaaagtaataaatttaatgcttaacagcagaatatggtgaccatacttgaaaaaaaaggtttgtactcaagtgatgggcactgtaaatgctctgattgggtcactatgcataatacacacatgagaaaatttcttatgtaccctataaatttgtccaaacagaaatttagaaaattgtaaagtttaaaaagaatatggcacatacacaaaaaagccattttatacttaagaaaattataagatagatgacagtttctaccactttttataactttagtatactcaacgaacattttttcttgaatttttrtattattaactttattctaggtaaatgtatataaaataacaata

SEQ ID NO: 578123 - DNA, 478 bp, Homo sapiens
aaactttatcttcatagtcctaaaagcaaaaattaattacataggttaaaaaaaatgactgtaatcttaccacctggttttccttattcaaattcgcctctgttatatgacacacatacacacatacacaaattgaattctgctcagtyttttctgagtaatattgatgcaatgggacaccttacttttttattacaatttttttatctgtatatttagaagatttatcagactgaatactagatttaataataatgtaagtatgctgggaaaatcacattgaagcaagtttgcaaaaaaagatataaatcacttctgagtttaaaaagaacaacaaagtcaactgggcatggtggctcacacctataatcctagcactttgggaggctgaagcaggcagatcacttgagatcaggagttcaaaaccagcctggccaacatggtgaaaccccatctctaataaaaatacaaaaaaatt

SEQ ID NO: 578124 - DNA, 478 bp, Homo sapiens
aaactttatcttcatagtcctaaaagcaaaaattaattacataggttaaaaaaaatgactgtaatcttaccacctggttttccttattcaaattcgcctctgttatatgacacacatacacacatacacaaattgaattctgctcagttttttctgagtaatattgatgcaatgggacaccttacttttttattacaatttttttatctgtatatttagaagatttatcagactgaatactagatttaataataatgtaagtatgctgggaaaatcacattgaagcaagtttgcaaaaaaagatataaatcacttctgagtttaaaaagaacaacaaagtcaactgggcatggtggctcacrcctataatcctagcactttgggaggctgaagcaggcagatcacttgagatcaggagttcaaaaccagcctggccaacatggtgaaaccccatctctaataaaaatacaaaaaaatt

SEQ ID NO: 578125 - DNA, 184 bp, Homo sapiens
gaattcacattgttggctacaccaaaggcaaggaattaacataatcaaattaraaaaagggtctagatttgttggaatttcttacaacaattattttttttttctttttgacaggatgatcactatgatgatcccccaatttagtgactctttgaaaacttaaaatataggctaggcattgata

SEQ ID NO: 578126 - DNA, 465 bp, Homo sapiens
actccatacctattagcggtcatttctctttccccactgcccccagcctctggccattcctaatctaccgtctgtctccatggatttgcctattctgggcatataaatgaaatcatccaacatgtggccttttgcatctggcttctttcactttagtataaygtttccaaggttcatccttgctgtagcatgtattagtacttcattctttttgtgcgtgaataatatccatttatatcaatatatggcattttatttatccattcatcatgattcatcttttgtgttctttttgcttgatataagaaaatgatatcaacatatttcacagtaattttgtctctcaatttttctctatagtttctggttagttgacccataaaaatggttagttatccattcattgtgagtggataaatgaaatgttgtatattcatgtaaatggatattattgttttgtttcta

SEQ ID NO: 578127 - DNA, 445 bp, Homo sapiens
ttaacctacttagcacttaccatcacgtgttttagttgcaggtgtttccttagcactttaccgtcatgtgttgagtttcagactgtgcctggcactatgcctggcacaggctaaccctcaaatcttccctaaacttakttcaattgaatcatgcggcactgtagttctttagtgcttactattcattcattcattcgttcattcctttttggacactcactatgtatcaggcattaaacaggccatatgatctctcatggggcagaagttctattgggggagatagataataaagccgattctgaggtgagaaatggactccataggcttcctgaccatcaactgcctcatctctgcttgaactctctctgtgatgagaaactcactttctgaagaaatctaatccaatgctggtagactcagactctcctttgattgagctgga

SEQ ID NO: 578128 - DNA, 445 bp, Homo sapiens
ttaacctacttagcacttaccatcacgtgttttagttgcaggtgtttccttagcactttaccgtcatgtgttgagtttcagactgtgcctggcactatgcctggcacaggctaaccctcaaatcttccctaaacttagttcaattgaatcatgcggcactgtagttctttagtgcttactattcattcattcattcgttcattcctttttggacactcactatgtatcaggcattaaacaggccatatgatctctcatggggcagaagttctattgggggagatagataataaagccgattctgaggtgagaaatggactccatargcttcctgaccatcaactgcctcatctctgcttgaactctctctgtgatgagaaactcactttctgaagaaatctaatccaatgctggtagactcagactctcctttgattgagctgga

SEQ ID NO: 578129 - DNA, 600 bp, Homo sapiens
tgcccagacatcgacgaacatctataagtatgaagaccatccaggaaaatatgacatctccaaacaaactaaataaggcaccagggactaatcctggaaagacagaaatatgtgacctttcagaggattcaaaatagctgtttttaggaaattcaaagaaattcaagatagcacagagaaggaattcagaattctatgagataaatttaacaaagagaccaaactaatgaagaaccaagtagaaatagaactgaaaaatgtaattgattattccctcaagtaagtttttttaatttcatattttatttttttttatatatatatttttattatactttaagttctagggtacatgtgcacaacatgcaggtttgttacatatgtatacatgtgccatgttggtgtgctgcacccattaactcatcatttacattaggtatatctcctaatgctatccctccccactccccygaccccacaacaggctctggtgtttgatgttccccttcctgtgtccaagtgttctcattgttcaattcccacctatgagtgagaatatgtggtgtttggttttttgtccttgtgatagtttgctgagaa

SEQ ID NO: 578130 - DNA, 598 bp, Homo sapiens
gactagcatactggtaatcagtacaggttaaccatttcctagtcatcaaggtaccttaaaaagcaaaacagtaatcagaagttagaaggwaagcatagaataatttgaacaaccagtaacaatagctaatattcgtaaagtatttcctatgtgccatgttttgcaaacactgagttgtttagcacacacaaaaacctctgaagctggcactatcataattcccattttataagtggaggaaccaagactaagagggctactattctgaaagtattttgaggaatatttaatccagacttaggtaagatgcaataaattataactaccccagaatagaattctttattccagtaaccagaacacattcacttttcccctccccttcagatggcatagcagaagctagccaagtattaccagcaacttctgtttctgaaggttattttgtctcaccatttcctcaaactggtcagtcgcctatttctgttttcttttctattatcctcatcttcttgagaatagagccttcatcatttcacctttaccatcttgtggagctttctgctttcttcctttcttatttgtattatatgtgtgc

SEQ ID NO: 578131 - DNA, 598 bp, Homo sapiens
gactagcatactggtaatcagtacaggttaaccatttcctagtcatcaaggtaccttaaaaagcaaaacagtaatcagaagttagaaggaaagcatagaataatttgaacaaccagtaacaatagctaatattcgtaaagtatttcctatgtgccatgttttgcaaacactgagttgtttagcacacacaaaaacctctgaagctggcactatcataattcccattttataagtggaggaaccaagactaagagggctactattctgaaagtattttgaggaatatttaatccagacttaggtaagatgcaataaattataactaccccagaatagaattctttattcyagtaaccagaacacattcacttttcccctccccttcagatggcatagcagaagctagccaagtattaccagcaacttctgtttctgaaggttattttgtctcaccatttcctcaaactggtcagtcgcctatttctgttttcttttctattatcctcatcttcttgagaatagagccttcatcatttcacctttaccatcttgtggagctttctgctttcttcctttcttatttgtattatatgtgtgc

SEQ ID NO: 578132 - DNA, 592 bp, Homo sapiens
attgttccaggtcccaccactccccattcatacactccccctgattcccacatttatgttgctttcctagtccttatgagggtgcaaacttgaaaacactgcaaaagaaaatggtgaggtcctcaccagagtgtactctcctgattagggaaaactggggacttatcagcacctctgtgaggtcctctttggcctgaaggcctttgaaatgttggtgatctttggcacaaacagaaagaaaagaagartgtgtaatgcaaaatcaggcttggagaattttagacctttctaatttttagatttcatttacttttagtgaaaacacactgctacatgttttgacctgactttctgcaaactgtcacttctggaaaatagcaaatctacacccccattatcataagggatcgttattatccttctggcgaaaatcagatgatgagttagactttaagagttagacttttaaaagtgtaactcttggccagttgtggtggctcatgcctgtaatccaagcactttgggaggccgaggcgggcggatcactcgaggtcaggaattcgagaccagcctggccaacatggcaaaaccc

SEQ ID NO: 578133 - DNA, 592 bp, Homo sapiens
attgttccaggtcccaccactccccattcatacactccccctgattcccacatttatgttgctttcctagtccttatgagggtgcaaacttgaaaacactgcaaaagaaaatggtgaggtcctcaccagagtgtactctcctgattagggaaaactggggacttatcagcacctctgtgaggtcctctttggcctgaaggcctttgaaatgttggtgatctttggcacaaacagaaagaaaagaagagtgtgtaatgcaaaatcaggcttggagaattttagacctttctaatttttagatttcatttacttttagtgaaaacacactgctacatgttttgacctgactttctgcaaactgtcacttctgkaaaatagcaaatctacacccccattatcataagggatcgttattatccttctggcgaaaatcagatgatgagttagactttaagagttagacttttaaaagtgtaactcttggccagttgtggtggctcatgcctgtaatccaagcactttgggaggccgaggcgggcggatcactcgaggtcaggaattcgagaccagcctggccaacatggcaaaaccc

SEQ ID NO: 578134 - DNA, 533 bp, Homo sapiens
tgccacattttttttttatccagtctaacattaagggaatttgggttggttccaagtctttgctattgtaaatagtgctgcagtaaacatacatgtgcatgcgtctttacagtagaatgatttataattctttgggtatatactcagtaatgggattrctgggtcaaatggtatttctggttttagatccttgaggaatctccacactgtcttccacaatggttgaactaatttacactcccaccaacagtgtaaagacgttattgtataatattaaagttaataaatggagaaattttgagaataataactgatagcaaatatgtggtggacaagaaccctcatatgctgttatctgcaaagtaaattagtacaaacactttgataagcactttatcaatattcactaatgtagataatttttatatccttagagccagcaattcctctcccagacataaaaataaagtgtaacatttttgtctaaagtttttgtggcagcatgattttcataacaaaagaaagaataatag

SEQ ID NO: 578135 - DNA, 512 bp, Homo sapiens
gaattctaaattcactgagggtggcctaataaagagacaggacatacagggaccacacagctgagaagcccatgtgaagatggaagggagactgggaagatgtctgcaagtcaaggaatgctaaggaacaccaaggaatactccaataccgggagctgaatacgggaagctgaataccggaagctgaatgaataccggaagctgaatgaataccggaagctgaataccggaagagaatgacgtgggtttctcctctgttgcctccagagggagcaggctactkctgacttcttgattttgaacttctggcctcctgaactgtgagagaataaacttctcttgctttaagccaccactcttgttttgtggtaatttgttatggctaccccagaaaactaatacagcaaatacaggtgtgtgaagacctgtgggcgcacatgggaggagtgacttctcctccctggaagatcagggggggcttcaaggaggaggtgaccgtcaaactgagccct

SEQ ID NO: 578136 - DNA, 369 bp, Homo sapiens
gagaacaaaaagagaactccatatagagtactcaatatatagttacatagtaactatatgtaatgtcaatagtaactatatatttcctgttgtattattgacaaaaatgcataacctaaatccaatcactacaaaaattagaaaaattccaattgaggctcattagaaaaaaaaaaagctgatcaatactygtcaaaagtgtcaatgtcatgaaagagaaagaatgatgtaggaatgatcacagactgctggagactaagaagaaataccaaggaaatgcaatgtgggattaagttatacatttttgtctataatacaacagtatagttactattgacattaatatgcagcaattctcatacattgttg

SEQ ID NO: 578137 - DNA, 552 bp, Homo sapiens
caatttttatgtcttcccagtaaattgttcctttcattaagtgatcattttacttaatactggtttgggcctgaatactttaataatttaaatattactctaccggtgttctttttgcttttatttgtctgtgttttctatcatttagttactytcaaacttttaaaccattaggttttgtggtgtctgtctgtgtgttttaataaccaacttatgactaagtatatttcttgctgaaaatataatagattttgtgaattttcaacttcactagataaagccaaattgttctccaaagtatttaaataaatttctatcttttgcagcagtgtattaatatgcctcttggtttacaatctgaacaatatttgtaatctgtagtttttttaatttttatgttatcatgtgggtgaaacatgctgtgtctttataattcaatttgaattgttttattacaaatagactttgccatattttcacatatatattcaccaatgatacactctccgatgtgacatgcctgttaaccttttttgcctatttctcaaattg

SEQ ID NO: 578138 - DNA, 520 bp, Homo sapiens
aattgacagtgatcaaatccagatcttcatccctgagttttctcttaggtttgggaatagacattcattygtcactaaatggagttgtggaagttggcctcctaaactgattcattctcttgcactgaatggagttgtggaagttggcatggctaaaattttcccattcacatctgtcagttcaacatgctattggacatatatttattgtgtgattccaatgtactacagactctgctgtgggcattaaagtattctatcagcagaatgtaatggtcctttttactttgaaggatcactccaattgcattgtgcagggcagatgtaaagaccaagcccaaggcctgaagataaattaagttgcccttagagcaatctaaacaaggtatattatccctctcactaaggacattgatactatggttttagtggcattaacaggacttgagaaactctgagaaaataaaatatatctatttaatgtttggtactataggtgaggcaagaagtggaattaaaa

SEQ ID NO: 578139 - DNA, 520 bp, Homo sapiens
aattgacagtgatcaaatccagatcttcatccctgagttttctcttaggtttgggaatagacattcatttgtcactaaatggagttgtggaagttggcctcctaaactgattcattctcttgcactgaatggagytgtggaagttggcatggctaaaattttcccattcacatctgtcagttcaacatgctattggacatatatttattgtgtgattccaatgtactacagactctgctgtgggcattaaagtattctatcagcagaatgtaatggtcctttttactttgaaggatcactccaattgcattgtgcagggcagatgtaaagaccaagcccaaggcctgaagataaattaagttgcccttagagcaatctaaacaaggtatattatccctctcactaaggacattgatactatggttttagtggcattaacaggacttgagaaactctgagaaaataaaatatatctatttaatgtttggtactataggtgaggcaagaagtggaattaaaa

SEQ ID NO: 578140 - DNA, 520 bp, Homo sapiens
aattgacagtgatcaaatccagatcttcatccctgagttttctcttaggtttgggaatagacattcatttgtcactaaatggagttgtggaagttggcctcctaaactgattcattctcttgcactgaatggagttgtggaagttggcatrgctaaaattttcccattcacatctgtcagttcaacatgctattggacatatatttattgtgtgattccaatgtactacagactctgctgtgggcattaaagtattctatcagcagaatgtaatggtcctttttactttgaaggatcactccaattgcattgtgcagggcagatgtaaagaccaagcccaaggcctgaagataaattaagttgcccttagagcaatctaaacaaggtatattatccctctcactaaggacattgatactatggttttagtggcattaacaggacttgagaaactctgagaaaataaaatatatctatttaatgtttggtactataggtgaggcaagaagtggaattaaaa

SEQ ID NO: 578141 - DNA, 438 bp, Homo sapiens
aagggatgtaggtaaattggaacacatacattaatggtgggaatgtaaatggtgaagccactgtgggaaacattctaggagttcctcaaaatgctaaatacagtatacacccaagattaatgaaaatgtatgtccatacaaaaacttgtaaatgaacatttatagcaacattattcataatagccaaaaagtggaaacaaactaaatgtccatcaactgatgcatggataaacaaaacgcattatattcataacaatggaatattatttggcaataaaaagaaatgaagtactaatacatgttacaatacgaggcaccttgaaaacatggtcagaagaagccaacacaaaacaccacatgttacataaattcatttatgggaaatgytcataataggtaaaaaaaaaaaaaaaaaaaaaaaatgaaaataccaggtaa

SEQ ID NO: 578142 - DNA, 514 bp, Homo sapiens
caaaaagaaaaattttttttctgactcccagggactaggctgagtgtggggagtcaaaaaaaaaraataaccatgaatgagtatttcatttcagttggaagtgataaaagtttccacaattagactggggggatggtttcacaactatgtgaatatactaaaattcactgaaatgaaaaatttaaataggtaaattttatggtatgtgaactagaacttaacaaaactttaaaaaatagattagctctgtgtgtgtgtgtgtgtgtgtgtgtgtgtgtgtgactactaccaccacctagagataatcatgttaatatttttgtgtataattcagacttttctgtaagtatgcatacagaacatgcattctaatgttaatatattgatcatatatgtgcatatttataagtgtatgtatatacatgtaaacatacccatatatgcatgtatatgtgtatatatacacgtgcatgcatatctgtatatgtatgtatttactcaagtatgtatatat

SEQ ID NO: 578143 - DNA, 514 bp, Homo sapiens
caaaaagaaaaattttttttctgactcccagggactaggctgagtgtggggagtcaaaaaaaaaaaataaccatgaatgagtatttcatttcagttggaagtgataaaagtttccacaattagactggggggatggtttcacaactatgtgaatatactaaaattcactgaaatgaaaaatttaaataggtaaattttatggtatgtgaactagaacttaacaaaactttaaaaaatagattagctctgtgtgtgtgtgtgtgtgtgtgtgtgtgtgtgtgactactaccaccacctagagataatcatgttaatatttttgtgtataattcagacttttctgtaagtatgcatacagaacatgcattctaatgttaatatattgatcatatatgtgcatatttataagtgtatgtatatacatgtaaacatacmcatatatgcatgtatatgtgtatatatacacgtgcatgcatatctgtatatgtatgtatttactcaagtatgtatatat

SEQ ID NO: 578144 - DNA, 595 bp, Homo sapiens
gtctctataagtaagaggagtctgataccctcactatacccatgtagaaaattttgactggttacaaccaaacctggtaattctaaagatcaacttagaaataactaagtggtccagctatagccaatgagaagtaagggggagttttctggaaggtctttggaaaataattttccaccttgatcaaaacagatgccctcttgtctttgggttctatgaagaagtattgcttagagctgcagcaactcttttgtaaccatgagagaatgagcctgaaggtaagagccaaatgctaataatgccagagaagaaatatggaaaacatctagttctcaatacagctctcccatcacagaactgatcaaccctggaattgcctacctctacacttctcattctagaaaatgttaagtatttatatcacatatgttcatgtacatgtgtgcaagggtatactgctgcccaccaccatatctattatgatgtaggactgtgtttgcctagagaacgaggcatattttaaaaattttgcataaaagcacaaagctagtggaaawgcttttagttgaatgttcttttctttgcaatgagacca

SEQ ID NO: 578145 - DNA, 564 bp, Homo sapiens
ctcgggaggctgaggtgggaggatggcttgagtctgggaggcagaggttgcagtgagctgagatcgcaccactgcaactctagcctgggcaatagagccagactctatctcaaaaaataataataataataacaattgctgtctgtatccttcctatggctacaracaaatttgaaagatgacacaaaggattgtatcaagcaagaattttccaatagtagtgtttgttgctcagagaaagagacagagaaagagagaaatgaaatggaagcatctgtttctgcaggtggataacctgctaggttcctggaagctcccaattttttcccaggtaaggagtcatgagccaatcacttgccacctctattagtaaacacctgtaaactagccttcctcattttcataaatggagcatcagctgactaccactcataaaggctttaccataggccatagactagccactgtgccaagcacttcacagacactaactggatgaatcctctggaaacctcatgacattaagtatatcttgtgtcagagatgctctgggtcacccaacca

SEQ ID NO: 578146 - DNA, 616 bp, Homo sapiens
tttctctcatttctgtattacaatggggatgtaagaaatagtattcttgctgtctgttcaaagattagggcaggacagagagaaaagccraagaaccaggcagcattccacatgctaccgtgaactaccccacccacaatcttcccatcagatgttttcctcatgacttgtcatcatctttactcatttgtacacatgagcactgtgccatgagagaggcctcagtgttgattcccagatttctgctccaagaatgtaaagaccccctgaaacttggtcattgcagtagtcccattactagcccagtgcttggcacaaagaagataaccaataaatatgaactgagtagatgcaaaagaaaataacatctggcaaaactgcagtccttatcccaaaacatttctttggaagcactgtgctggaaaagcagcctcacaggaaacactattataaagtgaagctcagggatataagaaagaagagagataaaagacttctaaataatggtaaaatacaccttatatttagcgtaaagctgttgtctattatctgcttggtttggctaaaccaggctttttcagtgaagaccctgtaaatgtttttggactagataact

SEQ ID NO: 578147 - DNA, 445 bp, Homo sapiens
gtagtcccagctactagggaggctgaggcaggagaatggcgtgaacccgggaggcggagcttgcagtgagccgagatcgtgccatccagcctgggcaacaaacagagcaagactccgtctcaaaacaaacaaacaaacaaacaaacaaacaaaaactttttagttgttttaatagggtttgtaatgtaagtttgatatggtttggctctgtgtccccacctaaatctcaccttgaattgtaatttccataatccccacgtgtcaagggcaggaccaggtrgaagtaactgaatcatgggggcagtttcccccatgctgttcttgtcataatgagtgagtctcactagatctgatggttttataagcgtctggcatttccgctgcttgcattcattctctctcccactgccctgtgaagaggtgtcttccaccatgattgtaagtt

SEQ ID NO: 578148 - DNA, 546 bp, Homo sapiens
aaaatctagatgaccttgggactggtgatgactttttagatatgataccaaaggtacaatccataaaataattgataaactggacttcattaaaattaaaaatttttggacactgtcaaagaataaaaacacaagccacagactaagagaaaatatttgcaraagacctatctgataaaggactattaatccaaattatacaaaggtttcttaaaactcaacgacaagaaaacaaacagcctgattaacaaatgagccaaagaatttgacacctcaccagagaagacatccagatggcaaataagcatatgaaaagatgctccacatcgtatgtcatcatagaagtgtaaactaaaacaataagataccactacacacctattagaatggccaaaatctggaacactgataacaccaaatgctagtgaggacgtggaacaatacagttgctggtggaaatgcaaaatggtgtagacactttggaagacagtttggcagttttttggaaaactaaacacaattttaccatatgatccaacaatagtg

SEQ ID NO: 578149 - DNA, 248 bp, Homo sapiens
tatcaaagtacaatggctatcttgaggaaaacctcttgtgtgatttggggaaattcgttttctccacamtgagcttaactgctttctagtatgtacatacatacatactgtcttacgagattggtggttacatagtcaaatatgatttttgatattgtacaaaaaatatatcaacattttaaagatctgtattgtttggtaaagcaatattttctaaatgaccagtttgtaatattacaaaattatgc

SEQ ID NO: 578150 - DNA, 248 bp, Homo sapiens
tatcaaagtacaatggctatcttgaggaaaacctcttgtgtgatttggggaaattcgttttctccacactgagcttaactgctttctagtatgtacatacatacatactgtcttacgagattggtggttacatagtcaaatatgatttttgatattgtacaaaaaatatatcaacattttaaagatctgtattrtttggtaaagcaatattttctaaatgaccagtttgtaatattacaaaattatgc

SEQ ID NO: 578151 - DNA, 538 bp, Homo sapiens
tgataaatattcaagatgatggatacaccaagtgccctgacttgctcattacacagtctatggatgtaacaaatactcacatgtgccaccataaacatgtaaaaaattatgcatcaattttttaaaagtcaaccaatcaataaaggtaaagagaagagagtaaaaaatcacctgaaatttcaccatctagtgataaccattttttttttttttttgtgggggctcagtctggttctgtcgcccaggctgtagtgcagtggcacgatctcggctcactgcaagctccgcctcctgggttcacgccattctcctgcctcagcctcccaagtagctgggactacaggtgcccgccaccacgcccagcaaattttttgtatttttagtagagacggggattcactgtgttagccaggatggtctcgatctcctgacctcgtgatccaataaccgttattaatatttagtaatcatcctttcatgyatatgattttgcatatatatatttgtgtatatataaatcacaaataagattatttat

SEQ ID NO: 578152 - DNA, 540 bp, Homo sapiens
gggcttttatgctgcatgatcacatggaagaaagtgagaaggcaagagagtgtgagagcaagaggaggtaaaggggctattgggatgaaatggatatggggctattgggatgaaatgaatgcatttttcatgtgagaagaacatgaattttaagggctggggcatggtttctgtgtatgtctatggtttgaatgtgtttctctaagtttgtgcattggaaacttaatccccaaaaaaacagtgttgagaggtggaacctttaagatgctctggcttcrtgaatgaattcatgttgttatcttgacagtgggttagttaacatgggagtgggttcctgataaaaggatgagttcatcccccttacctcctagaactctaggaggtagaactataagaaataaatgtctgttctttataaattacccagtctcagatattctgttataacagcaaaaaacagactaagacagagaattggtaccaggaatggttttagaagaacagaatttttaggatgagttttcttaattggtttggggg

SEQ ID NO: 578153 - DNA, 610 bp, Homo sapiens
ttccttcctggatgtcagatgccatttgtcacaccacagattttgctgtctatcaggatctaggtaaaaaggtatttcagagcttaaggagtttctctccatatgagcatttttatccaaagaggcagtctcaatttctctgagaagtttagaaagttggagaaaagtacaacagtgtgtgcaccatggtatttggtaggttagttttgtagctcaactacttcctaattttagaatctacattaattcatttattcttctaattcatttattcttctagggtgatttcaacaaatctatgtgtccatggtctaacatgaactacatgtatccatgatctaaacatgaactrcatggctgtaaacagttttcactgatgacaaacttagtaccagcgagtagttgagaaactgggagaatcaatttattaaaagttgcagatatgagcatagtttgacactatgcttcaaaaggcttaaaaaaacagtgcatacctagtcacatagtaagtttagttacaggactataaggtgaggaaataattagacaattgtgcaagatttatgaacacaaatgttcattgtagaatcatttatgatggagaaaacct

SEQ ID NO: 578154 - DNA, 495 bp, Homo sapiens
tgtctgtaagtgaaataaatcgtgttcacattaacagtctaaattgcactgacttatgtggtatctgcacagcctcatctatgtttgttctgagacatgtcaagggctaagtcacaaataagtcagatctacccctctggtcccttactcaagagggcatttcatcaaatctcactgctttaaaacccatttaatggcttccaagtctctattttcaatttgaacatctcccttcaaatatagactcatacatcttcttttggatataaaataggtttctaaaacttaactttaaagtgtaatcccatttgtgtttccacagctgctttttctrcagttttctcaatctcagtaaatgacaactccaaatttctagatacttggatgaaaaaaattatattaatccttgattactctctttttgtaatattcacatcagcaaaacatgtctgttcaaacttctgtcctaactgctctcttcttgctttcttgagg

SEQ ID NO: 578155 - DNA, 567 bp, Homo sapiens
accccatctctactagaaatacaaaaactatccaggcgtggtggcatgtgcctgtaatctcagctactcaggaggctgaggcaggagaattgcttgaacctgggaggcagaggttgcagtgagttgagattgagccactgcactccagcctgggcaacagcaagagtctgtattggaaaaacaayagcaataacaacaacaaaaaaaattacaaaatattctgaatagataaatgttaactggttttacaacataagtaaaatggacttctaataatgaagtcactttctcctccttttgtagtacagagaatggtagctttaactaggtataataataacacaccagatatctttgttcaaatacatataatctaactttagacagcatagatatattaaatcacaaaccaaggagactcaaatgagaatcatttcctttgtgcatgcttaaacatttctttcatctttccaaagcttaagaatgagaaacaactttagagatttgcagaaaaatggcaagaattaggcccaatcacatactcatcacaaaattctggaaaacaca

SEQ ID NO: 578156 - DNA, 539 bp, Homo sapiens
ctccactaaaatataaaaattagctgggcgtggtggtgggcgcctgtaatgccagctactcgggaagctgaggcaggagaatcacttgaacccaggaagcagaggctgcagtgagccaagatcgcaccactgaactcagcctgggactccatcaaaaaaaaaaaaaaaggcatagggtggcaaattgggaaaaaaaaaaaaatcaaactttccatggcctttaagagagacctatcttacatgttatagcccccagrggctcaaagtaaagtgatagagatctgttatgcaaatggaaaacaagaaaggtcaggagttgctattcttgtatcaagtaaaacagactaaaccaacaagagttaaaaaaagaaaaaagacaaagaagggcattacataatcagaaagcattcaattcaacaagaagatttaactatcctaaatatatatgcacctaacattgaagcacccaaatttataaaacaaatacaactacacctaagcaaagaaatagacagccatgctatactagtggaggactt

SEQ ID NO: 578157 - DNA, 523 bp, Homo sapiens
cacttccctatgagacggaagacggacttctaatcaggtaccagagagggctctgccaacttcagggctttgatgaataagaatggttsagagcgctcatcataaatgaattcagtataactgagtgagaaagtgagagaaccagagaaataaatccacatgtagaaaatttagtggtgtgaaatgccaaatgccagttaaccaaagctttctttgtcataaagcaacttctataaaaattgctgaaaataaattcttcatggctcaatgtgaatcagtaatttccatttctattacactgttgtttacccaaaaactatttttaatgactaagactcagagtttgccagagtgttttccacaaaacaactgttttgagatactccagatctgtaatcaagtaagtctgaaaaaccccaaatacctcactcacctcttggatacgcataaagcacactaatatataacgttctaaaaagccaatcattaaaactgttttatattgtttaagcatttcctagac

SEQ ID NO: 578158 - DNA, 523 bp, Homo sapiens
cacttccctatgagacggaagacggacttctaatcaggtaccagagagggctctgccaacttcagggctttgatgaataagaatggttgagagcgctcatcataaatgaattcagtataactgagtgagaaagtgagagaaccagagaaataaatccwcatgtagaaaatttagtggtgtgaaatgccaaatgccagttaaccaaagctttctttgtcataaagcaacttctataaaaattgctgaaaataaattcttcatggctcaatgtgaatcagtaatttccatttctattacactgttgtttacccaaaaactatttttaatgactaagactcagagtttgccagagtgttttccacaaaacaactgttttgagatactccagatctgtaatcaagtaagtctgaaaaaccccaaatacctcactcacctcttggatacgcataaagcacactaatatataacgttctaaaaagccaatcattaaaactgttttatattgtttaagcatttcctagac

SEQ ID NO: 578159 - DNA, 523 bp, Homo sapiens
cacttccctatgagacggaagacggacttctaatcaggtaccagagagggctctgccaacttcagggctttgatgaataagaatggttgagagcgctcatcataaatgaattcagtataactgagtgagaaagtgagagaaccagagaaataaatccacatgtagaaaatttagtggtgtgaaatgccaaatgccagttaaccaaagctttctttgtcataaagcaacttctataaaaattgctgaaaataaattcttcatggctcaatgtgaatcagtaatttccatttctattacactkttgtttacccaaaaactatttttaatgactaagactcagagtttgccagagtgttttccacaaaacaactgttttgagatactccagatctgtaatcaagtaagtctgaaaaaccccaaatacctcactcacctcttggatacgcataaagcacactaatatataacgttctaaaaagccaatcattaaaactgttttatattgtttaagcatttcctagac

SEQ ID NO: 578160 - DNA, 612 bp, Homo sapiens
atgactcgttttgctttgcattctcagtgccacgtacagtgcctggaatacaggagggtggcctaaatgttggctgaatgcatgaatggtcatttcttgcagcctcttttcattaccctgtctcatcagctttcttatcagaataagtgcccaagagtgccaaactgtttcagacccttaatcaatttagttctgattctgaccgtgacaacatgatgttcagcacggtasgaatgactgccatctctgaaggagtcttaagattctgtagaatcaatgaaagattctatgttctaacgcctttatctttcaggaaagaaattacaaaatagtttcattgtccagtcatattcactatgagttataagaggaaacattctatctagaactagaaataccatttgacccagccatcccattactgggtaggtacccaaatcatgctgctataaagacacatgcacacgtatgtttattgcggcactattcacaatagcaaagacttggaaccaacccaaatgtccaacaatgatagactggattaagaaaatgtggcacatatacaccatggaatactatgcagccataaaaaaggatgagttcatgtccttt

SEQ ID NO: 578161 - DNA, 612 bp, Homo sapiens
atgactcgttttgctttgcattctcagtgccacgtacagtgcctggaatacaggagggtggcctaaatgttggctgaatgcatgaatggtcatttcttgcagcctcttttcattaccctgtctcatcagctttcttatcagaataagtgcccaagagtgccaaactgtttcagacccttaatcaatttagttctgattctgaccgtgacaacatgatgttcagcacggtacgaatgactgccatctctgaaggagtcttaagattctgtagaatcaatgaaagattctatgttctaacgcctttatctttcaggaaagaaattacaaaatagtttcattgtccagtcatattcactatgagttataagaggaaacattctatctagaaytagaaataccatttgacccagccatcccattactgggtaggtacccaaatcatgctgctataaagacacatgcacacgtatgtttattgcggcactattcacaatagcaaagacttggaaccaacccaaatgtccaacaatgatagactggattaagaaaatgtggcacatatacaccatggaatactatgcagccataaaaaaggatgagttcatgtccttt

SEQ ID NO: 578162 - DNA, 542 bp, Homo sapiens
gccagaaggaagagacttctagtctagggactcagagaatagatcactcagaacaagaagcccacaggaagaccttcctgcccagaggattsctttcaaaagaagcctgggactctaccccagcttcagagagaatattcatcccttaagattcaaaatctgtccatagccatcaacgggcttttgtctggagcaatggctcaggaatctgattcaccaatggatccctaatcagtcagaaatgacaacaaagacttcaaaggcatgcatttagggtcctgagtgagaggcccaggatccagtgatgaatctgtttcaacaccataattgttaaagaaaaaattattcagtgatacttcaaatgcacagtaaagaagactttattcaggaccattgccatagatataggaaccactgcaacacagtcttggagctggggagagagatgggcttaactctgaatacagcaaggggaagtgggaatttatagcccaggagcaatgcaggggtcagtgaatggagaatcactaagaggaaacatc

SEQ ID NO: 578163 - DNA, 542 bp, Homo sapiens
gccagaaggaagagacttctagtctagggactcagagaatagatcactcagaacaagaagcccacaggaagaccttcctgcccagaggattcctttcaaaagaagcctgggactctaccccagcttcagagagaatattcatcccttmagattcaaaatctgtccatagccatcaacgggcttttgtctggagcaatggctcaggaatctgattcaccaatggatccctaatcagtcagaaatgacaacaaagacttcaaaggcatgcatttagggtcctgagtgagaggcccaggatccagtgatgaatctgtttcaacaccataattgttaaagaaaaaattattcagtgatacttcaaatgcacagtaaagaagactttattcaggaccattgccatagatataggaaccactgcaacacagtcttggagctggggagagagatgggcttaactctgaatacagcaaggggaagtgggaatttatagcccaggagcaatgcaggggtcagtgaatggagaatcactaagaggaaacatc

SEQ ID NO: 578164 - DNA, 542 bp, Homo sapiens
gccagaaggaagagacttctagtctagggactcagagaatagatcactcagaacaagaagcccacaggaagaccttcctgcccagaggattcctttcaaaagaagcctgggactctaccccagcttcagagagaatattcatcccttaagattcaaaatctgtccwtagccatcaacgggcttttgtctggagcaatggctcaggaatctgattcaccaatggatccctaatcagtcagaaatgacaacaaagacttcaaaggcatgcatttagggtcctgagtgagaggcccaggatccagtgatgaatctgtttcaacaccataattgttaaagaaaaaattattcagtgatacttcaaatgcacagtaaagaagactttattcaggaccattgccatagatataggaaccactgcaacacagtcttggagctggggagagagatgggcttaactctgaatacagcaaggggaagtgggaatttatagcccaggagcaatgcaggggtcagtgaatggagaatcactaagaggaaacatc

SEQ ID NO: 578165 - DNA, 542 bp, Homo sapiens
gccagaaggaagagacttctagtctagggactcagagaatagatcactcagaacaagaagcccacaggaagaccttcctgcccagaggattcctttcaaaagaagcctgggactctaccccagcttcagagagaatattcatcccttaagattcaaaatctgtccatagccatcaacgggcttttgtctggagcaatggctcaggaatctgattcaccaatggatccctaatcagtcagaaatgacaacaaagacttcaaaggcatgcatttagggtyctgagtgagaggcccaggatccagtgatgaatctgtttcaacaccataattgttaaagaaaaaattattcagtgatacttcaaatgcacagtaaagaagactttattcaggaccattgccatagatataggaaccactgcaacacagtcttggagctggggagagagatgggcttaactctgaatacagcaaggggaagtgggaatttatagcccaggagcaatgcaggggtcagtgaatggagaatcactaagaggaaacatc

SEQ ID NO: 578166 - DNA, 367 bp, Homo sapiens
tattaatacagcttcttgtgggttaagtagaaagctcttttgtaaatatccctcagtttaagtatatatagtttacatttccaggtaaactrtaaattctctgagaaaggcccagcatggtggttcaagcctataatcccagctctttgggagtctgagatgggtggatcactggaggtcaggagtttgagaccagcctggccaatgtggtgaaaccccatctctaccaaaaatacaaaaattagccaggcatggtggtgcacgcctgtaatctcagctactcaggaggccaaggcaagtgattaaacccaggaggtggaggttgcagtgagctgagatcgcaccactgcactccagcctgggtgac

SEQ ID NO: 578167 - DNA, 367 bp, Homo sapiens
tattaatacagcttcttgtgggttaagtagaaagctcttttgtaaatatccctcagtttaagtatatatagtttacatttccaggtaaactgtaaattctctgagaaaggcccagcayggtggttcaagcctataatcccagctctttgggagtctgagatgggtggatcactggaggtcaggagtttgagaccagcctggccaatgtggtgaaaccccatctctaccaaaaatacaaaaattagccaggcatggtggtgcacgcctgtaatctcagctactcaggaggccaaggcaagtgattaaacccaggaggtggaggttgcagtgagctgagatcgcaccactgcactccagcctgggtgac

SEQ ID NO: 578168 - DNA, 437 bp, Homo sapiens
tcagtgatttccattctcctttatagtaattgttaagcactcacaattagatggttataacaactatcaaagaaaaacaattattttaataaatatttttcatcattttctcctttctaagccctatgctatgcactaaaawctgcagagaaaatcaacacattctctacctcacagcagatttcttggagagagataggggtggggaggggaataagggttgctaaatgttgtcaactttgtaatacaactctcaaagggagatagttattagggaggcaaagtgctcaggctcagatttcaggttgcctagatttgaattctgtcttcactgcttcttttatgatttgcccaaattacttaagctctttaaaccacagtttcctcatccttaagagagggataataaatagaacttatctcataaaattactgtg

SEQ ID NO: 578169 - DNA, 528 bp, Homo sapiens
gaattctgacaggttttgcactgaagacattcacatgtgaggaaaacaggaaaaccactatgctagaaaaagcaaatgctgttgagattgtckcacaaacacaaattgcgtgccagcaggtaggtttgagcctcaggttgggcacattttaccttaagcgcactgttggtggaacttaaggtgactgtaggacttatatatacatacatacatataatatatatacatatttatgtgtacacacacacacacacacacacacacacacacacagggtcttgctatcttgcccagggtggtctccaactctgggtctcaagcgatcctctgcctccccttcccaaagtgctgggattacaggtgtgagccacctcacccaggccattttaattttaatttaatacttttaatttgaatacacaatccaaaaatcatataacaagtacaggaaacccactttatgccaagtttacaaaaacaggaaagatatgtcaatgacaaagcgtcgaagtggcaacatcctaaagt

SEQ ID NO: 578170 - DNA, 539 bp, Homo sapiens
aatgaattctgacaggttttgcactgaagacattcacatgtgaggaaaacaggaaaaccactatgctagaaaaagcaaatgctgttgagattgtcgcacaaacacaaattgcgtgccagcaggtaggtttgagcctcaggttgggcacattttacyttaagcgcactgttggtggaacttaaggtgactgtaggacttatatatacatacatacatataatatatatacatatttatgtgtacacacacacacacacacacacacacacacacacagggtcttgctatcttgcccagggtggtctccaactctgggtctcaagcgatcctctgcctccccttcccaaagtgctgggattacaggtgtgagccacctcacccaggccattttaattttaatttaatacttttaatttgaatacacaatccaaaaatcatataacaagtacaggaaacccactttatgccaagtttacaaaaacaggaaagatatgtcaatgacaaagcgtcgaagtggcaacatcctaaagtactgagag

SEQ ID NO: 578171 - DNA, 551 bp, Homo sapiens
taaaacattttagcaaaggaaatgaattctgacaggttttgcactgaagacattcacatgtgaggaaaacaggaaaaccactatgctagaaaaagcaaatgctgttgagattgtcgcacaaacacaaattgcgtgccagcaggtaggtttgagcctcaggttgggcacattttaccttaagcgcactgttggtggaacttaaggtgactgtaggactyatatatacatacatacatataatatatatacatatttatgtgtacacacacacacacacacacacacacacacacacagggtcttgctatcttgcccagggtggtctccaactctgggtctcaagcgatcctctgcctccccttcccaaagtgctgggattacaggtgtgagccacctcacccaggccattttaattttaatttaatacttttaatttgaatacacaatccaaaaatcatataacaagtacaggaaacccactttatgccaagtttacaaaaacaggaaagatatgtcaatgacaaagcgtcgaagtggcaacatcctaaagt

SEQ ID NO: 578172 - DNA, 551 bp, Homo sapiens
taaaacattttagcaaaggaaatgaattctgacaggttttgcactgaagacattcacatgtgaggaaaacaggaaaaccactatgctagaaaaagcaaatgctgttgagattgtcgcacaaacacaaattgcgtgccagcaggtaggtttgagcctcaggttgggcacattttaccttaagcgcactgttggtggaacttaaggtgactgtaggacttatatatamatacatacatataatatatatacatatttatgtgtacacacacacacacacacacacacacacacacacagggtcttgctatcttgcccagggtggtctccaactctgggtctcaagcgatcctctgcctccccttcccaaagtgctgggattacaggtgtgagccacctcacccaggccattttaattttaatttaatacttttaatttgaatacacaatccaaaaatcatataacaagtacaggaaacccactttatgccaagtttacaaaaacaggaaagatatgtcaatgacaaagcgtcgaagtggcaacatcctaaagt

SEQ ID NO: 578173 - DNA, 528 bp, Homo sapiens
gaattctgacaggttttgcactgaagacattcacatgtgaggaaaacaggaaaaccactatgctagaaaaagcaaatgctgttgagattgtcgcacaaacacaaattgcgtgccagcaggtaggtttgagcctcaggttgggcacattttaccttaagcgcactgttggtggaacttaaggtgactgtaggacttatatatacatacatacatataatatatatacatatttatgtrtacacacacacacacacacacacacacacacacacagggtcttgctatcttgcccagggtggtctccaactctgggtctcaagcgatcctctgcctccccttcccaaagtgctgggattacaggtgtgagccacctcacccaggccattttaattttaatttaatacttttaatttgaatacacaatccaaaaatcatataacaagtacaggaaacccactttatgccaagtttacaaaaacaggaaagatatgtcaatgacaaagcgtcgaagtggcaacatcctaaagt

SEQ ID NO: 578174 - DNA, 539 bp, Homo sapiens
aatgaattctgacaggttttgcactgaagacattcacatgtgaggaaaacaggaaaaccactatgctagaaaaagcaaatgctgttgagattgtcgcacaaacacaaattgcgtgccagcaggtaggtttgagcctcaggttgggcacattttaccttaagcgcactgttggtggaacttaaggtgactgtaggacttatatatacatacatacatataatatatatacatatttatgtgtayacacacacacacacacacacacacacacacacagggtcttgctatcttgcccagggtggtctccaactctgggtctcaagcgatcctctgcctccccttcccaaagtgctgggattacaggtgtgagccacctcacccaggccattttaattttaatttaatacttttaatttgaatacacaatccaaaaatcatataacaagtacaggaaacccactttatgccaagtttacaaaaacaggaaagatatgtcaatgacaaagcgtcgaagtggcaacatcctaaagtactgagag

SEQ ID NO: 578175 - DNA, 551 bp, Homo sapiens
taaaacattttagcaaaggaaatgaattctgacaggttttgcactgaagacattcacatgtgaggaaaacaggaaaaccactatgctagaaaaagcaaatgctgttgagattgtcgcacaaacacaaattgcgtgccagcaggtaggtttgagcctcaggttgggcacattttaccttaagcgcactgttggtggaacttaaggtgactgtaggacttatatatacatacatacatataatatatatacatatttatgtgtacacacacayacacacacacacacacacacacacagggtcttgctatcttgcccagggtggtctccaactctgggtctcaagcgatcctctgcctccccttcccaaagtgctgggattacaggtgtgagccacctcacccaggccattttaattttaatttaatacttttaatttgaatacacaatccaaaaatcatataacaagtacaggaaacccactttatgccaagtttacaaaaacaggaaagatatgtcaatgacaaagcgtcgaagtggcaacatcctaaagt

SEQ ID NO: 578176 - DNA, 528 bp, Homo sapiens
gaattctgacaggttttgcactgaagacattcacatgtgaggaaaacaggaaaaccactatgctagaaaaagcaaatgctgttgagattgtcgcacaaacacaaattgcgtgccagcaggtaggtttgagcctcaggttgggcacattttaccttaagcgcactgttggtggaacttaaggtgactgtaggacttatatatacatacatacatataatatatatacatatttatgtgtacacacacacacacacacacacacacacacacacagggtcttgctatcttgcccagggtggtctccaactctgggtctcaagcgatcctctgcctccccttcccaaagtgctgggattacaggtgtgagccacctcrcccaggccattttaattttaatttaatacttttaatttgaatacacaatccaaaaatcatataacaagtacaggaaacccactttatgccaagtttacaaaaacaggaaagatatgtcaatgacaaagcgtcgaagtggcaacatcctaaagt

SEQ ID NO: 578177 - DNA, 555 bp, Homo sapiens
actgtactacccaaataattacttttattttatttttataaatgtgctaggtacaagcatacttttattatatgattgttttgttatttggatatattgctagtggtgaagtctgagcttttactgtactcatcaccccaatagtgaacattgtacccaataataatttttcaaccctcactcccctccaaccctggcatsttttggaatattctccagcgtctactttccagtgtatgtactattataataattttgtagccaccccctgttgctactgtggtgagctcatgttgccagtatctgccatgagcacttggtctcttcagtaaattctgtatctaagtaaatagtgtgttctttcacagttctcttttcattgtgcttagtgtaatactataaatcttgaataacaccatgagaccaatacaaagtgccacaagtgatgctgggagtgctcccaagaagcagagaaaagttgtgacattatgagaaaaagttagattgcttcctatagattgagttcttcagctgcctgccatttcaaaataaatg

SEQ ID NO: 578178 - DNA, 555 bp, Homo sapiens
actgtactacccaaataattacttttattttatttttataaatgtgctaggtacaagcatacttttattatatgattgttttgttatttggatatattgctagtggtgaagtctgagcttttactgtactcatcaccccaatagtgaacattgtacccaataataatttttcaaccctcactcccctccaaccctggcatgttttggaatattctccagcgtctactttccagtgtatgtactattataataattttgtagccaccccctgttgctactgtggtgagctcatgttgccagtatctgccatgagcacttggtctcttcagtaaattctgtatctaagtaaatagtgtgttctytcacagttctcttttcattgtgcttagtgtaatactataaatcttgaataacaccatgagaccaatacaaagtgccacaagtgatgctgggagtgctcccaagaagcagagaaaagttgtgacattatgagaaaaagttagattgcttcctatagattgagttcttcagctgcctgccatttcaaaataaatg

SEQ ID NO: 578179 - DNA, 582 bp, Homo sapiens
gttttaattcttaggaaagctattaattttctgaaaaataagttttaaaatatgtttggaaggccctatgtcagtcaaggaccagtcagaggaacagaagccactgttggtcttataagcagagggaatttaaaatagggagtaggttacaaggctgctagaagagccaagaagctgaacaggggctggtgaggcacccattcgattagcaawgcctgggaactactatgcctgcaaggaaaatagtgcactggtgtcaccaagggctggaagtccgagtggtctggtgtgagcggaagcatggaaagaggagcagtctggtggcagctggaagtaggccgagtgagagagcgtattaccctggctgctccctgctcctgcctcttatcctcctcagtgcctcccattgatggaacttatcctgaaatcagttggcaaagggagcctgggagatgtagttccctgtgatcaagcggagcaagggagggatcccagcgcaaacaggcaaagacacaaaggcactgaattctccaagatgtaatttctttccccttatagtatttgaattattttggacaagag

SEQ ID NO: 578180 - DNA, 564 bp, Homo sapiens
acttgtaaagatgaaaggaaataatgcagctaaagcactctcatggtcaatgttatgtgtcaacttgtctgggataagggatgcccagatagctggtaaaacattatatttgggtgtgtctatgaaggtattttcagaagacattagcatctaaatcaacagactaagtaaagaagatcaccttcaccaatatgtgtaggcatcatccaatctgttgagtcctcaaaaagaacaaaagttggatgaggggtgatttcattctctcttcttgagctggtatattcatctgctcctgcccttggacatcagagctactgattctcaggccttcagacttagatgggagttacacattggctcccctgttttccaggcctttggacttggactggaagtacaacgctggctttctttggactccatcttgcagacaacaagtagtgggatttctcaacctccatgatctcttgagccaatccctcataattaatccccatgtatctatataactaacacatatatatttatatagatakataaatgcatatcctactggttctgttt

SEQ ID NO: 578181 - DNA, 595 bp, Homo sapiens
ttagtactagagcaggaataaggaagtggtgcagaagtaaacacagttggaggccattcaagcattacccaaggtgaaggttgcccagtgaaaatgaacatctggtcttcctggcatgtatattcttactattgagatgcataaatcaagctatgaaaatctgatgaaataaacgtcgaattaaaactcctttttctttgattacattgctctttactattccacatgcttaaaatttgggttctggagtagataccaattttcagtctgccccatattcatcttttcttctgaccagaactccacattccccaaactcccctccttcttyttcagggaactgctcttcactttactccagctatgtaattctcatagcacctgccatgttcttaaaaattcaggctgtagttacagtagaaaaaatggaagacagagctaatgagtggagagaaacagagtcctaatgaaaccatttgagagcttgggcctcaaggtctgcacctacacctgaaagccagacataccttctggactttttagttacatgaggtattaaattcttcatttttcttatgccagtttgagtttcatt

SEQ ID NO: 578182 - DNA, 585 bp, Homo sapiens
ttctcttctttgtcttaatcagaaaaggaagagaaattgctagacaaaattaaaagcttcttcctaatagtagatgctgttcattgaacaagtaccatatgccagcactaaatactttgcatataatattatcatattctcacagtaatctgtttagttaggtgataggatttttattttaaacataaggaacatagaaaaagaattaggtagcttgtccaagttggcaattcttttctaccctcttctctgaatttcctttcattcccctctatttctcaaccccatataaggaacccagaatcaaagtatgtactggttgcttaattctgtctgccttctaattggtcactagtcaccatttagtctctttctctctcttcctattttttttttttttttgagayagtgtcttgctttgtcacctaggttggtgtgcaatggcctaataccagctcactgcaacttccacctctcaggttcaggtgattctcctgcctcagcctcccaagtaactgagtttacaggcacctgccccccatgcctggctaatttttgtatttgtagtaaagatggagttttgcc

SEQ ID NO: 578183 - DNA, 227 bp, Homo sapiens
ttctctttctcttcttataaggccactaatcctattgtattagaaccctgcccttatgacctcatttaaccttaaataagttaaggttaaacttactcatttcatccaaaacagttacattggggtttagtgtttcaacatatcaatatggccggggggaagggtggggagatgcasacattattcagtgcatagcagcatggattgatttatattatcaatgaccc

SEQ ID NO: 578184 - DNA, 565 bp, Homo sapiens
ttattattattattattattttcctgagatggagtcttgctctgtggcccaggctgacgtgcagtggcacaatctgggctcactgcaacctccgcctcccaggttcaaacaattctcctkcctcagcctcccaagtagctgggattacaggcatgcaacacaactggctaatttttgtatttttagcagagatggggtttcaccatgttggccaggatgttctcgaactcctgacctcatgatctgcatgccttggcttcccaaagtgctgagattacaagcgtgagacacctgcccagctggtttattatttctcagtgcaaaataattttccattttatggatgtaccaaaatatatttaccaattctggagttaatggacagtttggggctgttataaataacacaaccataggcaatgtagtacatgtttttggtgattatctgttacatatgtctcctgtactcttctgtgtatttcctgttatagtctagatattttcttttgatctatcttccagatcatttatcttcagctgcgtccctctatcatgctatcaattt

SEQ ID NO: 578185 - DNA, 565 bp, Homo sapiens
ttattattattattattattttcctgagatggagtcttgctctgtggcccaggctgacgtgcagtggcacaatctgggctcactgcaacctccgcctcccaggttcaaacaattctccttcctcagcctcccaagtagctgggattacaggcatgcaacacaactggctaatttttgtatttttagcagagatggggtttcaccatgttggccaggmtgttctcgaactcctgacctcatgatctgcatgccttggcttcccaaagtgctgagattacaagcgtgagacacctgcccagctggtttattatttctcagtgcaaaataattttccattttatggatgtaccaaaatatatttaccaattctggagttaatggacagtttggggctgttataaataacacaaccataggcaatgtagtacatgtttttggtgattatctgttacatatgtctcctgtactcttctgtgtatttcctgttatagtctagatattttcttttgatctatcttccagatcatttatcttcagctgcgtccctctatcatgctatcaattt

SEQ ID NO: 578186 - DNA, 632 bp, Homo sapiens
ttacatagttttgctatatgcttccacttctggctcgttcacatggtctgcatagggatcgtttgtaattattttgctaacattacatagtgagagcccatagcttcttcagatcactacataaattacaaggtattgttaaaatgaaagataaaattatgtgattataatttaratactcttcattgagtcatgcctgatcatatttattataactttgttataataaaaaatatatatgtttatatataataaaaataaaatataaccttattatatctttgttatgatagacacaataatgaccatgttcatcacttcagtgcacattttaaaaatgtgcttaactacaggagctagggtatatattttttccttagtgtgtatgaaatctataatcttaacatccattatcaagatctaaaattcttgatgctaacatatttaactttttgtttattagatccaaaagaattagaattaaatttccaaattacactagttttttcaaacttttgattaaactgttaaaaaagcaaatgaggactgtgtttcaaactgtgcttttagtagaataaattttatttcagcctgtagattataatgataatgatgacaacaacagtacaaat

SEQ ID NO: 578187 - DNA, 572 bp, Homo sapiens
tttattaaattatttgtattaacaacactttaatatttcttaaaggtcaatatcttttctcttagaatgtaatttttttctgtctatacattacatctcctagtacaatacaatgcaaagtagaagcttaagaaataccttttttttttttttgagacggagtctccctctgtcacccagactggagttcagtggtgcaatctgtgttcactgcaacctctgccttctgggttcaagtgattctcctgcctcagcctccctagtggctgagattamaggcacatgccaccatgcccagctaatttttgtatttttcgtagagacagggtttcaccatgttgtccaggcttgtcttgaactcctgacctcaggtgatccacctgcctcagcctcccaaagtgcttggattacaggcatgagccactggggccagtcagaaatactcatttttgttagttaccatctattacatcaatacctatttaagagattcatttgggatttaatcagttacataaaaatcttatggacactgctgattctctgcccaaatctctttggatcacttttac

SEQ ID NO: 578188 - DNA, 572 bp, Homo sapiens
tttattaaattatttgtattaacaacactttaatatttcttaaaggtcaatatcttttctcttagaatgtaatttttttctgtctatacattacatctcctagtacaatacaatgcaaagtagaagcttaagaaataccttttttttttttttgagacggagtctccctctgtcacccagactggagttcagtggtgcaatctgtgttcactgcaacctctgccttctgggttcaagtgattctcctgcctcagcctccctagtggctgagattaaaggcacatgccaccatgcccagctaatttttgtatttttcgtagagacagggtttcaccatgttgtccaggcttgtcttgaactcctgacctcaggtgatccacctgcctcagcctcccaaagtgcttggattacaggcatgagccactggggccagycagaaatactcatttttgttagttaccatctattacatcaatacctatttaagagattcatttgggatttaatcagttacataaaaatcttatggacactgctgattctctgcccaaatctctttggatcacttttac

SEQ ID NO: 578189 - DNA, 495 bp, Homo sapiens
gaaaaaaacagataagctacatctgtgtgtatactttaattgtgtaaaactgaaagaatacacccaattgtattcaatgttgtatgctcatggacaggtaacagamacaaagctacttcatacagtaatctatattgacatcaaaatagagtttctctaaaggaaagagcctttttttaatgggattgatcaaaattagaagttcccattatttgtccatgaaacctaaggaaggtgctatttcaaatggaattctagtagaacttggcacatacattttaacttttcaaccacccattattttttacctcttgtagtttcactcactcagacaatcacacatctacattcattaattttaaaaacacacatgcctttaaagcagaaaattcatcctcaaattacattttctacaaaaaaagcaggacaccatatttatatccaatgcttcagtcatggaaatggattttcttcatagagctgttaattaacata

SEQ ID NO: 578190 - DNA, 495 bp, Homo sapiens
gaaaaaaacagataagctacatctgtgtgtatactttaattgtgtaaaactgaaagaatacacccaattgtattcaatgttgtatgctcatggacaggtaacagacacaaagctacttcatacagtaatctatattgacatcaaaatagagtttctctaaaggaaagagcctttttttaatgggattgatcaaaattagaagttcccattatttgtccatgaaacctaaggaaggtgctatttcaaatggaattctagtagaacttggcacatacattttaacttttcaaccacccattattttttacctcttgtagtttcactcactcagacaatcacacatctacattcattaattttamaaacacacatgcctttaaagcagaaaattcatcctcaaattacattttctacaaaaaaagcaggacaccatatttatatccaatgcttcagtcatggaaatggattttcttcatagagctgttaattaacata

SEQ ID NO: 578191 - DNA, 455 bp, Homo sapiens
caatttgattagtaagacaggattttactggatgaaaggaaagaaaagagggaaacagggactctcgcaagaccagagtccctgccagagcgcttccaccaggctgctcaaatcccaggttccacacaggaagaggagaagccagactcttcactrcttcatgaacttaccgaggctccaccccagtgggcgggctggttggagtttctccagggaccccctcccatctggctgtctcattacccctctgaggaaatacatctaactgctgtaagattaagggaaaggacaaagaccaatcttaactccttcctgctgacagggatgctgtttggggaaaacagcagtcagatctccctcagaggcctatttaagggttcccagcaaaagaggccatcatcagaggctctggttgcatgactgtttggagtttgatggcccgaaagcaagaacag

SEQ ID NO: 578192 - DNA, 658 bp, Homo sapiens
tcaaggaaatagacatcctgctttctctttttccctttccaaagggcccatggcagtttggtcagaatgctcctacatatagcaaaacaaaacaatacaaaacaaaatttgcaatccgtatgttcataaagtggatagtgtatttgagccttgtgtgttytttttttctcttcaatgattcataatgatggttttccctgcctgaaaagaccttccaccatatcttaattgccttttttttgaggggggtgtctacaacacctactatggtgactaagatttagtaaatatttaatgactattttataaaaatacagttttctattttttatatttaagttgaagatgcattaaaaataagtgataacacttaaaacaatgatcgaatattaactaactcaagacataacttcatgttccctgaaaagccagtgacattatgaaaaaaaaataacctcaccagaaagaccctgctgtacaatgctacaaatcgcctgttgcagattccctctccttcctctttgggttttatagctggaggcaggtggctcattaaaacttgaaaagagtttctccaaattcaatttctgaattctctgcaggaataggctttgtagaatctcattgagcacaggcacatttgtttgtttgtttgttt

SEQ ID NO: 578193 - DNA, 562 bp, Homo sapiens
tttatttttgtatttgttgcatttgcttttgggttcttggtcataaagtctttgcctaagccaatgtctaaaagtttttctgatgttatcctctagaattttttatggtttcaggtgttagacttaagtcttttatacatcttgagttgatttttgtataagatgagagttgaggatccagtttcattcccatacatgtagcttgccaactatcccagcactatttgttgaatagggtcacctttccccactttaaaatataaaaagaagaaaaaatagtgagcacggacattggaggctacatactgcatgggaaacaggmcttatatagtttattttcaccaagtcactaagtagataaacacaatcatccaaacaacaacagcaacaataacaagtctaagtaaaagaggattggaaagtatcctcagttgctacattttactatcaaagatgctgagttttcaataaaaatcattacacgtggaaaaaaaaacacattatgacccacacactgaaaaacaaataggtaatagatattgcctttgaaggcactcagatg

SEQ ID NO: 578194 - DNA, 552 bp, Homo sapiens
ggtttctttcatttgttccattattatttaatgaatacctactatgtgttaagcactcagaatgcagagttaaataagacatggcccttggcaaaaggggtttgcaatcagagcagtggagacacagaagtaaacaggcagttatcgcatacaatgtaggtctatgacaagataagtatatcagaaagacttaatggcaatgagtctcatctcctgattcctttcaaagtgttaytcaaaaaacaatccagaaactggtaaacaggattcctagcccattcattctaagggagaacaaaaactgacatctctaatgggtgcttcctcttaatttttcaattactttcctatcaggccaaaacggtgcattaggatcatctgcagtgcttctaaagagtactgatgcagctgggtgtggtggctcacgcctgtaatcccagcactttgggaggctgaggtgggcagatcacttgaggtcaggcgttcaagaccagcctggccaacatggtgaaaccccgtctctactaaaaatacaaaaattagctgggcatg

SEQ ID NO: 578195 - DNA, 187 bp, Homo sapiens
tccctgcaccctttctgttctagttccttactgctgcataacaaaccacrtcaaaactaagtgtcttaacccaaccatcgcattacgttcaccaactctgtgggtcagggattcaggtggggtacaacagagagagcttggctctcctccacaatgtctggagcctcagctggaagacacagaggac

SEQ ID NO: 578196 - DNA, 319 bp, Homo sapiens
gcttatttctagtttttaccatgggatgttcatatttttcctatagcctcaaagcactctgaaaagtctcattgtagattctacaaaattagtgtttccaaaaagctgaatcaaaagtaaggtttaactctttgaattgaatgcacacattgcaaagcagtttccaagataactttttttttccagyatttatcacaggatatttggcttatccctataggcctcaatgtgctttgaaatgtccctttgcagattctacaaaaagagtgtctccaacctgctgaataaatagtaagatttaatgctgggagctgaatcc

SEQ ID NO: 578197 - DNA, 606 bp, Homo sapiens
aaagaacaaatctggaggcattgcattacccaaccttaaagcatactataaggccatagtcaccagaacagcatggtactggtataaaaaaaggcatatagaacagtggaacagaatagagaacccagaaataaagccaaatacttactgatcttcaacacggcacacaaaaacaaagtgggaaaagaacaccctattcaacaaatggtgcagaaataattggcaagccacgtgtagaagaatggaaccgaatcctcatctctcaccttatacaataatcaactgaggatggatcaaagacttaaatctaagacatgaaaccatacaaattytagaagataaaattggaaaaacccttctagacactggcttaggcaaagacttaatgaccaagaacccaaaagcaaatgcaacaaaaacaaagataagtagataggacttaattttaaaagtttctgcaaggcaaaagaaataatcagcagagtaaacagacaacccagagagtgggagaaaatctttgcaatctgtagatccaacaaaggactaatatctagaatctacaaggaactcaaatcagcaagaaaaaacaatcccatcaaaaagtgg

SEQ ID NO: 578198 - DNA, 224 bp, Homo sapiens
atggaatactacacagccacaaacaaggatgaaatcatgttctttgtagcagcatggaggcttctggagaccataatcctaacaattaacacgggaacagaaaaccaaataccacactgtaggaactaaacattgggtamctatggacataaagatgagaacaatagacactgttgactactaaagttgggaggaagaaaggggttgtgagttgaaaaactacc

SEQ ID NO: 578199 - DNA, 506 bp, Homo sapiens
gcaccattttatcaacagcttgacctggtgaccccagtgcagagctctgacatggctcagttggagcttactgcaagggtctggaggccccacctcagcccaaatcctgcacttggatccccactaccttctatgcggctgcaagatgccctcacactcaatgatcttcacgctcaggcttttcgtggccagggtacaataaggaccttagtttgggagctggccagatggtgtaggagaaaaaccagagagggaggggaatgaaaagggttaggtctgagctttttatgaacatcactgaaactgacccaatagtcaactagttttttttggataaacacagaaattgatccttctgttcttaaagcttgaaacttacatttgttgttttctgagacagggtctcactctgtcacccaggctggagtgcrgtggcgcaatctcagctcactgcaacctctgcctcccaggttcaagcgagaggtgggatttgccatgttggccag

SEQ ID NO: 578200 - DNA, 509 bp, Homo sapiens
ttaccagtgatagcaatgtcttaggccatgagggcagagggtctctttagcagtttggcagtaagcagattgtcagaggggtaagggaagcagggaacacttccatcgaccctttctgtgggggtcttagttcctttggggtcaatctctactagattctttctgattctttctgatttccatttttgcaccttagyttcttcctgagggcactccaacagatcttgattctcttccctcaattttctgttttttttttttgttttttttttttttgacagagtcttgctccgtctcccaggctggagtccagtgtgcaatcttggctcactacctcctgggttcaagctattctcctgcctcagcctcccaagtagctgggattacagatgtgcaccaccaagcctggctaatttttgtatttttagtagagacagtgtttcaccatgttggtcaggctggtctcaaactcctgacctcaaatgattcacctgcctcagcctcccaaa

SEQ ID NO: 578201 - DNA, 509 bp, Homo sapiens
ttaccagtgatagcaatgtcttaggccatgagggcagagggtctctttagcagtttggcagtaagcagattgtcagaggggtaagggaagcagggaacacttccatcgaccctttctgtgggggtcttagttcctttggggtcaatctctactagattctttctgattctttctgatttccatttttgcaccttagtttcttcctgagggcactccaacagatcttgattctcttccctcaattttctgttttttttttttgtttttkttttttttgacagagtcttgctccgtctcccaggctggagtccagtgtgcaatcttggctcactacctcctgggttcaagctattctcctgcctcagcctcccaagtagctgggattacagatgtgcaccaccaagcctggctaatttttgtatttttagtagagacagtgtttcaccatgttggtcaggctggtctcaaactcctgacctcaaatgattcacctgcctcagcctcccaaa

SEQ ID NO: 578202 - DNA, 471 bp, Homo sapiens
aaaaatacacaaatatgtggaaattaaacaacacacacctgcataatccatgggccaaagaataaataaaagggaaagcaaaaatgtcttacaacaaatgaaaatggaaacataacataccaaaacttacgggacgcagcaaaagcagttctgagaagtttgtagtcataaatccctacattaagaaaataaaaagatctcaaataaacaacttaactttgcatctcaatgaactggaaaaagaacaatctaagctcaaagttagaacaaggaaaggaaataataaagatcaaagcagaaataaataaaatagagactagaaaaaatcaaggaatctaagttggtttttttgaaaatataaacaaatttaacaaactcttatctaaactaagaaaaaaataaagaagatacatctaaaatcagaaatgtaagaggagacrtaacaaattataccacagaaataaaaaggaa

SEQ ID NO: 578203 - DNA, 451 bp, Homo sapiens
aaattaaccttagtttactgtaaccgttttataaattttcaatattttaaaacttccgactcttttataataaaacttagcttaaaacacaaacattgcatatttgtacaaagttatttttctttatattcttatctgtaagcttttctctattgttaaggttttctgatttttaattttgctttttaagtgactggcaacgcagtaagtgtcttcgcaccaggatcatatcaacacatgagtaatttgttgctctcaatgttacaatgactgtgatggcactaggcaataagaattttttggctccattataatcttacaggaccactgttatatctgtcatggactgaaatgttatgcagtgcrtgactgtacattatcattatcaactatagtcaccatgctaccttttatctcgagaacttatcttctaacagtaagtttaagtttg

SEQ ID NO: 578204 - DNA, 446 bp, Homo sapiens
ctattcaacaatcatgccaatcgacacttctttcactgcctcccacccaaatgcagagagtgcatctgtattgtgaccagagaagtggttgtaaaaagtagggctaccctgacatttattcaccaatatccatgaataaataaatatgtacacrtaaatttatagatatatacatccatacttacataaataattttaaaagtgtccatttttacttcaagagaactaaggatacttttgtagacattagggcagataaaagatggtagataaagaaaagggaaatgagaaggaaacatttctgtaagtgcaagtgttggggagaaggagtgggagctggggggaagctgagaattgtgttttgtgacaaagagcatggttcatggacagtagcacatgtgagtcacagaaggacaataagatagggagaatcagccaagatggcc

SEQ ID NO: 578205 - DNA, 446 bp, Homo sapiens
ctattcaacaatcatgccaatcgacacttctttcactgcctcccacccaaatgcagagagtgcatctgtattgtgaccagagaagtggttgtaaaaagtagggctaccctgacatttattcaccaatatccatgaataaataaatatgtacacgtaaatttatagatatatacatccatacttacataaayaattttaaaagtgtccatttttacttcaagagaactaaggatacttttgtagacattagggcagataaaagatggtagataaagaaaagggaaatgagaaggaaacatttctgtaagtgcaagtgttggggagaaggagtgggagctggggggaagctgagaattgtgttttgtgacaaagagcatggttcatggacagtagcacatgtgagtcacagaaggacaataagatagggagaatcagccaagatggcc

SEQ ID NO: 578206 - DNA, 446 bp, Homo sapiens
ctattcaacaatcatgccaatcgacacttctttcactgcctcccacccaaatgcagagagtgcatctgtattgtgaccagagaagtggttgtaaaaagtagggctaccctgacatttattcaccaatatccatgaataaataaatatgtacacgtaaatttatagatatatacatccatacttacataaataattttaaaagtgtccatttttacttcaagagaactaaggatacttttgtagacattagggcagataaaagatggtagataaagaaaagggaaatgagaaggaaacatttctgtaagtgcaagtgttggggagaaggagtgggagctggggggaagctgagaattgtrttttgtgacaaagagcatggttcatggacagtagcacatgtgagtcacagaaggacaataagatagggagaatcagccaagatggcc

SEQ ID NO: 578207 - DNA, 446 bp, Homo sapiens
ctattcaacaatcatgccaatcgacacttctttcactgcctcccacccaaatgcagagagtgcatctgtattgtgaccagagaagtggttgtaaaaagtagggctaccctgacatttattcaccaatatccatgaataaataaatatgtacacgtaaatttatagatatatacatccatacttacataaataattttaaaagtgtccatttttacttcaagagaactaaggatacttttgtagacattagggcagataaaagatggtagataaagaaaagggaaatgagaaggaaacatttctgtaagtgcaagtgttggggagaaggagtgggagctggggggaagctgagaattgtgttttgtgacaaagagcatggttcatggacagtagcacatgtgagtcacrgaaggacaataagatagggagaatcagccaagatggcc

SEQ ID NO: 578208 - DNA, 538 bp, Homo sapiens
ggggcaaggccactgattcccacaggatgctctagtaaagctcttgactaggcctccaaattaaacatatggctgaggctagccccttctcactcaatggactccagtatttggtgaggaaatgaggaaaagagaggtcccgaagcaagtaattgtatgaaatatcaggatccagttttgacaagactgtttgtggatataccagaagagcaggagagagttccagaagacccaaacatccagcatccagaaggtcttttgtaactggtaattaaattatgaagtgaggactgatgggcatcattgagaacatgatttgggrgctgtttaaccccttgctcactagtcagttcatcctctcttgttttctacaaaaatgtagttatctgcttctcataggagaagctgttgtgggagccacacagggtggtaacagtcagcggtaatctggtgaaaacaattttgtagaagggattgtccctccttcacatatttccatatataaatcctcacagtcagaaaaatattcttaatatct

SEQ ID NO: 578209 - DNA, 569 bp, Homo sapiens
tgaaaaaaaaacaaaaacaaattaacctaagcttactgcgacttttttactttataaactttttaaattttttactgttttgtaataacacttaacttaaaacacaaacattgtatagctgtacaaaaatattttatttctttgtatccttattctgtaagtctttacaaaaaaataaatttttcctatttaaactgttttctgtggttaaaaactaaggcacaaacacatacattagcccaggcctgcacagggtcaggatcatcagtrtcactgtcttctacctctatatcttatcccactggaaggtcttcaggggcaacaatattcacagagctgtcatctcccgtggtaacagtgccttcttctggatacctcctgaaggacctgcctgaggctgtttttttttgtttttgtttttgtttttttttttgtttttgagatggagtctcactttgtcacccaggctggagtgtagtggcacaatcttggcttactgcaacctctgcctcccgggttcaaacaattctcctgcctcagcctcccgagtagctgtgactacaggcgca

SEQ ID NO: 578210 - DNA, 569 bp, Homo sapiens
tgaaaaaaaaacaaaaacaaattaacctaagcttactgcgacttttttactttataaactttttaaattttttactgttttgtaataacacttaacttaaaacacaaacattgtatagctgtacaaaaatattttatttctttgtatccttattctgtaagtctttacaaaaaaataaatttttcctatttaaactgttttctgtggttaaaaactaaggcacaaacacatacattagcccaggcctgcacagggtcaggatcatcagtgtcactgtcttctacctctatatcttatcccactggaaggtcttcaggggcaacaatattcacagagctgtcatctcccgtggtaacagtgccttcttctggatacctcctgaaggacctgcctgaggctgtttttttttgtttttgtttttgtttttktttttgtttttgagatggagtctcactttgtcacccaggctggagtgtagtggcacaatcttggcttactgcaacctctgcctcccgggttcaaacaattctcctgcctcagcctcccgagtagctgtgactacaggcgca

SEQ ID NO: 578211 - DNA, 559 bp, Homo sapiens
gaattcaagttaggacctttatgcacttcgtgtctttatgttttgaacatctgggatacagttcaatagctagcttcatgtccttgtcttctcattagaatattggcatcagttttgagttgatgtcaattaattcattattctcttcattatgggttgtgcttttgtgcctctttgtatrgctggtaatttttgtttaggtgctagacattttaaattttaccctggtgggtattggatcttttttttcttttttgtattcctgtaaatattattgagctttgctctgggatatagttaaattacttggaaacagcttgatccttctgggtattacctttaacttgttgtactgtgttaaacagtgtcccccacaaaatcctgtccatgtgaaacttcaaaatgggaccttatttggaaatagggtgtttgcagaggtaattagttaaaatgagatcatactggattagggcaagccctaaatccagtgactggtgtccgtataagaaagtcatatgggccaggaatagtggctcatgcctgtaatcccagaactttg

SEQ ID NO: 578212 - DNA, 523 bp, Homo sapiens
acttgacacatttacatttctgaacgagtttctaaatgatacctgcaaactatatgtaagagaaacagcaagacaagatcatcaacaaaaatactaaaatgcagccatcgtcaagttgaaaataatgtgtgccattcagcttagggtatgctcagaacagcagctcagctgtggaaatagtcacagttgcaaatgacttgatggacgcagaaatcatttaggaccattaataatatttgaaacatttaggtcaacatttctcaaaagtcattaaagcaaagttctcaaaaactaatacttctgtcaatcatggttattatttaacatattattctgattacttatgtcttcattctaacaaacttgttttcaaatatgttgaaagcatgtctaaagtatagttcgtgttgaattgctttagtactcttaatacatctctaaaccattatattatttgcaaatagatgcactgtatttgaatgagaattgttatayagatgtgtatgctggtgaacagggaagg

SEQ ID NO: 578213 - DNA, 562 bp, Homo sapiens
atcctataaccataatttatctttgtaattaaacagtgatattttataaaaatcttttgtttcttcctcaaatatagaaattgttcttatatcagtctagctttatcatcaaacccataatactttcatagtgactatcttccatagtgttttggtagataaaaagcctgttcttaacacatttaatagccaatgtaatttttcttttttgataagaatattcattttagtgaccctcatcatcccttatctttaataatctgacaaaagcctgaataactgtaattctcatccacatgcaatttccaaagatattgcaacaacatagtctaggtcctacccaggttctcttgataggaattatatgacacatgtattttcatgttgtgatgcctrtatattgctgattgtataaagatgtatactttaccattttagtaagaaaccaatcatccctccaaaatttcttctttttacaattaccccaatgcatttttattgttcagaggctttggacatattcacttacttttgcccctctattttcctcttttcaaattca

SEQ ID NO: 578214 - DNA, 566 bp, Homo sapiens
acatatcctataaccataatttatctttgtaattaaacagtgatattttataaaaatcttttgtttcttcctcaaatatagaaattgttcttatatcagtctagctttatcatcaaacccataatactttcatagtgactatcttccatagtgttttggtagataaaaagcctgttcttaacacatttaatagccaatgtaatttttcttttttgataagaatattcattttagtgaccctcatcatcccttatctttaataatctgacaaaagcctgaataactgtaattctcatccacatgcaatttccaaagatattgcaacaacatagtctaggtcctacccaggttctcttgataggaattatatgacacatgtattttcatgttgtgatgcctatatattgctgattgtataaagatgtatactttaccattttagtaagaaaccaatcatccctccaaaatttcttctttttacaattaccccaatgcatttttattgttcagaggctttggacatattcacttacttttgyccctctattttcctcttttcaaattca

SEQ ID NO: 578215 - DNA, 587 bp, Homo sapiens
acagctgcaaaatattgtggacagttttgcctggtaccaagattgtgtgtatttgtcctcaaaagagcaaaggcttggagttctgatttctctgaggtcattgcttttcctcctattgttttagacacatggctagctctttcacagagttttaatctctgctttaattgtgactccagtgacaacttcttctgtggagtgaattgtgtcccctcaaaattcaattcttgaagccctaaccccccaatgtggtggtgttggagatgaggctttgagagctataagatttagatggatgaggtcatgagagtgggactcttataatgggattagtatccttataagaagagacaccagagaacttgccagttgagcacacaggggacggtggccatctacaagccagaaagagggccctcaccagactccaaccacattggcaccctgagttttgacttccaggcttcagaatttctgttgttgaagcttcggtctatggaattttgtcatggcagaccaagctgactaacacaactttctgttattytgcagcaccttgagtgccttattttccttttctattttgg

SEQ ID NO: 578216 - DNA, 559 bp, Homo sapiens
tgaatagtattccactgtgtacatacatacatatatatgaaatacacacacacacacacacacacacaaacacacaccccacatgttctttattcattcatctatcagtaggcatttaggttgcttccatcccttggctattgtgaataaagctgcaataaacataggtgtggaaatctcttcacgatcctgttttgaattcttttgaatrtatacccagaagtgaaattactggatcagatcatatgggaattctatttttaattttttgaggaagctccatgctttattttctatgatggctgcatcattttaaattcccaccagcagtgcacagaagttctaatttcttcacatcctcaccaacactagttattttctgttatttatttttttgttagtgatattttaatggtgtgaggtgctttctcatgtggttttgatttgcatttccgcagtgattagtgacgttgagcatctttttacatgcttgttggccatttgtatatcttctttgtagaaatgtctattcaagtcctttgcccattttaaaattagg

SEQ ID NO: 578217 - DNA, 559 bp, Homo sapiens
tgaatagtattccactgtgtacatacatacatatatatgaaatacacacacacacacacacacacacaaacacacaccccacatgttctttattcattcatctatcagtaggcatttaggttgcttccatcccttggctattgtgaataaagctgcaataaacataggtgtggaaatctcttcacgatcctgttttgaattcttttgaatgtatacccagaagtgaaattactggatcagatcatatgggaattctatttttaattttttgaggaagctccrtgctttattttctatgatggctgcatcattttaaattcccaccagcagtgcacagaagttctaatttcttcacatcctcaccaacactagttattttctgttatttatttttttgttagtgatattttaatggtgtgaggtgctttctcatgtggttttgatttgcatttccgcagtgattagtgacgttgagcatctttttacatgcttgttggccatttgtatatcttctttgtagaaatgtctattcaagtcctttgcccattttaaaattagg

SEQ ID NO: 578218 - DNA, 559 bp, Homo sapiens
tgaatagtattccactgtgtacatacatacatatatatgaaatacacacacacacacacacacacacaaacacacaccccacatgttctttattcattcatctatcagtaggcatttaggttgcttccatcccttggctattgtgaataaagctgcaataaacataggtgtggaaatctcttcacgatcctgttttgaattcttttgaatgtatacccagaagtgaaattactggatcagatcatatgggaattctatttttaattttttgaggaagctccatgctttattttctatgatggctgcatcattttaaattcccaccagcagtgcacagaagttctaatttcttcacatcctcaccaacactwgttattttctgttatttatttttttgttagtgatattttaatggtgtgaggtgctttctcatgtggttttgatttgcatttccgcagtgattagtgacgttgagcatctttttacatgcttgttggccatttgtatatcttctttgtagaaatgtctattcaagtcctttgcccattttaaaattagg

SEQ ID NO: 578219 - DNA, 502 bp, Homo sapiens
gacactgccattattctctatgatattagcctgtatgtccagcrttagggaatgagaaagtaattaaggaacaacaatatcgttatgacaattttatgtgatgttaggaagggttcaaaaacatgacatctgtcacatagtgatttgcaaggtatattatgatatgaaaaaacaatctaaaaataccaacaaatattgcattaagataaagaaagcaaactcagcataggatgatgagcgcattcacaaatgctacagaatgtcttgaaggacatacatcacagggataacagtggttacctagatgggagactgaaggtgtgagttggtggaaacgaactaatttggcttacttatctcaatttaagtattataatatatttaaatcacatgtactataatcttaattgcaatttattaagaaattatctatctaactgggtacttgttattaaagtaattctgcttaagtatctagtctagagtcagaaatagagtctac

SEQ ID NO: 578220 - DNA, 502 bp, Homo sapiens
gacactgccattattctctatgatattagcctgtatgtccagcgttagggaatgaraaagtaattaaggaacaacaatatcgttatgacaattttatgtgatgttaggaagggttcaaaaacatgacatctgtcacatagtgatttgcaaggtatattatgatatgaaaaaacaatctaaaaataccaacaaatattgcattaagataaagaaagcaaactcagcataggatgatgagcgcattcacaaatgctacagaatgtcttgaaggacatacatcacagggataacagtggttacctagatgggagactgaaggtgtgagttggtggaaacgaactaatttggcttacttatctcaatttaagtattataatatatttaaatcacatgtactataatcttaattgcaatttattaagaaattatctatctaactgggtacttgttattaaagtaattctgcttaagtatctagtctagagtcagaaatagagtctac

SEQ ID NO: 578221 - DNA, 539 bp, Homo sapiens
attataatatatttaaatcacatgtactataatcttaattgcaatttattaagaaattatctatctaactgggtacttgttattaaagtaattctgcttaagtatctagtctagagtcagaaatagagtctacaagtgtaaggtaaatctttttcaaaatatgtacaaacactcttgcttcagtgaagtactttcctgaagtacaatagcacttgaagcttagaagatcgaattgaagatttctaaagataaaatttctaattacacatctgatatgtcttagggtaattcttggctccctatcawatcaataaggaaacacccttcctttgggctgctagcattaaggattgacttgcacagcgtcctttctactcttatctagttcccattgtaaggatcacaatccaaatacctggcgttagacaaaaccacctattacgggacagacccttttaaaaagctcatgtatggaatgaagtgtatatgtaaatacctatcacatgctcgtgaagtggttgtttcccttcataaaattt

SEQ ID NO: 578222 - DNA, 551 bp, Homo sapiens
tcgtgaagtggttgtttcccttcataaaatttcataatattacctgatgctccaagaagggggaggagaagagataattaatcagtttgcatctttattttgtagaaaagagtgatatatggtcgtttgtgctgtggatagaagttgaatacttacttgaacacataattttacaaatttatcttaagtttatatacttaggaaaagaatgagatgcacttttacaaagtttccctaaaacctttcattcattcaattatgtaktatattttggttgctttcaatgaatcagaggctatccaacgtggcactgaaataatagggaacacattgaatttctgtccttgtgcaggttaaattctgagtcatagggtgacacaccaaaaagcaaatataaaataaaatagacagtcacagtggctcatgcctgtaatcccagcactttgggaagccaaggcaggtgggtcatgaggtcaggagttcaagaccagcctggatggtgaaaccctgtctctactaaaaaatacaaaaattagccgggtgtggtggtg

SEQ ID NO: 578223 - DNA, 512 bp, Homo sapiens
agacctcagtcaaaactatttgagaccagaagacaatgttgtttttcatagcagtatgtgatatccctcatggtaatccacctctttgtatagtttttctggccccatatctgcatctcactcataaacaaaccctttattcaaatttcttactactttattgaatgattagtaaggaccctggcccatggggagcccttyagaggtccagggtttctgtggttggatagacttctatacctaagtttggaattttgcattaaggaactgacttagttatcaatgtaagcttcaacaccaatatcaatttatcaaaaataaaagcagtatcttagcctccgtgtgtagatttatttttccttatttttgagtctgctcagaatatgagtaggaaagagggttcctgtgattcagatcccttaaaatctcaacagcaataagctcctcttcatttagctcccacttgtaagtgagaacatgtggtatttggttttctgttcctgcattaattt

SEQ ID NO: 578224 - DNA, 512 bp, Homo sapiens
agacctcagtcaaaactatttgagaccagaagacaatgttgtttttcatagcagtatgtgatatccctcatggtaatccacctctttgtatagtttttctggccccatatctgcatctcactcataaacaaaccctttattcaaatttcttactactttattgaatgattagtaaggaccctggcccatggggagcccttcagaggtccagggtttctgtggttggatagacttctatacctaagtttggaattytgcattaaggaactgacttagttatcaatgtaagcttcaacaccaatatcaatttatcaaaaataaaagcagtatcttagcctccgtgtgtagatttatttttccttatttttgagtctgctcagaatatgagtaggaaagagggttcctgtgattcagatcccttaaaatctcaacagcaataagctcctcttcatttagctcccacttgtaagtgagaacatgtggtatttggttttctgttcctgcattaattt

SEQ ID NO: 578225 - DNA, 512 bp, Homo sapiens
agacctcagtcaaaactatttgagaccagaagacaatgttgtttttcatagcagtatgtgatatccctcatggtaatccacctctttgtatagtttttctggccccatatctgcatctcactcataaacaaaccctttattcaaatttcttactactttattgaatgattagtaaggaccctggcccatggggagcccttcagaggtccagggtttctgtggttggatagacttctatacctaagtttggaattttgcattaaggaactgacttagttatcaatgtaagcttcaacascaatatcaatttatcaaaaataaaagcagtatcttagcctccgtgtgtagatttatttttccttatttttgagtctgctcagaatatgagtaggaaagagggttcctgtgattcagatcccttaaaatctcaacagcaataagctcctcttcatttagctcccacttgtaagtgagaacatgtggtatttggttttctgttcctgcattaattt

SEQ ID NO: 578226 - DNA, 418 bp, Homo sapiens
tgcccaggctggagtgcagtggcacaatcatagctcactgttgyctttaactcctgggctcaaatgatccttcctcatcagcttcccaagtagctggggctacaggtgtgtgctaccatacctagatgaaaatactttattcttaaaataccaaattttatatcataaaacattctctggctttatcagtaatgttagtttgagattttagagttcatattttctaaatgaacattgtgggatattgttatcatctgctgtattcaatttttatttctaatttttctcaattaatgtttaaatgtatatatttttttattggttttgaaccaagaactcctggtttactgtattctcaagcaagatttgagttgattatggtttccagtggaactcaacctctgtggaataggtctta

SEQ ID NO: 578227 - DNA, 567 bp, Homo sapiens
atatatctggggacttctaaatagaattccatctcctgggtgcaggagctgatgaaagaagggcaaggaggccattttggctgatgtagagtaaagaaggaagagggttagtaagaagatgagatcagagaggtaggggaatagttgaggacatatattttagggacctgtagttcattttaacagcttatattttcctctgaatgaaaaacaattccagagcatttttgaatagaggagtgatatgattttatgtacatctraaaagccagagcaaataatagtttcaaagggaagaggtgaaacagaatgttaggatattattgcaataatccagaaattttttaaaaagaagatggtgagaatcagaggagtagcagtgaatggaagtggtaagaaaagttgggctggatatactttgaaggcagaaacaataggaaaagagaaaatctttcttaatgacattttcaaggaactttaagacttctggcataagtaactggaagaaagatattgatattaattgaaatgaggaaaacagaaaaaagcttggttgagaaaaataag

SEQ ID NO: 578228 - DNA, 549 bp, Homo sapiens
ctctctttgaccacagcacaatcaaaagtgaattcaagactaagaagttcactcaaaaccatacaaccacattgaagttgaataacctatccctgaatgatttttggatctgtaataaaattaaggcagaaatcaagaggttcctgaaactaacgagaacaaagatgtaacctaccagaatttctgggacacatgtaaggcaatgttaggagggcaatttatagcactaaatrcccatatcaaaatgttagaaagttctcaatttagcaacctaactaaaagaaatagagaaccaagagtaaaccaacaacaaagttagcagaagacaagaaatgatccaaatcagaactgaactaaaggagattgagatatggaaaaccatttgaaagatcaacaaacctcaaagttgtttttttgaaaaaaactataaaatcaattgctagacaaataaacaaggaaagggaaatgatccaaataaacacaattagaaatgacactgacccctcagacatacaaataaccatcagagcttattataaacatctctat

SEQ ID NO: 578229 - DNA, 549 bp, Homo sapiens
ctctctttgaccacagcacaatcaaaagtgaattcaagactaagaagttcactcaaaaccatacaaccacattgaagttgaataacctatccctgaatgatttttggatctgtaataaaattaaggcagaaatcaagaggttcctgaaactaacgagaacaaagatgtaacctaccagaatttctgggacacatgtaaggcaatgttaggagggcaatttatagcactaaatgcccatatcaaaatgttagaaagttctcaatttagcaacctaactaaaagaaatagagaaccaaragtaaaccaacaacaaagttagcagaagacaagaaatgatccaaatcagaactgaactaaaggagattgagatatggaaaaccatttgaaagatcaacaaacctcaaagttgtttttttgaaaaaaactataaaatcaattgctagacaaataaacaaggaaagggaaatgatccaaataaacacaattagaaatgacactgacccctcagacatacaaataaccatcagagcttattataaacatctctat

SEQ ID NO: 578230 - DNA, 562 bp, Homo sapiens
atttaatttttcaggaacaaatgcaaaattatagtttcattttccccactctcagagtttaaatatgttgagtttgaggttaacataatggcagaaatttgatatatgaatgtctacaaattttaagcttgtattcctatgaaaaacgaatgatcactagcagcaaaagtctagcagctgatagygctcaaccaaaatgtatcagaagttgagtactcccacataagggctttttagaggaagtgttttactaatttaaatatgttcaaagctgagagatggctgagctcttatgcaattcagatttttattcagtgtgtttctgtgagaagtctttcccagacaatatggaacaatcagagtgggaaggagttttgctccctagaatcatttccaaaaggtaatttcagaaggacatatgaaaccattattctcacacagagttcaaacttacgaatctcagaacttagaaaatcaatgataggctttcttttatttctatgcacttattaagtaaaaaaaaaatttctgataatatattaatatatcaattttatttaat

SEQ ID NO: 578231 - DNA, 581 bp, Homo sapiens
agaaccaggagtttgaggccagctaggcaacatatcaagaacctcatctcaaaaaaaaattaacctatttgttcaacaaataataaaaaagagtaagcattaacaatactactagcaagcttgtattaattgacacacatagaacggtgcccacaaatggcagagaaaacaaaaacaacaacattctttatatgtttatttggtaaacatataaaatgtttaccaaaatagattatattcaaggtcataaaatgattctyaattcctaagaattgaaattaaagtattttcttttactgctatggcagaaatctaaaaatcaagaacaaaagacacccagtacacctctaggtgttttaaattaaacaagacacttttaaatgactggagggcagggggagtcaggaaagagacaaaaagcagtggaaattagaaaatatttgaactgaatgataagaaaatagagcatatcaaaatttatggatgcagctaagtttcctcagtcttagaggaaaatgtaatgtgaacaaagaaggaagactgaaatcagttgtccaagaaagaagttatttcttaaaaca

SEQ ID NO: 578232 - DNA, 562 bp, Homo sapiens
gatagaaataaaataaataaaattatgtttttaagaggattcgttatctatgaatttcatttaagggtaacaaaaaaatgaattacaaaatgcttcttctaaaaagaaatattaggtattccaggactgagagctgctgagttttcctagcctgttcaggctgctagagcaaaataccataaactggtggcttgtcaacaacaaacatttatttctcccagctttggggactgacaagtccaagataaaggcaccaccaaatgtctggtaagggcttggttcctggttcacggatggcaccttctcactctgtcctcacagggtagaacaggctagctagctctccaaaacctcttttataaggccactaatccactcatcagggctctgcccctgtgacctaaccacctcccagaggctccaccacctgataccwttgcactgctgattaggtttcaacatactcattttggggagacaaatattcagaccacagcctggtttaattaaatgactgatgatgatgatgatgatgatgatgatgacgatgataaagccaaac

SEQ ID NO: 578233 - DNA, 418 bp, Homo sapiens
ctggatttagtcccacctcaaccattacctactgacagcagcctctggccaagttctgaaatttctttcgtctacaaaacgtggtgccaccacccacttgtcaarctgcggaagaagtagacacaacgaaagtgggtggctgccaggcctgggatggtaggtctgaaactggataaaagtctgagacgctctctctcttcacagacaataacattctatacttagaacaccccacagtctctgtccaaaggctcctagttctgacaaatactctcagtaaagtttcaggacacaaaatcaatgtacaaaaatcagtatcatttctatacgccaataatgtccaagttgaaagccaaattaagaactcagtcccattcacaatagccacaaaaagaacaaaatacctaggaatacagct

SEQ ID NO: 578234 - DNA, 463 bp, Homo sapiens
ctataagtgaagaaagtcacagaaccaaaatggaagtgaagctttcacacttccttcaaaatggtaaaatgttgatatgtgtagatggttaaaagtcacctatgtttgtggtaacccctaaagcaaccacagtgagaaatatacaaagaagtayactcaaaaacagaataaattaattaggacagaatctttaataatgttcacgtaacacaaagaatagcataaaaaagaaacaaagaaatgagaaacagagaaaacaaatgtaagatatataataaaatagcactcctcattaatcactaattatcttaaatataaatgatttaaataaaataattagagaaggcatactgaacacacaaattactatccaactgtatgctgcttttaaaaaaattacttcaaattcaatgacacaggtagattttgaaagtaaaataatggaaaatactataccatgtaa

SEQ ID NO: 578235 - DNA, 576 bp, Homo sapiens
gcatatcacggctttctctattactatatgaaggaatggcaatcacgaagccaaaataaaactaaaatgcacctgaatgggagtagctctcttttggctgaaatggaataatatgaggtacagcagaacaaaactagcaagaatctaaataatttgaaatgagcattcatgtcagcataattaagtgaacaatatggtacaggtaatgtggtaatcagtaatactgttgagtaggtttataggacaggtatcaggcttccgagacactgaaacagctccttcagtgattgaaaggatctttgctattcctgatgcaagcaaaattaagtaaaggtaataatggtagcagcatggaagcaatcagtaactactgcactaaaagattaccgtgcaaaagtgttctctttctaccttaaaactaacaagtactcatactgctgccattaggacaayagcaacttgctttgtcactggctaattaacaattaaagcaattacctgacaaattgtggtcacttattaatctttcaaactgaattttaagactgctaaaaatacttctaatgttagaaaatt

SEQ ID NO: 578236 - DNA, 587 bp, Homo sapiens
aggggttcataatagtggctatgtaaaaggtccacttcgggattaaattatttaatacatggaagtgcttagaacagtgcttggcacatagtaagccttatataaaagctagccattattataattgcttgagttgcactccatstctcacccaactttggttggcctgctctcctcattgtctgggacttgtttcctgttagagaagctacctgctggagtcctgctccgagtggatgcgtcacatgcttggcgatgattcttatctcactgggaatctccagacactatagcccactactggatttgaaccctttgggtactgacttaaaggttgaattactctttcttgaaacacaatgccctacctaacccagataatagaatgaagatgtgaaattaatgcaagcagcttgaggcctttctctattcctaaatagtaatttaaaagggagggcccggtgtggtggctcatgcctgtaatcccagcactttgggaagctgaggcgggtagatcacgaggccaggagtttgatggtgaaaccccgtctctattaaaaatacaaaaattagcaggcatgttggca

SEQ ID NO: 578237 - DNA, 587 bp, Homo sapiens
aggggttcataatagtggctatgtaaaaggtccacttcgggattaaattatttaatacatggaagtgcttagaacagtgcttggcacatagtaagccttatataaaagctagccattattataattgcttgagttgcactccatgtctcacccaactttggttggcctgctckcctcattgtctgggacttgtttcctgttagagaagctacctgctggagtcctgctccgagtggatgcgtcacatgcttggcgatgattcttatctcactgggaatctccagacactatagcccactactggatttgaaccctttgggtactgacttaaaggttgaattactctttcttgaaacacaatgccctacctaacccagataatagaatgaagatgtgaaattaatgcaagcagcttgaggcctttctctattcctaaatagtaatttaaaagggagggcccggtgtggtggctcatgcctgtaatcccagcactttgggaagctgaggcgggtagatcacgaggccaggagtttgatggtgaaaccccgtctctattaaaaatacaaaaattagcaggcatgttggca

SEQ ID NO: 578238 - DNA, 532 bp, Homo sapiens
ctttgggtggccgaggcaggcggatcacaaggtcaggagattgagaccatcctggctaacacggtgaaaccctatgtctactaaaaatacaaaaaaaattagctggacatggtggcaggcgcctgtagtcccagctacttgggaggctgaggcaggagaatggcgtgaactygggaggcagaacttgcagtgagccaagatcgcgtaccactgcactccagcctgggagacacagcgagactccatctcaaaaaaaaaaaaaaggtacaaaattagccaggcatggtggtgcacgcctgtaatcccagctattcagaggctaaggcaggagaatcgcttgaacccaggaggcagaagtttcagagggcgaagatcacgccgctgcactccagcctgggcgacagagtgagagtgtatctcaaacaaaaaaaaagaaaaagaaaaaaaagagagaaagaaattctgacatttgtgacgacattgatggaattggagaacattatgctcagtgaaataagtcaggcccagaaag

SEQ ID NO: 578239 - DNA, 532 bp, Homo sapiens
ctttgggtggccgaggcaggcggatcacaaggtcaggagattgagaccatcctggctaacacggtgaaaccctatgtctactaaaaatacaaaaaaaattagctggacatggtggcaggcgcctgtagtcccagctacttgggaggctgaggcaggagaatggcgtgaacttgggaggcagaacttgcagtgagccaagatcgcgtaccactgcactccagcctgggagacacagcgagactccatctcaaaaaaaaaaaaaaggtacaaaattagccaggcatggtggtgcacgcctgtaatcccagctattcagaggctaaggcaggagaatcgcttgaacccaggaggcagaagtttcagagggygaagatcacgccgctgcactccagcctgggcgacagagtgagagtgtatctcaaacaaaaaaaaagaaaaagaaaaaaaagagagaaagaaattctgacatttgtgacgacattgatggaattggagaacattatgctcagtgaaataagtcaggcccagaaag

SEQ ID NO: 578240 - DNA, 317 bp, Homo sapiens
gtgcaatcttggctccctgcaatctccacctcccgggctcaagcgattcttgtgcctcagccttctacaccaccacgcccagctaatttttgtatttttagtagagatggtgtttctccatgttggtgaggctggtctcaaactcctgaaatcaaatcttcctcagccttccaaagtgctaggattataggcatgagctaccatgcccagcctagattggcaaaaattttaygtctgataacactgagtgttgttaaacatttggggaaacaagagctgctagcacacatgtaaatttgtgagcagatagccagcct

SEQ ID NO: 578241 - DNA, 583 bp, Homo sapiens
attgaaataaaatttgacagtaggagctgcataaaacttgctcaaactgacagagagccctggtaaatggccacatgttttggactcatgaaagggtcttagtaagaccataggttctcatcatggctgaagcctcagtgatggtgagaacatcctggggatgacagttagtcttttataactgaacaasagcttcactaatgcttatggtgtgaacttcatcacttgcttatgccagggaggttagaagaaccagctatgatctcagccatatctcatcagacctaagaatttcctgtggagggacatggtgccacgtataagcagatagggaaggtaagctgtgatagcattctacatgaagtttaacaaaacaggctgaataaaactcactctaccccaccctcctgtgtttaaaggaccacaattcacagccataattgatcaaaggaatattgatttttaaaaaagaatgaaccattattctcatacagcaaactatagtattctctcttagatatgcatatcttcttccctttaccatcttttcacttaaaaatatttaatatggaaaagcaaaaaa

SEQ ID NO: 578242 - DNA, 638 bp, Homo sapiens
actacactccatcctgggtgacagagcaagaccctgtctcaaaaaaaaattttttttttccattagtactggggcttcagggaaactggttgagagctgattagttcatctcataccctgtacatgtcccttcctggcttatgattttaaggccagacctaaacagccacaacatgtcgaggccccccaaaaccatgtttgtggggtcttttctagttcacaaagagctcycacacccatccccctctttcctcacagtcacacttgagaattcagaggaagagaggcaagccttggttacgattcctcgcaatcctactggcaagggagacgtgagaggaatgtgagagctgagcgttttgttcatctttgctttacaagtgagaaagaaggtcattttccaatatggggtagctgctcagtggcacaggtgatcctcgaacctgggccttgagaaccccagctctgcccacactgccatgcccccgatgtccaggccattgccgtgcacagcctgcgtggtcctgaaagaggggtggtccagcacaggggcagggaggagggagggcactgttcttatacagcttctccataattccctgtctcctaaaataggcttggcacatcctggaacacta

SEQ ID NO: 578243 - DNA, 539 bp, Homo sapiens
ggggtttgtagtaaatggctgcaccatttcccttgttactcaagccagaaatgtgaccactgtgcctcaatctttcttcttcctatctcccatatcaatctttgagtctattcatcttaccagctgtctctcttgatatttacttttaaaatctattcatttcctcatattgccaaccacctctccaacccccagttcaggacatccccatctattgcctggactatacttgtcattcagtctctctacttttattattttccctccttatccttccacctacatttaattgatacrggatatcttgaaatatttgactgaaaagttttcattctgttttatattggtaaattgataaaatagttatattcaaaaactgcttttataattcctcaaaaccacaatgagatctcactttatacctaccaaggtggctataatttcaaagtttttttaattaaaaaaaaaaaacaggccaggcatggtggctcacacttgtaaacctggcactttggaaggctgaggcaggtggatcactt

SEQ ID NO: 578244 - DNA, 490 bp, Homo sapiens
ggaaagtttgctaaaatttatatgtgccaaaataaacatgtaaaaagagttaaaagttgtataaaacttttcttaacatataggacgcctacaaataaatgaataaccacatactaaaaaatggacaagggacatggacagttcatagaaaatgaaatgtgaatggctcttaagtatttaagaagatatctactattgctcataaaaagaaatgcaaattaaaactgcaacaaggtacagtttttttctcttctccaattagtgaagatcagtaagcttgatactatactatgtttggyaagcatgtgggaaaacagatactctctcatgtggcttttgagagtcaaaactgccacaaatatcatgtaggatgacaatttggcaatatgtataaaatttcagaaacactttccttgacccttttaagaatttatctgacaggctgggtgtggtagctcacgcctataatcccagcactttgggaagctaa

SEQ ID NO: 578245 - DNA, 604 bp, Homo sapiens
attttttagaaagaaaatctgagattaactcaaatcattaattcatactgatttttcctattcatagttgacagagtattattatcttttgttctgcttctcttgtacactgaaattcttggtttttgatattaacaattatttacttatatcacaatatacatacattaatttaaaaataatttacagtgctacctgaatattttttcttgtaagttgttttatctctctttgcttacttgtatgtttgtttattgtcattagaatgtatcaaactagggctataaagctgtaatactatattttagccagaaactaggacctagcactcaaatgcccatcaatggtagaataattcatcacatttttataagatggaatatggtactcaatgaaaatgaataaagtacaactacatgcagtgatttggatggatatcccaaacataatggaaaaagcacacacaaataagcttatattatataattccatatacctatgtatatatcaagtataaaagtaggcaaaacaagcyactgatggtggcacacacctatagttccagctatttgggaggctgaggcgggaagatcacttgagccca

SEQ ID NO: 578246 - DNA, 529 bp, Homo sapiens
cctgtaatcctagcactttaggaggctgaagcaggtggatcacctgaggttgggagtttgagaccrgcctgaccaacatggagaaactccgtctctactaaaaatagaaaaaaattagccaggagtggtggtgcatgcctataatcccagctactcgggaggctgaggcaggagaatctcttgaaaccgggaggcggaggttgcagtgagctgagatcctgccattgcactccagcctaggcaacaagagtgaaaaactcaaaaaaaagaaaaataaaaaagacaatgttttgaatactctgagaaaattatattataattttgtgggtacagataaatcagctctccttcaagaatgtgtgaataggagaacaaatcagaatagtacctattgggttgggggggacttcaactaaaagacaaaaataaacatgttacttaatagtagaagaacacactttcagaaatgatttgcttactgttctagaaataaatcttagacctcatgtgccttatcctgacaaagaaa

SEQ ID NO: 578247 - DNA, 594 bp, Homo sapiens
aggaatttgagaccagcctgggcaacatagtgagacctcatctcttaaaaaaaattttttttaagtaaccaagtgtggtggtgtgtacctgtggtcctagctactcagaatagtagctatggcaggaggatcacttgagcccaggagttcaaggctgcagtgagctatgattatgctgcactccagcctaggtgacagagcaaaaccctgtccgtttaaaaaaaaaaatgcacgctgaatatggcatacgcaccagcctgtggggaatgactctctaaggcagttttgtgtttgagaggggatggagtcagccttgctggccctaatcctcccccttctttctagttcttcctaaataggcaggaagccttcttgcagagtgtggtggaggcctctccgagggtggtggatagggattgcagcacttggttccagctcctccaaatggaaaatgtttgctcttccgctggacccttgtttacccccataggtcagccattgtgcactaggagaggtgttgccatccctggtgaggaagtgagttggaggaatatagcagaacttggsgagctgcttttcacagtctgtgctaga

SEQ ID NO: 578248 - DNA, 619 bp, Homo sapiens
acatatatatttttatatgcatatacatgyatctataaacataaaattcataggctatatataaatttagtgtctaaattatataactaaagtgtttcatatcctaaagttttgtgtttgttttgatcctgcagagcattgaaaattgttgctttcccaaaaaaaaaccttcagagagcaactgtgcacacaccagcagccaagctgtttattaggctaagagtgaattcaggagaactttttaaaagataatcaatgaaaggtgaagataatacgaaggtagaaagtgtgtaaccctactaagactctgcaaacaccctagacaagacccttggagaagaacatttctatgtacttatacttatcacagatgccttgcacattcttcactgatactctcctatgaggtgccacacaaaagggctgtagcaggtttgtcacaacttgaaattctcttgcttttatcctgaggggattgtgaagctcacgtggtttgggtaaagaacctacaatcaaaatctttttctaagtgtctgtggctgaataaaaagtaataatatatttttaaatgagcatttaaagcaaagccaattgctaagattatggctgaaaatggatg

SEQ ID NO: 578249 - DNA, 619 bp, Homo sapiens
acatatatatttttatatgcatatacatgtatctataaacataaaattcataggctatatataaatttagtgtctaaattatataactaaagtgtttcatatcctaaagttttgtgtttgttttgatcctgcagagcattgaaaattgttgctttcccaaaaaaaaaccttcagagagcaactgtgcacacaccagcagccaagctgtttattaggctaagagtgaattcaggagaactttttaaaagataatcaatgaaaggtgaagataatacgaaggtagaaagygtgtaaccctactaagactctgcaaacaccctagacaagacccttggagaagaacatttctatgtacttatacttatcacagatgccttgcacattcttcactgatactctcctatgaggtgccacacaaaagggctgtagcaggtttgtcacaacttgaaattctcttgcttttatcctgaggggattgtgaagctcacgtggtttgggtaaagaacctacaatcaaaatctttttctaagtgtctgtggctgaataaaaagtaataatatatttttaaatgagcatttaaagcaaagccaattgctaagattatggctgaaaatggatg

SEQ ID NO: 578250 - DNA, 571 bp, Homo sapiens
gtcagaagtccaaaatgggtttcactgggctaaaattgaggcatcagcagagcctccttccttttggaagttctagaggaaaacccacttccagctctacaggctgccttaattccatgactggcagccccttcttccatcttcaaagccagcagtggggcattttcacaactctctgactctgactcttccgtttattctcaactctccttctcttaccctaaccttctgccttccccttccagtatttaagcaccyttgtgattacatagggtccaccaggataatcttcctatctcaagatccttaccttaatcacatctgcaaggtccctcctgcaaagtgaggtgacagattcacaggtttgtgggggttaggacatgaacatctttggaggttcattatttagcctgccacacctcacataattccttataaacatcgtcctcctgaacaaagataaactgctcctggaggaaggctgaaaaaggaattaaactgcagagtcaccagaaactttctatatctgcctgcctaaacgccaatggttaacattctgaagagagccaca

SEQ ID NO: 578251 - DNA, 607 bp, Homo sapiens
aaaacatttttctaaaatactaaaacattccatgttcaggggrcttttttccttctgattctgaaagaaattaaaatattgccttggttgctgaaagtctcatgggcccgaggcactgtgcctgctgtacctgatggatgagtatccacatggaattactgtgaagttcctcctcccttctctaagtctgtccttatctgtgatgtcatcctgcccctaccttgaggaagaacaaccacagtttattgtattttctctctccactatgtccatgcaacaggaaggttcacaacgttggcaagcattggaatcaccaggggcttgtgagcatgcagattcacagctctgctcctgaaggccaagattctttaaatctacaatagaccttggattagctagacttttacagtctcctcaaggggttctgggacagatcaccttcccaaataccttgaactttgcgagacccactttgggaagtcctgtgtgtgatgctggaacatcacagtgtcctctgtaagagcaaaggccatgccatgctcatctctgggttctactgaacaacactgtgcctggtggcagcgggtgctgagaaaaggttgaattg

SEQ ID NO: 578252 - DNA, 460 bp, Homo sapiens
atgtaatgagcaccatgatgattaattcaaacaagaaactcctagacattttcttataaaggcagatattattgtttggctggggtcaatgactakcaaactcacagatgtgattcaaacctaggcatcctagagagaatgctatttcaactatagaatgcttcttccctactgtatcttattataagaacaaagtcaagagaccaaaatatgtatctggaaaattcttacataccctattaatctgaagtcaaatttttgagcatctctgtagtaagattaaaatgtccacttggtgtgagggcacattgaatgccctggattacagtggatctgtaatcccaggactttgggaggtcaagatgggaggatctcttgaggccaggaggcccagagcagcctgggcaacatagcaagacccttctctaaaaacaaaacaaaacaaaacaaaaaaagtcaa

SEQ ID NO: 578253 - DNA, 460 bp, Homo sapiens
atgtaatgagcaccatgatgattaattcaaacaagaaactcctagacattttcttataaaggcagatattattgtttggctggggtcaatgactagcaaactcacagatgtgattcaaacctaggcatcctagagagaatgctatttcaactatagaatgcttcttcyctactgtatcttattataagaacaaagtcaagagaccaaaatatgtatctggaaaattcttacataccctattaatctgaagtcaaatttttgagcatctctgtagtaagattaaaatgtccacttggtgtgagggcacattgaatgccctggattacagtggatctgtaatcccaggactttgggaggtcaagatgggaggatctcttgaggccaggaggcccagagcagcctgggcaacatagcaagacccttctctaaaaacaaaacaaaacaaaacaaaaaaagtcaa

SEQ ID NO: 578254 - DNA, 521 bp, Homo sapiens
ttcctttttttatgtgtctttatttggctttggtatcagggtaatacttgcctcacagaatgagtttagctatattccctcctcctttattttttggaatagtttctgtaggatwgatattaattctttaaatgttttgaaaaattcagcagtgaagccatcaggtcctgggtttttctttgctggaagactttttattatagctttgatcttattacttgtttttcgtctgttcaggttttagatttcttcatggttcaattttggagggttgtatgtgtctaggtatttatccatttgttctaggttttccaatttattgatgtgtagttgcttagagtagcctctaatgatcctttgaatttctgtgatattggttataatgtctcccttttcatctcctttttaaaatttattttggtcttctctctttttttcttagttcgtcttcctaaagttttgtcaattttatcttttcaaaaaaccaactttttgttttgttgatgttttgtattgttttc

SEQ ID NO: 578255 - DNA, 521 bp, Homo sapiens
ttcctttttttatgtgtctttatttggctttggtatcagggtaatacttgcctcacagaatgagtttagctatattccctcctcctttattttttggaatagtttctgtaggattgatattaattctttaaatgttttgaaaaattcagcagtgaagccatcaggtcctgggtttttctttgctggaagactttttattatagctttgatcttattacttgtttttcgtctgttcaggttttagatttcttcrtggttcaattttggagggttgtatgtgtctaggtatttatccatttgttctaggttttccaatttattgatgtgtagttgcttagagtagcctctaatgatcctttgaatttctgtgatattggttataatgtctcccttttcatctcctttttaaaatttattttggtcttctctctttttttcttagttcgtcttcctaaagttttgtcaattttatcttttcaaaaaaccaactttttgttttgttgatgttttgtattgttttc

SEQ ID NO: 578256 - DNA, 521 bp, Homo sapiens
ttcctttttttatgtgtctttatttggctttggtatcagggtaatacttgcctcacagaatgagtttagctatattccctcctcctttattttttggaatagtttctgtaggattgatattaattctttaaatgttttgaaaaattcagcagtgaagccatcaggtcctgggtttttctttgctggaagactttttattatagctttgatcttattacttgtttttcgtctgttcaggttttagatttcttcatggttcaattttggagggttgtatgtgtctaggtatttatccatttgttctaggttttccaatttattgatgtgtagttgcttagagtagcctctaatgatcctttgaatttctgtgatattggttataatgtctcccttttcatctcctttttaaaatttattttggtcttctctctttttttcttagttygtcttcctaaagttttgtcaattttatcttttcaaaaaaccaactttttgttttgttgatgttttgtattgttttc

SEQ ID NO: 578257 - DNA, 543 bp, Homo sapiens
aatcgcattagccaagaagactttttaatattagagtacagtggttaagagtagccttcagcaaattatttcacctttctgtgcctagattctttatctgttaatttgtagtaatcatgggttttcatgataatcaatgaattgccttatcacatcattgacacttgttaggaactcgaatgtggagctattgttattgctattacaatattgtaattttgtaaaaaaattagtaacaaaaaaaagaaagtataaaagtattaatttggggaactaataaatgtccatgaaatcttcacaatttatgttcttctgccatgacttcagccaatccctccgttcggggtccctgacttcccacaacaaacatatgtaagatgaacattggtttggtccagaaaaagtggggcaattcaaagaaaaggtgagacaacttgaagyggggagggagcttccaggtcatagataggtaagagacaaatggttgcagtctttcgagtttcttattagcctctccaaatgaggcaataagatatgcattta

SEQ ID NO: 578258 - DNA, 389 bp, Homo sapiens
aattcaatcagaatacagctagagcttaggaactgaaaaatataaaacagaaggtaagatatattgaggacagattgaaagtctccaatataagtttgggggctattggctggatgcagtggcttatgcctgtaatcccagcactttgggaggccaaggcaggcagatcacctgaggtaaggagtttgagaccatcctggccaacatggcaaaaccccatctctactaaaaatacaaaaattagccaggcgtgrtggtgcacacctgtagtcccagctactcagaaagctgaggcaggagattcacttgaacctgggaggtggagaacctgggaggtggaggttgcagtgagctgagattgcactctagcctgggtaacagagtgagac

SEQ ID NO: 578259 - DNA, 416 bp, Homo sapiens
atacggttcaagcagcagggctgcctgcatcacaacctagacctgacgcagagccctttcttgctctgggccccactcaaagctgacagccttctatgtcacttggaaaatgtatcaaagtcatatttccaaggaggaaaatgctaccttcagaacccaaagaggcttaccaggtgataygctgtcctcttagtgaggggaaatatgaaatgcagtcaactgttctttactaaatgttcatagatatgatagacacctcagtgtttgtggggttttctcacaccctctgaagcacatatgttagcaggtctctaattacttgccacatcttgttaatgtgaacctattaacttgacgtcatcaaattagtggaccaatgtaatgttcttcaagtgtccagacagtccaagttccct

SEQ ID NO: 578260 - DNA, 571 bp, Homo sapiens
tgagtcaattaaacctcttttcttcrtaaattacccagtctctggtagttctttatagcagtgtgagaacaaactaatacagtggccaagtggccttccaggcctgctttcctgcctgatgtctccccagggcccgttccatggttggcatccataaacacttattgaatgattgaagagatgaacggggcacctttatatacattatctcacttaatcctaccctgcaaggcaggaaaggtgagccttgttatagaagtgtggaaactgaagctaagagagagaagacactttggctgagatttcagggctggtgggaattgaacaaggagtcaccttcttttccccactcttgacttttttgagttccacttgatcccctgcccacatattaaatgtctgagttctgctctgcagtgtttctcagtgaccatagtacccaataggaaccagcccccaaaaacctctactttaagctttgctgaaatttacaaggccatgaattggtcttaagacagagaaaggagtgtggactacaaagactcctgtttaaattgtcctgctccttctc

SEQ ID NO: 578261 - DNA, 594 bp, Homo sapiens
ttatctgttagtccatcactacacacctagtgcctgatagggtgcattgtaaacagaaagtactcaaaggaaataataaaaatggatccggagtttatctatatacaaccactgaaggatcacttactgacctcccactatgaggttagttctatcaacttctccaatttcaattcctttttccatcccatttctgtccttttgcctgtttcccaagtctgttttatgttccaagactcataatgtacaagttaagctactagctgaattcttgtccctttactgtttccatctggttcccatcctttattttgatttttgtattgttgtttgccattttgtttttgttttttgytctccgtaaagtctctgtattctgctaggattcctttaatttattactctcttttttttttaagtgatatctcctttcaacccatcagcaattacgtgtttaaagttaaacctatacccatatgcaatatacacagtatgttatctcatatgtacgatctacctgggatccacaatctgctgtcttccagacatacaccaggtagcatctctgcacaatagtcctgtagttagaaacga

SEQ ID NO: 578262 - DNA, 607 bp, Homo sapiens
caaaacacatccatacctcactcttgatgtgtggatagactgatcttaggaccatacatgcaatattgtatctggtttgaacaaacttctaagcattcctcagtgcctcccgcaaaaaactgcctatcatccttcacagcacgcttgatcctgcctgctgaactcttttcctatctccacataacgtagggtgaggacacatgtgttctgttttgtgtttcttcataatatgtcatttcttcagaaaacaaatttgagtataagaaaacaytttaatctccttaaattaatgaatgtagtttgtagaagaacaaattcattttttcctttacccaatttgcatagtaatgtctgagcacaagcagcagctcacagatttatacaagggcactgaaagaaaaagaataggctttccaaccattatcttccaaaatcctgcccccacacattaccaaacaaaaatagacctagtttatctagaaacttgaaagcatgtactatatctgtctactttatccatctccattactactatcacagtctaaatgacatcatctaaaatcatgatttttttcctaattgatcttcttgcttttacttttattcc

SEQ ID NO: 578263 - DNA, 528 bp, Homo sapiens
ttaagtacatgaaaagattttcaacctcattagtcattaaaagtgcatattaaaattataatcggatacaactacacatctattaggataactgaaatttaacaatattactataccaaatgtggccaaggatgtgaaaaaattgaaactctccaggaatgtaaaatgacacactttggaaaacagttggcagtttcttagaaagttaaatatacaccgatgatatyatttcctttgccaggcatttaccgaagagaaaagaaagcaaatattcagtaaagatttgtgcacaaaattcatagaagctttgtttgtaatagtccaaaactttaaagaatccaaatgcccataaacaggtgaatgtacaaattgtgggatatccaatactgtatataaaatgaattactactcaccaataaaatggaatgaactatttctatgtggatggactaatgtgaatgcatctcaaaataattcattgagattgagtgaatgcagccaaaccaagtaagtacatactgtgtgatt

SEQ ID NO: 578264 - DNA, 319 bp, Homo sapiens
aaagcaagagcaaaccaaatccaaaattagtagaaaaaaagaaataataaagatcagagcataaatacatgaaattgaagtgaagcaaacaatacaaaaagatcagtgaaagaaaaagttggttctttgaaatgttaaacaaaattggcaaaacttagcccaactaagaaaaaagagaaaatatccaaataaataaaatcagatatgaaaaagcagacattacaactgatactgccaaaattcaaaggatccttcgtggttactgtgagcaaytatatgccaataaattggaaaatctagaataaataaactaattcct

SEQ ID NO: 578265 - DNA, 564 bp, Homo sapiens
agcaaccaatcaaatattttttattttgtttctgtacttatcccataaatacctgtccctacttgtcatcagaactgatttgtcaccaaaaccctttcagtctgatgttccacaattaatgaattacttcttactcaagtaagctctttaaaatgttattgtgccttagaattttttaaacatttatttttattctttgatacaatctcttttcatttgattctgcttttccctcatttgacatttttacctcttaaaagtatctggttatatccacaggatgtgtcttctggaatcatataaagattttcaaatattttaatcatcttgtgcttatttcagaaggttattttcagatatttgcttattttctgaatgatgtttatttttcacctgaattctgtaattttatttcataagtgtgaaamgatcagtcagggttttggtcatgctcagttttcttttccaatatgtcagaaaacataaaaggccaagggtaggagcatgggtaggtcctgtgccaagggtgaccctatccagatgtcagagacacatgacctggca

SEQ ID NO: 578266 - DNA, 393 bp, Homo sapiens
cacagggacactgagaggaatctgaaggaatagcccttgctgtttcccccagtttattacacttagctgacaccttttggtmccattacatttctccatgactcttcgctcttcatcagaccagcaaaaaaaacactcaggtttaactgcttcttttgggcttagttttcttatgaagactcatgttacataaaacatacagtaaatcaacttgcatgattttctctcattaatctgtctcttgttacagggggacaagcaaaggaatgagaagggtagaagtttctggcaacgagaaagggacagctgggacacttcattctggagtctgcaggtaggattctggaaaacagacacaagcctgtgcaaggtgagaattttcaccaaagtcag

SEQ ID NO: 578267 - DNA, 665 bp, Homo sapiens
ggtggctgcagagagggagggaccgaacaagcagtaggagatgaagtttgttagccattgccaggacttagactcttattctgaggsatgtgggaagtggcggaggtttccagtagaggaatgataggcttgaccttcattttaaaatgatcactgaggctgctgtgtgggaaatagacaaggcaaagttggaagcagggaggtctgttaggaggtctttgcaataatcttggagagatggtgatggcttccagagtggcagagtcacactgaggagtgattggattctgaatctttgaatagagctgacggcatttcctgacttcttggattgtggtgcagaagaggagtcaagggtgagtcccaaatttgtggcccatgcaactggaagaatgcagtaaacatttcctaagaagggaaagactgcctgagaaccagatttgtggaaggcaaaccagagtttggtgttggatatgttgagtttgagataccttttagatgtctgtgtggagaggtcagctagacaagtggatggactggaaagaagttcagaggaaaagtcaggactggggacaaaaatttaggaggcctcaaagtatagatgatattgaaagcctgagtaccagataggaaggtctaggagtgagcatagcaagggaaggatg
